United States Patent Application Publication US 2004/0214272 A1 - sequence listing, part 41

SEQ ID NO: 171121 - DNA, 427 bp, Zea mays
  Clone ID: MRT4577_87641C.1
agcagtggtaacaacgcagagtacgcgggtatagtgtctgagtatggaaagccaggcctgtcgcatatagtggccttttttttttttttttttcggcaaaccggaatcaagattgctttcattttcccggtgttttcgtccatcctccaatttcactaaagaaaatgggcttctggaaatgagagttttgcagtagttccaaatagtgagatgaacttttccaaaaagcaatcgactctccctaggtaaaaaccaattatggactttgccatccatatgatccgcacttttctcattggaaatccaatgagtcacgtataatgtgacgaataaaagttaggcaaaattgacttgatgcccaaaatcccagtaaaatgaagaagtcgaacctgtcaaccagagagcaccattttggaacccggccggc

SEQ ID NO: 171122 - DNA, 259 bp, Zea mays
  Clone ID: MRT4577_87642C.1
aaaaaaaaggcccctttttaactttccccattggctgaaatacatgggcgggcgggctttttttagagcctgtttaagtccattcgccccacagaatttgctacacggggctgggggtaactaacaggcgggtcacccttttcaatttttgtacagactggcccacaaccttacccataacaaatttttccatccaaaatgagagaagagcctcccctttaccatcccataagctgtttgttttgggcccaaaggcgaa

SEQ ID NO: 171123 - DNA, 258 bp, Zea mays
  Clone ID: MRT4577_87643C.1
actcattcttccgcccctccagatttcttttcttccatttcacattttatgacacctactctagattggaacacttctaccgacccatccacacttctcacctcacaatcactttccccaccatccaacctcttacgccctgacttgtatccaaaaatatatcctttgccccaatttcaacccacgtaataagtttaataaccacaaaattagttatatttcacttacacccgtatgcttccacttattctacacctc

SEQ ID NO: 171124 - DNA, 2414 bp, Zea mays
  Clone ID: MRT4577_87644C.1
cacagctgcacgggtatcatatcggtagtctagtaatataataaaccgctgaagcttggttgtgcagaaggtttcgttgcattgagccgcggtgcgtggaggagcatgtggaggttaaagatcggagagggaggagggccgtggatgcagactgtgagcggcttccatggccggcaggtttgggagtacgacccggacgctggcaccgacgaggagcgcagcaaggtggagcagcttcgccgggagttcacagagaaccgcttccgaaggagggaatcgcaggacctcctcatgcgtatgcagttaactggacaaaaacatctgcttgcggatatgcgagcggccaccaaaatagaggatggcgacgaggtgaccgaagaaagtttgcaggagtcgctgaagcgagcgctggggtggatgtctggtctccaagctgaagatggccactggcctggtgattacagtgggattatgtacattatgccgttctggattttcgcgctgcacatcacaggatccatcgatgctgtcctatcgaaagagcatagacgtgagatttgccgccatatctacaaccatcaggttattggtgtatatgattggcgtggcaataatccagttgtacctgaactgtggttggtaccacgtttcctcccaattcacccaggccggttctggtgtttcactaggattacatacatgtcaatagctttcctttatggcaaaaaattcattggtcccattacaccaactatattagaactaagggaagaactctacagtttgccttatgttcagatagattggagtaaagctcgtaattcttgtgccaaggaggacatacgcaataaaccttcagaaatattcaaatttatttcaacatgcttgaacatgttcgtggagcctgtgttgaactattggccacttaacaagttaagagagagagctttgaaccacattctggaacatatccactacgaagatgaaactactcaatatattggcatatctcccgttacaaaggcactaaacatgatttgttgctgggttgaaaacccaaattcagatgcgctcaagcgacatattccaaggatacatgattatttgtggattgctgaagatggaatgaacaccaaaatatacgatggtacccacaactgggagttagcacttataatccaggccatgttatcagcagatgctgccaatgagtatggtccaaccattcagagggctatggaatacttaaagagagcacaagttactacaaaccctccagggaacccaagttactggttccggcataggtcaaaaggatcatggccactttccactatagacaatggctggggctcatcggatactagtgcggaagcaactaaggcacttttgatgatttccaaggtatatcccaacctcgttgaaaattcaaatggagatgagtggatgttgaatgctgttgattgccttctttcatttatgaacaaagatggttcagtttctacatttgaatgtcaaagaacttattcttggctagagattctgaatcctttggagagttttcgaaatattgtcgctgattacccgacggttgaatgtacatcctcggtgttgcaggcattggtattatttgaggaattcaattcagagtaccgcagtaaagaaataaaagaaaatgttaagaaagctgccatatatattgagaataatcaaaacaaggatggatcctggtacggcacatggggaatatgttttgtctatgggactctctatgcaataaaaggcttagttgctgctgggagaaattatgagaacagtatttgcattaggaaagcatgtaactttttgctctcaatacaactcaaaactggtggctgggcagagagctatcattcctgtgaaagacaggtttatgtagagggtcatagcactcatgttgtacaaactgcttgggcgatgctagctttgatttatactggacagatggaacgggacccaacaccattacatcgagcagcaaaagtattgattaatatgcaactggagacaggagactatgctcaacaagaacatgttggtagcaccaactgctctgtatacttcaactaccccaactatcgtattttgttccctgtttgggctcttggagagtatcatcgcaaagtatgtaccaaaagtaattgaaaggaacccatggaatgcaaaaatgtcatatgtagtactatgttacatactaaaggaaaatcatagcggagtcgatataaccaattgtactttatataatgaaatgtaaatgggtagccacatacatgatttcaatggaccatgtagtgatgtctaacatttgattatgatgtatgtacactagtatgaatacgccaaatcgcaaataagtaacaattcagtttatgtgt

SEQ ID NO: 171125 - DNA, 400 bp, Zea mays
  Clone ID: MRT4577_87645C.1
gggaacaaaatttaatttattccaaggggcaaaacaaaaacggggtccccggaaggggtccctggggacaaaaggggataagaaaaatagcaaaaaggtggggggctcccaaaggggggccatgggccccaatgggcccatagcaaagggcctcattttccttccaccggggggggggggggggaccccctgttttgggaagcccgccccacccaagggccaccactttagggggggggaggcaaagggtttcaccaagggttccgaaacccactacccaacttggaaggggggggccacagttgggggccctagacccaggcccatgccccacaatgggcatccaccctcccttattgcccccggtggggttacaagcaatcgctaccggacccgtggg

SEQ ID NO: 171126 - DNA, 485 bp, Zea mays
  Clone ID: MRT4577_87646C.1
tggcgagcgtggagggcaagaggcacacgtgctgggcaccggcagccagcgtcttaatacggacgaccctcgtaggactcctactggaccgaggctacaacggccacgccagcgtgctcaacccctagacaaggcggatactgagcacctggtaggcctgggggccggctcccactagggccgattagcaagtattaccgggcgacctcctttacagacccgcgctcatggccgccgcgcggggctgctcgggcgtgttccacctggccacccactgcaccagataccctatgagcgacccgcatgggcagatgtgtggcagccggcagaggaaggcacactaaacgttctgcgcccatacaaaggaggcccttaccgctcgacggaaggaggtaacatgatgcaaatccgacattatacccagccccgtgtggccagcctgggaaccaaggcatgagttatgctaacacgtatgacagtactgc

SEQ ID NO: 171127 - DNA, 661 bp, Zea mays
  unsure (1)..(661): unsure at all n locations
  Clone ID: MRT4577_87647C.1
gccggccgggttccgaatccaactacaaccacatcgtgactgacatcatcagcaacgagtactcgacgaccaactgactcacgacattcatgaagatcttggacgaggaggtccgaatcctgaaagagaccatgacaactacacagtcatacatgggtgacgaaaggctgctggtatgagcgacaccgtgaactccgtcgtgcccacatgccctgctgaacatcatgccgaccatgacgggcgccgccgagggcgtggcgctggagctgccacaactcaagcgaaaggtgaacggcatcgccctgcggctggcgacccccaacgtgtacgaggggcacctactgattcacatcgtgaatactggtatcacgggcgaccacgtgaatgttcatctacacaaggccgccgccgcaccgctggatggcatgctgcaggcatatgacgagccgctcgagtccgtcgacttcaggcgactccgacgcgtcctgtcaccatccaagcatcactcagaatggtgatgggcgacgacatgctcaaggacgatgcctgatacgacaacgattgaccgtacactcaacgagtggttgatctgccgcacctggaggcgcgcaagtgacccggcgcgacgncgcgcggcatactggaccctcttgaggacttc

SEQ ID NO: 171128 - DNA, 334 bp, Zea mays
  Clone ID: MRT4577_87648C.1
acgccataatcaagatatagaacagaaagccgccgctgccagcatacagaattaataagggggggcttctccttggctgcgacgcgcccacctgctgaacacgggccctcaatcgacgcacaggcacgcgcgcgtcgcaccaccacgaccacgaccagatcgctttcatgcaccgccgctcagatgcatcttttggcatgggagttgctcctaacattatggagacattcatcgagcctgaaatgaagacagcatcgcaatatgcgatgtctaaaatatacgagaagcagaagcacttgacagtagagaacacacgtgctactaccgcaagcta

SEQ ID NO: 171129 - DNA, 1073 bp, Zea mays
  Clone ID: MRT4577_87649C.1
gccggccgggccgggacatatacatagtgcacctcttctcattcccgaagaaagtaaaacaagaaaaacagagacagaaaagagagtaatattgtgctctcatctcatggtagttacaaaatgcaagacaacgaggaatgtacacctgacaagtacatttttcctaatacttgtgatcatttgttcagcctcaccgtcatgcaaaggccaagatcagccccaagcacgtcttccttgtccccctaggccaccgccaccacatagaccaccgccgtgtaatttgttagagatgtcacaccaccatcgtcataggtcgcctccatcttcacccctactggtgccatcatctccaccacgcagtttgttagagcagtcacaccatcatcaccacaagtcaccaccaatgccagcagtgccattgccaccaccatgtagtttgtctaagatgtcacaccattattcccataggtcgccatcattgccgccagtgtcgtcaccaccaccactggaactagtgtcgtcgtcaccaccacgtagcttgtttgagacatcacaccatcatcatcataggtcaccacaatcaccacaagtgttatcttcaccaccacatgatttatcagagatgtcacaacgtcatcactattggtcatcttccctaccattggtgcaatcatcatcactaccatgtagtttgtccgagactgtttccctaaagccaaagcccgagacgtgctacccctacaataacagattttgtctgactcatgattgcgagacatgtgcaaggaaaatggctttaaaccaaaaaaagctattgtgtgagagagggatgctaatgtagccttatatgtatataatatagagataattacttccacatcacattgttacatattaatcctttagtcgcaaataacagttcactttatctttatcgtaagttaaactactttaaatttaaacaagtttccataaaaatatcaacatgtacaaatttaaataaatacactaacgaaatagggtgatagagtatttttaaaactgattcgatattttagaatgtggtacatttt

SEQ ID NO: 171130 - DNA, 150 bp, Zea mays
  Clone ID: MRT4577_8764C.1
tttcaattgattccttagccaataacaaagccgtgagtgttagctttatcgaggggggtagtaagttcacttggatttacttgcttcgttacaaatctgaagtcttcacatttctttaaagaatttcagtgccttttttaatctattttt

SEQ ID NO: 171131 - DNA, 228 bp, Zea mays
  Clone ID: MRT4577_87650C.1
atacaagacgggatgtcatatttgctccagactggtctgaccgtatagtgcagctatctacctttaaccattgtgatatggaagtaatggcacatgggacagactgacgtgatcgaagttcactactattgcgatactcggacagggggaacacagtgtgcatgaacgagtgagcatatcggacctatgaacagagaaaaggcgagtagcttgtgcgagctctaacat

SEQ ID NO: 171132 - DNA, 1218 bp, Zea mays
  Clone ID: MRT4577_87651C.1
gaaattccaacatgtgtgcttatattaatcaggccgcaaagccttatgcaggacacagcttagcaaagggctaaacgttacagatcagaaccaaactaccatccagaagccaaataaaatgtgcgaattgcagtttcccttcgtttgacatccctaaactagtagtaaaatctggattgatcagcataaacctttgagaatacaaaattctgtcattccaagatcagagtgatttgcaaacacttcggctcaaaaaaaagcgtgaatgatgactagaaaacatatactagtaagcacaaccaaatactgctccaaagaggtcgtcactgaatagctaaattaaacggttctcctggtccaatttctgcaactcgagggggaaaagaactggcaccgtgaggcagtgccgcagtgccgatcacttaatttgcttttgtcaactctggatctcttttaatgtgatcaagtatgaggagcctggggccaggcgggatcttcacatctctgagagcactgtccgtaagaaggggcaaggtttgatcagttaggagacccttcttgaagttcttctcatagttctgaaggcctaacttttgcagcatgcttcttccacgagaatagtatgtatctccactctgtggctgtgaaaatttttgagagatcatgaaaaaaccaccttgaaatacagcaaaaccaacaccagttgtaattgcattagctactggatttggggtccccattccactcacgatggagaatagagccccagaaccaaaagctgctgccatgctgccctggacatcctccactcctcttatccttctcatgacacaagatatgccagcattcgcaccagtcatgaccgcaaagtttcgtgcttgcaccaggggtccacccgctaaagcctgcgcttgcttgaaggaggccaagacctttgggtcggtccccggcggcggcggcggcacaggaagcgcggccccgccgtcgggcgcaagcgtgcccatgagcccgccgagcgcggcgccctgcacggcgccgaccgccgtgaccacggcggcctcgacgtgggtgggctgcttcgctagccacgcccgcacgccggcctccagcgacctgacgcggtcggtccactccgccagtgggttggtcatgcccatgccccgcgctgctgccacctgcgacgatgaggatgccatcaccgtcagcggccgccgcttc

SEQ ID NO: 171133 - DNA, 264 bp, Zea mays
  Clone ID: MRT4577_87652C.1
catttatttagcatgccggggcccggccaaatacaaaacttgcctactgactcgttgagagatgccaactgacgagagttggactacactactcccaagtgatccaatgatcaacttgaataccagggggtttctgtttaggtggggtgagcccctttgccaggaacctcccaaaaataaagcctctggccgggacataagatgcccacactgaatctcgaagcccgggaggtaatgagccacccacacaagagttcaaaagat

SEQ ID NO: 171134 - DNA, 452 bp, Zea mays
  Clone ID: MRT4577_87653C.1
cccacgcgtccggtttgcaagtttagatataagcaaaggcttgattttgttgttatcagccttttcacttggctttaattcgtaccggtttctactgcttctacagtcctgtctctatgaattgcagctgcggcgagagatcttatgaactcgtcagtgacttgatcttttgtaggcacaaaatcaacatcaagtaattttctggtcactcattctctctcataaagtgggaatcaacttcaatgtgcttttttcagcatgaaaaaactagattaaatgctagcaatccatgttatcaacatatagctttgcacatggacttcacgttgtgtcccttgttgtcgtgttgcgccaatttttagtggtctgtccttagccgggtgctagggtatcaagcacattctgtcgctgctagctctcgtatgattagcctactttcgctaactgatgct

SEQ ID NO: 171135 - DNA, 555 bp, Zea mays
  unsure (1)..(555): unsure at all n locations
  Clone ID: MRT4577_87654C.1
aaagaatgggaaacaatcagaagctttaaggatgagtggactcagctggatatgttttataggaattgggcacttaaggaaagcttcataaaagccattggtgttggactaggatttgaattgcagcggcttgaatttgatctatctccattaaacttggatataggccaagtttataaagaaacacgtttattcctggatggagaggaagaaaaagaatgggcatttgaggaaagcaaaatagatgagcaccattttgttgcagttgctcttaggaaacccgatggatctagacatcaggatgttccatctcaggatgattccaaaccaacccagaggcaatttactattctcaactttaatgatttaatgtcatctgccgttcccatgacacctgaagatccttcattttgggactgtttttgcttcacagaagaaattccaatacgaaatggtacaaagtcatgatgattccctgagtaacaaagggaaatgaaaactgtttgtgaagttccgtattcactgaaaaataaatgcttgtttagtatcannnaa

SEQ ID NO: 171136 - DNA, 464 bp, Zea mays
  Clone ID: MRT4577_87655C.1
tgcctcactccgccatgtgcgtgcggatctcccgcgactcctaccccaacctccgcgccctccgcaacgcctcccacgccagcctcaccgacgccgcatacgtcaagatctccgagggcgacttcggatacgtcctcgacgacgtgccccacctcgccgactacatccccgacgtccccacttacccgaacccattacaagaccacccagcatattcaactgtcaagcaatattttgtcgatgaagatgacaccctaccacaaaaggttgttgttcaaaagaatagccgccggggggttcacttccgtcgtgctggaccccgtcagagggttaattttgagtcagacgaagtgaaagcatgcattgtaagttgtggaggcctttgccctgggctcaacactgctatcagggagctggtgtgtgagttggcactcatgaacaatgcgaacaacatccttggaata

SEQ ID NO: 171137 - DNA, 422 bp, Zea mays
  unsure (1)..(422): unsure at all n locations
  Clone ID: MRT4577_87656C.1
ttccaagacagacgaggagtcaacctgggctgactagtgggcctttggtgagggctaatggagcgtgctttcggaaaggcggctggtaagaggacggtggtcggtttcttgaatgcggtggcattngaaggtctgttgggggcctaagaggttgcgctggtgggtgcgctcaagttcatgaccgggacgagttctggcttcaagtgggttatggagcagtaccagaagaagaggacgttcaattgagctacgctgctttaattgtgatggaggagaactgctactgtgtgttgtgatcttttttagtgaagcttattagagaaataggttttttgtcttgggtggagactctttttgtacggttttggattcattttggatggtgagcttgtaagtctgtgggttttttttttattattatg

SEQ ID NO: 171138 - DNA, 288 bp, Zea mays
  Clone ID: MRT4577_87658C.1
aaaagtatgtttgtgatatcttctctcgcttaacatactttgatttcaccattgcatttcagcattttaaagaatagtgtatcagtatagaaggaggagcaaagctctttaagagtaatgatgaaaccaaaaggtcaaaaagtagaagaatagcgaatgtaagttattaaataaatgagcaagaaggatgtgtcagggaagataaatgcttcttatattgttaataccgtgattccctgcccgctcaccccgtcactcaacacttgatgcatttggtttggatagtgc

SEQ ID NO: 171139 - DNA, 1289 bp, Zea mays
  unsure (1)..(1289): unsure at all n locations
  Clone ID: MRT4577_87659C.1
cgacagacgatgcaagggaacatctgggcagttctcgacggccaaggactcccggagagcatgaccctggtcctgaggttccagctccaaccatcgctggcgagctccaacctcctcggagggtcgtttgatcaggagcactactcatcattgccatctaaccaaatagccgggctgaaggttctgctcatcgatgacgacgagatcaacctggtggtggcccggaagctcctggagaggctaggctgcaccgtttcctcaggctcgggactcatggactcttcctctgcctgtgcctcgttccagctcgtcatggttaacctcgagatgtcagcgatagatcccctggatgctgcctcgaggatcaggcagcagtacaggagctcgcactggcccctggtgatggccatgacgtcggagcagaacgtgtgggagaagtgcgcgcagtccgggatcaacggcgtcctgaagaagccgcttgttctgctggaagtgaaagaagagctcgagcggatccttcagaacacatgatgcctgccatgacccatgagctactaccatgatgaatacgacccccgtccgtccgtctagcatactacatagcagaggggaggggacatggatctcgagttgagaagtggatgcaagtctcctacgctgctgtagttgagtgactgctgtgaggacggaggtggtgacgacgacggatttggcaggcaagcacgagggccgcgttatccgatccatgcccatgccgcgtaaggaggcttcacctcgattcaccaactacataatcacctcgattcacacacgtcaggctttcagtcgataaattcattagtttcatcagaaacggaatgcagttgccagttaatgttggcgtcagtcgcaggggatcttcggccatcgtcgccgcatcagaagcaatgcgcagctccagtggcctcgaccgaacaggacaagaaataggtctagttggatttcttttcgcctttgggtttttgtttaaaaagaaagagaacttgattttccttaaactagaattctctgtcttccattatagtgcacccttttttatactcagattcaaaaccaaaatataaaagaattaagtnaaaaaaaaaaaaaaaaaaaaaaaaaaaaaaaaaaaaaaaataaaaaaaaaaaaaaaaaaaaaaaaaaaaaaataaaaattaatattaataatataaaaattatttaattgggggcggccgttttaagggatccaattttacttccccgtgcttgcaaagtaaaaattttttttt

SEQ ID NO: 171140 - DNA, 321 bp, Zea mays
  Clone ID: MRT4577_8765C.1
gtgacatctagaagatgtctctaccactcaaacgcgttgccacagcgcgcgcttacacgatgacgcggagagtgagaacgacggagagtgcggttgatcatgtcgactggtactacgtcaccgattgtctatggcccaaggacggcttcgaccgacagacgatataacaggccaaatgcggacgggtgtaggactgtcacaacggcaactacgccatcttgatggaccgcgaggccagacgggcgcttgtcaagatgctcaatgacaaggccgttgataatacggacctttacttcctcgccggctaggaacgagtgataa

SEQ ID NO: 171141 - DNA, 385 bp, Zea mays
  unsure (1)..(385): unsure at all n locations
  Clone ID: MRT4577_87660C.1
acggaacaccaagctagacactgctatgctctctatccttctagtttttgaatggaccgacatnctaccgggaggaaggtataaaatatgccatctaaataccactacaccctgaatatgccattcaacttgatgctacaatcacatggaaactacttcatgaactgctgcaaaataccgcacactacaaggatactcctgcaagactgaaactgtcaaacctgcatccatatgcaaaaatgctatcatttactcatgagtgagacatggcactaaaaatatttcaacacctataaaaactgtattcccaacataaaacgaactctctctctttatatgcaacagcaatacttgtgaaatacagattttcatgacacaacacctt

SEQ ID NO: 171142 - DNA, 449 bp, Zea mays
  unsure (1)..(449): unsure at all n locations
  Clone ID: MRT4577_87661C.1
agcagtggaacaacgcagagtacgcgggtagcatcgtcaccactcgcgccgtcgtactacctcgccgactccctcgcttcgcagtttatttgcggggccgttccgatcagcgatggtgaagaggctcaggcgcaagggcgacgtctcctccgcgccgccgcctaaggccggcgggtctcggtcaaccaatcccgacaaatttaaaaagaagggggtcaaaaccgatccggagaaattgaaggcggcctgcactgaatccgcaaacattgctgaggcgtctgcttcagcgcagacacccaccccgaaaccagtcaagacgagtccggcggccgccgccgccgcagagattgcagatgatcgggtcgcccagagcnnancggnggacggaaagtttagttggaaggagacgatgatgggtttagtggtgcttttgggtgttggggcctgtg

SEQ ID NO: 171143 - DNA, 774 bp, Zea mays
  Clone ID: MRT4577_87662C.1
acccccgaggctggccggttccctacgcgccttggccccaccgtgccatcacgcccgcccccacacgccacggccgccgggatgccatcatcgcccttccccacgcgcctccgccgccaccacgccatcaccgcccgccatcaccttccccatgtgcctcgaccgccatccgcgccattaccgcaagtccccacgcgcctcgccagccatccacgcaatcaccttccttcccacgcgtgcgtcgaggatgccatcaccttcattcccacgcgccgaggccgccatcaccgccatcaccttccttccccatgcacgcgtcgaggcccatccgcaagattccgcaaaactcgctatccccaaatcccgcaatcttagcatccccccaaatctcgcaactctcgccagcccaaccatccacgagagtcaatcagctaacatcctcgccccaaatctatgccaacctcccttccacgtcgaggatggtgatccttaaagaacatgtgtgtgcgggcgggtcgtcaccaagctcctcaatgacctttttggagtccggaccaggggtggttgtgcgtgcgcggtacggtttgcgctccttggcgtcggcgaggacctcgcgctacgcattcgtgacgccatcgtcaagggctaccacggcgtgaaggcgtgaagcccgggtggtcgcggttcaggttcgcctactacctatcccacaacgaggacctcttgctccacatctgtgatgccattgtcaagggctaccacgatgtgaattct

SEQ ID NO: 171144 - DNA, 276 bp, Zea mays
  unsure (1)..(276): unsure at all n locations
  Clone ID: MRT4577_87663C.1
ctcaaagtaggatggcatataagttggacaattctcattaatgtgcaaaaaccttgcctgaacgacaactgatgttcacgatcaaacatttctaaaaaaaaatattcaatccaacattgggcctgtttggatcggcttttggccaccaaacgcttcgcttctcagtcctcttcatgaaggcatgaagcagctcagccagngatcatggggcctgngccctcgngtgggagaatntngngctgaagagagnggggaaaatggnnntgantgatactt

SEQ ID NO: 171145 - DNA, 1986 bp, Zea mays
  Clone ID: MRT4577_87664C.1
atgaaaatggaaaagagtgcattatgagcacggcggctctatcagagcgtgatacattcacaagctgaagagggctcggtcatccggaccggaattcgtaaaggcattagtgcattagcatcgtcaccactcgcgccgtcgtactacctcgccgactccctcgcttcgcagatcgcactaaagggaacacatggatctagcttgattttgtaccaaattcagagcaactgatcgtggggattcgattctccatagtttatttgcggggccgttccgatcagcgatggtgaagaggctcaggcgcaagggcgacgtctcctccgcgccgccgcctaaggccgccgcatctcggtcaaccaatcccgacaaatttaaaaagaagggggtcaaaaccgatccggagaaattgaaggcggcctgcactgaatccgcaaacattgctgaggcgtctgcttcagcgcagacacccaccccgaaaccagtcaagacgagtccggcggccgccgccgccgcagagattgcagatgatcgggtcgcccagagcaaaacggaggacggaaagtttagtaggaaggagacgatgaagggaagagaggagcagaagggagaaggggccagtgatggggtcacccagaccaagactgaggatatgaatgtgactaggaaggaaacgatgaaggggggagagaggaagggggacgggagtaggaaggagatgatgaaggggagggaagagcgtgtgaaaacggaagagaagacagggaaggaaaaggaggaggaaaagagtggctcaggattcatattcatgtgcagtgcaaggacgaagccagaatgctaccagaacggcgtgtttggccttcccagggggaagatggatgtggtggagaagatccagcgagggacgaagctgttcttgtatgattttgacctcaagctactgtatggggtgtacaaggcagatacaaggggaggattggatcttgtgcgtcacgcctttgatggcaaattccctgcacaggttaaatttagcgttttcaaggattgtcttcctattcctgagagtagtttcaagcatgccattaaggagaactacagctcaaagggcaggttcacccaagagctcaacactaaacaagttcaaagactattggcactgttcaagcctatcagcctttctaaaccagctccacaacatattgaggatattcgaaaaccaagtgattatgaagaaagaagacagttgcaacatattgaagaaagggctgcacctattaatgtccacgcacatcctcttgaagatcggtacaagatgacacggtcattacatccgccactttttgatgagcctcgacgtggtttggtgctaaatccttatcatatgcaagagcctcaacatgttcctcttaattactatcaccaagtggctactaggtctccataccatcaacctcatatggatattatgcacgaaagaactgcagctgaggtaactgtaagagatcaccaagcactgccaggagagcttgctgcacggtctgaacgcgtggatgagctgtaccgttcttacaaactctctacacgcgcaatggacctcagtccgggagcatcctacctgacaacttatgagcacccgactagtgtttatggtgagggcattcagaggccagctttgacaagggttagtggcccaagtgtgcctgtgtccacccgttattcctttgctggcccaccagcatattgatcatccagatgcaagcactcaaatcggccccagccgctgtacaagttactgtaggcaatggcttcttgtacaccgttggaagccaggatagaacctgatggtagtagctttgcagtttaattattgcctttggtttcttttgcaagataaatctatgagatgtaatgtggaccttgtttgacccaagttgtttaaactaaaatgcaaaacgatggatgtctttgtgttgatttgcccccccccac

SEQ ID NO: 171146 - DNA, 447 bp, Zea mays
  Clone ID: MRT4577_87665C.1
aactgaatcaatctatctaggtagaacacaacacgttcaacgaccgcgcacaacgcttgttagagaatgtactgcgacatgtcttgtaataacacatgatcgctatagaaatgaatcagggtatcttcacaagggcaaaaggccccaacgaaatgcatgccatagttcttcagaccctgcagaactgcgcaattcagtggttcaaccaccccatttcctcatttcagatatgacttgacggagcatagtccttcgaaatctgttgaagctgaacccagtaatccgctcgaaacgtcttggcggggtgcaggctggggtagtatgggggatccaggaacattcgggcgagctgatccatctactgccccggtacaaacagagcacggttgtccgactcctgcgccgtgcccatcacaaccgttaccagctgtcggtaccctaagaaga

SEQ ID NO: 171147 - DNA, 393 bp, Zea mays
  unsure (1)..(393): unsure at all n locations
  Clone ID: MRT4577_87666C.1
gaagcttgttattcgtctcgaggctttatttcccggctagtgttaccaacccccgaggacgaaccagaccggggggctttatcagccgncctccatcgttttttcccaggaaggattgagatcaataggatctaaccacacgaccacgagggtagcgacaccgttttgaacgcttgctattgggctgctgaagaaggcgtaccaccattgaggcgggtgccaacctcaggtggctcataaccattgataacgccgccgtcaacgctctccgcctgataacaatcgtggggatgatggtcaagtgcgcgtcgggcttgcgcacagactacgttaatgctatggtgctcactggcgatggaggcaagttctgcggaggttccgatatgaacgttt

SEQ ID NO: 171148 - DNA, 202 bp, Zea mays
  Clone ID: MRT4577_87667C.1
gacattattaatgggaacggttaaaaaatgaaacgaggacgacagcgggggggcaggacgtttcgcatacctctatatccccaaaaggaagacgaaggtgacactaccacaccacacgaggatattctccatgtgcagagcttaaaaacaggggaaagacttattaccccataccattttgacaccactaccatgggccaaa

SEQ ID NO: 171149 - DNA, 236 bp, Zea mays
  Clone ID: MRT4577_87668C.1
tacgatctccgtcgtactcgtatcgctcagccattgtagcagtcttaattgcacttgtctgcctggttcctatgctgcctgtgcagttctctgatgggcccgtaacttgtcaagcagggactatctgctagtgcttagctacatgcatcatgcactcctggcatttctggatctgaactagctgcttatctagatagtgacactgttcagaagtttgatgatgaattcaatctcct

SEQ ID NO: 171150 - DNA, 271 bp, Zea mays
  Clone ID: MRT4577_87669C.1
cagcggccgccctttttttttttcctgtgcggtcgtctcgtgagttgttgaggccctctctcatctcttgtatagctgagggtggcgccatgccaggtgaatgcgatctattgactggtgctgatccagagcttccatcaactgacgctgcagatggtagactatgctttctcctctgcgatgtaagacagcaattaacagatgaaagggatgcactagctgacatggggctgtcctaaaaaaaaaataaaacgtctgctggacatttttt

SEQ ID NO: 171151 - DNA, 419 bp, Zea mays
  Clone ID: MRT4577_8766C.1
gcgggcggaccaggccagggatttccccatgtgattccggtgggcctgaaaaggattggtaataatcccgcaagagggcacgctagggagacattctttctgtacggagaatggactacgagcatgcacgcgtcggcgctccttgagatcgcgaaaaggcatcggacagaagctagctctccggaaaagctgaggaaaaacggtgtcgtatcatcaaaatgagtatgcgcacagccacaaccatctatcatgataggtaaaggaccattccaggacaatgggaggaagacccccattatgagagcatggaggggcaccattacgcatcacccggaagcgacaaagacgagcagtgcgtcatgctatctcccgggctatgccacccactccccaaaatggacgtatgggaccttattccc

SEQ ID NO: 171152 - DNA, 255 bp, Zea mays
  Clone ID: MRT4577_87670C.1
gccgaagcgtcgccaaccgtcaaagcggtctctcctccggtaacatgggaagacacgcggtatgggaactgggcgcaactcaagaccaccgcagaaaccagagtggctgacaaggcttacaagacaagcacttgggcaacgagtggaagaacccttttgctggatcatctcacgccaagggcatcgttctggagaagattggtattgacgccaagctaccgaactctgccatccgtaagtgtgaccgtgttcagc

SEQ ID NO: 171153 - DNA, 402 bp, Zea mays
  Clone ID: MRT4577_87671C.1
aattgaccgatcgactccacgcctcccatagaggacatttgcaagaacaatctaaagtaggaatgtgatcaccacgatatccgcactcgggtaaataattaccttggaccagtacatgacgaacgcatgcaatacataaatattcaagctgctgaccggaaattattaactgacactccaactgacttgcaacagaatgatcgaatacatcatctgatcaaaagtgctctattaaatgtcaatatggtatcgtccaaatatcaccatgagactactgacaataggaaattgagctaaagagctgcttgataaatggaatcgaccaatattgaacacgagcacgagattagctgacatgaatagatatgatgattaaagagcacattacatgatgacacaaat

SEQ ID NO: 171154 - DNA, 373 bp, Zea mays
  Clone ID: MRT4577_87672C.1
ctcatcctctttatctttcctgtgcctttatttaattaaggttaggcacgcacaactgccaactactagtactctgctgcaattatagcatgcaaagagtcctcgtttcacccaaccatcgagctgtttgacctttaatagcatggagaaaaggatggtgacgacaatggttgtagattgatgcatatatatgattaaccatggtagttctttctcctaaaatctaaataaataaatgtgtggatattccatttttacatcacatcacaataaaactgcttgggacatgtgcaatccttgagtattcaaccatctgtaggtcttctataacaacagcgcagtcttttgcatagagttacttctcttggctatc

SEQ ID NO: 171155 - DNA, 644 bp, Zea mays
  unsure (1)..(644): unsure at all n locations
  Clone ID: MRT4577_87673C.1
gtcagatattcgggtttcagactacctttagatctatctagtcggatacctattgctatctttagatctatctatcgtgtcgtactgtgctgtccatcgtgtttaagtttgagaaacggcatgacacggtcattcttgggctgtaccggtccggtctatttttcttggcaacagactttattttggacttgtatttttatgtcgtaccgtgtcggtcttaaatggtccggtccaaattttcaggtctaagtacacaggtacgcttgatagctagtactcctacaatcctactcctaacagctgcccatgtagcagagtacatccaagctacggctcactaccgcttcgattttgaacatgaactgcagcactcagtcgatggcctcacccgcagccgcagcagcatcagcagagttcacgcagatggaagccgcgcgccagtccctcatcgcgatctcccagtcggtcccggaggtcggggcacccgtcgtcagcccgcccagcggcggcggcggcggcggccgaggcatggatgagaacgggcacgaggacgtcgcggagcggaggtacagggcgaagcttatctccatctccaaccagtcgcccgacgcgcgggcgcggnctacgacgtgccctcgcaacaa

SEQ ID NO: 171156 - DNA, 191 bp, Zea mays
  Clone ID: MRT4577_87674C.1
acagtttgcgaccgcgcttgctttgtctgaccggtagcaccttctcccatcaattgtgactgaaccgccggctgtcgctgtgccaagcggtgatactggtatctaccttcgagctcaaccggtggttctttgccccggattttagcaaaaactgtggacaggctgagtcacctcgcaagaaactgaggtgc

SEQ ID NO: 171157 - DNA, 533 bp, Zea mays
  Clone ID: MRT4577_87675C.1
gggtacctcgaggccggccggggcaactgtttccgccaatctcatgcccgcacacatgatgtccaagatcgacccgtatcaagtggtgtagttgttagtgcgtgagaccggcggcgaggactccatatcgttgtaggtgtccaacaagatcggtccgtgcggcctttccaccgagaagagctgatagtttgtcatctaggaagggtgcaaggattgtaagggcctctttgtaccagacaagctctccgaataccattgttacatgaaggcctacatgtcacatcgctctatcaagcgccctcaacatcatggagctccactataccttacagatacggtatctaaccctcgaacaattactgttgaggggattgcaatctttatgtcaaggtgcagatctgctgtcacaccttcagcctggaaccgtctacgtgatactgcgacaacggcaaggtacacctctgtatctgttttcaccgtatgtccggcacgaatgcctaaccgatcaaagaaatgctgattgacgactgtaa

SEQ ID NO: 171158 - DNA, 806 bp, Zea mays
  Clone ID: MRT4577_87676C.1
cattgggacctcgagccggccggcatccggatagggatagcctcgcccatagcacctgcctgaaagttccctctgtttcctttgtcttctcacagttgcccggcttcgtctccggtaacgcactcagtcgatggcctcacccacagccgcagcagcaccggcagagttcacgcagatggaagccgcgcgccagtccctcatcgcgatctcccagtcggtcccggaggtcggggcgcccgtcgtcagcccgcccagcggcggcggcggcggccgaggcatggatgagaatgggcacgaggacgtcgcggagcggaggtacagggcgaagcttatctccatctccaaccagtcgcccgacgcgcgggcgcggcctacgacgtgccctcgcaacaacggcgccgcctaaagagccgcgtttgtgtattgtaacgtcgccgcatgtacgtccgcccgtacgtgtactggacttactgggtgtgtcggtgtgtccgtgtgtgttctgcagttctgctaataatactcgtagcccaagaataagaaccaggacatgggccttaataatcaccttgaactgccaaagggaacgcctgtgtgggtgtgtgcaagcgtgctaaaggccacttagaaaagtctcattagtatctgagttgagttccagttccactcttatgttttcaacagtagacaatgttcctgttcgtgagttgtctgtgtgattttcttctaaaaaaaaaaaaaaaaaaggggcggcctacggtgatttccgggggggggggccccgacccaaaaacccccctcgggcccgg

SEQ ID NO: 171159 - DNA, 212 bp, Zea mays
  Clone ID: MRT4577_87677C.1
gtgcgcgctcgagcggcggtcggggaagatcgcagcgtgcgtgcaggaaactaacacgccatgaaaaaatggcaagctcatgctcatcctaggtggagctttgcgcgtgtgccatgtgttgctgtgggctgctgccctgctggaggatccataacatctcctcccccacaccttcccttcctccgcttctccggccactctccagtggaggt

SEQ ID NO: 171160 - DNA, 384 bp, Zea mays
  Clone ID: MRT4577_87678C.1
cccccaggaccaactttgggccccggggggccaaaaagttccccaacccggggaacaaaaacaacccgggtcccaaatcgggcctgactaaaggacaaccgttccatacccaacaccaaactaaaccttgcccaaccccaagtttttaaaaggcgagttcaaactataaacccaccgttgctgcggtttttaaaggaaacggacctttaaaagccccttcaggacccccccacccccggagagcggaaaccccccccccccccccttttttcccaccggaccccgaagggcctcggccaaaaaagcaaacctttttaagcccccccccacccctttttccggaaaaacaaacccgagggcaacccccttgggtgcccctccaaa

SEQ ID NO: 171161 - DNA, 369 bp, Zea mays
  Clone ID: MRT4577_87679C.1
aattcccggctcgccgccacgcctccgtgcggagtactaccggtccgaggtgtggctcacggatgccgtcgtagcgcgcgcgggcgggacaggtgctaagagagacacgaacatggctccgagagcgtgcatggaccatctcgtgtgcgtgcactatcggccgcaggataagccggccatgggcatactcgtcagcatgctgcaaacggaacaacacatcgacccgccaccccatccggacgcacatctggcgccatacactggtagagccactcaggcgttcggagacaccacataccgccctgtgttccgtgctcggcagatgaaaatccttgggctatcaaaatctggaaccataggatgcctatc

SEQ ID NO: 171162 - DNA, 454 bp, Zea mays
  Clone ID: MRT4577_8767C.1
gtttaattgtgttttttcgaaccttggtttttacaaaatgttgataatgtggcctgtatagtgcaatatcaatgttcttattaatccactttaaaaacatatataattattgtgttcatattatcttggtttactggtactttgataaccttcagattctcatcatatgcatgcaaagcaaaaaatgattgtgatgtttttcggtcacatgtgcatggatagcttatggttgatcattgatcatttgatcgttatccatattttattccttgagtttctttttgtctctcttgagtgaacaaaatattgggtctggtactgagatgattcttcttgttgggcgtttgagcatgaaaagaatttgctctgtcacttttggcagatgacgtgatccatgagatgactgctgcacaggtcctacagaagcaactgtttgatgcacacgaaccaaatt

SEQ ID NO: 171163 - DNA, 153 bp, Zea mays
  Clone ID: MRT4577_87680C.1
taaagacacttgggccaatcagaagctcgctctctaactgactcatggggagagttcttttgttggacggagagttcaaaatccaaaaatcttggtgtatgtacagttgtctatgaggaatactaacacgtcttgcagtgcttctgcctctcc

SEQ ID NO: 171164 - DNA, 425 bp, Zea mays
  Clone ID: MRT4577_87681C.1
gggtcttcagaccataagctctatctacgtcagagcgcacaagaacccgatcgacaccatgagggtgttgctcgtggccctcgctctcctggctctcgctgcgagcgccacctccacacatacaagcggggggtgtggctgtcagccaccgccgccggatcatataccgccgccggtgcatatgccacctccggttcacctgccacctccggtgcatatcccaccgccggtgcacatgtcgccgccggtccacctgtcaccgccggtacatgtgccgccgccggttcatatgtcgccgccaccatgcgactacactactcaaccgccccggcctcagactcatatccagacacacacatgtgcgtgccaacagacgcatacaagcccgtgccaactgcagagaacctgcggcgttggcagcaccc

SEQ ID NO: 171165 - DNA, 317 bp, Zea mays
  Clone ID: MRT4577_87682C.1
gctgtctgctgagaagacctggattggacggcagtacaacagaacggatctgtcgcaggcgtacttcggacagcctgagatggatctggacggagctaacttgccctaatctgatggggtgtcactgccagtttggccggtgcaaaaccttcggcgccactaggatctatgagtctgtccacatgaccatagagaccgccgtgcgtattgagacctttaccgctctctgggtcaatgactcgctgtgctcgtgcgtcatgttgtgcacagaggaccacgccgactcaaaggtggagcgcgactatgcacacgagcac

SEQ ID NO: 171166 - DNA, 287 bp, Zea mays
  Clone ID: MRT4577_87683C.1
gcagaatgatgaaacaaggtgcggaagtaacaatctttgggccttccggtttggttcctgagaacatagatgggatcgtggacctatcttgctttcgattcgaagctataagcgtggagaggggatttagctatttcttctctttatatagagcatgaaaggagtcaatgttaaggcatgatgaaaacgaaatattgctgcagccacagttagttgcaaaggaatttagttgtaataggcaatctattttggttgtcctctgttgcagcaaaggggccgtggtgcct

SEQ ID NO: 171167 - DNA, 225 bp, Zea mays
  unsure (1)..(225): unsure at all n locations
  Clone ID: MRT4577_87684C.1
ctacnttggcttccacttctcgggggtgctcttcttcctgctggtgtgggccaccaaactctaccgcttcagcacctactccttctcggncgagggccttcgcgccagcaccacgaccaccaccaccacgaccaccaccacgacgacgaccaacaccttcacgctctgcttcgccgacgccaacacttcccctttcacccccgataaccgaaccgcgctggatgc

SEQ ID NO: 171168 - DNA, 270 bp, Zea mays
  Clone ID: MRT4577_87685C.1
aaattcatattaatagaattcagatattgatctcaaccaaacagtttactcaaaaggatttttaaggtgttgtctgctctttgttgggacttctaaagtgaagatccggttgtttgatgggctgctagcagtctcgctggccaaaaactttttgggggacatttctgtgtttccatacttggggccattggcttgggtggtttcaagatcaacaatgacggggtctttctcacttagagattgagaggccctttaaaagagggaaaaccc

SEQ ID NO: 171169 - DNA, 323 bp, Zea mays
  Clone ID: MRT4577_87686C.1
cccccaaaaaataatatgaattcccagcctgaaccaaccgggttttgaaacccaaattcccaaaatttttgtttatcctcccaaaagttttatttggggggccccctgcctttgtttaaaaatcctgggcggccggaaaaattattttcccaaagcttttttaaaaacccttttttgcaagggaaatgcaggccccccggccacccatgtgctttttgctcccgggcaaaaccccagccggagccataacgccccgatccccctttgatttttagggcaagcctaattaacatggcctttttatggggggggatttttaccca

SEQ ID NO: 171170 - DNA, 216 bp, Zea mays
  Clone ID: MRT4577_87687C.1
aaagcaccacaaatcacagattttttatacataaaccataaagacatacacagttaatcaggatacaattgtcatagatccattacataaatacaaaagctccacatttatttattcacaaaagcattacaattataatatcatttcacaactagatcatttacagatgtttagcttgaactattacaaaagcttaataaaatatttgttacaaaa

SEQ ID NO: 171171 - DNA, 538 bp, Zea mays
  Clone ID: MRT4577_87688C.1
gctgccgcgtcgtaagctggacctctaaacggccgggggggggggggggggtttttaaaattttttttttttttttttttttttttttttttttttttttttttttttttttttttttttttttttttcaaccagctaatcaaaaaaggggttttttaaaaaaacagaagtggggccaaaaagggccgggggagagggggaaacaggcccaaaaaaagggcctagccacattattctgaagaggggccgcagccagaacagccatgggagtttaaagggaccagggataacacacgtttgggaaggtcctcaaaagtcaaaacaagggggaacaatttcgtttttaaaaccattaacactggcgcaccaggatcgttgaaaacacccaaaaaaaatcctttattgggccaaggaaaaaaatttttggggcatcgacccgggaaccaaaaattttaagccgaacctaacttttttttggaattttcaccgatccataaaaagtggggaagttgggcacatctccgggagggaactccaa

SEQ ID NO: 171172 - DNA, 1223 bp, Zea mays
  Clone ID: MRT4577_87689C.1
aattcggcacgaggcatctgcgccgatccaaatccgcccttccgtctttggtgccaagaggaaaatggacgacaatcccatcttgtggcggccctacgtcagccaggcagccatggccacggagagctgctacccgcgcggcctctcgtggttcgcgtggtcctgcatccccgccgatctcgcccaccatagtaaagctcccggtccccgtccccttcacggcccccgacgccgaggatcccgagcccgaaccccccatcgcgggactcctcgacgagctcctgctggatatcctcgcctacgtgccccgcgcctcgctcccgtcgctccccgccgtctgccactgcttcgcctcgctcctcacgtcccacacattcctgtagctgcgcctcgcgagcggccgcctccgcccatgcgtccacggtgcacggttctgccctccccttcccctaatcacgcgccccctgccccgccgatccgcgtctgccgccccgccgctgatgacgtgttcgtctcccacctcgtcacggacaccatgcactacaatccctccgacctgtcgtcctgggtcgagagcatgctgtccgagctcaacgcgcccccgccgctgctcccgcccgtgacgccgttcccaaggctcgcgtccacctcgtccaccgtcacaagtggtgtcgccgccggtgccggctacttcgatctcccgcccgccgtcgactcgtccagcagtacctacgctctaaagtcgatcccctcgccggtggtggcggcgtcggctgacccgtcccccgactcggtgcgggagcccaagcggatgcgaactggcggcggtggcacgtcgtcgctctcttcctcatcgtcatccatggacggtggatgaggtgactctgctgcggtggcgacgacggcggccacagacgtcgatctgctcaagcgagcgtggctcaacgagaaggccgcgtcggatatcctcagcttcgactcgcccctcgcgttacgtgtctgcgagcagatccagcatctcatacgctcttctcccttcccgtcttcttgaccacgttccttgttggtcgtcgctttccaggggcctcgacatgcccaatctaaagaagcgatgcgtgaggttcgtctccaccacgccctgccccaggctaagaacccgcccaaggccaagaacctgctggaagccgccgtgaagcaggccactgcgtggatgcccaagcccc

SEQ ID NO: 171173 - DNA, 758 bp, Zea mays
  unsure (1)..(758): unsure at all n locations
  Clone ID: MRT4577_8768C.1
cctcgaagccggccgggataagagccacagctgcgggctagctcattcgagaagcagcacagctgaaccaattttcatttccttggcaagctaataaagagttcatcgtcgatcagtcccgctgcatggtttcctctccgcaagcaaataaatttcctctccgcaagcaaatttcctcgccctcctcttcgtgcatggctcctcatgtgctattagtcctagtgattctcctgtacctcgtcagaaccctcaggccgtggcggagccggaggaacagcacatgctgcaccccttcgctcccgccggggcctgtgccatggcccgtcgttggcaacctgccggagatgatgctgagcgacaagccggcgttccactggatccaccatatcatgaaggaggcgggaaccgacatcgcctgcatcaaactgggcggtgtccacgtcatccccatcagctgccccaagatcgcgctcgaggtgctaagcaaccaggatgccaacttcgcttctcgcccgctcaccttcgcctccaagaccttcagcacaggctacagggacgctgcaatgtcccactgcggcgaccactggaagaagatgcgccgcgtgctggcctccgagatcgtctgcccctcccgtcacaggtggctccacgacaagcgtgccgacgaggcagacaaacctcaccggtacgtctacaacctcgcgacgaaggcgggngtcgtccggcgccgttgacgttaggcatattgcgcgccacta

SEQ ID NO: 171174 - DNA, 560 bp, Zea mays
  Clone ID: MRT4577_87690C.1
aattcggcacgagggagagaactagtctcttattagctctaggctctagctagccgcgccactccttcgtgtagccatcagccttctcatcgccaccaatggccactgccgaggtccagaccccgaccgtcgtggcggccgaggaagcgcccgtggtggagacccccgcggccgtcgtgcccgagagttgccccgcgaggcgagcgagccaggtgtgtctgtgtcccagacttccgggcgacacagagcgcgagcggagcgcgtctgtgggcagaccctccggcaaccggcgcgaggcgagtgtgtctgtggtccagaactctgcgcagcagagaccgcgagagagctgtgtgtctctgtggccagacccgcgggcacctggcagcaagtgtgtcagagtgccgcaccgagtctgtctgttgtgtccgaccgcgcagcgagtgtgtctagacccaagcacaggagctgccccacgcgggcaggcagccaggtcgctccctgcggtatttcccgctctgcattaccgattgtgtatcctacgttgcgtttggggggggggc

SEQ ID NO: 171175 - DNA, 349 bp, Zea mays
  unsure (1)..(349): unsure at all n locations
  Clone ID: MRT4577_87691C.1
gccaacaaaaaacactgatagaaagcaanacaccaaacgaaacctanaaaatcgccgcgcctnaaggagtcctcagcgtcgaggaaccaggctttttttttttctatcaaccccaaaaaacccaactggggggggcgggaaattttcctgtanacgattaacccctggatttgaaagcacagcatatacacctggtattggccataatttacaagaacattccgtagtattagtaagaagaagaaaggttaaggatttacccggngtgagaaatcccattattcgaagaaccctagnagctgncgcagtaaagaatctcaaccaaggcgttctaaatatggggccaaaa

SEQ ID NO: 171176 - DNA, 654 bp, Zea mays
  unsure (1)..(654): unsure at all n locations
  Clone ID: MRT4577_87692C.1
aaagacgtcgtccgccgcgctgtgcgcctagccgtcaatgtggacgcctgcgggcggcctaattcttcttcccgtccttcgttcttccccctcgcccttcaggcagcaggcctcacactccagagtagtagcaagcaacagcaacgccgagcctgcatactacacgcatacataggtagatccgatcccgctctactgacctatagtggcggcggtggcgtttgcgctgggcaacagtgcatgcctctcttctctgggccagctcccagctatctccagcggctgtcatcgcagcagaacctagctagctagtcagataggtagcgcagccagtgcccagtggaggagggagggaagaagcaggtggcgcgcgggaccaagggaggagcgagagcgagcgagcaagaaataccagaggaagcaagtggtaggtaggtaaggtagtgcctatatggaccagttcgccgcgagcgggaggttctctagagaggaggaggcggacgaggagcaggaggatgcgtccaattccatgcgcgagatctccttcatgccgccggctgcggcctcgtcatcttcggcggcggcttccgcggnccgcgtccgcctccaccagcgcatccggcgtgtgcatcggggaagcagcagcgccccctt

SEQ ID NO: 171177 - DNA, 377 bp, Zea mays
  Clone ID: MRT4577_87693C.1
cgctgttttcacgcagcgcaggctcaagccgtcggcatggggagcaagcacctcgccgtcggctcatgcctcctcctccttctcctcctgcccaccgcctcggctgccaccgtacgtcgactactgcagtaagaaggactacccgcgcgaaggtgagcggggcgcacatcgtgcccgacccggccgaacccggcaagcctgccagtttcaagatctccgctactactgataaaaccatcgagaaggggaagctggtcatcgacgccaaagtatatcatcttctacgtgcactcggaggaccgcgacatctgcggagagacttcctgcccagtgaacggcgacttcgtgctgctcgcaccagcatacgctgccaggct

SEQ ID NO: 171178 - DNA, 632 bp, Zea mays
  Clone ID: MRT4577_87694C.1
attgggtccctcgaggccggccgggagatgcgcgtacatcgaatcgtctcgctcttggctgccctactcgtgctgcttgccctcgccgccgtatcctccacgcgcagcgcacaagaggagtccgtggctgacaacgccgggatgttggcgggcggcatcaaggacgtgccggcgaacgagaacgacctccagctccaggagctcgcgcgcttcgccgtcaatgagcacaacaagaaggccaatgctcttctggggttcgagaagcttgtgaaggccaagacacaagtggttgctggcacgatgtactatctcactattgaagcgaaggatggcgaagtcaagaagctctatgaagctaaggtctgggagaagccatgggagaacttcaagcagcttcaggaattcaagcctgttgaagagggtgctagcgcctaagcgcaaaactaagttacagaataaagagctgcttcggaacatgccagagcatgcaccctcgcgtaatttcagaaaatcacagtgctcttaatgtaatatcttgaattgccgtgccatgtgtaataagtaatatcatgaataacagttgctattatgggctctaaatgtgtataacagctatccatggcagaattctc

SEQ ID NO: 171179 - DNA, 355 bp, Zea mays
  unsure (1)..(355): unsure at all n locations
  Clone ID: MRT4577_87695C.1
actagcaacatcttagacaccaatgggagccaagataaaagccctccttgccctccttgctcttacaacaagcactgcaacctacactcaaagaccacaatgctcacaaaaagaccttgggtccggtcaacagcaagcttggattgaaaggcagcaattttcgtgctttaagaggccgccaccgggaggcgcagcgcgcggggggaacggcaacaaccgcggnngngncaagaaggnagcagggctcacaccagctagcnggctgaanggnagnagnngnngcngcngnaaacaagcaggagagnncaangcngncagnnggnngaanggaagaanaggcnggggggaggcagca

SEQ ID NO: 171180 - DNA, 429 bp, Zea mays
  Clone ID: MRT4577_87696C.1
ctggccaaaattagaggaagcgcttccgtgcggaaaaagtctaacttgccaagatctgtacttgcccggtgaatccaatacaatgcaaccgaacgctgttgcagacctaaagaggctcgaatagtggtgcacatacatatcctgtacatgctgaaaacttatgtgcaaacggaacggcagccaaggcttcatctaggatgggtaacccattcgagagtgatgacctccacctgaagaaagatgcaccacatttttgagatggtctcatcttgttgagtgctctatatgctgacacctagatagaggtttgccaaagatccgcttccgatcttgttaacaggcttaaacttcaccttcgaacacgagctcctttctcgcagccccggcgacttccggcccgtacatggaggtggttcaatggagaacgct

SEQ ID NO: 171181 - DNA, 552 bp, Zea mays
  Clone ID: MRT4577_87697C.1
aattgggcatgtatcaccaactgcaatacacaccavgcaamaattctgtgccaactgtttacaatttcatacggaaggacacaaaatggaccagggttgtttcgaggatcaatctaaattgtctaagcctatatttacatmatatagactcttacagcatgggccaaacaaaacataactcaaaagatgtgcrggggtcttttctcggtactgatcctggtgtgatgtacttwacttgtgaggatttcggctgtaactgtatcggtttctagttttcttgccggctgttggccttgggcagtatggytctggcttctggttmavasgggcacacggcctgaactctttctgttcctttttcttttgcttttgtmccttaaatgaaatggaagagatcctgccctchthtctcaaaaaacgggaccaacctaattcttaggcgctagmaccctcttcaacaggcttgaattcctgcagctgcttgaagttctcccatggcttctcccagaccttagcttcatagagcttattgacttcgccatcccctcgtgc

SEQ ID NO: 171182 - DNA, 1003 bp, Zea mays
  Clone ID: MRT4577_87698C.1
ttaaatcttgtactactgaaaatgctcttaatctcattgaaaatcgaagatcgaatccactgccatctctatccatgtccgtagcgtgacgcgtccacaacagtagaacacgtgttacgacggcgcagtttcagtgtagaaagcctagaagggtaaaatgtcctccctttccctttccaatccccacgccgccacaacaatatcgcattgacacatcgttcatcggatccagtcctctcccgggatcacctccggctataaatttccgtccccaattcacccaatccagatgcgcaaacatcgaatcgtctcgctagtggctgccctactcgtgctgcttgcccttgccgccgtttcctccacgcgcagcacacaaaaggagtccgtggctgacaacgccgggatgttggcaggcggcatcaaggacgtgccggcgaacgagaacgacctccagctccaggagctcgcgcgcttcgccgtcaatgagcacaaccaaaaggccaatgctcttctggggttcgagaagcttgtgaaggccaagacacaagtggttgctggcacgatgtactatctcactattgaagtgaaggatggcgaagtcaagaagctctatgaagctaaggtctgggagaagccatgggagaacttcaagcagctgcaggaattcaagcctgttgaagagggtgctagcgcctaaggatctgtcgtctccctgtgcaatttcctgcctgaagcgcaaaactaagttacagaataaggagctgcttcggaacatgccagagcatgcaccctcgcgtaatttcataaaatcacagggctcttaatgtaatatcttgaattgccgtgccatgtgtaataagtaatatcatgaataacagttgctactatgggttctaaaggtttattaacagccatccatgggccatggcagagttctcatattactttgttgaagtctttgttgcaaaaaaaaaaaaaaaaaaaaaaaaaaaaacacaaaccc

SEQ ID NO: 171183 - DNA, 923 bp, Zea mays
  Clone ID: MRT4577_87699C.1
gcacgaggcctagaagtgtaaaatgtcctccctttccctttccctttccaatccccacgccgccacaacaatatcgcattgacacatcgttcatcggatccagtcttctcccgggatctcctccggctataaatttccggccccaattcacccaatccagatgcgcaaacatcgaatcgtctcgctagtggctgccctactcgtgctgcttgccctcgccgccgtttcctccacgcgcaacgcacaggaggagtccgcggctgacaacgccgggatgttggcaggcggcatcaaggacgtgccggcgaacgagaacgacctccagctccaggagctcgcgcgcttcgccgtcaatgagcacaaccaaaaggccaatgctcttctggggttcgagaagcttgtgaaggccaagacacaagtggttgctggcacgatgtactatctcactattgaagtgaaggatggcgaagtgaagaagctctacgaagctaaggtctgggagaagccatgggagaacttcaaggagctgcaggaattcaagcctgttgaagagggtgctagcgcctaaggatctctccttctccatgtgcgagcctgaagctcaaagcaaagttgcagaataaggagccacctcccaacatgctagaccatgctcccttgtgtaatttcataagactacaacccttttagggcttgttcgtttgtgtctgtgtctaagggaattgaaggtgattaaatttccttctatacaaatagaggggctttaatccactccaatacttttcaatccacgcctaaccgaacaagcccttaatatgatatcttagattgccgtacctgtgtaatatcatgaataaaatttgctattatggattctaaggttaaaaaaaaaaaagaaaaaaaaaaaaaaaaaatttgcggcc

SEQ ID NO: 171184 - DNA, 390 bp, Zea mays
  unsure (1)..(390): unsure at all n locations
  Clone ID: MRT4577_8769C.1
ttatattttatttttttttttatccaagtgtatacaacttttatcctatcncatcatcacctttacatagttcggtgggttaaatttatcatctaatctcacatcaccttttattttttcacccatcgaacaataggcattcagtcaacatatatttagtatctactccttcacagacaaacaatatcccctaacgaccatgattacaccactaaatctaacaccaactaataaatacctttaaccaacatcaaatttactaactgatcggtgccaaaacctatcagacttcacaaaagagcatacttagaacaccctgtatggcttcccccgttaatgccttcccactgtgcatccacatccttgcagggctcattcctatcgacaatt

SEQ ID NO: 171185 - DNA, 208 bp, Zea mays
  Clone ID: MRT4577_876C.1
tggttttgttggataaaaaaaacgcatgataaacgaatctttaaaagcacagaactggagcatagttgccacaactgtgtgaaggaacggttaaatgaaacatgtgcaataagaagctaagtaatgatttctagattatgggataattatggaatgattttggaagaagctaaagcaacgacataaaagattacctgggtaactataa

SEQ ID NO: 171186 - DNA, 599 bp, Zea mays
  unsure (1)..(599): unsure at all n locations
  Clone ID: MRT4577_87700C.1
cggtaccggaaatctcccgggtttcgacccacgccgtccgggnagtccatnnggcgttggccggcggcatcaaggacgtgccggcgaacgagaacgacctccacctgcaggagctcgcccgcttcgccgtcgaggagcacaacaagaaggccaatgctcttctggggtatgagaagcttgtgaaggccaagacacaagtggttgctggcacgatgtactatctcactgttgaggtgaaggatggcgaagtcaagaagctctacgaagctaaggtctgggagaagccatgggagaacttcaaggagctgcaggaattcaagcctgttgaagagggtgctagcgcctaaggatctctcgtctccatgtgcaatttgctgcctgaagcgcaaaacaaagttgcagaataaggagctgcttcggaacatgcctgagcatgcccccttgtgcaatttcataaaattacagtgctatgtaatatcttaaatttccgtgccctgtgtaatatcatgaataacagttgctattatggattctaaaggtgtattaactagtaccatagatggaggaattctcatattactatgctgaaagtttttgtc

SEQ ID NO: 171187 - DNA, 1034 bp, Zea mays
  Clone ID: MRT4577_87701C.1
ggtaccctccggcctgccaaatttgaacaaaaagatgtggtgaggaacacgtgttacgacggcgtagcttcagtgtagaagcctagaagggtaaaatgtcctccctttccctttccctttccaatccccacgccgccacaacaatatcgcattgacacatcgttcatcggatccagtcttctcccgggatctcctccggctataaatttccggccccaattcacccaatccagatgcgcaaacatcgaatcgtctcgctcgtggctgccctactcgtgctgcttgccctcgccgccgtttcctccacgcgcagcgcacaaaaggagtccgtggctgacaacgccgggatgttggcaggcggcatcaaggacgtgccggcgaacgagaacgacctccagctccaggagctcgcgcgcttcgccgtcaatgagcacaaccaaaaggccaatgctcttctggggttcgagaagcttgtgaaggccaagacacaagttgttgctggcacgatgtactatctcactattgaagtgaaggatggcgtagtcaagaagctttatgaagctaaggtctgggagaagccatgggagaacttcaagcagctgcaggaattcaagcctgttgaagagggtgctagcgcctaaggatctgtcgtctccctgtgcaatttgctgcctgaagcgcaaaactaagttacagaataaggagctgcttcgtaacatgccagagcatgcaccctcgcgtaatttcataaaatcacagggctcttaatgtaatatcttgaattgccgtgccatgtgtaataagtaatatcatgaataacagttgctattatgggttctaaaggtttattaacagccatccatgggccatggcagagttctcatattactttgttgaagtctttgttggaatatacatgacagaattctcacattgccttgctgaagtctttgttggaattttacatgcagaaaaaaaaaaaaaaaaaaaaaaaaaaaaaaaaaaaaaccaaaaaaaaaaaaaaaaaagcggcc

SEQ ID NO: 171188 - DNA, 326 bp, Zea mays
  Clone ID: MRT4577_87702C.1
tttttcacgcgtccgccattttgtaaaggtaccaagaacaaggggaggcaccaccaggaccaaccgggctccgagttcaacacacacccatggaaggatcggcggcacaagcaccggcgaagaccgacctgagggtggcggcgaactacggctcactgcccaaggcacatggcaacaccgacctcatccgcgccgccgggggaatctgcacggagcgaaaaccccgggggcgaggggccgaccaggaccctacccgaactgccgctgatgaacaccaaccacacagggaccgcgcccccgagcggtgcacgggggcgcaaaagccc

SEQ ID NO: 171189 - DNA, 1053 bp, Zea mays
  Clone ID: MRT4577_87703C.1
ctcccatcccccgccgccacaacaatatcgcattgacacatcgttcatcggatccagtcttctcccgggatctcctccggctataaatttccggccccaattcacccaatccagatgcgcaaacatcgaatcgtctcgctcgtggctgccctactcgtgctgcttgccctcgccgccgtttcctccacgcgcagcgcacaaaaggagtccgtggctgacaacgccgggatgttggcaggcggcatcaaggacgtgccggcgaacgagaacgacctccagctccgggagctcgcgcgcttcgccgtcaatgagcacaaccaaaaggccgtctggtgccgccacgtgtccccgggggtgaaaatgcccaaagactactgctatgagtccggaccccgtaggtgggacccggacccccacgtatgccgtctgggcccccgtagatgggtctacgacctccacgtgtaccgtccggaccctgcaggacggtcccggatctctgtgtatgtcaactggaccctgacaaggggggtccaagacttcaagccagcatacactcttggtctctgctcgggctcgaatgaccgcgccgcacgttaccgaggcgggcgatcgtgtcacatcgacacgcgcatggtccacacagtaacccgcatgttactgaggcacgcggttgcgtctcaacgccgcgtgcgtgggcagcgccataatgggcaaccgttggctcaggcagagtacccactgcagtgccaacagctcgcgtctatcaccattaactcctgtgcgcgtcagcatggccgatccctacatacgtcggcataccagactcccctccgtagccgatttgagccggcagagaggaatgctcttctggggttcgagaagcttgtgaaggccaagacacaagtggttgctggcacgatgtactatctcactattgaagtgaaggatggcgaagtcaataagctctatgaagctaaggtctgggagaagccatgggagaacttcaagcagctgcaggaattcaagcctgttgaagagggtgctagcgcctaa

SEQ ID NO: 171190 - DNA, 855 bp, Zea mays
  Clone ID: MRT4577_87704C.1
ccggggtagaagcctagaagggtaaaatgtcccccctttccctttccatccccacgccgccacaacaatatcgcattgacatatcgttcatcggatccagtcctctcccgggatctcctccggctataaatttccggccccaattcacccaatccagatgcgcagacatcgaatcgtctcgctcttggctgccctactcgtgctgcttgccctcgccgccgtatcctccacgcgcagcgcacaagaggagtccgtggctgacaacgccgggatgttggcgggcggcatcaaggacgtgccggcgaacgagaacgacctccagctccaggagctcgcgcgcttcgccgtcaatgagcacaacaaaaaggccaatgctcttctggggttcgagaagcttgtgaaggccaagacacaagtggttgctggcacgatgtactatctcactattgaagcgaaggatggcgaagtcaagaagctctatgaagctaaggtctgggagaagccatgggagaacttcaagcagcttcaggaattcaagcctgttgaagagggtgctagcgcctaaggatctgccgtctccctgtgcaatttgctgcctgaagcgcaaaactaagttacagaataaagagctgcttcggaacatgccagagcatgcaccctcgcgtaatttcagaaaatcacagtgctcttaatgtaatatcttgaattgccgtgccatgtgtaataagtaatatcatgaataacagttgctattatgggctctaaatgtgtataacagctatccatggcagaattctcacattgccttgctgaagtctttgttggaagtttacatgcagaaaagttttatctcac

SEQ ID NO: 171191 - DNA, 288 bp, Zea mays
  Clone ID: MRT4577_87705C.1
ggggcgggggttttttttttttttttttttttttttttctttttttcttttttacaaacggaaaacagattttccttggggcacctttattaaagaatcccccaacgggggcccagcacccttgccggcaatggtacacaaagctaaactgccttactaggagggggagcaagccttcttttttggcctggcaaaaaaagtaatgcttgctttaacaccctacctccccagatttatacacaaaacacccccttttgttgttgcagggaagtcctgccctgcccccac

SEQ ID NO: 171192 - DNA, 1130 bp, Zea mays
  Clone ID: MRT4577_87706C.1
ccggccgggagccgccgccgtttcttcatcttcctcgcaacgccgacgctgcaacttccgctccctccccgactcgcgctcggcacgcaggcaggcgactgcggtggcgctcaggctcgggctctcagcaacggcggggcagtcccagactcagcggctccctctctccaatcgccttgcgccctcgctccgttcctctgctcaccggccgattctgcgttgcaatattttccagcatagcttgctcacctacttctcaatttagaagacttcaatttctggatctgagcatcaaatcaagaccataccactttagtcagtcctgtctgatggcactggctgcagctccagccagtggtgattcacagagtggtcctcagaggaactatcaggttgttgagatgcgcaaacatcgaatcgtctcgctagtggctgccctactcgtgctgcttgcccttgccgccgtttcctccacgcgcagcacacaaaaggagtccgtggctgacaacgccgggatgttggcaggcggcatcaaggacgtgccggcgaacgagaacgacctccagctccaggagctcgcgcgcttcgccgtcaatgagcacaaccaaaaggccaatgctcttctggggttcgagaagcttgtgaaggccaagacacaagtggttgctggcacgatgtactatctcactattgaagtgaaggatggcgaagtcaataagctctatgaagctaaggtctgggagaagccatgggagaacttcaagcagctgcaggaattcaagcctgttgaagagggtgctagcgcctaaggttgtggccacagcccggctctcgcaggatctgtcgtctccctgtgcaatttgctgcctgaagcgcaaaactaagttgcagaataaggagctgcttcggaacatgccagagcatgcaccctcgcgtattttcataaaatcagtgctcttaatgtaatatcttgaattgccgtgccatgtgtaataagtaatatcatgaataacagttgctattatgggttctaaatgtgtattaacagccatccatggcagagttctcatattactttgctgaagtctttgttggaatatacatgacagaattctcacattgccttgctg

SEQ ID NO: 171193 - DNA, 639 bp, Zea mays
  unsure (1)..(639): unsure at all n locations
  Clone ID: MRT4577_87707C.1
ctcgaggccggccgggatctcagtttgattgtaacctgattcccttcgttgaactccacgatgccttctccatttcaccagaaatactctacccagagtcacaagatcntttggagacaacactgtcccatcgatgcctacaggccctaaggcagatgccgaccgcaggtcatcggactcatccatgacatcgaatccagggtcgccaactgagcgcagaaggtcgtcggctagcaagttcgcaaacttggaggcactgaagaggccccaggacgaacaaagcgtgaacaggaggtctagtttgcaagattcgtatggcaaggtcggaatgttcggcacgatgtggaacaatttcacgcgcggtgggccgggtctcaagtcgcctccacagcagccgaaggaagcacgcgacactactacgcttcggcagtaagctcactgtgaccggtgttggaacaatctgatgccttcaaagaagcgatttcctttggaaggactaaataagtcgagcaagcgtgacggccgttctattccccgctcggtaacaatgagtatggatcatgtatattacgcacctgttaaagtaaatatcaatataacgaaactctttcaatgaaaaaaaaaaaaaaaaaagcggcc

SEQ ID NO: 171194 - DNA, 465 bp, Zea mays
  unsure (1)..(465): unsure at all n locations
  Clone ID: MRT4577_87708C.1
ccagaacgcacaaatcttcctgaaaatacaattatattcagacaagcaccatattgcgaattaatagttcatatgctgcgcgcggtagggaagaaggggagagttggcccaatagggtgaaggctgtctcttcacaattgacgttttgttaaggtctgagtctgacatgcatatcatccttttttgggatagatttttttttttttttgctttgtcttnatttgtttgcagagaagctagtgatgaggctgtatnatttataaaagtgtccaagnaatgtaagggaactgtgcgcttatgagcaagcaggctggcggcagataaagaaaacagttcttccgatccgtggtcaatcaaaaaaattatcttctcctagagagcccacaggctttcttcagagaataatagtgcgtgggccgagatcctgcccagatcggcggcagtaggtgtacaagccacaaccac

SEQ ID NO: 171195 - DNA, 1686 bp, Zea mays
  unsure (1)..(1686): unsure at all n locations
  Clone ID: MRT4577_87709C.1
cctcgagccggcgggaaaaataaaaaaaaaaacctgcactctgaagaaacagccaattgaaataacagatggtcggatcgcggttttgtgtgcgacgggtcggacgtgaagattgccgctccctccatggcaaaagcctcgacacctccttgtccctcgccgttggcactcgacagggcgagtaggctaggaagagcagttagttgcagattctcgggctggacatgtgcgcggatatcatcgtcggcaacgagctaatgcgcggcatctccggcggccagaagaagcgcctcacaacaggggagatgctggttggcccgaccaaggcgctattcagggaggatttctccccagggcttgacgtaactaccaccttccagactgtaaagtgcatccagcagatcgtccacctgggcgaggccaccgtcgtatcctggctggtccggcctgagccggaggtcttcgagcccttcgacgatttcatgctgctatccgaggggcggattgactaccaggggccccgggagtacgggcttgagttcttcctggccgggggccttcgttcctcgtctcatatcgttatctccaatgccgtgcatgaccatcctgtaaaaaaacacacatgaacgtagtggataacatataaaaaacggcaacagtaggcagcaggacctgaatatcttgataatttcctgcatgttgatatcagaaagagcctctagaaacaactttcggtgcctttccactagaggaaaatacacaaatctgctttggtcttctctgataagtttgtctctactttggagcttgctcaaggcctgaattatttgcgaaccacgcgtccgttcatggtctcatggtccaaagaatggcttctcatgaagaggaattcatttgtgtacatcttcaaaatagtgcacctcagcaaagaagcgctgaggtgcactacaagccaaccgcgatcagcagctcctcatcgtcttcgtcatcaattgcaataactgcagttcctatagttgaaatatgcatcattatcgaggaacctctatcccaatataggcgtagttgtgccttttgtcccagctaccagaacgttttacaccctaagggctgccgtaagttcgtctgtggaaacgacaaggaccggtttgaacagcgactagacccttgctgctgcactggtatggggattgggaagatgccattcactgcccgcccagacatgtctgcttttctcaacatcagtcctaagtaggaagaagaagacaagaagagagtccgggggttcaatgtcaaggctgaccggggtccttcatgcctcctctcatatctttaacttcaagaccatgcatgtccatcatgtcaagtgacacatatgtatggagtggagtatataactagctaagcagtgagattgaatgaagaataaatatactttactaggtgttgttttcagaaggaacaattgtgggtcgaattcccacagttagggatatggtgatggtgtgataagccacatattgatgtactatgcattttgatcagacctgtacggtgtggttcacctgaattatttgctaatttgtcagtcggatttttcatcggtctggtttgtaattatcaagcaagatttattaggcctatctatgtcatctattggtatctggntgtaaaaaaaaaaaaaaa

SEQ ID NO: 171196 - DNA, 397 bp, Zea mays
  Clone ID: MRT4577_8770C.1
caaggtggttgtctttgcggcggcgatggccttggcggtggaagtgggcatggcatgggtgccggattcagcaagggtggtggtctttgttgcagcggcccctgaggtggtggcagggggtttggcaaaagatttggctttcggttttgtaaaaacaaaacattcggttgttgttgcgggggtgggggcggcacctgcattcctgatcaccattgatacatcagcatgcagcatacgcctgcctctcgttctatcacttacttttgtattcattcatgcttcgtacctcgccatgactatgggtgatggtgatatccttcacaccagaattatttgtgtactccatgtaatgctcgctccctacaagcattcggaaatataaattaagctaatgctt

SEQ ID NO: 171197 - DNA, 334 bp, Zea mays
  Clone ID: MRT4577_87710C.1
gagatccatcccgctgagtgctacaaccacgacattgctggtgctggtcattctaatagggcactcatggctccaggcgatatatgaccgaatgcaggcttgagggatagaaccatcgataacaagcatcgagcatcttctgattaggtatcttctgcaggcttttttacgttcaagagataaattaaagcctctagaactgaacggtgcatatatacaatgttggacggcaggaaggctcttgattgctgatctagcatgatcgttagcctgcggtatcagaaacacgattgactcagagcatttggctaatgagatctgagaggctttaaat

SEQ ID NO: 171198 - DNA, 537 bp, Zea mays
  Clone ID: MRT4577_87711C.1
tgtctctcttttttgcaaaatggttatgacatatactttattaacgaagtaatttgaaagatgtgagcgttgttcatacaaaaacgagcgcacatgtctagatttttaacgcgagaccaccttgagcggcgttcgcttctagacgacccaagattaccccctccagtcggccgaggcctagtgctcctatcctgtgatcccctagcagtgcaccggccgaggtggtacatcttaacgcactggaaataccctgggaactctcaccttggcgcctggagggcattcccattatcatcagccttgcgcgatgaccaaataggcggctcggccacggcccttcccagcaccacgtgcgacatgagcttaaccgggacgcgcccctgtgtgcagctaaaccgcgcgcagattgactcggctacgggcccggtcatctctggaatactccagcggcgctagaggaacagttctctccgatgcgttatccttcctttgtcgagcgcgaccaggaggtggaacgcgaagtggtacgcgcgcgac

SEQ ID NO: 171199 - DNA, 302 bp, Zea mays
  Clone ID: MRT4577_87712C.1
cggacgcgtggcgtgacgcgtgggttcatctgatacatgtgttgcattattcaccctttcagtgctctttaacatgtgtgcgcatgacttaggagtattagctaatttatgttcagctgcatttattgtcacacatttttttgtggaaaacttgaacctagacaaaatctgcatcgttgcttaattagttgatttattccttcaggtttctgttcatttcctctgaaatatattttgggatggacctcggccagaagtgctggcagcaaaagagacaaacaagcaacccttttttgactttg

SEQ ID NO: 171200 - DNA, 248 bp, Zea mays
  Clone ID: MRT4577_87714C.1
gggaggcaaaatatgaccaacagacattttcggggggcagcatttgcccgagctaaaataagctacatgggtaagttacatggttactggagcaatcgcacttaagttacatggggaactattcataaagttataagctagggagtggttattggcatttcccaataccgggaaattgggaaggaaaagcttgaggtaaaaaacccttcatgataactgtttgcaaataacatggaatcccaactggt

SEQ ID NO: 171201 - DNA, 396 bp, Zea mays
  Clone ID: MRT4577_87715C.1
ctccagactcttgatgtccggggcacctcggtccgaagcttgccagatgggttctggaggattcagacgctccgtcatgtgctgggcgaccgtctcatcctgcctaaacgtgttggtgacttgaggaatctgcaaacactcaacagcgtgaagcccgactatgtgacccccatgcctgggacgacaagaccttcaaccacatgatccgcctcttgtacttgcacatccggcgcggtgagagtctgggcgtccaggaaatcttctccaaccgcaagaacaaggctgccttgtgttcactaggtccaacctccagcgtctcaaggcaatggaactggtcgggaagcttgaccttcctaaaaatggcatccctgagatggatgtccgcaatcgcctccc

SEQ ID NO: 171202 - DNA, 931 bp, Zea mays
  Clone ID: MRT4577_87717C.1
tttcttccatcccttcctctcctcggtcaaaccgcctttctctcccctactcttctccctccctccccgtctctctctctctaaaaaaagtagcgcccggagaaccgacaggccggagaaagaaaggcggaaagagggagcaaaatctcactttgctgggagttctttcctctgtttccgactcctttgttctcttagtgttcttggttggtggaatggaagctcagcagctccatttgtgttccagagatcttcgtcgttctcgttcccctcgtgtgtagcctttggaggaattcccgttcacatgatccgtgcctggacgtgacggttttgccgcgctctgctgcttccctttcggggagaagaggactcgactcaaatcatttggtatcgcagacgtcgcccttcccagttcagttgagagagatttctggcatgtccggcgcaagtaactatggatccctcatcgatgaatggttgccgccccctacacctagcccaagaactctcatgtctagctttctgaatgaagaattcagctctgcgccattctctggtccccatgatcaatctgaaaagagcagagaagttttgaattcgagcgatgaggttccttcacatgctgtcaaaggcctatttcaaaatggtttctcaaatttgttcagtgctaaatcaaactccaatggtggtttggcggagcgcagggctgcgagagcaggtttcagtgtcccgaaaattgatacttctcgagttggttcatccacagttattcgatctcctgtgtcaattccacctggtctaagtccaactacacttcttgagtctcctgtttttctttacaataaaatggcacaaccgtctccaaccactggcacattgccattcttgatggctaccaatgataagtcaacatatccacagctgccaagat

SEQ ID NO: 171203 - DNA, 364 bp, Zea mays
  Clone ID: MRT4577_87718C.1
tttggttgcgtgggtggaaccatctctattgaaaaatgcgcctagatagaaatcgatttggctttcaataaagagtgtgagatgtcacacacttcgaaccctccacgtgtatctttctacggttacacgggtgagcaacgcaatcgaggaagatgaacaatgagagctcgattctgaacacgcccagaccgagctaaccattacagttatctaggcaaccggtaccagcgatggctaggaggaccagtgacgcgaagagaaggccgatgccgcagcttccaaaccaaacatagcgcttgcactatagctcggatgtgcatcagtctgatgactgtaatgaggaccaagatgaatccggtcaatg

SEQ ID NO: 171204 - DNA, 738 bp, Zea mays
  unsure (1)..(738): unsure at all n locations
  Clone ID: MRT4577_8771C.1
tgctaaaactcaannagatgacaccagcagttattaagttaagcttgcatttaagctctctgcggcctgcatagctgggcattgatattactagtcatctttcagctactttgcaggtcaccatacagaattagtcactgtcaaaccacagcaacacagcacaccctgtttcttcaacttatataaaggtaaattgcgaaagggcctctagcctagtggttaaggacttccgagtagcacctccaagtcctgggttcgattcccctcgggagcgaattttcaggcttggttaaaaaaatcccctcgttgtgccccatccgctctcgggttacgatgtcctgtgcgccaccctccggttgggccgttgcagagtggacagttgacgccggcccgttagtgatggggggccagggttcggggattttctcggccgggaccattgtttcggtctcttcttaatataataccgggagggtggtctttccctccccggccgagttttttttaatataaaggaaaaataaaagccaagttatcatttagtaaaaatgatccacacaaacaagcatggtatcatatactagactgataagatatatcacacatatggtggctttaaagcctaagtggctaagtgtgacaatattgagctaaaggtttggtcccaaactatgttgtgaaatcatggttagaagttaatggtgtcagacaaatcatacttttttctgtagcttgatc

SEQ ID NO: 171205 - DNA, 709 bp, Zea mays
  Clone ID: MRT4577_87720C.1
gtacatttatcatggtcaacatcaatccatgggttctgcagagcttttttacttctgtagagatttttgatagaccaagtgaatatgggtgattggttacttcatctaattgttttttaccctttggtatggttaatatttaaaatcttcttcctctcttcaagcactcagtgcattccatgttatgttaatttccggttagtggaaatattggttctgttattgttttagtactacttccatatgttggtgcttgtggaatttatttgattatgtactgttttttgggcatcaccgatggtcgatggatcatggctgctttggtggtgtttttggatgggtttagtaacagtcttagagatcctttctttgtcacatcattgttgtggcctaaattagtaatagttttactctatgtttcagtgtcaattttattgttaacaccctgttcaacgattggctgacaaggttgcagggaactttacatatggagtcatggcactttctgctgctacttacatgttctggagtattttgggttctcaacttgtacctgctgctatccaacatggaggtgcaatgtctttggcattacaactttcttgcagtgttctggtaattgcttgtccttgtgctcttgggcttgccactcccactgctgtactggttggcacttcattaggtgcaacaagaggacttcttttacgtg

SEQ ID NO: 171206 - DNA, 268 bp, Zea mays
  Clone ID: MRT4577_87721C.1
ttaacaaaaaattttcaaatttaataaacaaaagaggggcgggtttttcattaatttaccacatttcccccccacaaaaaaaaattttattctactttatttaaactttacggaacataattttcggccacactcgggggggcacgttttgggtaacaaatttctttatctgtgctgtgcactcattttaatttacggttttttagtgggcacttgatcactgttgttctttactttttttttgtttttttttttctaaaaagtttta

SEQ ID NO: 171207 - DNA, 437 bp, Zea mays
  Clone ID: MRT4577_87722C.1
cgacgcgtccgcccacgcgtccgcccacgcgttcgtgaagatgagactgaatctaaaagaaggaagttggaattagatgctgaaggagctatcgctattgctactacctccaccaccagtaccattgacatgggccctgcatcctcaagagctgtacgggagcctacggttgttgttcagaccacaagtgaggctgacattcttgatgacggttatcggtggcgtaagtatggacagaaggttgttaagggcaatccaaatccaaggagctactacaagtgtacacaccctggctgttcagtgcgcaagcatgtggaaagagcatcacatgatctgaaatcagtcatcacaacatatgagggaaagcacaaccatgaagttccagcagccagaaatagtgggcaaggcagttctggttctggcagcggtccatctgc

SEQ ID NO: 171208 - DNA, 502 bp, Zea mays
  Clone ID: MRT4577_87723C.1
gttctaagctctaaaaatgcaaaatgctgaaacctggaaccggtaaacgcctatatcccttaaccctggaaaatacaaaacccatttaatccttattccgttttggccttgggcctttgtcctttgagctcgggaaaccggaaacctggggaaatcgcaatcccggaaaggtgaaaggagaaaagagatgccgggaaaaagagctgagctctaaagggccatggacccctaaaccccaaaccccgttgaacgaaggaccggggacaacgaaccccatgacccatttcacgccagatgcttgtcggggggactcggtccacgggaaaacgccctgccacgggattgggtcttggttaaacttggaaactgcaaaaagcaaaaagggaggatgaagccttacgccttgaagggaacaggggccagggggcaaaagggcccacgaggtaagtgtaatgataggttagggtttaccgaaggttaaggtttcctaacccttaacctt

SEQ ID NO: 171209 - DNA, 283 bp, Zea mays
  Clone ID: MRT4577_87725C.1
agggcatatactctgtggggaacattgaaacggtgaggccattatgtcaatatacatttgttcatttggctttttttcttgaaaaaagaagctccggaatgtgatacttgaaaaacggtcgcctacacttctactgtgaagatttttacctgtggcgccactgtctccaattggtggagcaactgccctcccacccttgctacatatcgcgtgattttaataccaccgaaactccataccggtgaaacagcattgagccctttttgggcaaaaaagttttaca

SEQ ID NO: 171210 - DNA, 365 bp, Zea mays
  Clone ID: MRT4577_87726C.1
attttgttgggggggggaccatcgaactttggtgtgccttaggagaatccatatggggctctagttgtctatcgtttaactgaagtggaatgaaaaattgtcaatatcagtaggttgttgacttttttattagtctacttgtttaaattttgggggccggcggggggcagtttatgccgtatttttggaacctcacgttgaaggttatcccatcgatgagctgaactaatcatcttcattgtacgtgcgagtaaaggtgcaaggatagatgggttcaattgtgttgacttgtgtaatcggttgcaccgtaactcgtacgtaatccttcgcttgagcttcttgcaatggaaaacagtccaatcttt

SEQ ID NO: 171211 - DNA, 394 bp, Zea mays
  Clone ID: MRT4577_87727C.1
acaccataaactttggggcttcaaagaattgggctgttgcagccacatagaagggggcatcgatacccgggcgtaattattttaaggaggtatcacatagacacggagagagtgcttcaagagctgggcctacaggttcagaacgaaagactgtactgttcatacaagccatgggttcgaataagaccataaaagaacatataaaactttacctgtttgtacattgaatggcacttggaccaccaaaaggaggtgttgttgatgttgtgcaaaacgaatcggacacaattattgcgcactacgggggaacatttggttatttactggccgggtaccgacacagaaaccctttgcatgcacgcaacaggaatgctaagtaaacaggaacctttct

SEQ ID NO: 171212 - DNA, 270 bp, Zea mays
  Clone ID: MRT4577_87728C.1
tgtagaccggctgacggacaccagcagatacacgggctcccacaaggagcgcttcgatgagagcggcaagggcaagggcattgcgggacggcaggacatcctggacgacagtggctacgtgagcgcctacaagaatgcaggcacctacgatgccaaggtgaagaagtgaggcttgggaagaccgccctgccaagtgcggctgcccctgccagaggctcaggcctgggtctaaggggcacgtggagcaagagatcctggtcccctccctgc

SEQ ID NO: 171213 - DNA, 476 bp, Zea mays
  Clone ID: MRT4577_87729C.1
ggaaaaaaagggactttttgtttctcacggtgggacacccacagggcatttttttattacaggggccccttacacagatggtgagaagcactcatacacgaacccacgcacccaacagggagtttttttcttggaacttttcaccaaaaaagcctccccaggacataaacctttggtgcggacaatggatcttgatggcaagctggccttccttggcgatgtaattctgcaccgggaggtccttccccctgaaaacctattcaggaggggcctaagaccaagcgcaaaccggagctgcccataaatgggcttcccaaaaatgggaggggtgatgggatgtttaaggatataccccccggggtgaccccttgggggcggctgggggaaccacacataaccccccggtccacaaatgggacccgtaaaaatgcatttgggactgcttggacctccaagattgggactccggccttttt

SEQ ID NO: 171214 - DNA, 258 bp, Zea mays
  Clone ID: MRT4577_8772C.1
gtctatactacatcctgcagcggacgtttgttgcactcgcaccgggtatctggtagctcgcgacaggactaggatgagctagcctgtgatgaggtgtgtgactccatggacgcggcccatcaggacgcgcgggactgggactgggaggtccagctgccagaccacaggagctgattcttaatgcgccaacaccacggcagcatcgataatacccttgacgatcaagaagaaccagacgagctcgacctgctgctgact

SEQ ID NO: 171215 - DNA, 449 bp, Zea mays
  Clone ID: MRT4577_87730C.1
gtgtcgggtgttagcttatacaattaagagaacactgcagggcaggtcaccattaataatgaaatactgcctatggctttgataccagaagcctgtattacaattaagcctcttcacggtcatggggttgtcatcaatagtggcgaaggctgtgattcatgggggaaggggacgattcgtaccagaagtaagcgtgcggggggattgctcatcccactgggttttttatgcatggggggaaatcactggcctcgggggacaccttatagacttaaaaaaaaaaaccgccggacgggggggagggaacctttctcaaaacagatacattcttctgctgaagctcaaggcctagtgggggtattgagttctccaggagaaccttcctttccctaagaacctcgagggcaggaggtaaatctttgccagacatttgcagccaatggtcgcgc

SEQ ID NO: 171216 - DNA, 393 bp, Zea mays
  Clone ID: MRT4577_87731C.1
gcgaatgggtacccctcgggccggccgggcgcaattctaacgccccatgtggccggcgataccgagtattgctacagaactacggcaaaggctggtggtgacaccgccctggagcataatttaggcgaggcgtccaaggcagtagagccagggaactaaaaaaccggccaggcggtagccgaagacgcaggccattatggggctatcggaaccgatgaggcgagcattagcagagaatagtggatccgcgacttgcaagaataaacatgtagcaagatgtacgatggtgaccatcatgagaactgtgccactggctgacttagctgggatcggagagcaagtcattgcctcaaacattgcctcatctgtctctgtatcactgtgccggccatg

SEQ ID NO: 171217 - DNA, 417 bp, Zea mays
  Clone ID: MRT4577_87732C.1
tcttatttgtgggcaaagacacacatatggcaaaaaattatttattgaactatagctcatagcaatctataagaggctccacccatgatgggttgtcgcaataacgctgtggtgttattgaaagcatgttggctgaatggcagcaatcgttgcagttgtaagagggtgccaaacgccaaggcgcaaagcgcacgggaaacagcaacaactgttgctgtgtcaagaacgcaatagggctcacataacctcgactaggctgaatggcggatgacagttgctgccgtaaataagcagcagagatcaaagctatcagtgggctgaatgtaaaaaatttttgggggtggaaaccagctagctgactgaatgggaaatgttgttgtaaattaaaaccaaaggtcagatgcagacagttggttg

SEQ ID NO: 171218 - DNA, 268 bp, Zea mays
  Clone ID: MRT4577_87733C.1
cccggaacctcgaagcctgttgagctactcagccagtgagcttcaggttcaccgccagccttcctgtgtgtaccctgggctatgctcccggagagcaagcagcaggtgggacagaagtacaaagctttacatcctgggtgccctgctaaggttggcctgttctctggactcctcaggtcaacgctgacatgcaagagtttgctctgagcctgttagtccttctagcaggcctgcctactttggatgccaatgaccctgaagataaaga

SEQ ID NO: 171219 - DNA, 355 bp, Zea mays
  Clone ID: MRT4577_87734C.1
gcaactgaaatgcaaaacaagatttgatgaactgccaaccagctatataagagtatctgcggctgtaccgagataaggggaagcatgggtgtacccaagctatgggatggtctttttatctcatcgactgataagcttggtggcgaagctgacagacatgctgcttaacggataagcaaggctttcaaactagaaaaacgcagtatatgactttgacatactgattgcttgactatatagaatacgcctgagtctaagcaatgcggttatggctaatgaaggcacaggagacgacagagctcagagggctcggaacaaacgccgtgaagaggggtcttgaattcaggaacgaatg

SEQ ID NO: 171220 - DNA, 463 bp, Zea mays
  Clone ID: MRT4577_87735C.1
gggcaacaaaacaaatattggccatcaccattcaagaaaacccccccttaaccaaagggggtaacaccctttctgcaatgggccaagggggcccggcactatcattggcgggggcccgattattgcaacaaaacatgaaaacaagtttttcaaggaaaagggaaatgaaaggggctgaaactgaaacccccgaggaaaaaagccttcatgggaaaggaacacaaacgggaaaaggaaaaaatccccaatcttttcactacccctaaagggccgatgccccaaataaaaactcaaaaagccctggggggaaggaagcttggcgggtcctgttgtaagggaaagggaaaccaacaagcatatccccagcatttttgctaaaactgtccatggaaaacaaacgggctccaaactcactggatgcattttttagggcaccattgtacaggacacaaaaaaactggaa

SEQ ID NO: 171221 - DNA, 392 bp, Zea mays
  Clone ID: MRT4577_87736C.1
tactacattcttaatatacacgaacgagcagagaaggggccttgtagagcacgcgagagatgttgactgctggccacgtgaacatcaacgattacatggaggacctgaccgatacggttttatagacctatactaccacgaggaggacggtggccatcggggttgggctttccctgtacgccagagatcgaacaactggtattgtgtaggactctggagatggagggagccacaccgtgccaatctacgaaggttatgcccttcctcatgccatcctgagtattgaccttgctggacgagacctgcctgccaccctgacgaatatcctcaccgagagaggatactggttcaccaccaggttcgagaggaaaatcttgcggtacattagggaa

SEQ ID NO: 171222 - DNA, 400 bp, Zea mays
  Clone ID: MRT4577_87737C.1
gacactacaataagtgggatttctctggatcatccgatcggtttcacattcacactgtggtatgcacctgctggataccccccccttctaaattaaccgaagaacgctcccttggtcgcatcagcttcttatgctttataccctgctgagggtgattgcttgaggctctcgacctccgctgctgccgaggctgattgtgcccattgtgttgtggctggtcctacaagcctgagggaagggatgcccaactcgccctgtggataggcctcactgggagcgattactgccgctgtcgcccctcggacacgaacaacacattatcctatgtcatcttcacctcttatggtagcaaccatcattgatgtcaactgtgcactggtacgcgcaacaacacctgctg

SEQ ID NO: 171223 - DNA, 467 bp, Zea mays
  Clone ID: MRT4577_87738C.1
cccacgcgtccttttggacatggtctaagaaaaaaggcttttgtattttttgggtatagatgtcgtgcaattatgctttcaactcaatgtccagttattgttcattaaaaaaaacctcgaactgtagggggtaagatagccccttcttattgtattaagaagaagaccttgtcacataggtcaagaaaaccctcgaacccctacgctccacccatacacaacggcaccgtagcccacgtgagaacgaccacgaccgagacgggccttagacctctgctttgaagtgggacaaacgaggtgattttttaactaccacctgaaattcgctcccatgagtcgaattcaggacctaaggagggctactcaaaccacctaaccaacttagctagaggttctttcgcagctactgatcattgattagcactgaaacatgtttgctgcagtttattgcacatatgttacgtaag

SEQ ID NO: 171224 - DNA, 1534 bp, Zea mays
  unsure (1)..(1534): unsure at all n locations
  Clone ID: MRT4577_87739C.1
tacgtgggactccccccccgggcttgcagtgaacactctcggcaccgaagtggccgaacccaagccattccatctgcagcccacgccgcttctgtgtgcccgcgcccgcccgccctgggttgcacctaccccccgcacgctgcgcctgccaccaacacctggtatatgtgccccacgccgccagtctacctggtagttgtgcccctgcacgatccccagtggaaatctcaattgacatctcacatctctaagtgtgcccttgtcgattcccttcccttccttggcggccgcaagcccgcacggcgatcctgacagacggacggtcgccggcggcttctactcataaagttgcccaaccgagccgccgcaatgctgacagatgagaagccgattccggcccatctgccgtgaccccgacgccgtccactcaagcgccttcgcctccacgctgcggtgccgccggagctggactccgctaggccgcccgtctccatcctccagcacagctgcaccgtggccgagctgacagcgcccctgcctttcccagtgggccagtgcccgccgccgctgctttggtgtcctgcatctactcctgctgctctgcctctgcatctctcgtctgcggaatggaatgggcatgggtactctcgcctgcggtggtgtttgacacatggttcacaagctctgcctctcttgccatttccatctccgcatagcgtctcccctggtcccagacctgtgcccattccatctccgcatcgtttctcccaggtcctaagcctctgccatttacagccaactgcttcccacggtggtttacttcatagatctgaccaggattgtctctgtgaggtggaaggggttgtcaaggaggcaaacggatggcggctcagcgcctgctcttcctgaaatgttgtcgcggttactccacctctgctgaggacatggtcatctcctccctccgcctcatcccctccccttctgttagtgttaccaacccacctccactccctactattcttcattctactgactctcctcctgacccccatccaccgcttaccaccatgctcttatctgccgctgatcgtctccgcggggtcttcctccgcaagccctctagtcgcaacgtgcttcaccaggcgctatcctccacaggcattggcactaccatggcactgtcgccagaggtgcttgcgaatgtcgtcaacaccagcaacctgaatggtgccgccaccgtgacctactttttttgggcagtcactaactccaagcctcccccatctgtccacacctgcaacatcgtcatcagggcattggggaggaagaaatttttgattattttgatgacgcccttcagatcatgcgcagaaacaacatttttccagacctgaccacattgggagatcattgggggataggtttagttggctgccagngcatgtcagtaggggctgttgaggtggatcagtacccgattcaatatgggatttggggatttggaaaaaacctggcccaagaaagggatgcattt

SEQ ID NO: 171225 - DNA, 211 bp, Zea mays
  Clone ID: MRT4577_8773C.1
cccacgcgttcgcccacgcgtccggagcggattcggatactaactccgagcgccggccgcgcatggctgctgatgctgctactacttcgcctcctcctatataagatcgcattgcaatgggggatacagaaccactgtgctgctgacgatcatgaacatctatcctcatacatacatgcatacgcatggcgcgatgaggaatcctgcctga

SEQ ID NO: 171226 - DNA, 410 bp, Zea mays
  Clone ID: MRT4577_87740C.1
gagagtgttgtgagagagagagagagagagaacctggggaaggctgtgtctccttcctcctcgccgatgagccaggtgagctgctctagcaatgagggcaaagaagttgacttgcaaatgctactaaatgggcgaattagcagtcagttaatgtagcagcatagactctactgatacaagagaaaatgagcgtgtatgctttgaaaagtccgaagggaccattgtttcctttgcgatcaattcttgtcttcttaattgcattatatgggttctacgtctgctacttcttctttaatcaaattgatttagaaaataaagaaaatttgatcagtggagaagaacaaataagaactctttgcagaagacatacaatttcaaatgagctgatgcaatatgtgcactttccaaaa

SEQ ID NO: 171227 - DNA, 351 bp, Zea mays
  Clone ID: MRT4577_87741C.1
cgggcacttccagccgccctctgcgcccagcagcagagcacaccatcctctcaactcggatccccaagccctcgcctccatctcttgccacggcatccatcccctgctcggacctccacccggtcgcgtcctcgccggaggccagcgccgctgcatcgcccttgctagcgaggggcttggcaccgccaccccgcgcgccccagtcaagcttggccatcctgtgctctacccctagatgcacaccgtcaggaagtatttccagcagcccgaagacgagctacaggctcgcgccatcacctggccggaacacctggcagatccaagggctacgcatgtgctacgcccccggga

SEQ ID NO: 171228 - DNA, 259 bp, Zea mays
  Clone ID: MRT4577_87742C.1
cttcgcgtccggagtttttgcctcatattttttttcgttgggggaaaccgacagcccttactggattatttgggcgctctttaaacaagagtgcttcaggggatcccgtgggggtttctttaaaaaggatccttccccccaaatcacaagatacacatttgcgggtggaaactttacaaaaagttgattttttattacgggggattttatcaattttttcatgccccattcgccgacaacattgtttttttttttcccc

SEQ ID NO: 171229 - DNA, 817 bp, Zea mays
  Clone ID: MRT4577_87743C.1
agctttctagggaatccgaagctgtgcggctttatgatcggtcgtcgatgcggttcagccgatgtgcctctggtatccacaggaggaagaaataagaaggccattctcgcaattgcatttggtgtgttctttgcaatgattgccattcttttgttgctgtggcgtctccttgtctccatcaggataaatcgtttaacggcccaaggtagaagggaggacaacggatatcttgaaacaagcacattcaactccagctcggagcatggagtgatcatggtgccacaaggaaagggaaatgaaaacaagctcacgttctctaacattgtaaaagccacaaataacttcaacaaggaaaacatcattgggtgtggtggttatggtctagtctacaaggctgaactacctgatggctgcaagcttgctatcaagaagctcaatgatgaaatgtgcttgatggaaagggagttcactgcagaggttgaagcactgtccatggcacagcacgaccatcttgtgccactgtgggggtactgcatccaggggaactcgaggttcctcatatactcctacatggagaatggcagcctggatgattggcttcacaacagggatgatgatgccagcacatttcttgactggccgacgaggcttaggattgcgcaaggagcaagccgtggcctttcttatatccataatgactgcaaacctcacattgtgcaccgtgacatcaaatgcagcaacatcctgctagacaaagaattaaaagcttacgttgcagactttggactgtcagggttgatcctttcccaacaaaccc

SEQ ID NO: 171230 - DNA, 1153 bp, Zea mays
  Clone ID: MRT4577_87744C.1
ctcgcttgcattgacattgacatggaggagacacagaggtttgctgattccgttgctggtttggccctcgagagggagacaaaaacaaatttcagccgatttcaggagtggttggaagcaaataaagactaccaagctatagtcgatggtgcgaatattgcactatatcaacaaaattttgcggagggcggtttcagtttgacccagctggatggcgttataacagagcttcgggatagatatcatggaaaatggccacttgtcatactacacaataagcgaatttccaagcttatggaaaattcgtctaataggcatttgattgagacctggagaacaaatggggctttgtatacttcaccaagtgggtcaaatgatgactggtattggctatatgcagcgatcaaactaaattgtttgcttgtgactaatgatgaaatgagagatcacatattcgagcttctagggccgtctttttttccaaagtggaagcaacgccatcgggtaaagtacacctttaataaaggaaaagcggtgcttgtgatgccacccccttactcttcagaacttcaagagtcggagatgggatcttggcacattccaattgaagagaagtctgggaatgagagaggcaggatttggctttgtattggcaggggaggttcctgcaaagaacatggcgaagttccttcgactaatggagctgtccacaaagttcctcaaactgaggcatctaacgtggtgcagcaggggctgacagaaaataaggatgaatcgataactggtaaaagaaaggatagagattgatcaccttcacctatccaggagcagcatctgctcgggagtctgccatcttgtgagcgattgtggccacttgttgttgattcagctgaggtatttcaagaatagggatgcagcgataatgccatcccagatatgcaggatgtgataattattaattactttcgctgggttgcagactttcattcttcacaaattgggtgtgatcttagacgatttttctgtgctatgtatctgactgcatccatgatcatctagtgttaaccccagaataccagctaatgaactttttttattaccatcaaactgaggcacatttgcaagtgcgaaaaaaaaaaaaaaaaaagcggcc

SEQ ID NO: 171231 - DNA, 414 bp, Zea mays
  unsure (1)..(414): unsure at all n locations
  Clone ID: MRT4577_87745C.1
aatggctaccaaanatattatcgccggcgtgtgcggcttcttgcgccctttttgcgagcgccaacnnaaatgcgtcctattattgtccacaaatgtctcacttttgctgcgctagttccgattattcccacagtttctcttcctcaccagttaccttcaatgttccttgctttcgacccagggtgttgcaagctcttataggctacaacatagcgattgcgtgtgtagcgttttacaacatnccaattgtcccaattgctaacaaccaatccttggcacattctaacaatactaaaccatctgcatcgcaatcagctacaacatgttcctaccatctactgagccaccctagccatggtgtaaccctgtgcgtctactttgcaacagcagcttgcttgtcntccaacccacttg

SEQ ID NO: 171232 - DNA, 389 bp, Zea mays
  Clone ID: MRT4577_87746C.1
gcggcattgaaatgatgtgcatatgatatgaattgatacatatccttggttgaagtccagatcattcaaatgggatgctcaagcaagaactcctgagcctgcagaacttcccaaaaaatattgggggaagaaaaaggagaagttttcctggagatgaatctcacaaggagatggaatcattgctacaaacgatgactcttgtgaacagagagtgctgcatatatatcttaatgtgtagatctaagccttcaagtatgagcacatgtacatgctcatgtacattcgattgttagatgcaatagtatactatcaatgtgaaatgtaaatccaaatgcttcagcaggtcatgaccaagctaatgatctaactagggatggacatcttgactc

SEQ ID NO: 171233 - DNA, 460 bp, Zea mays
  Clone ID: MRT4577_87747C.1
gcaaaaattgtctcatgatggttgcaagatagtttgctttgttggttgttactccttttgttctaaactataagatattttgttttttagatacaatagtttttctaaatatataggagagataatatatatttaaatgtatagcaaaattatatagttaaaatgaaaatatgttatctatactatacttaaagcaccagtttcaacggtcgtcatgcgtcatctttttacaaataaccctcacaactatttcaaattaatccgttgcacacctataaatggccaaacagtggctcggcacgggccagatgcacgcggaccacaactatggcttaggcacgtcatgccggcctactgactgtgccgggccagcccatcggcccatttgattaaatcagcataaaatgttaaaaaatgatgcaggaggtgggttcgccctaatgaaagaaggggcggagaa

SEQ ID NO: 171234 - DNA, 397 bp, Zea mays
  Clone ID: MRT4577_87748C.1
ggatactctcttacttattttcagttaaagttcatgttaagctttcttgattcaactcagtgcatgtgatgtttcaacttgttttgcgtagccttgaatgtctatttttattagtatgttaagaacgtgattttatattgattttcatgtgtcaacaaggtcaataagatttctcatagccttagcgtgctgggatttttgaatggttatgtgctattatattagcattgcgaagttcactgactattgactgtgtgtaacatatataggcacgttcaagcttaccttgcagtttacagaagattacccaaacaagccaccaactgttcggttcgtctctaggatgtttcatccaaacatatatgctgatggaagcatctgcttggatatcctacag

SEQ ID NO: 171235 - DNA, 484 bp, Zea mays
  Clone ID: MRT4577_87749C.1
aaacgcaagtccgtgtgaattcaacaagaattgtcaacctcaaaacatagcaacaaagaaactgcttaacacaaacacggatgatattcatagcacggcagctttccagcaaagctcatgcaattcacccagaggggcctactgaagcaccgacaccaacattttgtaggagcaacgttgcccatgcctgaacttacctactgtacactggacacgtgaccatagcacactctgcgttaagttccatacaggcaatcaatcgggcccaggaataacgtggctctcaattcgataacagatgtagacggtaccttcactactaactaaccttagaattatccaatcgatgccgtacacgccttgactaggctatggagcaactgaaatccctacgctccttgtgaacactgtgtgcagccagaacatactgtggaagatcaacttgattaatctacacaggacaattcttattgactgcagattc

SEQ ID NO: 171236 - DNA, 402 bp, Zea mays
  Clone ID: MRT4577_8774C.1
gtctattcgccgaggacagcatatttcatgtcgggcgctctcggaacttctgaccgtctgtcatggtttccgactgtatctgtccgagagatgtatgtattagtcgcggttgtgcacgagtcagtgagggaggacgacgaggagagccgtggttatcgtatcgctaacgagggctctacggttgtgcaagatagagggggaggaggtgacggggatacagccctcgtgcgtgcggtccacatgggaaacgtcttgagtgctaattacggggagggctcctgcaaggcatgctgctctgagggccgggataccaaactgtgttgaccgcaccagtgcaacaaagacggcgcatctggcatgaaagctactatgtttgcagcacaggcaattgaattgggcatc

SEQ ID NO: 171237 - DNA, 2481 bp, Zea mays
  Clone ID: MRT4577_87750C.1
ttttgtgttccgctgcttgcaagacttcgttcttagttttttttattgttatgaatataaaattaattaggaaagaaatggcttcaatggcggagctaggtggtggtcagcagtggccaggcccttgctactaccatactgcaccatatttttttgctacattgattatgtgacacagtccttgccaaagtggctggttctgtcttgttgcataccttgttgctatgtatagtactatgtgctgagctactgaagccccctttctgattcccttgaccatttgttacttcacttgttttcctgaccctaccaaagccagtctgatcaagctactgcctagccaaggaagcttctatcccctggttaggtgatgcttcctttcctcaactctgttaggctattgccacacccagtcagtaatttagttcccatataagcttacattgactaaatgtactttgtaaatctcacaagggtaatcataactaaactaaaaggtaaatttgagcaattcagatagagtgaaaaagtggcgatatgatgccagttggcatcctttttattatctatagtatgaaatatcctcattgtaggactgataatttaagtgctgagatatcttctgtgtctcatttccaaatgttattttccatagaaaaggtacatgacaaaattattattattattatgaggaaatgctgttttgggtctgattaacaaggaataatgtgaccgtggaatgaatctttcagatatgatcatcacactccagatggaactggttattttctttttttcccaacataaacggacgtagcaactatattcagtcactgggttgcacttagtgcctaattgttgattaattaggataggtgcctttttgcgctgcttagggccatttcttaaagatctgaatggagttgtggttagtgtattgctggtacaaatgaatagtgctaaatgttctagcatttatggttcaaacgacatactgaaatgaatcttcagatatgagcatccactccagacgaaactcattatttttttatgccaacatcaacgaacatagcaactatattcatttaccaagatttttcttggttcatgatgcagtgttttatgagaatgcatggcctccatttatttttgagaactaggagttttttgtggtttaatcagtttctgatcctatacaggcgaaactagagccactttaccagatcaggtttggtactgatcattctagatcgagcgatatttatttcctggttaagttgcatggttaaacacttaaacctctaatctggtatttgtagatgttcgccaccaactttagtcatttcatggctacaaggaatcaactttaacctcgtattgtttatatgcaatatagtctagcataatttaatgtcttattaatttatcctgtctctctttgctacagcaatctggccttgttactttattatatgaaagcatattgtacctgggaattgtttgtacatcccttggttgctgtgtcatatggtcagaaccattcgcaatgggacatacatgattaatcaaacatgaatttaagggatagtcctcagaagtcatgaaagctgttttttgtactgggatactctcttacttattttcagttaagttcatgttaagctttcttgattcaactcagtgcatgactgcatgtgatgtttcacttgttttgtgtagccttgaaacatgtggggaacattttgaatgtgtgctgaaaaggctatgtctatttttattagtatgttaagatcgtgattttatattgattttcatgtgtcaacaaggtcaataagatttctcctagccttagcgtgctgggggttttgaatggttatgtgctattatgttagcattgtgaagttcactgactattgactgtgtaacatctataggcacgttcaagcttaccttgcagtttacagaagattacccaaacaagccaccaactgttcggtttgtctctaggatgtttcatccaaacatatatgctgatggaagcatctgcttggatatcctacagaaccagtggagtcctatatatgatgttgctgcaatcttgacttctattcagtccctgctgtgtgatccaaacccgaactcccctgcaaactcagaagccgcaagactgttcagcgagaacaagcgggagtacaaccgcaaagtccgcgagattgtggagcagagctggacagccgactagtgcaggaggaggatgctcatcgtgcccgaaagggcacaataaggaaccatgaaaaaccatccttgtgtttgtggttcgccagacctgtcgaaacattgaagaactctagttctagtctgtcgttgtcatggttttggtctgatccagagcaccggttgctcatggtggtggctgtcgtaatgtagcggttgttgttgacctatatcttctcaagatttaaaatgatcctgcttgtgtac

SEQ ID NO: 171238 - DNA, 673 bp, Zea mays
  Clone ID: MRT4577_87751C.1
agtctaatctcccgcgggcgggcagataacggctcgcggtacggaaagggcgagagagggggagcggagagcaccagtccaccgagaggcgcggagcaggagggcacacatggaactggaggaggcggtgccgccggccgcgatggtgggggaggacaacgcggcggcgccgacccaagactttgggctccccgctgagctgatagccgtgctgccatcggacccgttcgctcagctggacgtagcgcgcaagatcacctccatcgcgctctcgcaccgcctcggcctcctcgaggccgaagcagcgcgcctgcgctcgcagctcgccgaacgcgacgccgaggccgaggacctccgggagcacgtcgagcagctcgacgccgcgctcgccgtcgccaccggccgcctccgccacgccgaggaggaaaaggacgcactgcagcgggacaactctgagctgtccaacaccgttaggaagttgaacagagatgtcgccaagttggaagttttcaagaagacacttgtgcagtcactccaggaagatgacagcagtgataatactgctcccagggaaagagctgcagcagcttcaaatttctcctctgcaccatcagatgaagattctgcattttcgacttcaaatcatcacaagtttcagaaaccgcaagttcag

SEQ ID NO: 171239 - DNA, 1447 bp, Zea mays
  Clone ID: MRT4577_87752C.1
tgaaaactaggagttttttgtggtttaatcagtttctgatcctatacaggcgaaactagagccactttaccagatcaggtttggtactgatcattctagatcgagtgatattaatttcctggttgagttgcatggttaaacctctaatctggagtttgtagatgttcgccacctactttagtcatttcatggctacaaggaatcaactttaacctcgtattgtttatatgcaagatagtctagcgtaatttaatgtcttattaatttatcctgtctctctagtctctatgctacagcaatctggccttgttactttattttatgaaagcatattgtacctgggaattgtttgtacatccctttgttgctgggtcatatgggtcagaaccattcgcaatgggacatacatgattaatcaaacatgaatttcatggatagtcctcagaagttatgaaagctgtttttttttgtactgggatactctcttgcttattttcagttaatttcatgttaagctttcttgattcaactcagtgcatgtgatgtttcacttgttttgcgtaaccttggaacatgtggggaacattttgaatgtgtgctgaaaaggctatgtctatttttattagtatgttaagaacgtgattttatattgattttcatgtgtcaacaaggtcaataagatttctcatagccttagcgtgctgggatttttgaatggttatgtgctattatgttagcattgcgaagttcactgactattgactgtgtgtaacatctataggcacgttcaagcttaccttgcagtttacagaagattacccaaacaagccaccaactgttcggttcgtctctaggatgtttcatccaaacatatatgctgatggaagcatctgcttggatatcctacagaaccagtggagtcctatatatgatgttgctgcaatcttgacttctattcagtccctgctgtgtgatccaaacccgaactcccctgcaaactcagaagccgcaagactgttcagcgagaacaagcgggagtacaaccgcaaagtccgcgagattgtggagcagagctggacagccgactagtgcaggaggatgctcatcgtgcccgaaagggcacaataaggaaccatgaaaaaacatccttgtgtttgtggttcgccagacctgtcgaaacattgaagaactctagttcaagtctgtcgttgtcatggttttagtctgatccagagcaccggttgctcatggtggtggctgtcgtaatgtagcggctgttgttgacctatatcttctcaagatttaaaatgatcctgcttgtgtacaaaaactatagcgtgggaatggttgttcgatggaccgatggaaccatgttcttgcttgcattgaggtttcacaaagtctatcaaaaaaaaaaaaaaaaaaaaaaaaaaaaactcgagcccgg

SEQ ID NO: 171240 - DNA, 201 bp, Zea mays
  Clone ID: MRT4577_87753C.1
aaactaactacctccttcccccccgtcccctctaaatccaaaatggtcactcagggaataggtaacacagcccctgccccccctgggggaggggggccccactaattaccaatacatgccccacaaaggccaaacttggcaggtcgcccggcggctatccaggcaacaaggatctttaagggggggaccccacccgaccaa

SEQ ID NO: 171241 - DNA, 342 bp, Zea mays
  Clone ID: MRT4577_87754C.1
ttctttatgcttattttttttttcgtgcccgtgctctcaaccctattcctctttcccccttcgcaggaaaaaggaagacgagggagccttttggagaaacaagtgagaacgagccccatttctccttggagacgggcgcaccgagtcccacgggcatccggccccttttcaccctaggccctttgaaaacgacctgcatggaatgtttaaagccttggaaccccgtttctaaacaaagcccgcgagcgcaaattgacctcctaggggtaccaaaacgaagaccaaagctctgcggctttttgtcaccaaacgacgttctcccaagccctggggatcagaccc

SEQ ID NO: 171242 - DNA, 587 bp, Zea mays
  Clone ID: MRT4577_87755C.1
ccgggtgttagtttttggttgtttcagtgttgcgaacatttatttgatgataccttccgcacataattttggattttacttataatttatctaagaaattagcaattatgatagatagaattgggtagctttcctctatcaagcatcaacagtagagatatcttcctttcgtgaaaattttacgattagggcaaaggctggtccacattagcaattccggttccactttatttctttccaaaaaataaagcatttgtctaatattggtgccactaaaatgcattttggtataattttactggttgcaggtgtttcttccataagaagactaccgacatgggatacgtctcttcagtttgtttgtcaatattttgtaggaatcagaagaggtgttcaacatgtgggttaattttgttttcaagtgtgctcctctaatgacacccttttcttttttggagtaccttttgataataacaaatttgggttctatttttgtttctagactcaagtctagagttccatgaattaaaatattggtttatttgttgtggccacctatggtctccttaaaaaaaaaaaaaaaaaaa

SEQ ID NO: 171243 - DNA, 402 bp, Zea mays
  Clone ID: MRT4577_87756C.1
agcacgcgtgagagtacagagaggtaccaacagtgtcaggcaaaaaagctcgttggcttatgcttctaggcctaaaaacaagtgatgctaccgaaactatgcaaggacactgctcacaagctgctataactaggcttattcaaagatacctctcacgaggctggtagcctatgagtgcaagcacaattgttaaacactgcactatccatcaagaaatccaaacagggatcgtaccactacaacccttgctatttcaacaaccgaaagggatattacatgaccatcctgtggatcatgtggtggcacataacatcaagggacaacatctacaacatcttgtgctagcacaccttgctgcatactctcagcaacatcagtttttttcattcaaccaactggctg

SEQ ID NO: 171244 - DNA, 162 bp, Zea mays
  Clone ID: MRT4577_87757C.1
ccttaacaaaaagaaattcttgccggattcaggaaacaaaaaacatatgtccctgttccaaacggacaaaaacaaatttaggataataccccccacccttttttcctgagtgggtgaaaccaacccccctctctttttataaatgaaaaagaccagaccctt

SEQ ID NO: 171245 - DNA, 1143 bp, Zea mays
  Clone ID: MRT4577_87758C.1
cttcctcggcctcttcttcatggccggttcaattctcttgatctttcttacactactcgcgggctcgcgcaacaccaccccgcttaacgaagtctacttcctccaggccgatactggtaatatccctggcgcgccgtctacttcacggtggacattctggaatctctgtggggtgaccgatggaggtaggaacgactgcggtagctcacacccagcgttccccttggaccctccaagccatcgcaactttgatacgaccgaaaatgtgccatcgcaattcattggaacaaaccactacttcttgatgactcgttttatgtttcccttcatcattattggtctattcttcgccgtggtctctcttttcactggtctgctagctatgtgcactcgtatcggcagctacctttctggatttgtggcctggctcgccctgaccttccaggtcatcactacttgtctcatgactgctgtcttcgtgcaagcccgccacgcctttaacagcaacggccaaaactccaagctcggtgtcaaggctttcgcttttatgtggactgccagtgcctgtctattcctttcttgcctgatgtactgccttggtggcgcagtcggccgtaaggatgacggttacagtggtcgcaaggagcgccgccgcggtttcttcaattcggctcgatccaacagtgtgcgaagccagaagaaggaatcctacgcttaaaggagatatgatcatatgatctcaccccaactccctcggctctccgtatcacgaaaaagcaaagcaaagaatcgacggatacaggactgacagctaggctcacgttgacaaccttccatctattcaacgtctccgcttttcgcctcgtacacgattgttccactgcgttgatatcctgctgggtgctcttattcgtcgggttatccctctcagcttgtcttggtcttattgattatgcccttcagtgattcccgattatctggagtctcgcctcgcccacctttacgttccttaatgctgttacgaaaatctacgatcgttactgtaatatctattgatgttggtgaattgatgcgcatgccagtgcggcaatgacgttatcagcttgatgattcttttggtcagtgaatccatggatggttgac

SEQ ID NO: 171246 - DNA, 572 bp, Zea mays
  Clone ID: MRT4577_87759C.1
gccggccgggccgggatatcctctccggcctcacccatggatcatccactcctctcgcccgcgcttgattgttcgctgcttctccctgtagggaactccggtacccggccccgggtgtgcgcggcgtcagcacgccccgcgacgcaggagggcgaggctgctgagcgtgaggggcgagcaggccagccaagggcgccgccgggatgaacctgtggctgacccccggggggttgctggccttccccggagggccgcccgtgatcctgatcaccgggaacggagcgcttccgaatgcggcattgaccgcgccggcgtcgactgtgaagctggcgctcaccggcgagttccttgccctcacccacttcctcatcttcctatccgtacacgcgaaactgcatgggtgaattgtcatagctcccgagaagacatgtctctaactgacagatgcttgagctgcgtatgtctatgctgatgtagatgccttgccttaacacgaagctgatgagtaactcagggcgaccacgataattattattattttttaccaattgagcttacaggactctctcctt

SEQ ID NO: 171247 - DNA, 312 bp, Zea mays
  unsure (1)..(312): unsure at all n locations
  Clone ID: MRT4577_8775C.1
cgggccgacccacgcggccgcgggcgcgngggggcgggnccgcagcccccttaggcgcaganccccaccggcgccgccggcggccaccgcgnngcnccccncggcagccaggaagacagaagcaccagggcngccgcgggagaggcncgncaagcagcaacannacggccagaacgggaccaagcacaccnaccagaaagggcgccccgacgcgancaccnccgncgccaacccccaagcacccgcngccnccagcaaggacaagaaggggcgnggagnnnacaacaagncncaaggggnngggaagaaaga

SEQ ID NO: 171248 - DNA, 207 bp, Zea mays
  unsure (1)..(207): unsure at all n locations
  Clone ID: MRT4577_87760C.1
gctggatctgaatagcgtacagcganaacctgtttttttagttttttctttgcaatcgatgatgcatatattgcaggttgttgcatacattcaaatgagaactttgcatgccgaacaggagaacggttccatgtgaacggcacttgcacatggctaagccgatcctaagggacgggggaaacccggcagatagcgcgatcacgcgcg

SEQ ID NO: 171249 - DNA, 1212 bp, Zea mays
  Clone ID: MRT4577_87761C.1
gcatgctcgtggacatttgggaagctatactattgacagctttggatcgtgtgaaaactgttgtcggcttgtcgctgaaggtgtccgggagatttggttgagtagccagtagcgaagataccggtgcttatggacaggatatcggtacaatcttccaaatttgttaaacacgattgttgcggagcatcctgttgaccgaagcacattgctccgcataggcatgacaaatccacctttcatactagagcatctgaaggagatatctgccgttttgcgtcacccctgggtttattcgttcctccatgttcctctgcaatctggaagtgatgctgttttaacggcgatgagtggtgaatacactgttggcaagttcagaaaggtagttgatgctttgtgtgagcttgtccctggaatgcaaattgctacagatattatctgcggctttcctggttagctaaacaagttcacggcttagcatttcattcttagttatcatttatgagtacatctgaacgacattgtcttaactgaatgccccaaaagacgttgctgctaatagtttgcactaaactgacatcccattttgaggtgagactgatgaggatttctctgagactgttaacctcgtaaagcaatatcaactccctcaatacacaacgttccgtaaatctacaagttttggttgttgacattcttttcctacatgtacatcgacaacgtggtttttctagggacgccctgctgctaggatgaagaaggtatcgagcaatgaagtgaaaaaagcggagtcgtgaactgacttcagttttcgaatcattgtcaccgtaccaaggaatggtaggcaaagtagagaggatctggatcactgagatcgcgaccggtggtgttcgcttggttgggcataccaagggatacatccaggtgctggtaattgcccctgatagcatgttaggagcgtcagcaaatgtgaaggttacatctgttcggcgacgtctttggtgaagtggtggaagaaggatctgttgcggcaggagaagcaccgaagcgaactagcgcgacttgtagtggtggttcttgagcgagcgtgtcgatggtcgattttggcggtttgttttgtttactcggtctgttctgtatggcgttgcaaaattgtgctactgtacaaatacatggttgcgaacaggttaacgcggagtcttctgatgctgcgtc

SEQ ID NO: 171250 - DNA, 374 bp, Zea mays
  Clone ID: MRT4577_87762C.1
atctgcacatattctggggatgctcttttatagctcacgcagagctgcgatatccctggtatatcggaaacgtactgatctcctgccataagatgccacagactgctcctcaaacagatgcctatggcgcttatatttcaacatactctattcaggcctatacaggaaggaaggaggccattgttggaagaggaccatatggttaggctgctgccgatcaactaaataaaatgagccactttgtaactagagtcgaacgagcagaaagaatgggacgcttaatgatctataggggtgccaaacatgaagacagaacaatattagccggtgaccagcgcccgtgttacttaaatggtctgaagaaggtgtaacat

SEQ ID NO: 171251 - DNA, 314 bp, Zea mays
  unsure (1)..(314): unsure at all n locations
  Clone ID: MRT4577_87763C.1
acgcggacgcgtgggcggacgcgtgggcggacgcgtaggtggcttctactacccctgcggggcggaatcggattcgtgagggtctacagaattcggntacgaacaagggcggatcgagaaggcggggtcagatgacaagtaccgctacttccactacagacacggctgtgacatgaacgaccactcgcttcacaacgccttgaaaaaatacggaaagggccaagagttcaaaagaatcctagatcggcagacgcagagatcacgcagattaggtttaatgaccttattcacggaggaagcgatgcggaacgcca

SEQ ID NO: 171252 - DNA, 417 bp, Zea mays
  Clone ID: MRT4577_87764C.1
gggggaaaaccgccaacggaaaggggcgggggggggaaaaaaaggcccccgggcgggccttggggggggaaaaacaggatccgaggaccgccataaaaaaaaaaaaaaaagggccacccctggtaaaagggtcgttttttcccggagggggaaataaaaaaaaacacccccaaaagggttaaaaaaccggggaaaaacgggtttaaccccggggggggggaaaaggggggccttgggaacaaccttggaaaaaacaacctggttgggggacaccttctcccccaaaacctgcttaaagaaaaaaagggatatggtccccccctcctaaagggccaaatccttgttgtactgtcccggaaaggaactttaaactccttaaaaaccaaatccaattgccttggggttgaattgcaaaaa

SEQ ID NO: 171253 - DNA, 657 bp, Zea mays
  Clone ID: MRT4577_87765C.1
cttccccttcctcctcctcttcctcctccgattgggtggctgccattgctctccacagccaaccaagctcgagctcccatttcatcaccactctgctagcccgagtctccctcttgaccccccgtcggtttcaagtctcgcaatcctcgtcccagtctctttctccttccaataagaatttctttgggttgagggagctgctgttcttgctaggctaggctagatctgggggagaggctgggtcgttgttccgcttgaaatctctgggttttgttgcgctggaggttcttgctggccatggtttgtccaggcatgctgaggcgcaatctctgagctttatgaagatcgccactcacctgcgccggtgctgcttcctccagtccttctccgtcgtcttcctctactacttttatgtgatctcataattggccctctcaaatccgccgtcgctagcagtaaactattttctccttcttcttcttcttcttgcttccttttcctgcgtcaacaagtgataaataagaaccgtagcagcatcatcatcatcagcagcagtagtagccaagtagtagtgattccggtgccaagatgtcgtcgtcgtcgctgtcgccgggaggcggaaggctgtcgggctcggacggcgactcgggggcgacg

SEQ ID NO: 171254 - DNA, 325 bp, Zea mays
  unsure (1)..(325): unsure at all n locations
  Clone ID: MRT4577_87766C.1
ggccggcttaggatagcccggatggttaggggaagcgccgttgttacgcggaagcagtctagatatggtggccagaacgagtctgttgtccacaagagggccgagaccaccatgactatcgtgttgaagctgcagcgccagagctgcatgcagtagtcacagcgcgcatttatgaggtgcaagcatnttgagactgatggagactataatggcacgggaacatatgtgttctgagtttcccatcggtcatctagatgctcgatcgaaggctgtggtgtactactagtgtacatactcgtcaaatttcaatgtgactagttattat

SEQ ID NO: 171255 - DNA, 316 bp, Zea mays
  Clone ID: MRT4577_87767C.1
cgagctcctccctcccccccgacccacgccacgccgccgccaataacgaccaactcacgtgccctatccttctccttctcccccctttcgttcgtctcctaaaccgccgccagcatggacgccaggaagaggtcgccgcccgccccctcggccgccggagccgcgccgcccgcggccaacggatacttcaggtgcggcttctgcgcaccggcgacgcctgcgccaccgtttcgtgcgcccgagctgcattactgagtgagaggggaggaaaggggagacgagccggacaaggagggcctttttttttttttcaccc

SEQ ID NO: 171256 - DNA, 310 bp, Zea mays
  unsure (1)..(310): unsure at all n locations
  Clone ID: MRT4577_87768C.1
gggggacgggtgtcgtggtggtgctctgcggcggggccggggctngcttccttgaagagggggtgttggcgggtgtttctacatccttgcggggggcgaggcccttctaagagacggggggtggatctatcactctcctgagtggcccggcgcgtcggtcggtccagtcctgcctagcccacctatttatgggggggacatgtatttttttttgnncgcgcagtccgcccacctagttcgtcttggttggtttgttgggtgggcctcccccgcccttctgcacgttcttctgtggttgtgcggtcctggg

SEQ ID NO: 171257 - DNA, 230 bp, Zea mays
  Clone ID: MRT4577_87769C.1
tcgtccactcgtatggccactcatgcggagatttataataaacacgcacgaagtctctcgtggggtaagcattgtactgaatgttctcacttaacgcacctttgaatgtatatctgcacatctttcatagtgtgcacactataatcaagcaagacatcattatcttctgaggttttacatttaatttcagaattacttgaacaatactcacaccatatcacatatcatag

SEQ ID NO: 171258 - DNA, 404 bp, Zea mays
  Clone ID: MRT4577_8776C.1
attcggctggagcgacgtggcgcgttctttctccgtgcccgccgagctctactggatccagccggccagcgttctcgccgtgtacctccacttgttccgggccacggacggcgtggaccgggccatcgccgcggcgggcggctacccgtgggcgaccattcggctgccgggcctgccgccgctccgagtgccgacctgacggcgttcatcgagtaggcccgcgagaactacctctactcgttcgtcgacgacgcgtaccacgagctcgtgcagacgctggcccgctaggacaagcccagcgcgctcggcaacacgttcgacgctacggagcccgaggcgggggcgccattgctggaggctggcatggacgtggtccccgacggccccggcgcttcctctctcga

SEQ ID NO: 171259 - DNA, 1121 bp, Zea mays
  Clone ID: MRT4577_87770C.1
gcaacatagagaaaacaactatattgaagaaaataccacagttcaaaatggtcgtgcaactttgcacttcggaaagcatctctaacgtcaagtgcaaacacaacgcaataatccagttcctcttctatttggatcgatttgcaggtatctatttggatatggtccaggtatgtgaagcacaagtgcctcgaacaattgcaacttaaatatgccgcccagcggcccagccattcatctatgtctttcttcacgttgtgtcacttctggaactggatgctgtaagaaccagtgtttggatctttgacggctttgaaattgtcaacgctcattccgaagcgccccagcacggagttacccagatcttttagctttccaatcatttcttccttcatcttttccctcttctcagctgccaggggctcaagccggaaaagagaccttgtggcttgttgatttgaaggatccatttcaataacctttttcatatcggcaatagcttcatcatagtgttcgagcttttcgtgcgcttctgccctccgaagcagggctttcaggtacgatggattgagctcaagtgcttttgtgcattctttaaccgtctcatcatgctttcccaatttcaggaagcacacagcacgatttgaatggcatgctgcacgtatatcctcagaagattccagctcagcagcaatttgcaatgccatttcatacttagataatgcttcctcatattgtccggacccaaaaaatcttgtttccttctgcttttgcatcatttgcttggcttctagatttctctcgcagctgctcgtcggtgagcgcgtcctcgaaggcttcctcctcttctcccgccgccctcgacgcctccccgccaacagcggcggcggcggcggtgggcgcctcctcgggcgccgctgaagacgatgggcgcgccgcctccccaccggccgcggcagccgccttctcctccgatgccggcgacgaggggcgcgtcgcctcctcgggctccagctcgatcactaccatgacttccctcgctgggagaattggattcgcgaactcgctcgagaagtcctatcggactcggagacgtgcgtagagggggaaccctttagctattt

SEQ ID NO: 171260 - DNA, 1204 bp, Zea mays
  unsure (1)..(1204): unsure at all n locations
  Clone ID: MRT4577_87771C.1
gcaacactagagaaaacaactattattgaagaaaataccacagnttcaaaatgggtcgtgccaactttgcacttcgngaaagcatctcttaacgtcaagtgcaaacacaacgcaataatccagttcctcttctatttggatcgatttgcaggtatctatttggatatggtccaggtatgtgaagcacaagtgcctcgaacaattgcaacttaaatatgccgcccagcggcccagccattcatctatgtctttcttcacgttgtgtcacttctggaactggatgctgtaagaaccagtgtttggatctttgacggctttgaaattgtcaacgctcattccgaagcgccccagcacggagttacccagatcttttagctttcctgcaaaacaaacatgcatcgcaagaaaagccattttacaggagagatatctgcaacttttcacgatgagatcacaaggcaccaaaataatgctgtttttggtacttgcaaaaaaaagcagcacattaccaatcatttcttccttcatcttttccctcttctcagctgccaggggctcaagccggaaaagtagcaagtggcatgcagatgtgcaaggacaggttcaataacctttaaacagtactgattcatatcaggggattgaagtcgtggtagtaggccagtgacattaaggaataattatggcccataaatatgtactttttctctgcccaccaaagctatattccaatcagaaaaatggcttaccaatttcaggaagcacacagcacgatttgaatggcatgctgcacgtatatcctcagaagattccagctcagcagcaatttgcaatgccatttcatacttagataatgcttcctcatattgtccggacccaaaaaacttgtttccttctgcttttgcatcatttgcttggcttctagatttctctcgcagctgctcgtcggtgagcgcgtcctcgaaggcttcctcctcttctccggccgccctcgacgcctccccgccaacagcggcggcggcggcggtgggcgcctcctcgggcgccgctgaagacgatgggcgcgccgcctccccaccggccgcggcagccgccttctcctccgatgccggtgacgaggggcgcgtcgcctcctcgggctccagctcgatcactaccatgacttccctcgctgggagaattggattcgcngaactcgctcgag

SEQ ID NO: 171261 - DNA, 814 bp, Zea mays
  Clone ID: MRT4577_87772C.1
ctcgaggccggccggggccacggtgccaccgcatcgcacttgattgggccggggcgttgcgctctctggtctggtcaaggcgtcgagcgtccgtcctccaatggctggcgcggcggcggagcgcaaggcgatcagggtcctcctcgtcgaggacgaggagatccacagggttctggcgagggcgctgctgaggtcggcctgcggcggcgtggagctgcacgaggcggggaccggcgccgaggcggtacggcgcgtgcgggatggcggtgccgccgccgcctacgacctcatcatcaccgactggaagatgcccgtcatggacggccacgaggcgacgcggcagattagggcgatgggcgtcacgacgccgatcgtcgggctgtccagcgacaccctcccgccagacgtcgacgcgttcatcaaggccggggccgacgacttcacccccaagcctctgtccaaggagaagctcgtccgtatccttaccaagttccatctcgcttagctctctatttgctgtccaaggagaagttcatccgggtttttttttttggttgccaaattggcaaatacaatctccactttgctctatgtttgggtgcaaatctcaatgagtggataaataaagggtctcgaagaatcgggtgggctttcttccactatggaccttgggccttatatcagctcgtgttatccttctcgcatataattcacacccgctctgtaatctgtacgttggttggtattggcatcacatgacaacaaggccctctttgttaaaaaaaaaaaaataaaattttaaaataaaataaaa

SEQ ID NO: 171262 - DNA, 416 bp, Zea mays
  Clone ID: MRT4577_87773C.1
aacacgtaatttcaatttttaactttaacaagggacccaaggttggaccggtgtattttaaaaaaaacctgggaggagcacaagcagggcatatataggggggggtaaaacaatggaacatatatagcacccaacaggggtcactaagaaagcgcttgatctccttaagaccatgaaaaaaatagaggaatgcccaattaggggaaccaggcttgcaaaaggagaaaaccacggacacttagtccttcaggctctaaccaacaaaaaaaggaggggacctcagattgctaaggagaaacttggaagcaccctccacaccctttaaagaacatcatccgctttttctggctccaacacagtaccgatatccctgaggaatgggattatgtaaaagacaaatgatctcttggccaaaa

SEQ ID NO: 171263 - DNA, 632 bp, Zea mays
  unsure (1)..(632): unsure at all n locations
  Clone ID: MRT4577_87774C.1
gggcgctgctgaggtcgcccgtcggcggcgtggagctggacgaggcgaggactggcnccgaggcggtacggcgcgttcgggatggcggtgccgccggcgcctacgacctcatcatcaccgacgggaagatgcccgtcatggacggacgcgaggcgacgcggcagattagggccatgggcgtcacgacgccgatcgtcgggctgtccagcgacaccttcccgtcagacgtcgacgcgttcctcaaggccggggccgacgacttcacgcccaagccactgtccaaggagaagctcgtccgtattcttgccaaattcaatctcgcttagctctctgtttgctgtccaaggagaagctcatccgtattttcttgccaaattggcaaaatacaattcttgcttagctcttcgtttgggtgcaattttttttgaggggataaataaaggctctcgaagaagtattttgctctatgtttcggtgcaaatctcaatgagtggataaataaagggtcttgaaaaatacgggtggcgccttcctcccctatggaccctgggccttatatcagctagtgttatccttctcgcatataattcacacccgctctgtaatctgtacgttggttggtattggcatcc

SEQ ID NO: 171264 - DNA, 408 bp, Zea mays
  Clone ID: MRT4577_87775C.1
gggtacctcgaggccggccgcgactagcctacataaccaggccgtctggcggctcattttttcataccatgctgcctccgcgatgcctacttccaaagcgaatactaaatcctagcctcgtgcttctcgatgagggtgcgccgacaaggacccaaaggctgaccgcggtgatcaaagatgggggccagtctacgtctcatacgagcgcctccacaatctgctgctccgtggccaggacgcgcaaggaagagaacgaattctatggatgcatcgaggcgatccagtgcctgatgtaggtcgtcaagatcaaataggagtactctacagagaaacagaataacctcgtagctgcgaactcctcgagcgggcaggtaggacgccaagctgcatctagtggagtacccgctc

SEQ ID NO: 171265 - DNA, 168 bp, Zea mays
  Clone ID: MRT4577_87776C.1
ctcaacatatgagaaccacactccttgaatcgaagtgagtacaacttaacaacatgtgctaccaagatatacttcctccatgctctttttgtccttttagctagctcatcacattctaacatgatttcatagtgcttactagctcctagtgccattatttcacagttc

SEQ ID NO: 171266 - DNA, 208 bp, Zea mays
  Clone ID: MRT4577_87777C.1
catgtccacgctgatcgggcgctacacttgctcttgcaaataacggtggtcgtcggccgcggtctccgccctacccggcgaagaccggcgccgacgacctgccctcggaggcggcggctgggacatggacctggagcacgcccactcggccccttcgaccgaaggccgcaccggatgaagacacgcgcacccgcatggctctctcaaa

SEQ ID NO: 171267 - DNA, 5693 bp, Zea mays
  Clone ID: MRT4577_87778C.1
tgactagttctagattccgccacaccgcctctcacctctccagtccccacccccgcccccgtccgctccctatcctgttcgttcccctcctctccacacgatcccctcccttgtcggcttccgcgcgggcgggagtggccgcggccacgactccaccgcctcctgctcgcgccaccacccctcggcccctcgcggcgccgcgcgaccggcgcgtggtgcgcgtttgcctgcccgtcgtcggccccttcttattagttattattaggcggaggagaggctagctctgcggggggtcgccgcgcgccgccgaatcggatcacacgcctccccttcccgccaggccagggggccatggccacgctcccgcgcgccgcgccgcccacgcccgccgcgctgctcccgctgccccgcgccgcgccgccgctgctgctcgccgggagggccgccgccgcgcgccgctctcggctgcgcgcgcggggcccgtccgcggcggcgcgccggagctgggtcgtcgcctccgccgcttcctcctcctcacgggccgtggtcggcggcgtcgcccgccgggaggcccctcccgcgccgcagaagcccacgcagcaggctgcggacttgaaccatatcttgtctgaacgtggagcttgtggtgttggatttgtcgcaaacttgaaaaatatgtcttcatttgacattgttcgtgatgctcttatggctcttgggtgcatggagcatcgtggtggttgtggagcggacagtgactcaggtgatggtgcaggactgatgagtgccgttccatgggacttgtttgatgactgggccagcaagcaagggcttgctctctttgacagaagaaatacaggtgtaggcatggtcttccttccacaagatgagaagtcaatggaagaagccaaagctgcaactgaaaaggtttttgtggatgaaggccttgaggttcttggttggagacccgttccttttaatgtatcagttgtaggtcgcaatgcaaaagaaaccatgcctaatatacaacaaatatttgtgaaagttgcaaaagaagataatgctgatgacatagagagagaattatacatcagccgaaagctgatagagcgggctgcaaaatcttttagttgggcagatgaactttatttctgctctttatcaagcagaacgattgtctacaagggaatgctacgatctgaggttcttgggcaattctatttagaccttcagaatgaactgtataaatcaccttttgccatatatcatcgaagattcagtacaaatacaagtcctcgatggcctcttgctcaacctatgaggttacttggacacaacggagaaattaacacaatacaggggaacttgaactggatgcgatcaagggaaaccacactaaagtctcctgtatggcgaggtcgtgagcatgaaatttgcccgtttggtgaccctaaagcatctgattcagcgaatcttgacagtacagctgaattgctgctaagaagtggtaggagtcctgcagaagctcttatgattctcgtccctgaggcatataagaaccatccaacattatctataaaataccccgaggtaactgacttttatgactactacaaaggacaaatggaagcttgggatggacctgctttacttctatttagtgatgggaggactgtaggagcaactcttgataggaatggtctccgtccagcacgctattggagaacgtcagatgacttcgtttatgtcgcatctgaagttggtgttataccaatggatgagtcaaaagtagtaatgaaaggacgattaggtcctggaatgatgataactgttgatctacagactggacaggtgcttgaaaacacagaagtaaagaaaactgtggcttcagcgagcccctatgggacttggttgcaagaatgcacacgtttgataaagcctgtcaacttcctctcttcaactatcatggacaatgagactgttttgagacatcaacaggcatttggctattcaagtgaagatgtgcaaatggtgattgaatcaatggcttcacaaggaaaggaaccaacattttgtatgggcgatgacattccattagctgtattatcacaaagaccacatttgttatatgattatttcaagcagcggtttgcgcaggttacaaatcctgcaattgatccccttagagaaggtttagttatgtctcttgaggttaatattgggaaaagaggcaacatcttggaggttggccctgaaaatgctgatcaggttgcactatcaagccctgtgctgaatgaaggtgaactggaaactctattgaacgactcaaaacttaagcccaaagtactgtcaacatacttcgatattcgtaaaggtctagatggttcacttgataagacaattcaggctctttgtgaagaagctgatgctgctgtgcggagtggctctcaacttcttgttctttctgatcgttctgaagcacctgaacctactcgtcctgccataccaatacttctagctgttggcgccatccaccagcatttgattcagaatggtctccgtatgtctgcttctattgttgctgatactgctcagtgttttagcacacatcattttgcctgtctgatcggatatggtgccagtgctgtgtgtccttatctggcactagaaacatgccggcaatggaggctgagcaacaaaactcttaatttgatgcggaatgggaagatgcccacagtgaccatcgagcaggcacaaaggaactttatcaaggcagtaaaatcaggtctgctcaaaattctttcaaaaatgggtatctcactgctctcaagctattgtggagctcagatctttgaaatttatggtcttggtcaagaagttgttgatcttgccttctgtggaagtgtatcgaaaattggaggtctcacacttgatgagctgggtagggagaccttatcattctgggtgaaggcgttctctgaagatactgcaaagaggctagaaaactttggatttatccaatccagacctggaggtgaataccatgcaaataatcctgagatgtccaagctgttgcacaaagcaattcgcgagaaacgtgataatgcgtacactgtctaccaacaacatcttgcaagccgtcctgtcaatgttcttcgagatcttcttgaattgaaaagtgatcgtgcacctattcctattggcaaagtggagtctgcaacctccattgttgaacgtttttgtactggtggaatgtccctaggagccatttcaagggaaacgcatgaagctattgcaattgcaatgaatagaataggtgggaaatctaattcaggagaaggtggtgaggatccaatccgttggaatcccctcactgatgttgtagatggttattctccaacacttcctcatctcaagggtcttcagaatggtgacacagccacaagtgccattaagcaggttgcatctggacgttttggagttacaccaacattcttagtaaatgctgaccaaattgagataaagattgcgcaaggtgcaaagcctggtgaaggaggtcaacttcctgggaaaaaagtcagtgcatacattgctcgtctgaggaactccaaacctggagttcctctaatctccccgcctccacaccatgacatttattctatcgaggatcttgcacagttgatttatgacctccatcagataaatcctaaagctaaagtatctgtaaagcttgtgtctgaagctggaattggaactgtagcttctggagtttcaaaggcgaatgcagacataattcagatatcaggtcatgatggtggtactggagctagcccaatcagctccatcaaacatgctgggggtccgtgggaacttggtcttacagaaacaaatcagacacttatacaaaatggattgagagagagggtagtacttagggtggacggtggattcaggagtggtcaagatgttcttattgctgctgctatgggagctgatgaatatggctttggttctgtagccatgatagctactggatgtgtcatggcacggatttgtcacacaaataattgtccagttggagtggctagtcagagagaagagcttcgtgcaaggtttcctggtgttcctggtgatcttgttaactacttcctctttgttgccgaggaggttcgagctgcattagcccagttgggttatgagaagttggatgacatcattgggcgaacagatttgcttaaaccaaagcacatctcattggtgaaaacgcagcacattgatcttggatacctcctatcaaatgctggattgcctgaatggagcagctcccaaattaggagccaggacgtccacactaatggccctgttcttgatgagacaatccttgcagatcctgagatagctgatgctattgagaatgagaaggaagtttccaaggcatttcaaatctataatgttgacagagctgtctgtggtcgggtagcaggtgtgattgccaagaagtatggagacacaggttttgctggccagctcaacatcacgttcaatggaagtgcagggcagtcctttggttgtttcctgactcctggaatgaacattcggctagttggggaggccaatgattatgttggaaagggtatggctggtggagaactggtggtagttcctgtagacaaaacaggatttgttcctgaggatgctactatagttggaaacacttgtctgtatggagctacaggtggtcaggtatttgtgagaggcaaggcaggagaaagatttgctgttagaaactctctatgtcaggcagtggttgagggcaccggagatcattgctgtgagtacatgactggtggctgcgtagtcgtacttggcaaagctgggaggaatgttgcagctggaatgactggtggtcttgcctacattctagatgaggatgatacacttgtcccaaaggtcaacaaggaaatcgtcaaaatgcagagagtgaatgctccagctgggcagatgcagctaaagggcttgattgaggcctatgttgaaaaaacgggcagcgagaaaggtattgcgattttgagggaatgggaggcctatttgccgctcttctggcaactggtaccgcccagtgaagaagactcgcctgaggcttgtgcagagtttgagagagtacttgccaagcaagcaaccacccaattgtctgcgaagtgatcgaatcagactacaggaaggtggtaggtgttttctatttgacacaaagtgatctcatcttatcacttcaagaaaatcgaagaccataaccggcactctgaggcaccgaagtgcccgtctgaagactgcaactttgtggaggctctgcccaggccatctttttgagttgagctaacagaaccgagggttcttctcgacgctcgtgcacctaggtaacccctgtaaattggtttgctgacgctaggctgcaaggggcctgccctgtttgaactgctgtactgtacatgattcttggccgttgccctgtgtaattatgttttggttagctcgtaaatttatacgcatccaatggaggcatacaatgcaagtcgcaagcgcaatagtacggtgcatgataaactgtacggccaggttggattggaatgtttgcttcgtgaatgaacgaaaccggcgtcatgcctgtggtgtgaccgctcctctggttggcatcc

SEQ ID NO: 171268 - DNA, 271 bp, Zea mays
  unsure (1)..(271): unsure at all n locations
  Clone ID: MRT4577_87779C.1
aaaaaaatgtaaaaaaaaaaaaaaatgcgaaaaaaaaaaaaaaaaacaaaagttgaaaaatgcaaaggtaaaaaaccacgataaaaaaaacatactggactaaaaaaaaacactagtaaaaatcgagattgaggcacaacaaacttgcacacgtgataaggcccacgttaaaacctgacagtagcaaaaaggctcgttaaactaaatggtggacggaataaaagacgtcgtactcctacttgatgaccgccccgaaataaatnnnaatctt

SEQ ID NO: 171269 - DNA, 1195 bp, Zea mays
  Clone ID: MRT4577_8777C.1
tgaattcggcaaaaattattttcatctgtttaacaaaaatgaagctcgcaagatgcataataagtctaccgagtttgaaatgccgttggtgatacctgatagagagtatgaaatagaatcactgccactctatcaggaagttatggtcacgaggtcattatcatcagatggcaacttcagcgatgattttgctgcatccaggcaaacaaaaagcaagagtatgccatcagaagataattttggtgataattttgtttatacaaggaaagcaaaagggaataaacctgtgcatggaaagtctctagtccaagtatacacataccagatttcagaagctgatattttacaagtagcaacaatgatgggatttgatgatgaactagatgtaacagatgacattggagcagctgatgtgattcttgcatcgagttctgaaatgaagcagaatccttggattcataatgttgccaaataccacaagcttcccatatttgttgtcaagactaatacgatggctcaaatagttaaggctatcagaatgattgttggaagggacaacacatcatcaagtaagcaacctgaggttatggagggagagatagagattgaggatgatgctccgaaacgtaagccatctttggaggaaattgatgccttggaggaggctcgccttgcaatcgagtacatcgttattccaggtggggagccagttgagctcctcccaagatgttcagaaatagttgctcggcagctggagctcgtagagagctaccagctacttgctgaaacctttggaagtgactccaattctaggttacagattctccccatgaaaataaccaagaggggttctagtaaagacaatggagcatcaaagcccactaaacaaaccggatcagatttgatcgtcagtgagaatggtggtggctcaagtttttctcggctgccatttctgccaaagtgatcgtctagatcttctgatcaccactgtcgaaaatgtacatcattcctctctcttgttgttcattgtacaacattgtgcagtgttgtaaatagtgtgtcgaatgttgaagaagcgaaagagcaaaagctaactgcaattgccttccattcttttgctggaataaaatccgttcatttctggtgtcagccaggtcagctcacaagtcatccgcgacgccgtcacctataccga

SEQ ID NO: 171270 - DNA, 725 bp, Zea mays
  Clone ID: MRT4577_87780C.1
ctcgaggccggccgggttatctttctcgagttcatggcctatcaccgacgctctctgatgaccttggattttccactgattaggcagacattatcggatgctgcacaatttctctcactctctgactaccaggacctactgcgcttatatgcttattggaccaaactaaagcttatgctcgccaaacatctttctgcagatcatggagtctggcacaacgctatcaagaaaagcgaggctgcttttgaagatagccagccgcacattttaatggagatatacatggaccatgtacgtgaggcgacatccctttataagcgctgttatctccaaagatttgctgtgcctggatcatacgagatatgctatctcatgacataagatctgaagaggacaatggccccttgctatgattatgatcttgctgcaaagaagggtacccctcacctagagcaactcatgacattccagcctcatcaggatgctaaagttgaggcttaccctagcctccatgataattctaatgcaaatgattcctctcagaatagaaataccaagtaacaccactctgcacccccctgctaagaaaagaaaagagaatccaccgaaaactaccatgctatcagatgaccaaagtatcaatgtgcaaagtgatcaccagtcgctgctgttacttgatgtactaagtcggaggggccagcatgggagaaggtcatggcatctat

SEQ ID NO: 171271 - DNA, 590 bp, Zea mays
  Clone ID: MRT4577_87781C.1
gagtttttttttttttttttttttttttttttttttttttttttttttttttttttttttttttttttttttttttttttttttgggcccagggggcccggtggttttttttataaaaacgaacccccattttgggccggggcaactttaaacagaaaaacggggccaaaaaacccctttttaaaaacggggggggtcaacaattttggccccaaaaggaaacccgaaaaaaacccctgttttttttgccccgggaaaaaaaaaaaaaccttcaaatggaccccctattttttgggggggggttttaacggtttttttggccgaaaaaaaaaaatttttgggggggaaaaaagccttccccttttcttaaaaaaccctttttcttgggccaaaaggggggcctcccacccgaaaaaaaaagggacttttggggccacccggtggggaagaataaacaatccccttggttttcccacaacttttaaaagggcccccaaaaggggccacaaaaagggcctcccctttttcttgggaggccggtttttaaaaggcttccacacccggccctttgggggcccttcccccgccat

SEQ ID NO: 171272 - DNA, 284 bp, Zea mays
  Clone ID: MRT4577_87782C.1
cccacgcgtcagttccaagacacggagaaatgcccagatagatgtgttgatgagcgctgtgacccatgctacggtgccagacctttgcgagctgctataatgaggcttctgaaggatagtctggccaagaaaatcctgactgatgaggagaacgaaggagaatctgtcatcgctgatgagtattcacatggcaaggtaatagttactaatggtgagagcagtgttactgaacaactggaacctagtgtaactacctaaccgtggtcaaaatcatgatgggaccg

SEQ ID NO: 171273 - DNA, 349 bp, Zea mays
  Clone ID: MRT4577_87783C.1
accctaaaataaaaaagatctattatacacaaaattatacaaagatatgtgttaatgtataacatgacgccttgcttttttttaaggatggatgaaaatgagaaaaaaacttacaaaaaaacacaatttttttagaactaacgtaacaacaacttctgaaattttgccaaaactcagtatatttccttgaattgaccttaacacgcaggagaccaccttcaacagtcaaaaaacatttgggaggagttgacatgagcaccaataagtttgtttggagaaagagtgtgctacagtaggaacattctcagcacctttattgctgcttagagaccaaccatcacatgcaatc

SEQ ID NO: 171274 - DNA, 752 bp, Zea mays
  Clone ID: MRT4577_87784C.1
tgggaccctcgaggccggccgggcaagtcatccagacagagctggactcttttgtagaatttgctcctcattacttcaggcacttgacagaatcattgacttctagaagccctacttgcctggccaaaatattggggctttatcaggttagtatcaagaattcaaaaggtgggcgtgaggtgaagatggatctgatggtgatggagaacatactcttccaaagatcaatatctagggtgtatgatctgaagggttctgtgcgttcacgttataattctgatgcttctggtcacaacaaagttcttctagactctaatctcatagaagcactacatacaaagcctatttttttggggagtaaggcaaaacaaagattggaaagagctgtctggaatgatacatcatttcttgcgtctttggatgtcatggactactcccttttggtcggtgtcgacgaagagaaaaaagagctggtggttggcatcatcgatttcctgcggcagtacacctgggacaagcagctggagacatgggtgaaggcatcggggatcttagggggccccaagaatgagtctcccaccgtgatttctccaatccagtacaaaaagaggttcaggaaggccatgtcgaggtacttcctcgccgtccccgaccaatggacctcgaaaggcggttaatcttctcgctgttttagctgcatttttttgtcagcgaagcatcactcgttcatccttggcaaatttgagcgaagg

SEQ ID NO: 171275 - DNA, 377 bp, Zea mays
  Clone ID: MRT4577_87785C.1
gagagaggccacagcatcaacaggggtctgcgttgtataacgaaaacttatgctacaaggcttctgttgaagcgtcgctacctggtggacaacaagcacatgctctcaatctacaatcactacagcttcttccagaatacatatacaaatgaccagtctcaaaggggtgaaaatggacatgatgacacttgaatgatcacacacgttatacaaggacgatttatgaatattatagttaaaagttgtactacagcagaatgtggatatatcagcataacactgaatttgatccacacacacgaatcatgaggctaaactaactgcaacatcttgatctactgaaaatggcattatgatattatcaacatatagaactt

SEQ ID NO: 171276 - DNA, 966 bp, Zea mays
  Clone ID: MRT4577_87786C.1
ttgggaccctcgaggccggccggagtgagacgcgtggggacttggcaacgacagagagagagggaaagaagggagcagccaccggccagcgggacaacccaaccaacgcgatctctggggcaggcaaaggacgacgggtcggcgagaggcggggccatgaggatccggaagcgcacccctgccagggcagcgtcgccgggaccgccgcctctgcctcctcctcctcccctaccgctgcagcgtcccacggagaaaccacgggatgaggcggcggcggaggaggaggaggagaagcgggcggtcctcgccgccggagtccgagaaggcgacgaccgggttcgccccgccgccgccgccgctggctctgggaacagcagcgcaacggacgacgtgccgaggccggagccgcaggagcaggacgccgccaggtgcagccggaacgacgggaagcggtggcgctgcaagaaggcggccgtgccggggtacctgttctgcgaccgccacatcgcgtggtccacacgcaagcgcaagcccagagccagcaccaagcccaaggttcacggcagcggcgtcctggagcccaccgccatcgcccaggagttcgcggaggaccacggccccacgcagcgcgacgccgggttcctcggcggcttctagccccgctgccggaacttggcgggcgcagggcggcgctctacttaccgtggtctacctttttcctactctccaactgattgatgatagtagttctgcatcctgtgttgcgtcgatttttgctgccgtgctatgctcggatcgtgtcgcagttctcgtgtccatctggagggaaatgctgcgatgccttttttttcttttagggagaatccaggacctggtgcaaaagtagtagccagttcaactaaatatatggggcattgatcattggttcttgcgcctcgttcttctcgagctattttgctctcgtcc

SEQ ID NO: 171277 - DNA, 593 bp, Zea mays
  Clone ID: MRT4577_87787C.1
cccgggggccccgcgtggcgccggccagcccggcgcgcgcgtccgcgtccagcctcgactggtgccacggcaatgccgacaccgccgtccgcgacgccatcctctactgcaaaaagtgcagcgccgccggacaacaagacgcatagcacacgaccttgtcacgtgaagtcctccgagccgtccgtcgccctgtgccgtctcgtcaccgagctctttgtctgctcatcgtctgtccgacgtgatggcggtcatggcatcgccctgtgccatctctataccacacctcgcacaaagattacagcgtccgtgtatttgaactgccgcgtgaatggctcgtgatgtacagtttaaaatccaaagtttaaacattaatccgtagaaacgaaacggagtcggccttttctgcctcacgtactggtggtggtgggggagccggggagggaaggaacagtaagcagattgcggcagcgactgaaggcgtcattattccagaagaaatcctcggctctttatactgctgacctagcactcgtttagcacgttgtgcttggcgctctccgatgtgttaattgaattcgtttggtcggctcaac

SEQ ID NO: 171278 - DNA, 162 bp, Zea mays
  Clone ID: MRT4577_87788C.1
acaaaccaaacttttattttacctaactgcaccatcacaaaaggacagtttcattttcatccttacactggccatcttatccccaattcctactccaataaataacaacctctccaacttttaacacctacacaagctaactacatttcccctttcttttac

SEQ ID NO: 171279 - DNA, 479 bp, Zea mays
  Clone ID: MRT4577_87789C.1
ttgggaccctcgaggccggccggaataagatgtaatcgtagcaggcataaggtgtgtcgttgcgctgctatctcagcgtataaggcatggacatcacagcgttctttgcggtgaactcggccacgtcgagatccgcaaggttcttcttcgcttgtcactcctcggcatgagctgcggcgttctcaaacgggacggaggtaaggcagtttttctacttccagcgacagctacgtgcgcgagtccataccacttcggtgcgcgtaatggggactcatcgtaggcagcctggtctgcgacagtaccgtccacatgaagaatataaaggtcactcccccaacagaaatgggctttgagcgggggaacttatgggagtaccccattaatgtggaaggggcttttctcaatgtgatccgatgttgatgagtaccagaagggttttgggtgcatctggagatctggtactgcagatggaactccac

SEQ ID NO: 171280 - DNA, 176 bp, Zea mays
  Clone ID: MRT4577_8778C.1
aggatcgaggcaccggaacagggcgaaaagtaaaaaggaaaaggccaagcgaaaaggacctcgacatgtctgaagctatccgccgagcaaggaggagccctcgcggggagacacgggaggaaagacctgctcccacgcatgcttacctgcttgtttgttttatatcccgcccgacc

SEQ ID NO: 171281 - DNA, 337 bp, Zea mays
  Clone ID: MRT4577_87790C.1
caaaaacaagatcaacatttttcagcaaatcaaaggggtagccacaccaaagttgcccatcccgttttttttttttaaacttgggaccgggaccaagcccctttttttaaggggggggggacttaacggggggggtgatttatttaaaggcccttactaccaatttagggctttttatccttggggccctttggaattttggatgggcccttttcatcgaaaagggcataatacttttttagttggaccatagccttttaaccaaaagcattaaccttgtccttattttttttatacaaaacaggttttgtgttcagggccccaaaaacaatataaa

SEQ ID NO: 171282 - DNA, 303 bp, Zea mays
  Clone ID: MRT4577_87791C.1
atgctcgtcacccgccaacgccttgctcttcatccactggtgtcctgctccccaaccgccgatgcgccattgctcgtcacccgcatgtgtgccacacttggccttccccttcgcatacacccgcctccaaaaaccagtccgcactacctacgcctcctctccctctcgacgccttttccaacatattcgatcgtcaaggcgggcaactccctagagattcgacgtagattcagggcaaatttcagggtttctcggtggatgaaccggccagaaaggtacaactgcaaaagtgagaacaactaa

SEQ ID NO: 171283 - DNA, 641 bp, Zea mays
  unsure (1)..(641): unsure at all n locations
  Clone ID: MRT4577_87792C.1
cccgcgcctcgctctctcttgtctcgcccgctagctcccatcccagcctcccaccgcgcccgcctgccccaacatcccccctccccgctccgctccacgcacggctccagatctgctacggcggcggccggtggacgccgcgccgcgcgtgccggaggcggtgacgtgagcggcggatcctgcccggccgtgccatcctggcgacgatgacagcgtaagcgggcggcggacgaccgcgcccccccggcccctactcccgaggtacctacgacctgtgcccgcttcctatgccttgcgtgcgttcggttctcggtccggccgatccgccgcggcactcgactccgcacgctgccagaccggcgacgagcggcggcggaagggagggacgggtggggatccgagcttgagcttccaccctccgtgtttctttttctttatatctgnttgtttatcggnggcggtgctcactgctctgcctcctcgtcggacgatcttagctcggngagccgcgtccgactatggtggagtccaatcaacgctgcctgccgcgggaattggcgctccagtgaggttgggactggattaggggggcgtgtgcgtatgacgtgcctcgttaatgcatgctcccttcacgaaccaaa

SEQ ID NO: 171284 - DNA, 524 bp, Zea mays
  Clone ID: MRT4577_87793C.1
aggccagcggtctaccggatagaggcagctcagcatccttgcgtgacatgcgcggagcagagttgcggacccaatggcgtgacttacatcacgctcgtggcggagttctttatatccggggaggtggatggcgcggagaggctggtcggcatagatgcttgaaggcagcttgaatcccaacctggtgactttcaattcagtggtgatatgggatgtgctaggctgggaagatggaggacgcacgcaaggagtgcgatgaactgatgagggagggtttggcgccggatggggtcagttactacaccttattgagtgggtattgcaaggcaaggtgctcgcctgaggcattgtctgtgttggcaaagatgacactgatagggatcatgccatacgtcgtgacatttacgtcattgatccatgtgatgcgcaaggctgggatcttggagcgggcagtgacattgctgacgcagatgagggagaggagcctccagatgattgaggtatctctcacagccttgatagat

SEQ ID NO: 171285 - DNA, 537 bp, Zea mays
  Clone ID: MRT4577_87794C.1
acccacgcgtccgcccacgcgtccgtaatagggtgcttgttgacactgctgcaccaatagaatctgttaaagaggctgtaagcaaatttggaggcattcttgactggaaagagagacgtaagaatgtccagaatgagcttgataaggcattggaagatgctcctaggtacaaaagaagagcggaagctgcagaagctgagaaaagcaaagttgtcatggaattgtgtaccactaggagaaccattgaagggttgaagctaaatctagagaagacacaaattgaggcaatacaagcacaacaagactcggagcttgctgacatacggttcaaagagattcaacaaggaattgcatgtagagagagtgctgcagcaagagcagagattgagcttgcaaggtaccgctatgctagtgccttggcagaactacatttagtgaaggatgagctacaacaacttcagaaggagtacatgtccttaaacactaaaagggacaatgcagaaacaaaagcatgtgaatctagtgttgcatctcagg

SEQ ID NO: 171286 - DNA, 284 bp, Zea mays
  unsure (1)..(284): unsure at all n locations
  Clone ID: MRT4577_87795C.1
gacggnannngaaagctcggaagatggtggagttggaatgagactctgaggttgaattggtcatgagtgcttcaaggaaaattgaggtgggtgttgagtgatttggggagaaaataaaggaatttgaaataggagagttgcatgggtggagtgttggtgccgaatttgaactccctttcttactcaaaatttctgcagggggttgaggtcacatttcagtttttctttgctcaatttttggtttttcgaggtgtttgacatactaaaattggatttctactcct

SEQ ID NO: 171287 - DNA, 303 bp, Zea mays
  Clone ID: MRT4577_87796C.1
acattcgtgcaacaaaattatacctttcagtggagtcaataaataaataggggggctggcctacgggatacaaggtatgctaaccggtcaaccctggcttaactcattttacttggtccgcctgaaaataattttctggccggctggttaaatagctaaacggggaaaaccctgcgctcttcccatcatttgcgctggctaaatattccctgtttcgccccctgtattatagcataaagggccactcctgttggtcttacccacagggggtcctctttaatggccattgggctcccccccgtt

SEQ ID NO: 171288 - DNA, 136 bp, Zea mays
  Clone ID: MRT4577_87797C.1
tcgggttcccctgaccctccatttgtggtctagcaaaccgctgtattcactgaaccggggaaggcctgaatcggagtccaaggtcactgccaagaccgttggcattgctgctttatagcaaccaagccgctacgta

SEQ ID NO: 171289 - DNA, 420 bp, Zea mays
  Clone ID: MRT4577_87798C.1
tcgacacgccccaacccctgctcggaggtcccttgcgccgcgccccatctttaatggcacttggcttgccagcttcctgcttctccagagcgccggcgctctctcgcggctctctggtgcccacctctgctcttcttcctccagtcgcatctcccttctctctctccctcaagttctctgcgcgtatcgagcttctccacgatggctgccatggagtccaccagcagcgcgcctagctcctattctccatggcgcgtggctctgctactcccctcccatctccctgcgtctctctctactcgctgaccgagctccttccctgcagccgagtttcttcttctacagcccgtcgcgactgctccctttgcctggccgaggcttcccctgctcggtcccctgtcggcctgctcccctcttcct

SEQ ID NO: 171290 - DNA, 118 bp, Zea mays
  Clone ID: MRT4577_87799C.1
cgtggccttggccatcactcaacctggcccagcctcagagtcagtgcttgtctctgaacaattagggccgcgtggggggctaatatttaggacacgaataaaataatgtataaggctt

SEQ ID NO: 171291 - DNA, 332 bp, Zea mays
  Clone ID: MRT4577_8779C.1
tcgatacgaacgtattgcgagatcttttctacctcctccaccttagtacttattttgacacggaataacacctttgacggcgagagcatggagatggaataccgcgatctggaggtcaccctggtgtcagaagcatgacctcaacaaagagtcactgttctcctggactagcatctaccccgcggctgccatgtccggaatcgatctgcggatccctatccacagaactcaagcagaccacagcagcggatgtaccccctgctgggacgccgtggtccacttccccagccgggatgccgctgacacccgcggccttggactacacgtgaggc

SEQ ID NO: 171292 - DNA, 1168 bp, Zea mays
  Clone ID: MRT4577_877C.1
ggagatgatgtttggtgggcgttatgtaattatgatgatggcagttttttcaatctacacaggattaatatacaatgaatttttctctgttccatttgggcttttcggtaaatctgcctatgcatgccgtgattcttcttgcagtgatgctactaccgaaggacttcttaaagtaagagatgcatacccatttggtgtggaccctgtctggcatggtagccgcagtgagctgccgtttctcaactcactgaagatgaagatgtcgattcttcttggagttgcacaaatgaaccttgggattgtgattagttacttcaatgcaaaatttttcaggaacagtcttaatccgggtcgcgtcgaatatttagttttgtggtagattattttctataaaggcagctcaatattttatgcaacatacttggtgaataatgttttagttctttgaacatgaactacagaagtatttttatgaaacacacgctgtaactgctatgttatatggggttgagtgttggcctactaagagacgacatatccaacaactaagtgtcgcaaagatgcgtatgttgcgttggatttgtgggcacacaagattagaccgagtgagaaacgatgacatacgtgattggctaggagtagcgccaattgaagaagagcttattcaacatcggttgagatggtttgggcatgtccaccagagacccccagaggtaccggtgcacagaggcatcataagacatgacaataatgtgaagagaggcagatgaatggaatatccctatggagttgtgtttggatagaagtgcttggctatccacgtgcccgaaccgtgaatatgccttttcctttttagtgctctcaaaagcttttccccctcccctcccctttctctctctctctttttggtgacttcttgttgggttttaactctagcctactccaacttgtttgggactaaaaggctatgttgatgttgatgttgacacactgtaactgcaaatgagaagactggctcttggcatttcgttaatgcaaggcctcactagcatttttgcactagggcccaaattatcccatgcgagggtgtgttttttgcaattttctttcgttatatattttagtctgtactcattgtgttatgctcatgctgggtagatagtactct

SEQ ID NO: 171293 - DNA, 415 bp, Zea mays
  Clone ID: MRT4577_87800C.1
gggggggaaaagaaaaaaacccgggaaaattatgggcattatttaaccagggaataacccccggtgggggcccaaaactaaaaacccccaaacgggccaccaggggaaccaaggcggaggaaccggagatccatttaatccgcccacaaaggggggcggtgaaactcggggcaggcaaccggtccccccgcaaggggggttaatccaaaaacaaatggcaccgggggggattgggccccaaagaggcccgggcggtggcggaccaagactgggatccggtgcataacccgattgaaaaaaccccccctgaccacggggtgcaaatgcccaaataaaaaacggggggatcatgccaaaacaaacgacacgaggagcgaggcccctcattttttttggccccggcacccgggggccc

SEQ ID NO: 171294 - DNA, 317 bp, Zea mays
  Clone ID: MRT4577_87801C.1
cccgggcgcgacgcgagcgtacgctcggatcgcctagaccggacggcctctttttgcgcggcggcggcagcggctaccatcggcaggcgttacgctctaccatgaccttccacctgaacacacagagctacccgaccatgccggagtcgtcgtcctaggactcgacgaccgaacaagacctcgtgccgagcccttcttccgtggacttggttgtcatggctctgatcccgacactcgtgctgaatgacatcagggacctctgcgactgaccccaaatcttgctaggtacgtcccggaccgggagctccatcaggggg

SEQ ID NO: 171295 - DNA, 597 bp, Zea mays
  Clone ID: MRT4577_87802C.1
taacataaaatagggtaatagttggttacatcatgatgtccgagacatccacatagtcattaacaattatcaaagtgtgaaaacgaaacatagataaacatggccttcacaggcagccgactgggtgtttgccgctaacccacgcctagaactcatcgtactcttggaactcctgtaattcctccaccatgacttcatcttcacctgagcagtggttgcaacgtggacaaccttcaccaaccagctgttgcttagggtcttcacctgcaacttcttcggactccgccaactgatcgttatctatatctcagcagtaaagagaaggccgtcacaccatacagattagcagatgcaacccgtggacgatggtgaccgtatgaagagttaatagatcaaaatgaggagcagtccggcagggggcagcaacttgcactgtgcaggcggcgggcgtggagaggctgcctcggcccgcatccgccgcgatgcgatagaaatatagaatacaggaacgaatgtcctttctagcgcaggagggagggagcagaaactcggcggagcggtgaggactgggagctgagcagcgacggcaccggggag

SEQ ID NO: 171296 - DNA, 357 bp, Zea mays
  Clone ID: MRT4577_87803C.1
agcaaggatccactatagctgccgccccccccccttttttatacaccggaaccggaacccaacggagggaaaaaaaaaaggtgagacgggacaaaaacgcgacaagaatcaccaagggcatggttgaccaacactgaagggaacactcccagagcaacaccgtatagaaacgtactccataaaacgcaacttagggagtatctcacaaacctcctcaccagaccccaggaacccagcacggaaagacgacccctaaaaagcccgcaagccccaaaccgcagggatgaagcccaacaaagaacggaaaaccagggcagctcccaagagaaacgaaacaaacagcccaggaacccggac

SEQ ID NO: 171297 - DNA, 351 bp, Zea mays
  Clone ID: MRT4577_87805C.1
tttttttttttttttttttttttttttttttttttttttttttttttttcccaaacaaatgatgtatcaaaacttcatgcaaaatttcccccaacaaagcacgacccaaaggaagccctttcaagctttcaactcacaactcgcttggaacacaggcatcaaaaaattgctccaatttacataaaacccttgtaaactaaaacatttcatctatcctacaaataataaacatcctattggcataacaaagcgcaaattttccacatcctccccaaactcccaaaataggcattaatttgcctcaaggagtttattttttttttgacacaccaacagtttttccaccccttc

SEQ ID NO: 171298 - DNA, 278 bp, Zea mays
  Clone ID: MRT4577_87806C.1
cccacgcgtccgcggacacgtgcacgaactcgtggccggtgcctgggggactaaatcaggggccgccagttctgaagagggctatggacaacctattcgtgttaatgaattggctgatcctctcgcacgttatgctgatctttcgacgctgtcactgctggctacggccttccagctgcggtgttattctgcgaggctctgatagggatgggccacatctcttcatgatagaaccctgacgagcttgctatacatactatactgctgcattcaccaag

SEQ ID NO: 171299 - DNA, 575 bp, Zea mays
  unsure (1)..(575): unsure at all n locations
  Clone ID: MRT4577_87807C.1
gcggcggcggtggcggcggtcgcggctgccacgacggcgngagacgaggcgcgcctgctgcgtctggaggagcaggcgccgcacggcggcggcggcgcctgggactacctctgcctcgcccgccgggtccgtgcccgctgcgcagattgtgtcctacacatcctcctcctggggggggggggggtggttcctctctnccttctaccttnacttcctggttgggtggctgatcgggtactacatgttgaacctgttcggtctcgggtagcccgtggagtacctgcggttctagttgtactcgatggactagaacctggccaagaatgaggcgctgcggcatcttcggcgcccggttccagtcctccgatgtcatgtacatcctgttgcagccctacatagaggtgttggggctccaggggctacacgagtgcgagctgatgcactgacgttgggccatgctagccaccctaaggtctctgtccgtgaagtggcttattgggttgacctgataggtacgccggtaaggtggaaattgtggactggtcctattaattgggtcagtcgatgacgatttc

SEQ ID NO: 171300 - DNA, 254 bp, Zea mays
  unsure (1)..(254): unsure at all n locations
  Clone ID: MRT4577_87808C.1
ttgattccgcatntngcgcaggctctccccancgcactcccacgcctgataccataccatanccgccgccgcatcganttctcctcctctgaacccgcggcgggggcggacgganatccnttccagccggacctggatcggcctactccgncaccggcggtaaggaagccactacgacggnttgctcattctgctccgcgcaatcatgcnctgccctccaacgaaaattctttgtnttctgtaatgggcggtga

SEQ ID NO: 171301 - DNA, 358 bp, Zea mays
  unsure (1)..(358): unsure at all n locations
  Clone ID: MRT4577_87809C.1
ctttgggctgatttatgtgcttgtttatgtgcttggtttgtgttgttgagtctggtgattgntcttgtcttgctaatgaggcgtcttgttctgctgaggagcctagtggtgctgttacggatacntaggaggagacgttggtggatgatttgtcgtcgtgctttcggtagtcgtttcatttggtcgttgntacgtttactggtgttttgtatacgtcttatcatcgacgaccgttcctattaattatattattacatactcgaggtcgctagtcggggtcggccggtaataagataagaagaaccggtcgttctctaataatacctatactcatcattcattcggtcgtcccgagaac

SEQ ID NO: 171302 - DNA, 671 bp, Zea mays
  unsure (1)..(671): unsure at all n locations
  Clone ID: MRT4577_8780C.1
tcggtggcatcggcggcggcgacgacgactccacgtcgtcctcgccgctgcgcgacgcccagaagaggcggagcttcaccccgcccacgccgcagccggcgaagcgccgcaagggcatcccgcaccgcgcgccgttcggcagcttcatcgtcgagtactagctccctctctatccgtctccacggcggcggcggctgcattggcagtggcactacacagcacacgcgcgggcaatgggactgggacggccaccacttccttttgccgtgacacactctggctggctggctggtggtgcttctcgaggtggatgccattcggtcgctgctggctttgctttccacaaagggaggggaggaaagaaaggttgaggaagaatcaaaacacaggcttttcatcactgttgctaggctctctgatatagaaatatatatgtacatttttagccttgtcctgtttcaaatcatcatagtggagcattatagctagctagctttttttactagattattcgtctgaagaaaagaaaccatggttcaggagatgaccagctagtgcaaggtacttactttatactagtaataagctatggtggtgngtgatttgtggtgcttaatctgtgtttgtcccattacatatatctgtaaaaatactatgaggaagaaggtcat

SEQ ID NO: 171303 - DNA, 1382 bp, Zea mays
  Clone ID: MRT4577_87812C.1
attgggtacctcgaggccggccgggacggctgtcgccagtgatcgccattcgccaccctctccgttccattccaatccgttcagcggtcagcggaacatgatacgcctgcttgccgcgcttgcattgaggggagttcggggagcggccggtgcggaaggaatcgacacagagttcagttcacatggctgctgaatcagagaacggcagctgcaaagcttgggcagcgagagatccttctggagttctctcaccacacagttttaaccgcagagcagtgcaaagcggcgatgtttcgctgaagatcatatactgtggagtctgttatgcagacgttgcttggacacggaataagctcaatgattcaaaatatcctttggttcctgggcatgagatagctggagttgtaactcaggttggtgcagatgtcaaaggctttaaagtgggtgaccatgtaggtgttggaacatatgtgaactcttgccgtgattgtgagaactgcaatatctctctagacaaccattgcccaaaagcagtttatactttcaatggcattgatacagatggaactgtcacaaaggggggttactccactcacattgtagtccatgaaaggtattgcttcaaaatacccgatggctaccctttggcgaaggcagcacctcttctgtgtgctggaataaccgtgtatactccaatgatgcgacacaacatgaaccaacctggaaagtcacttggggtcattggtcttggtggtctgggtcacatggctgtgaaatttggtaaagcatttggtcttaaggtcacagttttcagtacaagtgaatcaaagagagatgaagccatcaacctccttggagcagataattttgttatatcatcagacacacagcaaatggagtccctgaagaactccctgcacttcataattgacactgcttccggtgaccatccatttgatccgtatttctctctccttaaggttggtggtgtgatgacattggtaggttttccaagtgagatcaaaatgcatcctgcaagccttatacttggtgcgcggaccttgtctggcagtgttgttggaggtataaaagacatccaagaaatggttaacttctgtgcagccaacaatatctatccggagattgagatcattaagatagattatatcaacgaggctctcgcgaggcttgttaatcgagatgtgaaataccgctttgtaatcgacatcgagaactccttcaagtagcgtgctagtgcacatgctctcgtctttctgttagtgttcaacagttcaagagctattacaaatgtgagtcatgccaaataaacttgatgtaaacaaccataattgaacagcaaggggaaacaggtatattgtgat

SEQ ID NO: 171304 - DNA, 436 bp, Zea mays
  Clone ID: MRT4577_87813C.1
ccgggaaagaaaaaaagaagaaaaaaccttactcaatcctatgtgtatgctgccgaataaagctttaaaaagatgaatgcaattagtatgttctaaaaaaaaaaaaaaaaaaaaaaaaacaaaaaaaaaaaaaaaaaaaaaaaaaaaaaaaaaaaaaaaaaccaccggggctctcgcgaggcttgttaatcgaaatgtgaaataccgttttgtaatcgacatcgaaagctccttaaagtagcgtgctagcgcacatgctctcgtttttctgtcagggttctaaagttattacaaatgtgagtcatgctaaataaacttgatgtaaacagccataattgaacagcaaggggaaacaggtatattgggacaatgaagtcgctctataaatattcaaccgcagtgttctctgaccaaaaaaaaaaaaaaaaaagcggcc

SEQ ID NO: 171305 - DNA, 686 bp, Zea mays
  Clone ID: MRT4577_87814C.1
cacatggctgtgaaatttggtaaagcatttggtcttaaggtcacagttttcagtacaagtgaatcaaagagagatgaagccatcaacctccttggagcagataattttgttatatcatcagacacacagcaaatggagtccctgaagaactccctgcacttcataattgacactgcttccggtgaccatccatttgatccgtatttctctctccttaaggttggtggtgtgatgacattggtaggttttccaagtgagatcaaaatgcatcctgcaagccttatacttggtgcgcggaccttgtctggcagtgttgttggaggtataaaagacatccaagaaatggttaacttctgtgcagccaacaatatctatccggagattgagatcattaagatagattatatcaacgaggctctcgcgaggcttgttaatcgagatgtgaaataccgctttgtaatcgacatcgagagctccttcaagtagcgtgcaagcgcacatgctctcgtctttctgttagtgttcaagagctattagcctattacaaatgtgagtcatgccaaataaacttggggcctgtttgtttaccccaatggattatataatctggattatttttgaaagattatataatctggattatataatttggattatataatctgagtagtcttgtttgtttaccc

SEQ ID NO: 171306 - DNA, 1853 bp, Zea mays
  unsure (1)..(1853): unsure at all n locations
  Clone ID: MRT4577_87815C.1
ccggccgggaaagaaaaaaagaagaaaaacccttactcaatcctatgtgtatgctgccgaataaagctttaaaaagatgaatgcaattagtatgttctaaaaaaaaaaaaaaaaaaaaannncccaaaaaaaaaaaaaaaaaaaaaaaaaaaaaaaaaaaaannnngcacgagaaacaatctacggttgccaggtctgcgacgtcagtgccgacgaactcatggctcgcgagaggcccgtaaaaacatgatagccagatctgcgacgtcacggctgtcgccagtgatcgccattcgccaccctctccgttccattccaatccgttcagcggtcagcggaacatgatacggtctgcgcccttccaagcaatcacatcttcttccccattataaatcgctcactcgctatcgtcggctacctgtatcctggcgacacccaacactaccctgcttgccgcgcttgcattgaggggagttcggggagcggccggtgcggaaggaatcgacacagagttcagttcacatggctgctgaatcagagaacggcaactgcaaagcctgggcagcgagagatccttctggagttctctcaccacacagttttaaccgcagagcagtgcaaagcggcgatgtttcgctgaagatcatatactgtggagtctgttatgcagacgttgcttggacacggaataagctcaatgattcaaaatatcctttggttcctgggcatgagatagctggagttgtaactcaggttggtgcagatgtcaaaggctttaaagtgggtgaccatgtaggtgttggaacatatgtgaactcttgccgtgattgtgagaactgcaatatctctctagacaaccattgcccaaaagcagtttatactttcaatggcattgatacagatggaactgtcacaaaggggggttactccactcacattgtagtccatgaaaggtattgcttcaaaatacccgatggctaccctttggcgaaggcagcacctcttctgtgtgctggaataaccgtgtatactccaatgatgcgacacaacatgaaccaacctggaaagtcacttggggtcattggtcttggtggtctgggtcacatggctgtgaaatttggtaaagcatttggtcttaaggtcacagttttcagtacaagtgaatcaaagagagatgaagccatcaacctccttggagcagataattttgttatatcatcagacacacagcaaatggagtccctgaagaactccctgcacttcataattgacactgcttccggtgaccatccatttgatccgtatttctctctccttaaggttggtggtgtgatgacattggtaggttttccaagtgagatcaaaatgcatcctgcaagccttatacttggtaattctctgttctgacactactaaaaaaaaacatggtaaccgaaatgaatcgtttaaatttaacctgaactgctttccttaggtgcgcggaccttgtctggcagtgttgttggaggtataaaagacatccaagaaatggttaacttctgtgcagccaacaatatctatccggagattgagatcattaagatagattatatcaacgaggctctcgcgaggcttgttaatcgagatgtgaaataccgctttgtaatcgacatcgagagctccttcaagtagcgtgcaagcgcacatgctctcgtctttctgttagtgttcaagagctattagcctattacaaatgtgagtcatgccaaataaacttggggcctgtttgtttaccccaatggattatataatctggattatttttgaaagattatataatctggattatataatttggattatataatctgagt

SEQ ID NO: 171307 - DNA, 226 bp, Zea mays
  Clone ID: MRT4577_87816C.1
atattttttttttttttttttttttgacaccaaagatgaagttccactggaatgacgggaccaattatgatttcttttcccgttaataatttggtgtagttataatgaaatcatgtaaagaaaaatcatactcagctttttactagtcactattgtatttacgatgactctgcatgtaacaacttcagtttattgatatctgtcattgtcagttctttatatcttt

SEQ ID NO: 171308 - DNA, 198 bp, Zea mays
  Clone ID: MRT4577_87817C.1
gcagaacggaatggatgtggatgacacccaggttgcgaccgcaactacgaatgcactcgcacaggtatatgctgccgctagacatgtggcataagcggactccctattgcagaagttgtgcttgaagaccaccgccacgcccacttacaggtcatacatgagagtggtcgatagctactcttagaaaggagacctgca

SEQ ID NO: 171309 - DNA, 347 bp, Zea mays
  Clone ID: MRT4577_87818C.1
ccgattaggaacttaggaatggactcgccggtgcctgctacgctcgcccgcgcgccagcgagatcgcaagcgcgggcgggcgaggaggcttgcgcggatactcggcaggatgctccggcggaagcggagccacctccccgtcggccacccgcgttctacagctccgtgtttgcgtagatcgaagagatcgggtggaagcagctggtgagcgccacaggagacggagtgtcctgtctcaccttccgcgtcgtggatgaaccaggacagatgcatttactggaagatcacactgcccatgggctatcccgaaagtcctccttcaatctctgcagttagtctctatcctg

SEQ ID NO: 171310 - DNA, 293 bp, Zea mays
  Clone ID: MRT4577_87819C.1
cctcccacgcgtccgattttaagcacagacccacgcgatcctctaaccctaaagggcccaagccgggcgggccactggtccaggtcatgtacaatcttgtctagcacgacgagctaatgagcactacggaagaagtagatctagtcgctaacactgacgcattaggatccgacgactcttacgtaccagagcacctcgttaactatctcagcgagctagacatagctgccgacttagacaagctaggatcctggcttgactatgtcgacgatatgatatcatatgacatggcc

SEQ ID NO: 171311 - DNA, 387 bp, Zea mays
  Clone ID: MRT4577_8781C.1
gcagcgccactgcgcggcagagccacacgcgcggccatcatggcgccgccggcaccgtcctccaggacgaccctctcccgcgcggttctgtacctcctcctcctcctgtccctgcaggtcgccgcgcccgctgccgcggccatggaccccgccgagcgggagacgctgctccgcgtcatggaatccgtctccgccgaccgcgactggcgcgaggccgccggcgccgacccctgcagcgcgccgtggccggggctcgagtgcaggcccgggaccgcggcggcgcggatgcacgtcgcgcgccttgacttctgtgtgcctgccaacccgacgtgcaccgacacgggcacgttcccgctcgccgcgttcgcgctgccggagctgcgggcg

SEQ ID NO: 171312 - DNA, 361 bp, Zea mays
  unsure (1)..(361): unsure at all n locations
  Clone ID: MRT4577_87820C.1
gccgcgcaaactcagacgtcctggatttttttcatgttacagaacgtccttcctgatccatggtgtgccccgcatgcttcacatgggttctttcttttttccaacgcctgngcctggttgggtgggaatagcttgctggtttttatgctgctgcccgctnataacggccgcgcggctttggccggttgctgatggcgtatagccttgccgcgttggggcttcggttgttgctcccgttgttggggctgcgcgcgttcccgcncnggctcccctgttgcgcccgctgctgcgcgctgcgcgccggtggctccgtaccttctttcagcgccggccctgcgcacggtgtgagctgcgccgggtt

SEQ ID NO: 171313 - DNA, 242 bp, Zea mays
  Clone ID: MRT4577_87821C.1
aaagcgcgttggctcttttgacgggacaaagattctttctcctcgaccatatatgggtgcctggacgataaaactaacagttttgtggatccatgaagttcgctaaacaaaagtacagtgatgtccagagctatcacgcgttctcagataccgttagcctggttgagatcccatccatgatgtgagttagttgagaaaaaatgtgttgtgtagggactgaccaacttatctcgataaataaa

SEQ ID NO: 171314 - DNA, 609 bp, Zea mays
  unsure (1)..(609): unsure at all n locations
  Clone ID: MRT4577_87822C.1
gagcgcatcatctccgacgaccgcggcgaggagctcctgggcgccgctgtcgcggagcacggcaagggcgccgtgctcgccgcggtgcacgagatccaggnccgccgtgacgcggcgcgcgaggtggaacgcagcctcctggagctccaccaagtgttcctcgacatggccgtcatggtggagacgcagggggagaagctcgacgacatcgagagccacgtcgccaacgcctcccactacgtgcagggcggcaacaaggagctgggcaaggccaaggagtaccagagaagcagccgcaagtgtctctgcatcggcatcataatcctgctgctcctcgtcctgcttgtcatcgtgccaatcgccaccagcctcaggaggtgatcgagttgtgatgggaggaacaacgccggggttgtgaattgtgaaatgaaatgaggggttccaattcgatccgatgggtgggattgggggttctaatgatcaggacactctgcggttgtgtcttgtcttgttcgattcagtattcgttaatttgagcatgaatgtttccgtggaatcttactgaattgtattgtatgaggtgagattcggtaaaccaaattcgtactt

SEQ ID NO: 171315 - DNA, 299 bp, Zea mays
  unsure (1)..(299): unsure at all n locations
  Clone ID: MRT4577_87823C.1
agcagtggtaacaacgcagagtactttttttttttttttttttttttttttttttttttttactgtaataaaaaggatattaaaaacagagacaggatcatcgaaaacacacacaacaacgacaacaacatgcgaaggacgacgagaagcattgcaggcagggacataaaaagaaaactacatcatatatatcaacggacggacgaaaataaactagctgggacaaaaaattaagcacagagagggaaccccgagaactcggcggggnaaccactgttaaagggcgaaataaggatata

SEQ ID NO: 171316 - DNA, 358 bp, Zea mays
  Clone ID: MRT4577_87824C.1
gagcctcaagaaacaactttcggtgcctttccacaagaggaaaatacacaaatctgctttgggcttctctgagaagtctgtctctactttggagcttctcaaggtctcatggtccaaagaatggcttctcatgaagaggaattcatttgtgtacatcttcaaaatagttcagcgcttctttgctgaggtgcactacaagccaaccgcgatcagcagctcctcatcgtcttcgtcatcaattgcaataactgcagttcctatagttgaaatatgcatcattatcgaggaacctctatcccaatataggcgtagttgtgccttttgtcccagctaccagaacgttttacaccctaaaggc

SEQ ID NO: 171317 - DNA, 1322 bp, Zea mays
  Clone ID: MRT4577_87825C.1
cccaccgcgaaagccacacagagagcaggagagacaatccagagagatcggcgccatgaacgacctcatgactaagtccttcatgagctacgtcgacctgaagaaggcggcgatgaaggacctggaggcggggggcgacgggatcgagctcccggagtcgggcgccggcggcgtcacggacgagcgcctgcgcggattcttccaggaggcggaggcggtgaaggcggagatggcggccatccgcgacgcgctcgaccgcctgcacgccgccaacgaggagggcaagtcgctgcaccaggtcgacgccctccgcgcgcaccgcggccgcgtgaacgccgacatcgtcgccgtgctccgccgcgcccgcgacatccgcgccaggctcgagtccctggaccgcgccaacgccgcgcagcggaggctctccgcggggtgccgcgagggcacgccgctggaccgcacgcgcaccgccgtcacctcggggctccggaagaagctcaaggacctcatgctcgacttccaggcgctgcggcagcggatgatgtccgagtacaaggacaccgtgcagcggcgctactacacgctcaccggggaggtccccgaggaggaggtgatcgagcgcatcatctccgacgggcgcggcgaggagctcctgggagcagccgtcgcggagcacggcaagggcgccgtgctcgccgcggtgcacgagatccaggaccgccacgacgcggcgcgcgaggtggagcgcagcctcctggagctccaccaggtgttcctcgacatggccgtcatggtggagatgcagggggagaagctcgacgacatcgagagccacgtcgccagcgcctcccactacgtgcagggcggcaacaaggagcttggcaaggccaaggagtaccagcggagcagccgcaagtgcctctgcatcggcatcatcatcctgctcctcctcgtactgctcgtcatcgtgcccattgccaccagcctcaggaagagttgatcgagtttgtgatgggaagaactgtgaaaaaaaatgaggggttcgaatccgatcgggtgggtcggtggtcctagtgatcaggacactctgcagttgtgtctcgtctcgtgttgcttgatttcgtattcgttaatttgagcctgaatgtttctgtatccatcaggatttgctgatgataccaccggcaattgcagttgctatctctaagactcttactggattgtattgtatgtgtatggtgtgagattcggtgaaacaaattcgtacttggcagttcgaatttaaaaacacatacatgacatgaatttaaagtcctttgtag

SEQ ID NO: 171318 - DNA, 685 bp, Zea mays
  unsure (1)..(685): unsure at all n locations
  Clone ID: MRT4577_87826C.1
ttcccgagggcggncgggccacgacgcctttcccgacctgatacggcagcagctggagacgctgctcgcggagaaggcgcggctgttgcacgagaacacggcgtacgcccgcgagaaccggttcctgcgggaggtcgtcgagtaccaccagctcaacatgcaggacgtcgtcggcctcgacgacgacgatatcgacgccgacgccgattacgacgtggagttggaggctgagcagtaccaagatcgccgcaggtccctgccgttccaccaactcgtgctggaggaagaggagcatcaggcggccgatccgggcaccgagccgcagtcgccgtctcggtgcacggagtcgccgcgaatgctaagcacgaacagcggcggcagccctgaccacgagtcgtcgcagcggatgctgaacacgaacagcggcgtcgggattgcaatcgaatcccctaggaataggatgctcagcacaaacagcggcgagtcgacccagagcttcgatcaagaatgatgctccttttttgccagaaacgagcaaacgacgaaaggcggctgatggttcttcgtctctgatttgtcattgcgatttattacattctaattcccctgatcaatccttctttcgactccagtcccattgtagttttctccgcttatatctagtgaccaataactctttcggatg

SEQ ID NO: 171319 - DNA, 559 bp, Zea mays
  Clone ID: MRT4577_87827C.1
acccaataaaaagtattttttttttttttttttccctttcccaaatttccaaacggaaagaaaaaaaaaaggtccttaactaaaaacctggagtcaaaagaaaggctttttggattgggggggggacccaaacggaagcccctttattggaccgaaaaaatccttggggggggggggggagggggaaaaacagaaaacccggcatggccaacgggggaactaagttggttacccacaactttaagccaaccttccccccgtaaaggaccaaccaaaaccccgggggggggggggccccccccgccccgccgtcaaccttcccggcggggcccaccggcttgaacagaacaagggggggaaaaataaaaacccccgcccggggcccgggcctaaaaacccagcggggcccgcccaaaacaacctccaccttgccccggttgaaggcaaccaacgggttgcccttaacctccaccggaaggggtttaacctgaccggcctcttgccggtgaaggggaatggtattttcaccggggccttccccgccgcggccttcccggcg

SEQ ID NO: 171320 - DNA, 230 bp, Zea mays
  Clone ID: MRT4577_87828C.1
ttttcagaaaagcggggagacgtgccttgagagaaagaagagttgcttaacgccgctgtgcgttgtgtccatgcattgcaagcctaactaactgaaacaaagacggctttgcacgaagctcttatcaggaaagaggaacctgctagccgtacatccgaccttttttttagatggcggggggtcagagaaagaagaaagcagtgcttcgaatactacccaagggagggaga

SEQ ID NO: 171321 - DNA, 119 bp, Zea mays
  Clone ID: MRT4577_87829C.1
gatcgatcgccacagccaacaccactctccaaggcgacccgacattcgtcaggaggaaggaataaactcactgcctgccagcgaagggtgagaagtgttctgctccgtttaccagtgct

SEQ ID NO: 171322 - DNA, 428 bp, Zea mays
  Clone ID: MRT4577_8782C.1
gcgttcggtataactaacatatagaatttgctatgtaaatttatatacttgtttttagcattaagactattaatcttcacaaaaaataaacattaaattcattctatatctttttaaataattcatataaaattcggatgtctattcgaatacggattcggatgttttttcaccttttttgttgtagggagaaaataatgtacataaaaaattatacaaaaatttatttaaatacttcataatattcttaataacattgccgaaaattaactttaattcctatgtatatctatgctaactacaaatctatatagatgaaaaaactagaaacattgtttaattataaatatatatagtaaaagaaataaaaataattaacaacgaagaatgcatagaaacactactaaaatctgaactaaataatgaat

SEQ ID NO: 171323 - DNA, 431 bp, Zea mays
  Clone ID: MRT4577_87830C.1
gccggagggcggcgcgtcagccgagccggcggcgggcgcctcggcgacggacccgcccttggccggcttgctggcggggggcggagccgacgccgggggctagacgccgaacaggccgttggacagtagcaacctgtccgaccgatagaaggggggggggctcatgctcgctcagggcctgctcctcgcggtgggcgacacggccactgctcacgatgcgcgggctgctcttttatgccgccatgcagagcgtgtacggcctcttggagctgctgaccatgagtacgttctgcggttaggccagcctggaacgtatatatagagccaaagtggagagcatccccctactgcgcaagaagatgcccctggaggcctgaccacatgaacaggccatgcgacgtcgaggctgtagaacgccctataccgagacg

SEQ ID NO: 171324 - DNA, 915 bp, Zea mays
  Clone ID: MRT4577_87831C.1
cccacgcgtccgcccacgcgttcgcccacgcgtccgcggacgcgtggggttctccatagagctgcatggcaatgtcattggagcagtggaaacttgtttagagtcgtttcatcggtatcacaagtatctaaatttttcgcatcctactatcagctccaagattgatccacatacttgtggatgggcttttggaatgaacatttttgacttgatagcttggaggaaggcaaacgccacatcattgtatcattattggcaagagcaaaattctgacctattgctctggagaacaggaattcttcctgcaggccttttgacattttacggcctggtggagcccctagaccgcagatggcatgtcttgggtcttgggtatgatgtagacatagatgaccgtttgattgagagtgctgctgttgtgcactataacggaaacatgaaaccgtggctgaagctggctattcgccgttacaagtatatatgggagcggtatgtgaatatctcacatccgtatgttagagagtgtatgttgcaatagaaagcctgcaaatctctgtatgttcttggatggtgttgaagctgtttcctcacacgaggctgctttcgagcacattgtatgagggaaaggttcagaggtagtagaatatataccagtcatcaaagaagtcaactgttaagtttctttttctttttgggttgggggaagattcattttgagatgaaaataattcctttgcagagtttacatacaaatctggactgggaattttagcagtctaaccagatacatctggatagatattgtaaaagagatacagttggatcaatgagcattttttctttgagaaaaaaaaaaaaaaaaaaaaaaaaaaaaaaaaaaaaaaaaaggggggggggaggggggggaagagagag

SEQ ID NO: 171325 - DNA, 2123 bp, Zea mays
  Clone ID: MRT4577_87832C.1
agatcacaaggtgctcatataccaacctttgagcctgttcctgagtcaagtgtctcgatagtggacgacagaactcctgaggacaaagaaaggtggtggaggaggggcttgagagccatttcagaggggaagttggctattgttttattggctgttggccaggataatggttcatatatcgaggaagtccctcgtgagaaagtgaatttctcagaagagcttttgagcagcacattatttgttcgccaattagcggatcagatgactttagcaaaggcatatgtcatccttgcaaaagagcaaggtaatcttcagcttgcatgggagcttagttcacagataaggaattgtcaaagattgctatctgaaggggcagttaatggaagagcaatcactaaagatgaagcccatcctataataagccggctagcacggttaatatacaaggctcaggactctcactatgatatcagcacaacaatagtgacattgaagaaccatgccttggcactagaggagcgtgcaaaggcagcaattgttcagagtgctgagtttggccagttagcagcagaatccttccccaaaaatctgcactgtctaactgtgaaactgacagaggagtggcttcggaacccgaagcataggagtcactcagaggagaaccggaattccacacgattggtggataataatctgtaccatttctgtatattctctgataatgtgctggccacttcagttgttgtcaattctacggtctccaatgcaaatcatcctcaacagcttgtgtttcatgtggtcaccgacagaatccattttggcgcaatgtcaacttggttcctcataaatgacttcaaaggttgtactgttgaagtccgctgcatagatgagttctcgtggttgaatgcttcttcatctcctcttgtcaggcagctatctgaggcggaaactcagggttacaattactcagctggttccaagaatcctgaaagagaaacaaaattcctaaatccaaagtttgtttctcacggggaaccatttacgtttctacattcctcagatacttcccaacttggagaaggtggtgtttcttgatgacgatgttgtggtgcaaaaggatttgactcagctgttctccatagagctgcatggcaatgtcattggagcagtggaaacttgtttagagtcgtttcatcggtatcacaagtatctaaatttttcgcatcctactatcagctccaagattgatccacatacttgtggatgggcttttggaatgaacatttttgacttgatagcttggaggaaggcaaacgccacatcattgtatcattattggcaagagcaaaattctgacctattgctctggagaacaggaactcttcctgcaggccttttgacattttatggcctgatggagcccctagaccgcagatggcatgtcttgggtctcgggtatgatgtagacatagatgatcgtctgattgagagtgctgctgttgtgcactataatggaaacatgaaaccctggctgaagctggctattcgccgttacaagtatatatgggaacggtatgtgaatatctcacacccgtatgttagagagtgtatgttgcattagaaagtctgcaaatctctgtatgttcttgcatggcactgaagctgcatgcttcagtttcttcacatgaggctgcttttgagcaccttatgtgccggaaagttccagaggtagaatatatactcaagggacagcatcaaagaagtcaactgttaagttttctttttgggttgggagaagattcattttgggatgaaaataattcctttgcagagtttacatacaatttggactggaaaatttagcagtctaaccagatacatctggatagatactgtaaaagagatacagttggatcaatggacattcttttttttagatttaggaaatgcaaattgtgagctcaactgtgcagggccagtggtgttggattcttttagtagtatctttttttataccggcgaagaaggctctgcctccctcgtataagtagctccttttagtaatatcttgttttataccggctggatgcggagctcgtcgccctttaaggccgacagcaccg

SEQ ID NO: 171326 - DNA, 832 bp, Zea mays
  unsure (1)..(832): unsure at all n locations
  Clone ID: MRT4577_87833C.1
cattgggaccctcgaggccggccgggacacaacgcgtgatgcctccgcccccaactcgcctcgtccgcacccgacgccgacaaagacgacgcaactaccgttcctctctggcgtgggctacggcgccaccgcccgcgcacgcatcaactggacccaccctgctcgtctacgctgggcctagatcccacgcgcccacacgtgtagggttgaaagcaagagacgtgatggtggcggttctgcaagccacgccgctcaaaaccccattcatctccagtcggcgcgtcgacggcgtgggggcatgaccgcgtctgatggctgcgagcttccggtgctccgcgacggcgaggagctacaacatcacgctcctccccggagacagcatcggctggaggtggtcgccatcgccaaggacgtgttgtccctcgccaacgccctcaaaggaatcgaccaccggttctaggaaagctgatgggtggctcaacgctggacgccatcggcgtgctgctccccgatgagacgctcaacgcggccaagggttctgacaccgtcctcctcgacgccattggagggttccgagtctgcacgacccatagtggataccaagaaaagctctggccgagcctgccgatgaccttcattatgttccttgcagaaaagttgattctgaacatgcttcaattcaacatgtctgttccaacaccttatgtcttcatgaagaggttttttgaagcagcaaatgcatataattaggtgaaatatcactaccctgctgaattgnagagtgccactgcgacataaatacaagtcttttatgaaaagttattctaacatg

SEQ ID NO: 171327 - DNA, 216 bp, Zea mays
  unsure (1)..(216): unsure at all n locations
  Clone ID: MRT4577_87834C.1
ccgcccttttttttttttttttagccatataatgagttcttaatacctcaattacacgccacannaagntcaacgggggggttttctgaaaggtttttataagcaacaaaaaaccgcgagcacanaagcggggtgagcaaaaactagagcgaaaaggagcaataggcgggaggaccaccatcagacccccgcgaagcgcctagacgaactcctgga

SEQ ID NO: 171328 - DNA, 283 bp, Zea mays
  Clone ID: MRT4577_87835C.1
gggaaaaaaagggggggcatttttaatttggtgggcccggtttttttttttaaaaaaggcaaaaaaattccccaaaccaagatttgccggggttttgttggcccaaatttttgcaatggttgccctgcccccttagatacattttttaaaaacatggggagaggttgtttctggaaccgatgggaccgcaaaaaaacttttttgggtgtcgttggaaaaattcggaaacaaaggccctttttacttatgtttttgcccctccgagcgttaaaaataagggggg

SEQ ID NO: 171329 - DNA, 542 bp, Zea mays
  Clone ID: MRT4577_87836C.1
gaccgtccgaattcccggtcaccacgcgtccatttttttggtaatctttcaaagttccacggagtggagggtatcatcgtggatttaactggaggttatcaccgtggattgaactcttctatcgcgcaatccatgccctaaacatctcagttcttcagctccccaaatcatgggtaccaggacgccgagccaggaccaaacctgcacatagacagaagagacgcacctgctcctccggggttgacagcaagggaatctgttttcttgcagagggcacactttagtttaaagcatgtactctctctattccaaattgtaagttgttcagattttttctagatacgtagtttttacttgtatctagacacggtatattcttggtacatagcaagagctatgtatcttgaaaagctaaaatgacttatactatatggaatgaagggagcacaaagcttactattgatattatgtgggttaaatgcgacaatcaatatattctggctctcctactgtttataatactattgcaagacactaatttt

SEQ ID NO: 171330 - DNA, 1007 bp, Zea mays
  Clone ID: MRT4577_87837C.1
atgaattgtaagatctcatatttgtagtttctaaaagttttgttcacaaatctctggtccttgtatgaaaagtgaattatcatcaagttttgatcagttttgtgtttctcttacaatgtttggaattgtgattctgaaatatagagctagggcccttggcaaataatagtttggtaaggtgaacagtctacaactcagccttatacttctaattttgtttgcatattgtttccgaaatgggaaaagaaaggccaaaagttatccaatgcagcagccttatacgagtcattcaaagcttatgaagaagactccaggaacagctttaagaaacaagaaagaaattatcagtgtcggcccccctgtaggtccgcccctggtcatcagacaacttttccgccaactccaagcgatctgacagattattgtataattgcgtcgttggaattgtgtctatggtctgtagcctgttcggcgtgactcaaaatataaacctttggatatacatgcaacagtcttcaagctgttatgtaaaaaaaaaaacaaaaaaaaaaaaaaaaaaaaaaaaaaaaaaaaaaaaaaaaaaaaaaaaaaaaaaaaaaaaaaaaaaaaaaaaaaaaaaaaaaaaaaaaaaaaaaaaaaaaaaaaaaaaaaaaaaaaaaaaaaaaagggggggccccccccttggaaaaaaaaaagggcttttttttttacccccgaaagggccccgggggggtaaaaacggcttggttttttcccaaaaaaaggtttcccaaacccgggccgccccccccccaaaaaaaggggccctttaagttgaaaaaaaggggtcgtgcccccctttcccaaaaaaaaaaaaagggaaaaaaaaacccattaggaaaaacccccccccccaggtttgggccccccaaggggggggggggggattgggccccttgacaccccccctcccctcccaaaaaacctcgaacatccccattgggggggggagggcccccccccaaatc

SEQ ID NO: 171331 - DNA, 209 bp, Zea mays
  Clone ID: MRT4577_87838C.1
cgcacgcgttcgattagaactatattttctggggatacaaattttagccggggtatgggttcaagtaaggattctgatccttttgatggactctatgttggtgcatttggcccttatggcatggaaatagtgcatttgaggctaaaattttgacattggaatgaattggacaatgaaaacaaaacttcttatgtgggattctttgaata

SEQ ID NO: 171332 - DNA, 273 bp, Zea mays
  Clone ID: MRT4577_87839C.1
gttttatttatggtttgatatgaggtggtgggtgagcgacctccaataatgcattgcgctgatgaccaatcccacttctagagaagagaggaaacatcttatactatctgcaagcttacttacacgtgttctaacatactgctcccactgtacgaccactactacttagctgaatgccggcgggctgatcgtcttctatgtaggaggcctttattgaccaagcatgtccaacggtaccgacagcagctagctggtagaaatcaaccctcacgg

SEQ ID NO: 171333 - DNA, 1599 bp, Zea mays
  Clone ID: MRT4577_8783C.1
cattgggtacctcgaggccggccggggcttgcttcgcttcacctgccccctgcccacattttccttccttccctcccgtcgccgcctgaaaccgcgacagcaagggtcgtaggagcaaggacgacgacgagaaggctcggttcggctcttcccagtctctccgagggaggaaggagaggatcggagggtgcgatggcgatcgaccacgagtccccgttcaaggagctccgcctcaagaaccgcaggatcatgggcggcggcggccctgaccctgagccggaggaggaggaggaggtcgccacggcggcgtacgcggggcagtggccgcgctggctgcagccgctgctttcggcgcgcttcttcgcgcactgcaggacgcacggcgactcgcaccgcagcggcgagtgcaacatgttctgcctggactgctccgccgcgggcgcgggcgcgggcgcgcgcgccctgtgctcgctgtgcctggcgcaggcccaccgcgaccaccacaccatccagatccggcgctcctcctaccacgacgtcatccgggtgtccgacatccagcgcttcatggacatcgccggggtgcagacctacgtcatcaacagcgcccgcgtcgtcttcctcaacgagcggccccagcagcagaggcctggatgcaaggccgcgtcggcgtccgccaacctctgcgaggtgtgcgcccgcagcctcctcgacaacttccgcttctgctccctcggatgcaaggtcgtgggctgctcccccgacgccgccaaggccaggagctggctcctccggcccgccgtcggcggcagcggcggcggcgacgacgactccacgtcctcctcgccgctgcgcgacgcccagaagaggcagagcttcaccccgcccacgccgcagccggcgaagcgccgcaagggcatcccgcaccgcgcgccgttcggcagcttcatcgtcgagtactagctccctctctctccgtctccacggcggcggcggcggctgcattggcagtggcactacacagcacacgcgcggtaaagcagggaaaatatatatatactcttgaatgaaccaacggaattgagcagcacagagtgagtcagtgaattcaggtcatgtctgaatcaatccgccattacagggcaatgggactgggacggccaccacttccttttgccgtgacacactctggctggctggctggtggtgcttctcgaggtggatgccattcgctcgctgctggctttgctttccacaaagggagggggggaaagaaaggtggaggaagaatcaaaacactggcttttcatcactgttgctaggctctctgatatagaaatatatgtacatttttagcctttgttctgtttcaaatcatcatagtggagcattatagctagctagctttttttactagattattcgtctgaagaaaagaaaccatggttcaggagatgaccagctagtgcaaggtacttactttatactagtaataagctatggtggtgggtgatttgtggtgcttaatctgtgtttgtcccattacatatatctgtaaaaatactatgaggaagaaggtcatcatccttggcacttgcc

SEQ ID NO: 171334 - DNA, 304 bp, Zea mays
  Clone ID: MRT4577_87840C.1
cttggcttggaacattgggctgattgagtgcttgatggtgcttctcatcctcgtcacaagccgattgaggcgtatgctgctcaccgcgctccggaattggcaaagaaaataagcgtagcatgttaagaagcatgcgtaggatacttgagaatatgacggataagatcacggcgtttggtactgagcaacactgggagaagatacggtgcgtgtacaattgttgtaataacaacggccgttagatgtagcgcatttgtgggacgtccatggacattacgacttcgtattgcatgggcataacatc

SEQ ID NO: 171335 - DNA, 304 bp, Zea mays
  Clone ID: MRT4577_87841C.1
cccccctaaaagggggggggatttctttggcgtttccccccgattatttggcggttaaaaaaattttggaacccgtccttgggggtgttaaaaaaagccaaaccttgcctctttttgccaaaacccgcatcttttgtcgtctaaaggggtgaagcccttttccttgtccgactcctttttgggctccgaagcctttttttttttcttgggggcagcccctgccccagtttccccatcataaaccggggggggaaccgcaaacttggttgggcccctgggggcccccttgtttttttcagctttg

SEQ ID NO: 171336 - DNA, 541 bp, Zea mays
  Clone ID: MRT4577_87842C.1
atagaagcgcgcgtcaccccccgccctagtacatataaaaacaagtcactccatatacaaagctaaacgcaggctcactacttatatccacacgtgttcccccttgcaaagaacatacttttacaagtgaaaaaagcggcccctgtcccctttgtttttttataagcaacaggcaacagacagaactgcgtttttttttttcttttacttttaccgcgtccccggggcgagggtaccgcttccccaaaagctaggggcaaaggcgagaaccacgaccgaggcccagaatctattttgaatctcacggacacgcccccgatcccagatccgaggtccatgatttttatctctggcccagagacgcgatggtagggctcctccacctacatctgggcttggccttgcttttactcttacccttaagatgtggaattcggccatggcccctgcacctagaactagtacatcccccaaactccacccggaacggcgtggaccttgctgggtccacctcccccatttcccttgacccggggagggg

SEQ ID NO: 171337 - DNA, 321 bp, Zea mays
  Clone ID: MRT4577_87843C.1
ggtaccagtcaagaattgccgggccgacccacgcgtccaatgattaagataggagattattgttgaggagagagatcgattattattattgctgctagtgcatatgtttagtgggtgtataggttgggaacacacattcatggaggatggaaccacacaccgatcaattggagggagaaagagattgttcgggtaattaattgtaatatatatagagagagacaattgagccacatacatatataagctattagtgcagtgcttgctgttgggtcaaatgattgggtatgcgtatatatgccagtgaaaaattgtggagcc

SEQ ID NO: 171338 - DNA, 514 bp, Zea mays
  Clone ID: MRT4577_87844C.1
accacgcaaccggtttgtttttagctcgcgcgacaggacaaaacacagccgatgggggggatgcaaactacaagcactgtgcctatctagcatggccaaaaagtgctacacaggccaatagagctgcaccatcaaatgctgccaccgcaaccgaaaaggacaaaacccacacagagaaaatcctcgtacacatcgagatgcaacataaataccagaaaggcgacaggagcaaacccacatcccagacaaaggaggcaatcctgaagaagaaaaaatcaagcaaattaccaaaggacgatgatacacaactaacctcacacggggctgccgaagaaccacaaacctccaaatcttctgaaggcaagaggaaaagaggaaaaaacaaacatgccactgtataaccaaaaaccatagaagaaagcaataaataaacgcaccgatgatgaaagccagctaacacaccggagagctgcacgactgaaaacgtccaacacttccaaaaggaaaaggaaag

SEQ ID NO: 171339 - DNA, 342 bp, Zea mays
  unsure (1)..(342): unsure at all n locations
  Clone ID: MRT4577_87845C.1
aaaaagaatatattatgaacattataattacaaaataatattcaagttggtgcttctcaacggcggattttttaaaaattagcacgcgcacaaactcaaacancaatttatcctatatagttaataaaaactcatctacacacttattcatgttaagttgcttatattcctaaaattgtacagctctcaacgaatattttgtctcatgataatcccctaactttttataaaagtcttaatccatcttttcttaatatcaaaccttattctttaatttatcttcctgtatatgaaacttttaaacatttgtctaaaacatatatacttaattactaataacct

SEQ ID NO: 171340 - DNA, 622 bp, Zea mays
  Clone ID: MRT4577_87846C.1
gctcgcgcacatgccgctgtcgtccaagatggacttctgcgggttctgcgtcgcctgggcggggacgcacagcaggctggacggcgccgacaaacagcggctcccgcccgcccccgccggcggcgacgcggagaaatggcagcgggtgccgctgccgtgggagctcttccagccggcgctgcacatcgtggcgcactgcctgctgggcaccacgggctcggacgagctgaaggcgcaggccgcccgcgccgcggaatgcctgtattggagggccaccgagacgatggacgcgcgcgcggtgctggccaccaggagcctcgtgaggctgtcgcagatggtggaggaaccgatcccggagccctctttctctggcgccatcgagaatacggcggagctggaggccatgagggccaacattctcaactcgaacaactgatagactggtgaatactgacaacgtattcagctaatgcaacgagtatttatttattatgggtagcattacctctggcattcggatagaagtactccagtctctcttgtattgtgcagcagagagattacgcgcaataagtgatgtaatcgtttgaaaactgaaacaaactatcagaatgataagttt

SEQ ID NO: 171341 - DNA, 468 bp, Zea mays
  Clone ID: MRT4577_87847C.1
ggccgcttttttttttttttttttatttcacatatttatttaatctatctaacaattcggctaacaacttgagtgccagtaataaatttagcttagattcactactttgattaacgaatacgccgggtttttcgttgattacacgttaaataccgtactaatattaaattactcgaaactaataacccaagcaaaccacatagaacgtaataactactataaagcaagggatcagcaacatggatgactaccgatcaaatcactttaacgactcaggcaatctaataaatattaaacctagtcgactgtaataacgaaccaacttaccatccattaaatccgacttaaacccacgaaatcgatgacttgttcgaacattttgtcgagcacttggtgaatatcacgcttctagcttcgtcttcgcccaacgcttgggatttcttgacaacgcacagaacgacgacgatc

SEQ ID NO: 171342 - DNA, 1328 bp, Zea mays
  Clone ID: MRT4577_87848C.1
cggacgcggccgattgaaaaagaaaatggtcttgcggtcttgctctccttcctcgtggtcggcggccggtgcagtgcagctgtagccacgcgcgcctcggcaaaccctccgcctcctcgcccatcctcccctccatcccgtcccagccgcagggccatggactcttctgccggcgcaggccgccaccgcgttcgaatcgcagtcgtcggcgacgtgcacaatgattgggcccttgaggaagattcaaaggcgcttcgatttcttcagccggatttagtgctttttacaggcgattatggaaatgagaatgttgaacttgtcagaagcatttcagatcttcagttaccaaaggcggcaattcttggcaatcatgattgctggcacacacatcaattctcagagaagaaggtcgatcgtgttcggcttcagctcgcaagccttggtgagcagcatgttggatacaaatgtttggacttcccatcaattaagctgagcgttgttggtggacgaccattttcttgtgggggtgataggctacttagaccaaggcttctgtcaaaatgttatggtgtcaatgatatggctggaagtgcaaagaagatacacgatgctgctgcaggtgcaccagagggacattctgttgtattgcttgcacataatggaccaacaggtctaggttcaagaatggatgatatctgtgggcgggattgggtacctggtggcggtgaccatggcgatccagatcttgagcgagccatctccgatttgcaaagggaagccagagtttccatcccgctggtcgtttttgggcacatgcacaagagcctggcctacgggagaggcttgaggaagatgatcgcctttggagccaaccacatcatatatctgaacggagcagttgtgcctagagtgaaatttgcccaaacaactcctgggcacgagcaaaatcaacccgaaggatcgggatccatagctccaacgttgcgcgcgttcaccattgcagatctctatgaagggcgtgtggagaagatctctgaggtctgggtgctggtgagtggcgccaggaccgaggtcgaggaggaaatcgtcttgtataagcatcctcgagagcagcatatgttgtgatggttatgagaccattatcttaccaaaaaaagatgtggtgttgtgagacgaaaatgtgatttgtgaatgccgtaaatgtgggggcgatgctgaagttgtgtgttataaagagccaaatgtgggggcgatgctgaagttgtgtgttataaagagccttgtattcgaactgaaaggagcacttcattatagagatcttttacctc

SEQ ID NO: 171343 - DNA, 2526 bp, Zea mays
  Clone ID: MRT4577_87849C.1
gcggccggtgcagctgtagccacgcgcgcctcggcaaaccctccgcctcctcgcccatcctcccctccatcccgtcccagccgcagggccatggactcttctgccggcgcaggccgccaccgcgttcgaatcgcagtcgtcggcgacgtgcacaatgattgggcccttgaggaagattcaaaggcgcttcgatttcttcagccggatttagtgctttttacaggtgattatggaaatgagaatgttgaacttgtcagaagcatttcagatcttcagttaccaaaggcggcaattcttggcaatcatgattgctggcacacacatcaattctcagagaagtaagagtcacgatctcatcctgaaaggagaaagtactaaagtaatttaatttctttttatgtcaaaatgtactggttggtattcaggaaggtcgatcgtgttcggcttcagctcgcaagccttggtgagcagcatgttggatacaaatgtttggacttcccatcaattaagctgagcgttgttggtggacgaccattttcttgtgggggtgataggctacttagaccaaggcttctgtcaaaatggttggtaagagatatgataactaatacatacatatgcttgttaactttctgttttgtactttgatatttcttttgtcatttccttgaattaacattgagattttgtaatgttgttggaatcatgggattacagcttaccacccaagacggtaaaaactgctgaagttattttctcaccaactgcatctcacatgttattactcccattttcatgtatgtgtctctcaggctctcagctgcaggattccaaagtatagtcatatagatctctctctctctctttctcgaacacgtaggagagctgcacatgattatattaggaagaaaaaaggggaagaacccttacaatcttgcaacattcgctgatccagttgtctgggtaaatactagtaacttaaatgatgagtgatggggtggctaacctccaagaaataaggaaatcgactgtttcttgattttttttaaaaaaaaactcccatcaagtttcagatctagattacagagcatgcactgtggtctgttggagaaccaaaaccaatctggatcaggatttcacaagaaataagattgatgccttgattcattgttttgtattgttgatatcttagtcgtatcacatggctggttatcaggggtttttgtaagcagtagaattacaactggaatgacctttaggtggtaggaaattgcgtgaaatggtggtaattgatgactgatacctgtccagcagtgtactctagattgatgcttttacggactgaaggcatatcttatctttagaaggatggctggatttttattgtggagctagcttatttgattcacattcatacatcactaactatgatgttaggaccaaatggtagactacaataggaaatttgcagctctagctaaatcagctactatttggtgtagtcagtcacagtagctcttggaaaatttagatctatgcctggttttattgcactagcaatgtatgctactgccttcttcgttattgcataatactctccagaaaatgtagctccaccttttcttgtgcaatcaagtatagcctcacacaatattctcgtttccttcatcatttcccttgctgatacctgtagttttgatccatcttcacccatcaccattgaacacttactatagttataataccttatagttatggtgtcaatgatatggctggaagtgcaaagaagatatacgatgctgctgcaggtgcaccagagggacattctgttgtattgcttgcacataatggaccaacaggtctaggttcaagaatggatgatatctgtgggcgggattgggtacctggtggcggtgaccatggcgatccagatcttgagcgagccatctccgatttgcaaagggaagccagagtttccatcccgctggtcgtttttgggcacatgcacaagagcctggcctacggtagaggcttgaggaagatgatcgcctttggagccaaccacatcatatatctgaacggagcagttgtgcctagagtgaaatttgcccaaacaactcctgggcacgagcaaaatcaacccgaaggatcgggatccatagctccaacgttgcgcgcgttcaccattgcagatctctatgaagggcgtgtggagaagatctctgaggtctgggtgctggtgagtggcgccaggaccgaggtcgaggaggaaatcgtcttgtacaagcatcctcgagagcagcatatgtgatggttatgagaccattatcttaccaaaaaaaagatgtggtgttgtgagacgaaaatgtgactgttgtgaatgccgtaaatgtgggggcgatgctgaagttgtgtgttataaagtgccttgtattcgaactgaaaggagcacttcattatagagatcttttacctctggcactctgtgactgttattagtaagtaataattctagctaattgacgg

SEQ ID NO: 171344 - DNA, 222 bp, Zea mays
  Clone ID: MRT4577_8784C.1
tcggtagaagaaagagtgttgaagaagtcagactcagaaccaaccctgtttttgacctcagtgctgttgatgctcttagaagagatttaagcttcaagagctaaactcgtactcttgtcttcaataagccttcctatgttgcttatatatgatgcatataatgaatatggaaagtaaggtgaatatcgataaaaaatctggctgttctagcaaacgccagcg

SEQ ID NO: 171345 - DNA, 718 bp, Zea mays
  Clone ID: MRT4577_87850C.1
gggaccctcgaggccggccgggctgttgcgccggccaccacagtgcagaagaacacacagcatccgcctgcctcgccgcagcaatggccgccgccgccgccgtggcgagatcctttctccggtacagcggctcatcgtccctccgcagcgcggcggccagagccgcctcgcgggccggaccggttccgctgccgaggcggatgcccagttctgggccccgcgtactcctaagcgtgtgcctggagtccctgatgcccatgcacagcgccacggcttcggcgctcatgacgtcgctactcgctgccccggcttgcaaggggttgggttggctatcagaagctggtaatgatgacttgtgacactctctagatggaatgtagcagattattatcatgtcacctcagatctacagattattgtgtttctatttgtagatggatgatttgtcattattggagacctgcagtgatggtatctggtctggattatggaatacctcgtgaatttatagtacttggttggcgtctcagttaacatgttttgtgctctgggattccagtttgtatgaaatttacataattcttcctgagatttattttggctcactagctgtcaaaaagactttggtcttgacgaccaggctgatcatgtacatctggactgaatgaacttgattaaaggcttttcacattacaaaaaaaaaaaaaaaaaagcggcc

SEQ ID NO: 171346 - DNA, 402 bp, Zea mays
  Clone ID: MRT4577_87851C.1
atgttgactattgttgatgttgagggcatcgacagggctgttagagctaattctaccaaggtgagggatagccctttgatgagttttgttgctggatttattaagacattcattgtgctcacatgtgtcatattttcgatatcaaatttgccactgatgttcatcatcagtgatatagaattcaatatttgggaagatgatggtgatgatcaagcgaagaatttgttcatccgaagaccatcatggagtaaagtgaccatgaggttgaagatgagggtcaatccattctgtgtaaagggtggtggaggtgagattgatggagggtttaacagaaagtttgattcgatcaaagtggcatttagggatcacctagaagggttggatgtttctcaaatagtgtag

SEQ ID NO: 171347 - DNA, 1040 bp, Zea mays
  Clone ID: MRT4577_87852C.1
cctcgaggcgcggcgggaggcttccttgcttccttatcacggatcaccccaccaccacacccatgggcccgatcaatggccgccgccgccgccgtctcctgctcctcgccgcggttgctctcgccggcgccgccgtggacgcgcagcccgactacttcaaccccaagaatttcaacccgtccatggcgattgtcatggtcgtgctggtcacggccttcttcctgctcggcttcttctccatctacctccgccgatgcgcggggcccccgctgggcgggcccgacgaccactaccatgtgaggcagctgggtctggggctcggcaacaacagctacgcgccgccgcccagcaggaggatgcgcggcctcgaccgggccgtgctcgactccttcccgaccatggcctacgccgacgtcagggcgcacaagggcgcgctcgagtgcgccgtctgcctcagcgagttcgacgacggcgacacgctccggctgctgcccaggtgcgcccacgcgttccacaccgactgcatcgacgcctggctcgcgtcgcacgtcacctgccccgtctgccgcgccatcctcctcgtccccgacgctgccgagcccaccgcgttggctgctgcccctgtcactgcagcgccggatgatgaccatgccgtggtggtcgacgccgcagccgctgccggggagaccgaggaccagaggctcatggagggaggaggccgccgagctgctgcggatcgccagcgccaagcgcgcgctgcgaagcaacaagtcgcagttcccgcgctcgcacaccacggggcactcaattttaggagagtcgctgcttggttgcgctcctccttcactccttctggacgcgtgttgtattcattttttcttcaacaaaaagcatgtacataaaattagtagttttttctttgaaattaagatacatatatactacctctaagtacaagcacacacgtaccttatctcttatgaataaatattagaattgatgaagtcatttttttaaaaaaaaaaaaaaaaaaactcact

SEQ ID NO: 171348 - DNA, 551 bp, Zea mays
  Clone ID: MRT4577_87853C.1
ccaatgttggtgtacgcctgctgacgctatgcgagcgctccgtgccctgctaccgctatgccaaccacctatacaccgcatcacatgcctttaggagcgaggtgcaacccactgcctggaccagcagagggtgctaaaggatgagctcagaacatgaaacagggaagagccccatgattgctttgttcggagctgtcatgagagtgttcgcttgacagaagacctcattgacaccaaaaggaatggaacctatgctgcggttctgagtcagatgccgtattgccactgatacagatgatggcgccaccattttgaattcctaagacattgcacagtgctgatgtgaagggcctatgggcaatattactggatcaagatattaaacttactgcagaggcagaccgtgctgacagacgtagctcgagagcattgaatgcatgtgaagatattattatacactgagaacgatgctgagactatggtggaaggctgacgctagtgctgtccagccagtcccgctttctttgatgaagtacttaatcgacttcctt

SEQ ID NO: 171349 - DNA, 522 bp, Zea mays
  Clone ID: MRT4577_87854C.1
cccggaaaaaattccaggccggttcagcccaaaaaaacactagcggaatcggaacatcaggacaaattcccccccaaaggtcaaacaaggcgggggggggaaccataaaaatggcccgggttaaaaatatcaaatcctaaatgggaaactttctacccaaagacggatagcattatttccagcaccccatgtatggaaaggggccaacgggggcaaaatattttatcagcccccgggggggcagaaaaaaaacggcatccacgggggtttttttttttgggaaattttggaaacgcccttagggggaagttgggggggggagccccaaggggggccataagggccaaattggggggaccccgatttcactgacaagggggggcccttggccaccgggggccgaaacaaaagaattcgttccttaggggggggtttcttcactgggttccccatgctggcctgggggaggaggaccttaagggggacacaaacttttccggaattcaggggggccccggggga

SEQ ID NO: 171350 - DNA, 915 bp, Zea mays
  Clone ID: MRT4577_87855C.1
ctttatttaggtttctcggctgaggctccttactgacatagtacactccacatgcattgcttttgttgagtttgctcaggtaagtaaaacaaagtctgttattggtatattatgatggaattaagattttagttaatttcaagtgctatcggtacacaataagtgtgtctagcaatgggcattatgtgagtcaagcgaaacaaagtcttttattgatatattatgatgcaattaagatgttaattattcttcaagtgatgctggtgaaggacatgctggtacagtggtgagagatgtctcaccactcaggttgcgggtttgaagtagcctctccgtatttgtgtggtgtaccttttttcgagtgctgatgttacataataatggggcctaggagtgagaattatgtgaatcagcttggtttctaattggcggcgtcgaaaagttttttttcacaaacattaccaatttaaaagacgtgctcaaaggatgatatttcttaatggacatatttgattatactgaagtcgcacagttgctatgtgtattgctcgaaatttcgttattttgtgttcaatccaggttggtgttccttttagctatgtttcattatatttctctttgctttaatgttcatcaaaacttagtttaaattaatggaaaattccattcatcaagacttgtgttaataatgtccctaaattagaagaactttgttattgttgctctgttctagtagcttggaaacttgtaataattctagatgtgatgtagtgacaatacataccaataatattgttaacttgtcgaaacaggacggtcctttgtcaatttttgaaaaacatgatactccatagagtaaatttatcattggcaaagacttaaaatcggagttttctgtagtccaccaaaacctac

SEQ ID NO: 171351 - DNA, 828 bp, Zea mays
  unsure (1)..(828): unsure at all n locations
  Clone ID: MRT4577_87856C.1
gccctcctctgtctttcacttctctttctcctcccttccctccccctcgcttctctctcccaggcaacctgcgtgagtgcgtaacggcgtgggctggatagcgactcgcgagcctcccctgcaccttcacccttcgagctccgctccctccactgtacgcggcgctcgaaccgagcatcggaggcggcgctgtcgccgcaacccatcactggattgtgcgggggtggaaacgagtacgggcagtgtgcggtgaggagcctgagaggaaggaggatgggacgagggcgctcaggagggacatcctgaccccatagcggtgcgcacccaagctcaaagtccggcaagttgacattgctgctggaggctggcattcaactgcactaactatacagggagatgtatttacattatcttgattctttaattcagggttaccatcttattatgtgctattttatcctgccaaggcaccagatgacacaaacatattgagggacaggcttttcttttattctttggaaataaacttcatggaaaatgttgtcatgtcattttggctgcagataaattcacttccttgctatttattcagagcatgttttaaagatgtccagattagaaagtaccaaaaatatacatattatatgatgaaagtaacctagagtgtgttgaccacgttgagcccctgaaccaaatacnaagtcagtagttgttccaaaaaaagctacagactcagtctggcttgagtccatttgatcagatctatctgtaccttattctgaattttctagaaacaaatattaatggcatggaaacatggtattatta

SEQ ID NO: 171352 - DNA, 404 bp, Zea mays
  Clone ID: MRT4577_87857C.1
tttttcccattttttttatatttcacctctctttttttttttttggtttgggttgaacgaaaaccaatttttcccaacacaccgcggggccggggggcaaaaccagaacttcacatttatttcaccccgaaaaaagaaagggaaatgaatggacccgggcaaaggcccaatatattggcacatacatgcatacccaaccataaattgaacgtgggggggggcaaaagcaaaccaccacggttttgaatccattcatccacagcggaaacgggggggggaataaaataggggtagccctggtccgcgacctggtgggaggagcccccaaagaaaacctcttcccaaaccaggccaccggaggcccgccccaacgagggggccgacccaaaaaacccagtttccgg

SEQ ID NO: 171353 - DNA, 1083 bp, Zea mays
  unsure (1)..(1083): unsure at all n locations
  Clone ID: MRT4577_87858C.1
caaagaataaaagaaaagcctgtccctcaatatgtntgtgtcatctggtgccttggcaggatanaatagcacataataagatggtaaccctgaattaaagaatcaagataatgtaaatacatctcncctgtatagttagtgcagttgaatgccagcctccagcagcaatgtcaacctgaaaatgtaagatgttggagtatatgcaacaagtgagaaatcaggaaagcaatgtgcagacaaattatgaatttatgcacatacagtagtgtcctcaaaaaaagaaccaggatgtcattctttgcttaatcaatttcaaacatagtattcctagtgtgcaatgacaataactggaaggccccaaaaggatgaagcttgttagctaaatgaaagaatccaattccaaccaacgcactgaatcaaaattgaaaaaaaattccaaaaacatttccacactacttgcaaacacacgaatccaattccactcacttgccggactttgagcttgggtgcgcaccgctatggggtcaggatgtccctcctgagcgccctcgtcccatcctccttcctctcaggctcctcaccgcacactgcccgtactcgtttccacccccgcacaatccagtgatgggttgcggcgacagcgccgcctccgatgctcggttcgagcgccgcgtacagtggagggagcggagctcgaagggcgaaggcgcaggggggctcgcgagtcgctatccagcccacgccgtcacgcactcacgcagacaaatcttgtagcattttagaaattgaaaaaagaggaacacgaagaccttcgttgggccagccacgggagctgctgtgcttgatcttggacgaaacaagtgaatggtcttcagcgggtttcagacacttgcagtcgcttcctattcttctacgattaccttctattaccggcttatgttgtgttgcaaaatgcgttctgtagtatcgctttagtggtcctttgggaaccctcctattcggtaactctaattaccgacagggggtttgtactttgttcactctactccctcttaatgaaaaacgtgcaatgacacggtcacg

SEQ ID NO: 171354 - DNA, 428 bp, Zea mays
  Clone ID: MRT4577_87859C.1
tgcaagcaagccatgggcatgagcaccaccactgacctgtccgcgccaccccactccgccacgctgccctgccgcatggcctcctcctcgtcatcttcctccgtcgccccgtggccgcgtccagacaagcaccgcggcgcgggcgccctggtccgccgcgcgcagctcgtcctgtcgcgcgaggtcgggtggtgcgggcagcgcgcgtggcggaagctgctcagcggctggcgcaggagaccaggtgcgtgtgcagctccccgacggcggccacgggcagggtcaggcccatcacgttcggctacgacgccgccagctacgccaagaacttcgacgacgggcgcagccccgccgcgccccgcgtcgtcgtcggcgccaatgcgggcgataaaccgagcggcaacaactgaccaccccatcgacgttct

SEQ ID NO: 171355 - DNA, 416 bp, Zea mays
  unsure (1)..(416): unsure at all n locations
  Clone ID: MRT4577_8785C.1
ccgggccgcttttttttttttccttctttgcgtttctcttttttttttttttttatttttttttttttttttttttttttttttttttttttttttttttttttttttttttttnaancaatagctagttgcatgcaaagttccaaagcaaataaacagggagatcgaaagacgtttcgctgttgcacgacacgacgaatcgatcgaacgaaagtgtgtttttatgattcccaagattctcgtttatatatagtcctagctactagctagtctagaacgtacagtgcacaccatcttcttccacagatcacagaaagacagcagaaacctgcatggatccgatccgatccggtcctgtcctgtaagatctacacacatgcaaagcaaatcatttcttcttttttttcttcagacaa

SEQ ID NO: 171356 - DNA, 320 bp, Zea mays
  Clone ID: MRT4577_87860C.1
gcctaaatgtcgtacaatttcctcatctgctagaaccaattcgagagggatgcctcctatgtcgccatggcgctctctgtggggaaaacctatgatggacgggattacatggtgaaggatctgttacaagcggacttatatcgcctcaagattgatctggccgaatgacaaatgcccggcctcatggcgtgccgggccctattgggaccgtacaagccgttaggcgggactaggatcttggaacatatttacatgaccatgcagaccgacgaactaataaagaccctgacctacctcgactattagggccaatggggcta

SEQ ID NO: 171357 - DNA, 390 bp, Zea mays
  Clone ID: MRT4577_87861C.1
ctctcttcatttgtctggtgtgcagccagcttccactctatggcattcattcagggactggagctgattctttctactggatgcgagcaatcctcacatcaaaccgtggcactgtgatggagttgggtattacttcaattgagacctttggtatggtaacgcaacttattggctgatcgaaaatcatagaacatgacaacagtgggagagaggatcgagctttgctgaatggtgcacaaaagttgatagatatattgatcactattggggaagctgccgcatatgtactgtatgtaatgtatcgaagagtaagccaacttgtaacaggaaatgctgttgtcattatacttaaactatgctttgctggaattatcgcaatctgatcagatg

SEQ ID NO: 171358 - DNA, 296 bp, Zea mays
  unsure (1)..(296): unsure at all n locations
  Clone ID: MRT4577_87862C.1
cgcgtccggccgccaccccgcctgctcctgctcagcctcggtctcgccaccacttcctccaataccctctccctcccgaccccgtcccanccccgaccccgaccccatcacccccgcgccgtcccccgtccgcactcccccggacgagcagttcgcggcgtgggtgacgcggctgcgccggggggggggggggtccgatctcnccgcggctatcaccgtcgaggaggacccggacctcgcgctcgcgctcttccgatgggccgngctgngcccgggggttccggtacgcgccggaa

SEQ ID NO: 171359 - DNA, 288 bp, Zea mays
  Clone ID: MRT4577_87863C.1
atggccaccggacccgtgggcgccacgaccacgttagggaaaacatctcgtgcggctctatttcctcgccggtgcggtaaacaccgccgtgaatcgggcgtacgccgtgattggggcatagcgctgttcaacgtcgattggattaatctccggtttggctcgcctgggcgcgtgcggctgttcgccggtaatggccgccgtcgctcggcagcgggggccgccgtggtctgggcgggtgaacagcggggtctttggaccgttggatcttacaacgacgggcgagattag

SEQ ID NO: 171360 - DNA, 1408 bp, Zea mays
  Clone ID: MRT4577_87864C.1
cctgcagtaccgtccggaatcctcgttctctccgccggcgcgctcactctccctggtctctcgtctcctccactccaagagaacaggcgccggcgaaaggcgggagcagcgcgctgcccattcaccgccccctgatttcttgggagttgcggatcggtctccggggcagcgtggaacggctgggcccctcggatcgccggagatgctgccctacgcgacggcggcggaggcggaggcggcgcttggccggcccatgacgcccgccgaggcgctgtggttccggtacaccgcgggggtgtccgactaccacctctactgctgcaacatcctcttcctcttcgtcgtcttcacggtggccccgcttcccatcgcgctcctcgagctccgggccccggccgcggtctcgccgtacaaactgcagccgcgggtgcggctctccagggccgagttcgtccggtgctacaaggacgtcctccgcatcttcttcctcgtcatcggcccgctccagctcgtctcctacccggcggtcaagtttgtgggaattcacacgaagttgcctttgccgtcccttgcggagttggcagcacagctactggtgtacttccttgttgaggactacctcaattactggatccacaggtttctccacggggagtgggggtaccagaatatccaccgtgttcaccatgagttcactgcgccaataggattcgcagctccatatgcacactgggctgaggtgctgatactcggcatcccctccttcgtcgggccagccattgttccaggccacatgatcacattctggctctggattatactccgtcaggtggaggctatcgagacacatagcggctttgatttcccattcaccccgacaaagtatattccattctatggaggagcagaataccatgactatcatcattatgtaggaggccagagccaaagcaattttgcttctgttttcacttactgtgattacttatatggcactgacaaaggttacagattccacaaaacatacctagcaaagctgaaggatctggggcataatgatggccagaaaggagacggcagcggacccagctatgtgaaactggattagattgcaagatatagtgcatcttgagtgtttctatggtcatcgacttcactgtggcatttcgaaatgggatattgctgagttgggctggtcacgtgtgttctcatttctgtagcaggcatacagctttcagctctaccttcttctttcttttttttttctagcgtttatgaaattctatggaacttgtacgctgacgaataacaacgcaactctcacgaataacaacgccaattcttaaagttaaaaaaaaaagctccgtgcttttgccaatttggaccagttgctgtatagttttctagc

SEQ ID NO: 171361 - DNA, 1063 bp, Zea mays
  Clone ID: MRT4577_87865C.1
accccatcaccattgtcaccattgctcgccgaaccctagatgggcgcgggggcggataccttagctagccatggtcatcgccgttgagggcaacggcttcgtccacgacgacgaggaggacgacggagaccgccccatccgctaccttcccctcggccatatctactcctcttccacccccgcccccgcaccgcgcccgccggcccagaagaagccccgcttcgacgacggcagaccccccatgaaagtatattaccgccgccgtcgcaagaagctgcgggtcgatgaatcgctgtcgccgccctcgccaacgacggccccactcgcgccgcccgagagggacgagaaggctgggccctcgcgccggaaagactccctcaagcacgagctgctcttccggggccccgcctcacctgcattggatggggaggagccggaacggcgtctaggacgaacgaggcgctgcggaggggctgaaaagacggtttgcttctcagaacctgagaggcggcggcagccggccaggcccaaggggtcggtcgggaggagatgggtcgagttggatattcagactgcggatcctaatgcctttgtcggattggtgtgcaaggttttctggccgctggatgatgattggtacaagggctccatcgcatggtacaatgaggcaaccaagaagcattcagtaaagtatgatgatggtgaagcagaggaccttagccttgcagatgaaaggataaagtttttcatctcctctgaagagatgaagtctttgaatctgaaacttggaatttccaatcaggataagaaggggcatgatgagttgcttgcacttgctgttagctttcatgactatcagggtctcgacccaggtgaccttgtgtgggcaaaaattacaggtcatgcaatgtggccggcggttgtggtggatgagtcaaatgtacctgcaactcgagctttgaagtcaattcggttggaccaatcaatgttggtccaattctttggcactcacgattttgcaaggattaaattgaagcaagctgtgccgtttctgaatggtctt

SEQ ID NO: 171362 - DNA, 364 bp, Zea mays
  unsure (1)..(364): unsure at all n locations
  Clone ID: MRT4577_87866C.1
aacacacttaatanatccccccnanaaaaaaaagccgggaggcgggcattatcagggcaaagaagcagccgcagcaaacaaaaaggccagggggcagaccaaagactagataaacaggtgaaccggccgaaatgggcccctataattccgggaggacaggcgccaagcagagctccgattgagaagcggggggggaagggatacaaggggcagcagaggggcgatacaaacacgggacggggcagcgctagctctccaacaccttttacgcttcgagatgaggggtgacgcctgggagaagtagtgccagatcctcttccgcggggtgaagaaccagagggagaattgctaaaggagcaggccg

SEQ ID NO: 171363 - DNA, 1692 bp, Zea mays
  Clone ID: MRT4577_87867C.1
cgtaagctcggaattcggctcgaggcgggtcaaaaaaaaaaaaaaaaaaaaaaaaaaggatcgatctcttcctacctcagaacacgacagagacagaaccgcttcctctcggaatcgggcgttctgggctcctctgtttcctttcgtcaccgtcctcgccgttgtgttcctctctcagtctcggggcttcttctcgcgggcacctccggctgcttcctttgccaccgcagcaccagcgctgtccatggagcccccgccgctctcctcgttgcaggaggagggggaggaggggcctaccgtcgaggactcgtccgtcttctccgccgccgttgtgccgcctcgccccgccacgcacagccactcgctccacaagtacgcgccgctggactggtccgcctacttcgacgaggagcgccgcgtagccatccccgacaccgacaacgttttcaatgcgtacacgaccggatcggaggggcccgtcgtgttctgcctgcacggaggcggttattcggggctttcatttgctctagcagcaagtcaaatgaaggacaaggctcgtgttgttgccatggatctaagggggcatggaaaatcaacaacgaatgatgatctggatttgtccattgaaactcttaccaatgatgtcatagctgttatacgtacaatgtatggagatttgccaccagcaattatacttgttgggcatagcatgggcggttcagtggctatacatgtggctgcaagaaaagaaattagaaatcttcatgggcttgttgtcgttgatgttgtcgagggaacagcaatggcttcattagttcatatgcagaagatcttagcaaaccgggcacagcattttcctagcattgaaaaagcaattgaatggagtgtcaaaggtgggccattaaggaacatcgagtctgctcgtgtgtccattccatctaccctgaaatacgatgaatcacgagaatgctatacatatcgcactcctcttgagcaaacagaaaagtactggaaaggatggtatgaaggtctttcagacaagttcctatcttgcccagtgcaaaagatcctgttgttagctggtaccgacagactggacagagctttaacaatcggtcaaatgcaaggaaaatttcaaatggtggtgattcggcacactggacatgctatacaggaagatgtacctgaagaatttgcatcgcacatactgaagttcatatcccgcaacaaaatagggcctaacggtgttgagatacctgggctcattaaaaaatggcagcagtagacataatgtacaagttaccgttctggaaaatgttcaggaaaatgatgagtaggtctgcctatccgagttctcttcatatcgaattaaaaaaaggttcaagatgatcatgcgatcgttaacaatcagtcattggtttcgtcatctgttggcaactctcccatgtcgcttgagttgctttgtttctgacatcactctgcgacctgccggcgtcttttgtacgagggttcttgtatgtttttaggtagagctgagtgcagtgcgttgtaatgctttccgtgaggttactatactgctatcaagcaggatcagctcgttatgacagctctgtttcgaatttctgctggcctcggcaagcttgatgggagtaaatcgaagaagccttctttgattaaaaatttaaaaaaaaa

SEQ ID NO: 171364 - DNA, 529 bp, Zea mays
  unsure (1)..(529): unsure at all n locations
  Clone ID: MRT4577_87868C.1
cttcttcctggttttcagcacaatgactagccctcgtgtcgtcaccgtggaataagctaccagcagtgaaatagttatggtgacatactgacatagggngaaataattatatgaagcagctgaaaggtttctattatgcatctttgctgttaatattgttttgtttcatgttcaaatactttttgaaccaatcctgtccttcttccagcaatacttgcagctcacatgtaaatgtaaagactagcctgacacccccatcaattgaactattgtttcgttgcaaaaaaaaaaaaaaaaaaaaaaaaaaaaaaaaaaaaaaaaaaaaaaaaaaaaaaaaaaaaaaaaaaaaaaaaaaaaaaaaaaaaaaaaaaaaaaaaaaaaaaaaaaaaaaaaaaaaaaaanggggggggcccttccgaaatttttttaaaacgggggggggccccccnttttttaaatttttttatatttatatttttattttttanttttttatttttttttttttaggtttttatctttttttttt

SEQ ID NO: 171365 - DNA, 151 bp, Zea mays
  Clone ID: MRT4577_87869C.1
cacccatacctggagcccagacactttgtggatgagaaggccgtgaatgagaaccacaaggactacatgttcctggagtgtatccagtgtattaccgagatgaagactggcccatttgcagagcactccaaccagctgtggaacatcagcg

SEQ ID NO: 171366 - DNA, 259 bp, Zea mays
  Clone ID: MRT4577_8786C.1
acgctgacatttgctcctccacaacttcctcctgggggcggtgttattgatgtggggtcagggaacacaacattatatagcgtaacacgacaatacaatgacattggtgcgatacatctgaattctccaaactgactcacgtcgcaacgcatactaccagcaccagcaggtgaagtcgctaataggctccaagtgatctctctttctacaaattgcgcagacggaatagacactgtgaaccaacgtgatctatggcatt

SEQ ID NO: 171367 - DNA, 1391 bp, Zea mays
  Clone ID: MRT4577_87870C.1
ctcgaggccggccgggcgcgcggacttcatcagttgcagacttggcagttttttctcctgcctctgcgtgcggtctccctgtgtctgtgggcaccgtgtctgtgacccttccctctcgcgtgcgctctccctatcgcgtgcctatcgctctctctcggcgtgcgtcagccaggcaaaccgccggcgccctagctagccaggcctctgtcccttcgccaggccttcatcggggactagcacacgcacccactagatgtctgcgccgaacggtccagctgcttctccgatggtgtaccctgtctaccttaccggggcattcccccagcaagcaggggatgaccaggctcaaggtccggggatatatgccatacaacagaaccagttagcggctgcgatgggaatggggtgctatgctccaaccacactcattccactcgcttacaatatcccaacggaaagcgtcggagcttctgctggtgaagagaatgtacaggatgctaggcagcaaaatggacctcaaagacaagttgttgtgaggaggtttcactttgcttttcagcttgacttggccctgatcatcaaactagccgctgtggtgtttctctttagccaggaaggctcaaaacaaaggctgtttcttctgatactgtttgcctcattgatttacttatatcaaaccggagctattacaccttttctaagacggcttcagcgggcaggaggtgcagctgctcatccaccacaggctcctgctcgggtcgagaaccgtgctcctctgcctgcccagaatgatggcaatgagcagcccaatggccctgcaaaccctgaccaagctgcggagaaccgcgaacaagatgctgcagctggtaacgagaatccgcaagaggcagaggtagaaggcaatcggcgcaactggcttggaggtgtcttgaaagaggtccagctggttgttgtagggtttgtcgcatcgcttcttcctggttttcagcacaatgactaggcctcgtgtcgtcaccgtggaataagctaccagcagtgaaatagttatggtgacatactgacataggggaaataattatatgaagcagctgaaaggtttctattatgcatctttgctgttaatattgttttgtttcatgttcaaatactttttgaaccaatcctgtccttcttccagcaatacttgcagctcacatgtaaatgtaaagactagcctgacacccccatcaattgaactattgtttcgttttctgaaatatgggatgcctacacctgaatacagaatcagcccctgttgtaagatgtctgaaacatgaaggatgtgaacgttttttcggggctgaaaccttgaataatgtgagtcgcgtaaaaaaaaaaaaaaaaaagcggcc

SEQ ID NO: 171368 - DNA, 448 bp, Zea mays
  Clone ID: MRT4577_87871C.1
ccggccgggttcgtgtgtctgtcaatcctactccgcatatctgaccatcgactcgaccacctcctcgcatcgaacgcacaggagctgtggcgcgagcggtggctgatcctctcgagggcatcgatatcaggagatcaagaaggccgcgaatgccttcacgagcgactgcatcaagaccaagtatcaacctgatgctgatctccgcttcacactagaagcgcctgcaagaaccctagtctgggtctgagaatgggaagcgtggcaactcattcgtgtcagaaagcactacgtctcgcgactgaagaaattgcaccgactattctgaaggaacctctctccaaaaccaaactgtcaaaattagagctgaattttgtacagatacacaacaagctatactcgggtacatgtgcttgctgactcttgagatcgcaactgatactgatcatct

SEQ ID NO: 171369 - DNA, 1334 bp, Zea mays
  Clone ID: MRT4577_87872C.1
ggaggtgattcaacgacgagagtaactgaagaatactgacaaaatcaaccgagaaaaataataattggtgtatctcactctgacattatttttctgctctgctagtactcttaagtataaagggagcatccttcttgacgcgactcacattattcaaggtttcagccccgaaaaaacgttcacatccttcatgtttcagacatcttacaacaggggctgattctgtattcaggtgtaggcatcccatatttcagaaactcaaatcatagctcatttgatggggtgccaggctactctttacatgtgagctgcaagtattgctggaagtatgataggattggttcaataagtctttgaacttgaaacaatataaacagaaagctttgagcagcttcatataattacttcccctatgtcaccataaccaaatcactacacatagcttattccacagtgacaagatgaggcctagtcattgtgctgaaaaccaggaagaagcgatgcaacaaaccctacaacaaccagctggatctctttcaagacaccttccagccaattacgccgattgccttctacctctgcctcttgtggattctcgttaccagctgcagcatcttgttcacggttctctgcagcttggtcagggtttgcagggtcattgggctgctcattgccatcattctgggcaggcagaggagcacggttccgcagcaggagcttgtggcggacgagcagctacacctcccgcccgctggagccatcttaagaaaggtgtaatcgctccagtttgatataggtaaatcatggacgcaaacaatatgagaagaaacagcctttgttttgatccttcttggctaaacaaaaagaccactgctgctaacttgatgatcagagccaggtcaagctgaaaagcaaagtgaaacctcctcacaacaacttgtctttgagggccattttgctgcctagcatcctgtccttgctcttcaccagccaatgccccgacgctttcagttggtatattgtaagcgagcggtatgaatgtctttggagcgtaacctcccatcgcccccatgaactgattctcctgtatggcgtatatccctggaccctgagcctgatcatccataccctgctgggagaacatccctggcacgagcatcgggtacatgagcggaaacgtcggagaagcagcagttggagcgcctatctggggcgaccggatcggctcgcccgacgcctccgccggcggcgaggaggagtgcgcgttgctctgggtttgggcgtcggcttccgccatgggagacgagaaggggggagaggtccgtctgtctgtg

SEQ ID NO: 171370 - DNA, 386 bp, Zea mays
  unsure (1)..(386): unsure at all n locations
  Clone ID: MRT4577_87873C.1
cttcttctaaaaaaaaaaaaaaaaaaaataaatagaatatttttttttttgggggctttcctttaatagatagatggatttggtttagaggcaaacagggtcaaagggaaagaaaacaaaggggggggccaaagcaaggggggaggaagaacgaacgaacaaaaagcagcgggggggcccaacacggacaaagggagaaaaagaaagacatgattggcgccggaagcgaaagaccgcatgaagccagacagggaggggaatggaacaggcaaagagaggggctattcaaggagaaggccaacccaggccggagagaagggggggggcgtgtttggggggngggaaggatggcgggccgggcggggggtatttcttgnngggggggc

SEQ ID NO: 171371 - DNA, 1322 bp, Zea mays
  Clone ID: MRT4577_87874C.1
gggtacctcgaggccggccgggaagaaacccacggacttcagcagttgcagtgccggctgcctccctctcgcgtgcgctcgccctgtgcctctcgcgtgcggaagctaggcaaaccgccggcgccctagctaggtgcccaggccatcgtcggtcccttcgccaagccatcgtcggggtctcggggattagcacccgcacccacaagatggccacaccgaacggtccttctgcttctccgatggtgtaccctgtctacctttctggggtatttccccagcaaggcggggatgatcaggctcaaggtccagggatatatgccatacaacagaaccagttagcagcggcgatgggaatgggttgctatgctccaaccacactcattcccctcacttacaatatcccaacagaaagcattggtgctcctgctggtgaagagaatgtacaggatgctaggcagcaaaatgtacctcaaagacaagttgttgtgaggaggtttcacttcgcttttcagcttgacttgaccctgatcatcaaactagctgcagtggtgtttctctttagccaggaaggctcaaaacaaaggctatttcttctcatactgtttgcctcattgatttacttatatcaaaccggagctattataccttttgttagatggcttcagcgggcgggaggtgcagctgctcatccaccacaggctcctgctcgggccgagaaccgtgctgctctgcctgcccagaatgatggcaatgagcagcccaatgaccctgcaaaccctgaccaagctgcagagaaccgtgaacaagatgctgcagctggtaacgagaatccacaagaggcagaggtagaaggcaatcggcgtaattggctggaaggtgtcttgaaagagatccagctggttgttgtagggtttgttgcatcgcttcttcctggttttcagcacaatgactaggcctcatcttgtcactgtggaataagctatgtgcagtgatttggttatggtgacataggggaagtaattatatgaagctgctcaaagctttctgtttatattgtttcaagttcaaagacttattgaaccaatcctatcatacttccagcaatacttgcagctcacatgtaaagagtagcctggcaccccatcaaatgagctatgatttgagtttcggaaataaaggatgcaaacacctgaaacctcgaaaaaaaaaaaaaaaaaagcgtcgaaacaagaatgtcaacgttttttcggggctgactattgtttcgttgcagaaataaaaaaaaaaaaaaaaaagcaaggccggccgccaactaacgagct

SEQ ID NO: 171372 - DNA, 103 bp, Zea mays
  Clone ID: MRT4577_87875C.1
gctgacatggactggtacttgaaggcgtaccttcccgatgacgccgaccggtgccacccggcgtgcaacccgttcgtgcgcaacggactgcgcctcgctgtgc

SEQ ID NO: 171373 - DNA, 447 bp, Zea mays
  Clone ID: MRT4577_87876C.1
atcttttttttttctctttttatttaggcatttagattccgtctaaatcgaaggcacatatacataaacacttagtggaaacgtacaacacacaccttgtaaacatcacaggaaaattaaacaataaacacaacaggttttcctttaaaaatgcacgttggtttactttcaaagcagatttactcgcagcagatgaataataattattaatattgtcaataaatggggtgtgcaaaaaaaaagtgagcttcggctttcactcatgttatattacgatgattgtgtatcaacactaacaagagccttggctacttgcacattattgcgaatggctataataagatgggagaacttagtaaagtgagcctctgttctaatgaacccaaggatctttactttcaagttatgatcgacaaagtcacaggtgaatgtctccataatatgtgc

SEQ ID NO: 171374 - DNA, 330 bp, Zea mays
  Clone ID: MRT4577_87877C.1
ggaaaggactgcctttcacaccagagtgtctcactcccctctgacctccagaccagatggggcatgagccagccagctcagccaggctccctgtgtcctgggaggaagtgtccccatcccccatgccccttatggggagggagggcgtctaatgctctctctctgcctccccccccatcctgtcaggcacaggtgacgggggcagcccatgcgagcccttctcctgctgctctgggagggccagttccacattgagcctgctggtcccatggacaatgatggcctgggctttctgaagcctaaattccagcctctgcagttcatgtcccc

SEQ ID NO: 171375 - DNA, 247 bp, Zea mays
  Clone ID: MRT4577_87878C.1
gcgtgccaccctgtgcctaccagactccccgggcgtccccaagggggccacctacgaggacgctgacggcaccctacaatgatggcgaggcagtggagaaactgttcgaggacaacacggaggagattgctgccgtctttctcgagccagatgatggcaacgctggtttgattcccccacaggctggttttcttaacgctcttcgcgacttgaccaaacaggatggtgcgcttctggtgtttgatga

SEQ ID NO: 171376 - DNA, 310 bp, Zea mays
  Clone ID: MRT4577_87879C.1
aaccacgaccatctgatgagtcttccgagagacctgcacaacctgaatgccaacattgcttgacgagcggagcctgtctatacatgacgaaatgcagacattaccatccaaggtcgcgccagactgcaccactcaccagcaggtctgagctcccactcaggctgagcctatcaaagctgatcaacgctgcgatgcacttactatggacgctcatggcattctgcacgtatgggccgacctcgcatcgatgaagcacgcattgatcttctggcctaccacgcaggcaagctgaccacccatcacatgggca

SEQ ID NO: 171377 - DNA, 839 bp, Zea mays
  Clone ID: MRT4577_8787C.1
gctgctctctgcgtttctcggcgattgcttgttcagctacccgccgccgcctcttctacccgcaacaacggctgccccgagaccgagcacgcgtctcccggttccctttcctgctcgcctcaggcccgcgtccctcgtcgcccgacggctgacggcggaggcgggggaggcgctgagcgcgttatccgccgcggagggcgacgacgaatacgaagcggagctccaggaggaagggtttccgagctgggcgggcggcggcgaggaggaggactacgaccacgaccccgaaatcggagacattatgggggactacttcgacgaccccaagaagggccaaacccgcgtgggaatgaatggctttcctcgtctccgttctgacgaatgaatggctttcctcgtcttattcccttgcttcactcacgccctctgcgctcgtgcagatggaggataggataagaaagaaacgccacaagatcgtgcaaaccaagaccggctctccaaaccccatgaaggtcgtcttcaacaaatttgacttctccaattcctatatatggttcgagttctacaatgttttgttgccaaaagatgttacgttgatttctgattctctgcgatcatggcatatagttggccgtcttggtggctgcaattctatgaatatgcagttatcgcaattgcctttagattgtaaaaggctgacttatgatgctcttgaaggagctaccgtcactccgacgtccttttacaacatttggtgatcttgagattcaagataatctagcacgagtatgggtagacattggtattcatgagccattgcttctggactcctgcttatg

SEQ ID NO: 171378 - DNA, 132 bp, Zea mays
  Clone ID: MRT4577_87880C.1
gccaccactatatacatcgaacgaggtttggcaagaaggcacttgtagtggaccgagcacgtcctggccctaggtagtcccgtgcggtcccctgcggtgcaagtcggccggcgacagctgactgctgcgtcc

SEQ ID NO: 171379 - DNA, 457 bp, Zea mays
  unsure (1)..(457): unsure at all n locations
  Clone ID: MRT4577_87881C.1
gggatctcccttctgtagattagtacgagagacgcttgttgagttggaattgccacatctgctacacagctgcgcacgtggcagcctcaaacgacaagaagttttcaagaaaaagggagttttccaggcgccttacatcgaagatcctaacacgggagtccagatgttcgaaagcgcagaaatcatagactacctgaaggcaacatatgtcctgtaccaaagctcatagtgacgttatctccaatagtcattgtaaagttgcatggaccgtgtaaattcaattctttccggtaataaaaggaaaagataaagtaaaccacaagttctgtatgatgcacagccgatttttatctatgcaagtctgaactttgaagttaaaaaaaaaaaaaaaaaaaaaaaaaaaaaaaaaaaaaaaaaaaaaaaaaaaaaaaaaaaaaaaaaaaaaaaaaaaanaagg

SEQ ID NO: 171380 - DNA, 246 bp, Zea mays
  Clone ID: MRT4577_87882C.1
ccggaaggcaaagcaggagcagaagcgctaccgcaacctgggcaacatcagccggggtggcagtggcggcagtggcaatggtgtggagaagcgcaacggccctgttccgcgcagccgcctggaccccgccaaggtgctgggcaagacgctgtgcccgcgcatccacgaggtgcccctgctgtagccccttctgtgcaagaagatcgcccaggagcggctcacagtcctcctgttcctggaggactg

SEQ ID NO: 171381 - DNA, 473 bp, Zea mays
  Clone ID: MRT4577_87883C.1
gatcgatgcatctggaacgtagcatgcgccacgtacttaggtacaaaaagacacaacaggacaggctttatatacgcacgccgctgcatgcaggatctggcaacacaagcttgatcaacagcattttttacccgtgtttgtgactcgggacagcgcgctagacggacaccgacatccgggcaggttacaaacatggacgcatcgtaactcatgagcatgggttgcagccagccactatgctgcacgccacaatccaagggcaaagccgtacttgccgggaatggctgcgactgagcacaagcgaacactgtagaccctgcaggacaggctatcgttgcaccagctcgcaagctggaccgccgatctgttcctcgccgggctggacaggctctaccctccgcttgaggacgacgcgaggaagcgagccctccctggccgttgggttcggaaacacactgagccagaacaggacc

SEQ ID NO: 171382 - DNA, 790 bp, Zea mays
  Clone ID: MRT4577_87884C.1
agttcctgtccatggtggccaacccggccagccacatcaccgtcatcgggcaaccttgtcacggccagggcggcggccagaatgggctggcacgaggccgccgtggccatcttcgccgtcggcgccgcgcactacctggtgctcttcgtcacgctctaccagaggtttctcggctccgactcgctgccggccatgctgcgcccggtcttcttcctcttcttcgccgcgccaagcatggcgtcgctcgcctgggacgccatatccgcctccttcgacacctgctgcaagatgctcttcttcctgtccctcttcctcttcgcgtccctcgtttcccggccgacgctgttcaagcgttccatgcgtcgcttcagcgttgcttggtgggcctactccttcccgctgacgctgctagcgctggcgtcggcggagtacgcgcgggaggtgcggcaggcggcggccaacgcgctcatgctggcgctcgccgttctgtccgtggccgtcaccctcgcgctcatgctcttcaccgccctgcgcaccgccgacctgttgccgcgcgacgaccctttcgactgcccgccccagcgtcctcctcgtaccagctatgcctagcactagcaggcatctatgagcatgtttttttcttctaagaatccgactgtaaaaagaatagctgtgtgattaactactctctctattctaagtcataaatttgagaatttttctctacctccaaaatcaataatcctcgacacaactatatatatatatatatccattgagcttggaccct

SEQ ID NO: 171383 - DNA, 390 bp, Zea mays
  Clone ID: MRT4577_87885C.1
ggtacttagtttttggtgttgttttttttttgtttttttttttctatttgcattttagacccggttctacccctaattggtaaaaggtgtgaatcattcttttggctgggggatcactccttttttacgaaaggtcccaatgttaatactcctcgggggagcccctttggggggggtgggacggggtttcggttttcttgggccggcacaagggaatgcttgctctatgtcgacccctttttaaatgggggcacccgttaataaatatcctttaggagggcggttcccaaaggttcatccctttcaggggtgaccaatccactctggttgagggccgggggtttatcctggaaaaagttgggcaactgaggatgggactatctcccacta

SEQ ID NO: 171384 - DNA, 327 bp, Zea mays
  Clone ID: MRT4577_87886C.1
tttttttttttttttttttttttttttggttttgtttttttttttttttttttttttttttttttttttttttttttaaaaaaaaaaaccgttttttataaaaccaaagggagggggctttcccctgtcatcccagttggtttcccacatataaaaatactttttgggggcaaatttccaagccccaacattttcagccacctcctttttcagaaaacaaataaaaggcccctttcccctccagcccagttatttttggcccatgtaagaatttttttatgttggcaaatccccaagcttagcaacttttgtttaactccttttttc

SEQ ID NO: 171385 - DNA, 285 bp, Zea mays
  Clone ID: MRT4577_87887C.1
cgtcctgattccgggcgccgccctttttttttttcgatcaggtttttagctttatgtttacgacacagcaccacagggggagatcttcaaatttattggcaaacaaacgaaaacccacttatacccggcagagcaaccgaaaatgccaaaaacctcaacaaatggaaaaataaaccatcacagagctagctgggtaagataaacgaagcatgcacgcgacactatggcccccccatcttgcttaccagaagggccaaagctgaggcattcagccttggctcaaca

SEQ ID NO: 171386 - DNA, 1421 bp, Zea mays
  Clone ID: MRT4577_87888C.1
tgtggcacttggtattagggacctattgggacttttccgaacactgggggaagattttaggctttcttgcttgtttaagtgccaggaagcactggaagtctacagaaaactccctgagtcgcagtttaacactggatgggttctatgccaggttggtaaggcatattttgaattagttgattatttggaagctgatcattattttgagctggcacaccgactatcgccttgtacgcttgatggaatagacatctattctactgttctttatcatctgaatgaggaaatgagactaagctaccttgctcaagagcttatttccattgatcgactatctcctcaagcatggtgtgcagtgggcaattgctttgccttgagaaaagatcatgagactgctttgaagaattttcaacgttcggtacagcttgactcaagatttgcatatgctcacactctatgtggtcatgagtattctgcactggaggattatgagaatagtatcaaattctacagatgtgcactgcaggtagatgaaaggcactacaatgcttggtatggccttggggtggtgtatcttcgccaggaaaagtttgagtttgctgagcatcatttcagaagggcatttcagataaatcctcgctcttctgttctcatgtgctatcttgggatggccttgcattctcttaagaggaatgaagaggcactggaaatgatggagaaagctatagcagctgataagaagaatccactgcccaagtatcagaagtccttaattcttctaggactaatgaagtatgaagaagctctggatgagttggagcggctaaaggagattgcacctcatgagagtagtatgtatgcactgatgggaaagatttacaagcaactcaatattcttgacaaagctgttttctgcttcggcattgccctggatttgaaaccacctgctgctgatcttgctataattaagtccgcaatggagaaagtacatctccctgatgaactgatggaggatgacctataagttcactcaagcatcgtgagaaatgaacatttacttcgggttcatgatgacccgcctgtgcttcgtgttcctggcctagtggcctgcttgggcttctcaagtggaactcggaagtcggagctgtaccattagccatccagtttggaatgaaaagaaaaaaaaattaaccatccagttttgtagatttagttttagcctgtaatcagagaacacatgcgcagaagctgcggtagtttaggactctgtacaagtgttggcgaaatgacgcctgtaccattatcaaataacggaaataattaaaggatgaggatccagctgattcaagcaaaaaaaaaaaaaaaaaaaaaaaaaaaaaaaaaaaaaaaaaaaaaaaaaaaaaaaaacgaagaaaaataat

SEQ ID NO: 171387 - DNA, 777 bp, Zea mays
  Clone ID: MRT4577_87889C.1
atgctgctcagcgccgccagggacgccgccctgctgatgctggccatcgtggggtcgtgccgcttcccgttcgacgtcgcggatgccagccaccagcaccagcagcccggcgaggtgaagaccaggctccccgccgtggagtacgaccagctcctggccgagcacgagcagcagtccggcgaccacgatggatgtcagacaataggcgcagaggaggaaggcgtgctcagcaggagcagacagcaccgcaggatgaggcaccctagcagcagctgcaccaccgcccccgatgacgatcgagcagatgttcctaatgcagactcaggcagtccaagccattggtcagactctggccgctatgcagcagcagcagcagcagccccgcctcagcctcagatgcctaaagacaagcgtgctgaattcatgagaggtcatcccccagtgtttgcttactctgctgactccatggatgctgaagattggctgtgtaccgtggagcgagagttgcacatcgctcagtgcaacgacagggagaaagttctgtatggtccccggttgttgagaggagcagctcagtcttggtgggagtcctacctcgccacccatgccaaccccgacactatcacctgggaggaattcagagacaatttccgtcaatattttcccatggcttgtagtgggcttgtcggcggtctccatttccttcttggcgtgatctcccgacatcacttcgagtggttaggctctaatgaagcaccgggctttgataccaattga

SEQ ID NO: 171388 - DNA, 635 bp, Zea mays
  unsure (1)..(635): unsure at all n locations
  Clone ID: MRT4577_8788C.1
cctcacnatcatgaaacaagagagatcaaattttttattgcatgagaataaattggacaccaatcatcactggtgtgagcgccatcccttagtgatctgagccatggagctggctttcctgctttcacaagagcagcacttgatgggcactgagatactgggattgtgtggatttcgagcctggactattgaaatgaacagaaaaccaaacagtcctaaccaaatccagcgtctatgtgacgaggactgattaaggcaccagtgcagggcttcagcgacaatgttcagccaagacattgcaaaccaatataaagatattttccttgatgcctcctatcccccaaaatgattgctcctccttcattgacattggagaaacacataactctgttttttcctgaacgggggatttagaagcatcatgaagggtgtatgtgtagtgagaagctatagatggtgaaggagatagatataggtaatagcagtatggtgtgacaatatgggcggaacaaatgtacaatgtagctatagatatatgtggaatgaacttccgatccttttttttcagttcagctactgttaacaagtactaccaataaattataccgcaatgcatatatatgtcagttcccaaa

SEQ ID NO: 171389 - DNA, 1344 bp, Zea mays
  Clone ID: MRT4577_87890C.1
ggggctggaggaagaggacggcgaggaggcggctccggcttctccgtgggcggaggctgacgcgcaagccggtggcgcggaggcacagaccgaggtgctcggcgccggcgagcctgatctcgagagcaagatcgtggccatcagggacttcttggaggaccctaatcagcccgagaacgagctggtgagcttgctgcagaacctggcagacatggatgttacctacaacgcactccaggtcaagttttcttttgccattttgttctttcactcttgtttggcttacccaatgggtggaccaatcggttttcttgcttgtttgagatgatcaggagcaacaaccatgtgaagggtaaagttttgaagcttatgttcgtgtttctgcaggagactgacatcgggcggcaggttaatggtctgcgcaagcatccttcggccgaggtcaggcggctggtgaagcagctcatcaggaagtggaaggagatagtggacgactgggtgcgcctggacaattccggcggtgacggcagtgcctctgttatgacagctgatggtgactccccacataaaatccaagccagcgcgtccggaaccttgcaggtttcggggtttcagtattctcccagcccacagaggtttagtgagtgccacatatcatcttccactgatatagcattcagtttttgtattttcagtaatgcagtagtaatgtacttatggcagtatgcactttgcggctgaaattttagacggttcaacttcagagatggctaacaatgggtctgagtcaacaatggatgcgaagcgtagggccagtcctgtaccagcacatcataactccaggcagatgaacaacaatcatcattctacaactactactactaccaccaccacgtcatctgctccagctaaagtgacaaaggagcaaaagcagagtcttgtggaccttgacaggcttgattctgccaggaagaggctccaggagaattaccaagaagcacaaaatgccaaaaagcagaggacaatccaagtgatggacatcaatgacataccaaagccgaagagcagaaacgctttcatccgcaagagcggcagcggtgggctcccggcgaggcaccgatagcctaacctccttcgtcggctggatatctgcgacccctcgccaagttgtgccctagaaccgcaacgggaaagaaaaagaagcaaacggttttctgttcttttttttccctgtaccttgactgcctaggtttacccccagtgtaatattgtgcaggtacacaagggtgaaatgatatgtgtttttccgaggaaaaaaaaaaaaaaaaaaaaaaagggcggccc

SEQ ID NO: 171390 - DNA, 233 bp, Zea mays
  Clone ID: MRT4577_87891C.1
ttctgcctccgttctttgcttccttcgtccccccttggctcatcgcgcggctgctgctccccggtgcctgtgctgtccgccggctcgcgttggcggtgtctgccggatcaacgtcccggggcacgggggtcttacctccggtgtgcgcgtcctccctggttggcgcgccgctctctgtcgcccccctcccgcggtcgcgcttggcggcctgctgtacggcgtcgcctcttgcc

SEQ ID NO: 171391 - DNA, 1834 bp, Zea mays
  Clone ID: MRT4577_87892C.1
ttgctggggtgcttgccgttgggcaggggggagcgtgtggggaggagggccgggaatatggggggagcccaaattcggttgcggggggggggggaagtggattgggtcgggtgcaggaaggggggaagagaggggagaaaaaaaaagggttgtcaaagagggggggcagagaaggcatggggaacaaccataagagttggtggctgaagtgggaggggggatgggggagcggaggggaagaaggggggggggtaggagagaggaaagagcgtggggggggggggtaccgcatggggggggggggggggggcggcaaacgttcggagtgagggaaatgcgttatggccggcggggtgtgggggtggggggagggggggggggggagagagagagagagagagagagagagagagagagagagagagagagagagaggtctacgggccaaatcgtccgcggcgggagcttatccgcactccgaccggtgccacctccaagctgagcccgctcctagactcccagtcccctccgcagtccgcaccgccgcctcgccatggaggcagctgccgccgccttcttgtcccctccccgcgtcgccctcgacgtccgcacactcttctccccgccccgttgcctccccgtctcgccctcatcccagctccgcctcgctgcccgcccccgcgcgctcgccggcgccaagccgcggttcctgagcccccatcgagaacccgccgtcgacggcggtcgcggcgccagggatgtcgtcgcgatggtggtgccgttcctgaggggggccgcgtgggagcagccaccgccggacttggcctcgttcctgtacaagaaccggatcgtgtacttggggatgtgcctcgttccgtcggtcacggagctcatgctcgccgagtttctctacctccagtatgacgacgccgagaagccaatctacatgtacatcaattccactggcaccaccaagaatggcgagaagttaggctatgagacagaagctcttgcagtatatgatgctatgaggtatgttaaagttcctattttcactctgtgtgtcggtaatgcatggggagaagctgctttactcttagctgctggcgctaaaggtaaccgtgccgcacttccatcatcgacaataatgataaaacagccaattggtcgctttcaaggtcaggcaacagacgttgacattgcaagaaaagagattcgaaatgtcaagatagaaatggttaagctgctggcaagacacatcggtaaaccaatggaagagattgctcgggacatcaggcgtcctaaatactttagccccagtgaagctgtggattatggcatcatcgacaaggtgatatacaacgagaaaatccaggaagatggcggtgttgtgtcagaactcaaaagatcaaatttgatatagtgttctttttccacaagtagacacgtctttgtatgtttagtggtcattcacgtgcctttgagtattgagtagttaccactcgatcactcattagctggttgtagaggcgtagagcacatagccaatgcattgaacaagcatttccttcccccctctgccgtttcaacgctgtattgcccttacccaacgggcgtgctgaaagatgaattttggtaggttgttgatcgttggtgccctgtttgcgtgtttgttttagcccgcggggaagcatatagtttgatcgtggcaatttggcgtgtggattgttacaatctggaccatgattgtttcagcgcagcttattatagattgtaacagcctgcaggtagcaatcaaaaaaaaaaaaaaaaaaaaaaaaaaactcgctcgtgc

SEQ ID NO: 171392 - DNA, 347 bp, Zea mays
  Clone ID: MRT4577_87893C.1
ggaacggggctggggcttttattcatataaaagggttcccaaagtccccaaagggagagagagggcgcccccctacaaaacgaacaggcctggctccatagccccggggacaacgttcaaaaaaccaaaacggcaaagcccgcaaaattattcagggcgcaagcaccgggtaattttacagggcgataactggctaccaaaaacccttctcgggagactcgaagaactggggccccatctcccgggaaaccaaaaagcaaaagagtttttttcctttcattccttttgaaaaccgggttcattcgttttttttttcgaacttggccccgtcagcccccccttgaggg

SEQ ID NO: 171393 - DNA, 1035 bp, Zea mays
  unsure (1)..(1035): unsure at all n locations
  Clone ID: MRT4577_87894C.1
gccggccgggtcggggaacggcctagcccactccaacgcgcactcttctaggcccatctcacggtctcacctcctatgttccttagcagatcgcaacaaaaccgcacgccctctctctagcccgcgcagtcttcagcacgcacaccaatcgcccacaagcgctcgcaggagaggtcgaaaccctagcttttgcggcggcggcgagagaagatgatctacgacgtgaactcccccctcttccgttccttcctcagccagaagggcggcgccgacaagaggaaaatggaggagcataaaccaaaggagcagaggcccaaggctaacgagaacaagcctgtgatgaacgaatgaatatctccagaagctttgttcaatgtgcaaccaagtccgatgtccgtttgctctggtcagcttaaaaccaacgcttccaataatcctatattggtgacttagtttccccttatagtgttatttgctcggcttgaacatggcaacggaaatgaaacttgaactacctatggtactgtcatcaatttgagactcccatggttgacaacttttgtgcagctctcctgttacagccgtcgtggttggtacagaattgtgggatgcgtcatgttttcatgcttgcttgcttcacattcttaaaaaaaaaaaaaaaaaaaaaaaaaaaaaaaaacaaggcccctagggccnaaaaaaaaaaaaaaaaaaaaaaagaacgccgccgccagccctcactcctcaccatttcccaaaccctacccatacccccgccgccgccgccgccatgccgcccaagctcgacccgtcgncaggtggtggaggtcttcgtccgggtgacgggcggcgaggtcggcgcggcgtcgtccctggcgcccaagatcggcccgctcgggctctccccgaagaagatcggcgaggacatcgccaaggagacggccaagggactggaagggcctgcgcgtcaccgtcaagctcaccgtccagaacgccagccaaaggtctccgtcgtcccctcgccgccgcgctcgt

SEQ ID NO: 171394 - DNA, 334 bp, Zea mays
  Clone ID: MRT4577_87895C.1
tcgttttctcttgtgctttatgtctgtgggaggggaagagtaattcaggctacaactgggtactattgctgacagacgacccgtcacaatataaagcgagacaggtgtgaagcttatgcggtgaggacgggatgcgatggcgtgcaaggcgatgaaattcaaggtccgcttgctattcggatagtgccatccatatgtagtttcggataccatcatgagctgagcgttgttgcagttgaatacgatctgattgatgcgtactatacccccggacgggctgtctatatcgtcgatgacatgcacatatttgcgggggagggtcatgttctcgatt

SEQ ID NO: 171395 - DNA, 628 bp, Zea mays
  Clone ID: MRT4577_87896C.1
ggtaccctcgggctcggccggggggcccttacactagcaccactcccaagcagtaccgagtcctacgagcgttcgcacgcagtgttaagagacaaacggtcgacatggttcgcacctcaatctgccgtagcggtcgccgtggtggccgaggggctgctgctggcagcggtggtgacgacctcggaggccgacatcacctgcgggcaggtgagcttcgtcatagcgccctgcctctcctacgcccgcggcacggggtccgccccctgcgcgttctgctgtatcggcgtcatgaacctgaagagcgccgtcagcaccgacggcaacaggcgcgccggctgcaactgcctcaagaacgccgtcaggggcgtaagaggactgaacgccggcaacgccgacagcatccactccaagtagcggggagagcatcccctacaccatcagcacctacaccgactggtccagggtgaactaaaacctataccactcgcgacgacggccgcctgatcgatcgatcgaccattccgccgtcgccgccggccggatcatcgatcgtcgtcatgatgatatctatcaatctacgcgtgatgatcgattgctacttgtctactgctatggactactaaataaa

SEQ ID NO: 171396 - DNA, 451 bp, Zea mays
  Clone ID: MRT4577_87897C.1
ctcccaagcctgttccacagtcctacgagcagtcgcccgccagtgtccagagacgaaacgtccgacatggctcgcacgcaatctgccgtagcggtcgccgtggtggccgcggtgctgctgctggcagcggaggcgacgacctcggaggacgccatctcctgcgggaaggtgagctccgccatcgcggcctgcctctcctacgcccgcggcacggggcccggcccctccgcgtcctgctgcatcgacgtaaggaacctcaagagcgccgccagaaccgacgtcgacaggagcgccgcctgcaactgcctcaagaaagccgccaggggagccagcgggctcaacgccagcaacgccgccagcataccctccaggggagtcgacgccatcccctacaccatcagcacctccaccgactgttgctgcgtgatttaaatcatataccacgcgcgac

SEQ ID NO: 171397 - DNA, 633 bp, Zea mays
  Clone ID: MRT4577_87898C.1
ggttatttgtttagccatgtcctcctgtcacgcacgctgcccataattagtaaccatagcctaattgggcggcgcccggcccctctctgcaagcaaccacacctgcctgcctgcctgccttttgagggactttgacgtgtgcgggtgagttagagtagagggagcgaactcccagtgcctgaggcaagtacgcaggaggtacatagataggagcaggatggacggcctccacacggagctggcgctggggctgatcgggtgcggccatggcgacctccagacggcgccgttcgtggccaagacgtaccagatggtgtgcgaccctaggacggacgcgctcgtcaggtgggggaagggcaacaacagcttcctcgtcaccgacgtcgccggcttctcgcagctcctcctcccctgcttcttcaagcacggcaacttctccagcttcgtccgccagctcaacacatatggcttccggaaggtgcacccggaccgatgggagttcgcgcacgagtcgttcctgcgcggccagacgcacctgctgccgcgcatcgtgcgccgcaagaagcgcggcgagggccggtgctggcgcctcgtgctcgtctgcagtcggcggcggcgagcagcaccagcacg

SEQ ID NO: 171398 - DNA, 435 bp, Zea mays
  Clone ID: MRT4577_87899C.1
cgagtcctacgagcagtcgcacgcaagtgttatgagacgaaacggtcgacatggctcggacccaattttccgtagcggtcgccgtggtggccgcggtgctgctgctggcagcggcggcgacgacctcggaggccgccatcacctgcgggctggtgagctccgccatcgcgccctgcctgtcctacgcccgcggtacgtggtccgccccctccgtgttctgctgtagcggcgtcaggaaccttaagagcgccgtctagcaccgccgtcgacaggcgcgccgccttgcaactgcctcaagaacgccgacaggggcgtcagctgccttaacgccggtatcgccgtcagcatcccctccatgagcggcgtctgcattctctacatcattagcatcttcatcgactgttccagggtgtactaaaacctataccacgcgcg

SEQ ID NO: 171399 - DNA, 402 bp, Zea mays
  Clone ID: MRT4577_8789C.1
aattatttgcctttttaagtagcagtttaattgctagcacacctttaaaaattcttcaaaatgaaattaaaaacagagcaaagttgaaatgagagcaaacaagcaccatagagggaaagtgaactatttgaagcaactctagcaagcacagtaacatacatacctcatcatgcattattttaaatgcttgtttaacaggaagctgagtgtccaaaactgttaactgaaatgttcatatgaagaatttttaaaggtgtgctagcaattatttgcctttttaagtagcagtttaatttgttttcctattatgttttgcagtttaaaaacacaacaaaatcgctcctagaagcaggcacttctttcatctgcactgcatacgtggcatcagtttaataatttaag

SEQ ID NO: 171400 - DNA, 139 bp, Zea mays
  Clone ID: MRT4577_878C.1
caagcgtattcttttaatgactccagtagaattaagcatcaagtagacaaaagtggaaaagaacctacacttttaacttgtctcactagtgcctaaatgtagtttaaaggctgcttaaattttgtgtgtagttggattt

SEQ ID NO: 171401 - DNA, 1352 bp, Zea mays
  Clone ID: MRT4577_87900C.1
attaaaaactgcaagataaaccattctgtagttggactccgatcttgcatatctgaaggtgctatcatagaggacagtttactaatgggtgcggactactatgagacagaagctgataaaaaactccttgccgaaaaaggtggcattcctattggtattgggaaaaattcatgcatcaggagagcaatcattgacaagaatgctcgaattggagacaatgttaaggtattccaaactgatgttccaacggtcaagaatattaatttagatttttccttaggatattacataatacttgatatgccattttgtcctcttatttttaacatttatttttgaaaatattaacttgaaaatatgaataggcttgcatgctcttttttaaatatgactgtctatacttatctttccctaattgcctgcataaattttcattcttcagttttgtctgtatttaactgaggtaatcaagatgaggttctgtttaccacaagataaaaaactgtcaacaagtcatatatcactttttattataaaaatacaaaataaaacctgaaatgcagagcttcatatcagttctttatttggctttccaatactgctcatgcggatgacattcaagttcaacccagaaagggctgccactatccagcaaaccttgctctgttatcggcattgtttgatagacctgttgcacttgactattcataaatcttcgcttgtcataggattaaacaggaaactttcattattagactttcctgccacaaattttctatggcagcggcatttctcatgagactcgatcttgtagatactcaatgctgacaatgttcaagaagctgcaagggagacagacgggtacttcatcaaaggtggaattgtcacagtgatcaaggatgctttactccctagtggaacagttatatgaagtgaacgtgcgacatgcagctgtgtgtctcgacattcgacaatgatcagcacctggttacatgcgtgatctgcagatcagtctgttggagatcatcggagcaataaaagtgtcatccaaggcattttttctttctttttgctcttttgtgtccttcaatgttgtagggtagaatgttgtagcagcaaatgttagttacatgttgaatcgacattgggggcctggatctggggatacatcatgctgtaaattgatcagtttaattaccatactgtgctgctttgagcgaaaaaaaaaaaaaaaaaaaagaaaaaaaaaaaaaaaaaaaaaaaaaaaaaaaaaaaaaaaaaaaaaaaaaaaaaaaaccaaaaaaaaaaaaaaaaaaaaaaaagggtccctgcccgggcggccgttaagggca

SEQ ID NO: 171402 - DNA, 300 bp, Zea mays
  Clone ID: MRT4577_87901C.1
aatggagtaggttcctcctaatctttccactcccctctctcctttggatcaagctccctccacctggaggaagggctgaagccgggtcgattccgtcgtgcgtcagagcttagaggcgtcaccgccggggcgcgtcaccgggccacgcgccgagagagcagcgcggttactggctgcacgttggagccttggaggttgctggctcgcagcaggctggggctgctggacatggagatcagatggagcataagtcagcgagtacttcaatctcaagttcgagctccccgtccagccccatgt

SEQ ID NO: 171403 - DNA, 588 bp, Zea mays
  Clone ID: MRT4577_87902C.1
ccactcccaagccagtacccacagtcctacgagcagccgcacgcacgtgtcaagagacgaaacggtcgacatggctcgcacgcaatctgccgtagcggtcgccttggtggccgtggtgctgctgctggcagcggcggcgacgacctcggaggccgccatcacctgctgtcaggtgagctccgccatcgccccctgcctctcctacgcccgctgcacggggtccggcccctcctcgtcctgctgtagcggcgtcaggaacctaaagagcgccagcagaaccgccgccgacaggcgcgccgcctgcaactgcctcaagaacgccgccaggggcgtcagcggcctaaacgccgggaacgccggcagcattccctccaagtgctgcgtgcagcatcccctacaccatcagcacctgcaccgactgctccagggtgaactaaaacctacaccacgcgcgacgacggtccgactgatctatcgaccaaccattccgccgtcgccgacggtcgtatcatcgatcgtggtcatgatgatatctatcaatctacgcgtgatgatcgatggctacttgtctactgctatgtactacta

SEQ ID NO: 171404 - DNA, 679 bp, Zea mays
  Clone ID: MRT4577_87903C.1
atgtgacagacagtgttattggtgagggatgtgttattaaaaactgcaagatacaccattctgtagttggactccgttcttgcatatctgaaggtgctatcatagaggacactttactaatgggtgcggactactatgcagagactgaagctgacaagaaactccttgccgaaaatggtggcattcccattggtattgggaagaattcacacatcagaaaagcaatcattgacaagaatgctcgaattggagataatgtgaagatactcaacgctgacaatgttcaagaagctgcaagggagacagacgggtacttcatcaaaggtggaattgtcacagtgatcaaggatgctttactccctagtgggacagttatatgaagcggatgtgcgacatgcaagccagagtgtcatcgacaatgatcagcatctggtttacatgcctgatctgcagttcagtgtgctggagatcatggaaacaataaaatgtgtcattcaaggcactttttctctctctgatcttttgtccttaaatgttgtgggttatatataatgttgtagcggaaaccgttagtacaatgctgaatcaaaactggatggctggatttgggatacatcttcgatgctgtgtcattgatcagtttaattaccataccgtgctgctttgagcgaagccattt

SEQ ID NO: 171405 - DNA, 636 bp, Zea mays
  unsure (1)..(636): unsure at all n locations
  Clone ID: MRT4577_87904C.1
cctgcagncaccactcccaagccttttccacagncctacgagcaggcgcacgcaagggacaagagacgaaacggncgacatggctcgcacgcaatctgccgcagcggccgccgaggcggccgcggagctgctgctggcagaggcggcgacgacctcggaggccgccatcacttgcgggcaggtgagctccgccatcgcgccctggctctcctacgcccggtttactggtccggcccctccgcgtcctgctgtagcggagtcaggaaccttaagagcgccgccagcaccgccgacgacaggcgcgccgcctgcaactgcctcaagaacgccgacaggggcgtcagcggcctcaacgccggcaacgccgccagcatcccctccaagtgcggcgtcagcatcccctacaccatcagcacctccaccgactgctccagggtgaactaaaacctagaccacgcgcgacgacggccgtctgatcgatcgaccaaccattccgccgtcgacgccggacggatcatcgaacggcgtcatgatgatatctatcaatctacgcgtgatgatcgatggctacttgtctactgctatgtactactaaataaaatctctccgtgtgtgcacgtacgcttgcatgtgcat

SEQ ID NO: 171406 - DNA, 2431 bp, Zea mays
  unsure (1)..(2431): unsure at all n locations
  Clone ID: MRT4577_87905C.1
gcgtgacaaagccgctgcaaatgattctatatacctcaatcctcaagctcatgagagagtacttggaatcattctgggaggcggggtttggactcgagcgctcctacctacacagaaatgccacaatgctcacaacaacatcctgtgtccaccgtcagccgagacccacgctccggagccccccaaagggggagaaaagagcaaaaagaaagaaatgcgaacactaagccgagacaacagactgatccgcagatcacgcatgtaaccaggtgctgatcattgtcgaattgacaatgttaagatactcaattatacgcaaaactactttcctcgaattccccattctataaattccagttaaacttaattcgtaagatcaatcataattctcgagttgcaaaccatggacatggctttggcgtctaaagcctcccctccgccatggaatgccaccgccgccgagcagccaattccaaagcgtgacaaagccgctgcaaatgattcaacatacctcaatcctcaagctcatgatagtgttcttggaatcattctgggaggtggtgctgggactagattgtaccccttgacaaagaagcgtgccaagcctgcagtgccattgggtgccaactatagactgattgatattcctgtcagcaattgtctcaacagcaacatatccaagatctatgtgctaacgcaatttaactctgcttccctcaaccgtcacctctcaagagcctacgggagcaacattggagggtacaagaatgaagggtttgttgaagtcttagctgcacagcagagcccagataatccaaactggtttcagggtactgcagatgctgtaaggcagtacttgtggttgtttgaggagcataatgtgatggaatttctaattcttgctggcgatcacctgtaccggatggactatgaaaagttcattcaggcacacagagaaacaaatgctgatattaccgttgctgccctaccgatggatgagaaacgtgcaactgcatttggcctcatgaaaattgatgaagaagggaggatcattgagtttgctgagaaaccgaaaggagagcagttgaaagcaatgatggttgacaccaccatacttggccttgatgacgtgagggcaaaggaaatgccttatattgctagcatgggtatctatgttttcagcaaagatgtaatgcttcagctcctccgtgaacaatttcctgaagccaatgactttggaagtgaggttattccaggtgcaaccagcattggaaagagggttcaggcttatctgtatgatggttactgggaagatatcggtaccattgcggcattttataatgcaaacttgggaataaccaagaagccaatgccagatttcagcttctatgaccgttttgctccaatttatacacaacctcgacacctgccaccttcaaaggttcttgatgctgatgtgacagacagtgttattggtgaaggatgtgttattaaaaactgcaagataaaccattctgtagttggactccgatcttgcatatctgaaggtgctatcatagaggacagtttactaatgggtgcggactactatgagacagaagctgataaaaaactccttgccgaaaaaggtggcattcctattggtattgggaaaaattcatgcatcaggagagcaatcattgacaagaatgctcgaattggagacaatgttaagatactcaatgctgacaatgttcaagaagctgcaagggagacagacgggtacttcatcaaaggtggaattgtcacagtgatcaaggatgctttactccctagtggaacagttatatgaagtgaacgtgcgacatgcagctgtgtgtctcgacattcgacaatgatcagcacctggttacatgcgtgatctgcagatcagtctgttggagatcatcggagcaataaaagtgtcatccaaggcattttttctttctttttgctcttttgtgtccttcaatgttgtagggtagaatgttgtagcagcaaatgttagttacatgttgaatcgacattgggggcctggatttggggatacatcatgctgtaaattgatcagtttaattaccatactgtgctgctttgagcgaagccatggagaccatgctccacttttgtgcctgacgaatataagcgttgctggtttggagtgcggattctaaaaaaaaaaaaaaaaaaaaaaaaaaaaaaaaggtaccctgcccgggcggccaagaaaaaaaaaaaaaaaaagaaaaaaaaaaaaaaaaaaaaaaaaaaaaaaaaaaaaaaaaaaaaaaaaaaaaaaaaccanaaaaaaaaaaaaaaaaaaaaaagggtccctgcccggccggccgttaaggccaaattttgcaaatatccatcacattggcggccgttcaaccatgctttaaaagggccc

SEQ ID NO: 171407 - DNA, 227 bp, Zea mays
  unsure (1)..(227): unsure at all n locations
  Clone ID: MRT4577_87906C.1
gtactcggtctcggaattcgccgggtgcgacgccacgccgtcgcgatgtgtactccactctnactggtggnnttttgagtgcnttggtattctcctaagnngatggccccagacgccntggagnncatgtctctccgttgcggtgtcaactttcttggaaagtgaagcnnagatgatttntngctgctgctaactaanngatggatgcccaacgacctcnnccaaat

SEQ ID NO: 171408 - DNA, 862 bp, Zea mays
  Clone ID: MRT4577_87907C.1
cattgggtacctcgaggccgggccgggcaggccacttaccagcagtcaccactcccaagccagtaccgagtcctacgagcagtcgcacgcaagtgtcaagagacgaaacggtcgacatggctcgcacccaatctgccgtagcggtcgccgtggtggccgcggtgctgctgctggcagcggcggcgacgacctcggaggccgccatcacctgcgggcaggtgagctccgccatcgcgccctgcctctcctacgcccgcggcacggggtccgccccctccgcgtcctgctgtagcggcgtcaggaacctcaagagcgccgccagcaccgccgccgacaggcgcgccgcctgcaactgcctcaagaacgccgccaggggcgtcagcggcctcaacgccggcaacgccgccagcatcccctccaagtgcggcgtcagcatcccctacaccatcagcacctccaccgactgctccagggtgaactaaaacctagaccacgcgcgacgacggccgcctgatcgatcgatcgaccattccgccgtcgccgccggccggatcatcgatcgtcgtcatgatgatatctatcaatctacgcgtgatgatcgattgctacttgtctactgctatgtactactaaataaaatctctccgtgtgtacacgtacgcttgcatgtgcatggtagcatgtacgtacgacgtcgtccatgtataagtgtgtgacgtgtgagacagagagagagagagacaggatcgatcgagagacggtcatgtccttttggctgtttggtttattcatatcacaacttttgagtgtatacaagattatttctgtgacaaaaaaaaaaaaaaaaaaggcccctagggcc

SEQ ID NO: 171409 - DNA, 348 bp, Zea mays
  Clone ID: MRT4577_87908C.1
tggcccttaccagcagtcaccactcccaagacagtactgagtcctacgagcagtcgcacgtaagtgtcaagagacgaaacggtcgacatggttcgcacgcaatctgccgtagcggtcgccgtggtggccgcggtgctgctgctgtcagcgccggcgacgacctcggaggccgccatcacctgcgggcaggcgagctccgccatcgcgccctgcctctcctacgcccgccgaacggccgacgtcccctccgcgtcctgctgtagcggtgccaggaacctctagaccgccgtcagtaccgccgccgacagcgtcgccccctgccactgcctcatgttcgccttcaggtgt

SEQ ID NO: 171410 - DNA, 604 bp, Zea mays
  Clone ID: MRT4577_87909C.1
cagcagtcaccactcccaagcgcgtaccgagtcctacgtacgagcagtcgcacgcaagtgtcaagagacgaaacggtcgacatggctcgcacgcaatctgccgtagcggtcgccgtggtggccgaggtgctgctgctggcagcggcggcgacgacctcggaggccgccatcacctgcgggcaggtgagctccgccatcgcgcgctgcctctactacgcccgcggcacggtgtccggaccctccgcgtcctgctgtagcggcgtgaggaacctaaagagcgccgacagcaccgccgccgacaggcgcgccgcctgcaactgcctcaagaacgccgacaggggacgtagcggtctcaacgccggcaacgccgacagcatccccttcaagtgcggggatagtatcccttacaccatcaacacctgcaccgactgctccagggtgaactaaaacctagaccacgcgcgacgacggacggctgatcgatcgaccaaccatttcgccgttgccgacggtcggaacatcgaacggtccacatgacgatatctattaatctacgcgtgatgattgaaggctacttgtctactgctatgaactactaaataaa

SEQ ID NO: 171411 - DNA, 546 bp, Zea mays
  Clone ID: MRT4577_8790C.1
ctatccctccgacgcgtgacagccgccggcgccgatctgaccagcctcgcttcgcctgcctcgtacgcgcgccggggaaagggaaagtgaaaagggaagaggatcaggggaagatgtgctgctgttgcggcggcgacgaccgcgaccacgagcacggctgccgcccgctcgggttcctgctcggcctgcccttcgcgctcctcgccgtcctcgtctccatcgtcggcgccatcatctggatcatcgggctgcccatctcgtgcatctgcccgtgctgcctgtgcgtgacgctgctgctggaggcggcggtggagctcgtcaaggcgccgctccacgtcatgacgtggttcacctccaagataccctgctgattcctcggtgaccaggaaccgctcgctcgcccccctcgcttatgtcttagtcggcgttgcacatgtccgcagattcttgttgtttttttcccctcgaaacatatatgttcgcagattgatcggcgtatatttcgcaccatggctgatggttcctgctcgttttcccctttgcttc

SEQ ID NO: 171412 - DNA, 362 bp, Zea mays
  Clone ID: MRT4577_87910C.1
gcaggccaccgatagtataaaatcctgctgcttcaacggaagcagggcgagactacaaatctaattgtaggacattgacgctatgcaaccccgagctactaacgccagagtataatgctcattccacctatggtgtgacccagatggcgctggcacaccaagctaccgtacattaccatagcttcaaactattcataacaggccatggtggaactggtaaaacaacatccatgaagaggcatttcactacagacagagagaagaaatatgaaccaaccataggagaggaacaacattcagtgaaaaacaccactaaatgaggtaagatcaagatctactgctctgataccggatctcaagac

SEQ ID NO: 171413 - DNA, 680 bp, Zea mays
  Clone ID: MRT4577_87911C.1
acttttcaccacctcattctgcgccccaccccagtccaccaccgccgaacctctctccatctccgcggggctctccggcgcaccccctcgtgcctcggggaccccgatccgccgcccacaccacgatcgtttcatccatcacacccctctcccggacgcccctgctcgtgactcgcgcctgagcgaaagggaacaccagctagcttggcagctcgcttgatggaggaggagctgagtcagatggagcccggcgcgaaggtgacgctgcagcggcaggcgtcgtcggggtccctgacgcagggcccgtcgggggagctccggcggcagacgtcgctggagtcgtccccccgctcggggcgcggcgggaaccggcacctgttcgggcggcagtcgtccatggaccccaaccggcggcgcggccggagccagagccccgtgggctcccaggccgaccaggacctcgccgtgccggacaacctcgactccaccatgcagctgctcttcctcgcctgccagggcgacgcgcccggcgtcgaggcactgctccgcggcggcgtcgacgtcaacagcatcaacctcgacggccgcaccgcgctgcacgtcgccgcctgcgagggccaccgcgaggtcgtcagcgtgctgctcgactgggaggccaacatcgacgcccgcgaccgatg

SEQ ID NO: 171414 - DNA, 748 bp, Zea mays
  Clone ID: MRT4577_87912C.1
aggtcacttatcagcagtcaccactcccaagccagtaccgagtcctacgtacgagcagtcgcacgcaagtgtcaagagacgaaacggacgacatggctcgcacgcaatctgccgtagaggtcgccgtggtggccgcgccgctgctgctggcagctgcggcgacgacctcggaggccgccatcacctgcggtgatgtgagttccgccatcgcgccctgtctctcctacgcccgcggcagggggttcggcgcctccgcgtcctgctgtagcggcgtcaggaacctcaagagcgccgacagaaccgccgccgacaggcgcgtcgcctgcaactgcctcaagaacgccgccaggggcgtcagcgctctcaacgccgaggacgccgccagcatcccctccaagtgcggcgtcagcatcccctacaccatcagtacctccaccgactgctccagggtgaactaaaatctagagcacgcgtgacgacggacgactgatcgatcgaccaaccattccgccgtctccgacggccggatcatcgatcgacggcatgatgatatctatcaatctacgcgtgatgatcgatggctacttgtctactgctatgtactactaaatagaatctctccgtgtgtgcacgtacgcttgcatgtgcatggtagcatgtatgtacgacgtcgtccatgtatgtgagtgtgacgtgtgagacatagagacagagagagacttcgtgagaccggatcgatcgagagacg

SEQ ID NO: 171415 - DNA, 167 bp, Zea mays
  Clone ID: MRT4577_87913C.1
ctatgacaaaacattccgaagcttttgaatggtgaaggcagacattgtgggccgctgaaatggagggacatgtatggctgcacaagaccctatcaagggtgacaccaaaggctttagtgcataaattcgtggagattggaagcttttgagaacaaaaagcatgtttt

SEQ ID NO: 171416 - DNA, 455 bp, Zea mays
  Clone ID: MRT4577_87914C.1
ggaaaaaaaaccccaccaggggttaaaacaaaaaaaattaaagggggtaaaaaattcaggccaacaagcccaaacagtaaacaagaaacccaaaaaaagttaaaaagcctggaagggccccaataaaagccgcaccccggctttaaaagggaattccaaaaaccaaaaggggggggccaaaaaattaagggggggggccaaaaaaagggggggccccctctcaagcccgaaaaaaaaagaaagggggtggaccttttttttcctagggaatcccagggaaaacgggtccccttttgaaagccggaaaaaaagacttcgttttccccaaaattttaagtctcgcccttgggggaggaaaaaaccccaccccttcttttggaagggggccaggggggggggctaaaaccggtggggcggtttttaaaaaaccaagggcttttcctcctttaacaaaa

SEQ ID NO: 171417 - DNA, 156 bp, Zea mays
  unsure (1)..(156): unsure at all n locations
  Clone ID: MRT4577_87915C.1
caatgatcgattttggcatgctcgagcagcttggaaaggggaggacgggccaaaaaaggccaccccatcatatgggccccatggagaatataaaacaaaataaagattgtctttgagaggcttggcaaggcatgnaaaaaataaggaagggccccc

SEQ ID NO: 171418 - DNA, 578 bp, Zea mays
  Clone ID: MRT4577_87916C.1
cgtcacagcacagcacgtacaagcctctcatcagctatggagtccaccaaggtctccgcgctgctggcgctcgccatgctcgcgctctcctcgtccccgctcgctctcgcgtgggagaaggaggaaccggagcgccactcgtgcgagtacggctcgccaccctagaccggtggtgtccccctgcctcccgtgagtataccgccagtgcccttgccccctgtttccctgactgacgtccccatggcccttagacgcgtaccgaagaagactactgtgatcgaggacccgcacgaaccttgatgatgaaaagcaagagggacaatacctcctgggaaaggacactgattggtcagaacacgagatcctcactccatgactttgacaggctcaacgacatggtgctcaaaatcaagacgcgtggagccattaaggatcagcttgctaaggttacaaaaggtggctgctggtgcttagattgctacggcgggtcctctattcgatctctcgagatggaatgcaccaatttctctgacaggtagcttgtctagatggccattttagactgggtgatctacata

SEQ ID NO: 171419 - DNA, 811 bp, Zea mays
  Clone ID: MRT4577_87917C.1
ccggccggcaggttcccttctccctcctccttcctccaaaccctggcgcaaaccctaatgtccaccgccggggacccttcccgcctctccggcgagtcctcgccgtcgtcctccacgtcctccggctcctcctcccactcctctggcgccgccgatgccgccgccaccaacctcgccctgacggcaccaacctccgccctcgccgatgacacagacgccgatgcccccacctccccgcgcgtggggacgtactttgagaccgaggacgacgcgtacgagttctacaaggcctacgcggcccgtctcggcttcgtcgtccgcaagtccaacaagtccaagaactcacggcacaccgtcacccgccgcctcttcgtctgctccaagcagggcttccgccaggagcccaagaagccccaggacgaaaccgcaggctccggagtcgcgtcctcgccctcgctgtcgctggtgcctgcgcctcggtgcccggactcgcgcacaggctgcctagcgtcgctcaccatcaagctcattccttccgcaaacgccttccgtgttactgacttcgtcgccgatcacaaccacccgctcgcctcttcctcgcccgctgtgtcactagccttgctgtcgccgagctcttcacaccacagcattgtagcagtggccagcttgccggacccaaaggatgggccgcgggccgatatgcattttgagacagaggaggatgcatatgtcttctataacagatatgccgaacatgtagggcttaagtgtacgggcgctcctacaagaaacggaagcgagggatgatagg

SEQ ID NO: 171420 - DNA, 1087 bp, Zea mays
  Clone ID: MRT4577_87918C.1
ggaatcatggaacgaccacgctctctgcaggggaagggggagaaacagaccaccagatcgatcgagacctcgccgtcgtccggcagggttaattttggttcttctccggccgggtgtgcatggcaaaacgacccacggtgcccaagttcggcacctgggacagcggcgatgccgggtacacggcctacttcgacaaggtgcgcgagaacaagggcgccacggcgccgccgctgcgccggccgcgcagccccaacgaccccgaccccgaccgcgagcccgagccagaggaggggccaatgaggagagtccccccgccgtcgtcgtcgaggccggcgaccgcgggaggccaccgcgagccgccgccgccggggcggcgccacgggcagagccaccggcgaacggagagcagcggcagcgcgccgtccgaccgccagagcaagttcgcgccgccgccgcagtactaccagcaacagcaacgcgccagcccgcagcagcagccccgtcatcaccacggcggcggcggcggcggcggccaccagcagcagcagcccccgtccgcgcacgggcacgggcatggccacggccaccgagctccgcacgcgcacaggcagcagcaccacgcggcgccggggccacgggcgcggtccgcctcgccgcagagcaacgccccgcgggcgtcggccgtgcccaggttcggcgtgtgggacgagcagaccgcttcgtcggccgcgcaggggttcacggtgcagttcgagaacgtgaagcggaaccgggaggtggccaggtccggggtgccggctgtgccgcgcgtgccgtcgccgccggagggcgccgcgctgaggcgcgcgcgcgcccatcagaagacccctttcgtgtccaaggtgtttggatgtttccttcccaccactgcaaaaggctgagaacgatgcacgtatatatgtacatgtatatgtatatctaatcttcgcacacgcatctcgttcccccgtacgtacgtgacctgttttaattttatcagcaggctacgagagcgtgttctttctttgattccatatattaattaatatataatgacctgcaattatgc

SEQ ID NO: 171421 - DNA, 171 bp, Zea mays
  unsure (1)..(171): unsure at all n locations
  Clone ID: MRT4577_87919C.1
ctgccctaagaggtttagtcccatttgcattaaaaaaaaaaaaagtagacatagtagtagacaccacgaaacttangcatcaatagaggccggtgcgccttcaagtaccgaggtgctgtaccctttcatgcaagggcatccgtggtgtctactgtgacctaaatttaattt

SEQ ID NO: 171422 - DNA, 480 bp, Zea mays
  Clone ID: MRT4577_8791C.1
atgcaggaagggaaagtagtggtatactcatcccaaaagttgaaggttcatgagaagaattaccccactcatgatcttgagctagcagcagtggttcatgcactgaagacctggagacactatttatatgggcagaagtgtgatatctacacggaccacaagaggctcaagtacatatttactcagttcgagctaaacatgagacaacgaagatggctacagttgatcaaagattatgagctggaaatacattatcatccaggcaaaacaaatgtggtcgtagatgctttgagcagaaagagtcaagtcaatatgttggccgctcacccgatgctgtatgagctagcaaaggaattcgacaggctgagtttcagatttctgaacaacactcaaggagtgacagtcgagctagaacccactctgaagcaagatatcagaaaaggtcagaaagacgatgagaagatcaacgagatccggtag

SEQ ID NO: 171423 - DNA, 719 bp, Zea mays
  unsure (1)..(719): unsure at all n locations
  Clone ID: MRT4577_87920C.1
ctggnccgggacagacaacactcccactanntctccttccaatactctcttccaaacccaaaacaccgcaaaaatgcacttcctcaccctcaccaccctcctcgccactgcgagcgccgtcccaacgctctaccagcgcagccctgttggccacgccgaacccatcctgattaccgactacagcgtgcgcaagacaaacggtacaatccagaatgtcaacttccacatccacggcttccaggcccgcaatgtgtcctgcgctgctggccccatcctctcgcttcccagcgaggctgtcacctgcggagccagcaactacaggtttgtcctgtctccattgaacggcacggatcccaaccagtatgacctgagcgtttaccaccagacaggttttgcctctggcaagtacgccactggcaccgttcctacctgctgtgttgctggcggtctcggaccccaggatttgcagtgcaaccagattcgccagcttggtccttacaagcttactcttcgctcctagatggatgcgggtaagttgacaggggaggatgaaagtaagatggatatgaatattggcaggcctctgaaatggtttttttgtatataatgagggcgagggaagagatggaagattgtgaagacgatgaaagggggaagtgaaaattcatcttcttgtatatagaatgaggatagtttattgaacgatttgctgggcttgg

SEQ ID NO: 171424 - DNA, 405 bp, Zea mays
  Clone ID: MRT4577_87921C.1
ttttttttttttttttttctttttttttttttttttttaaaaaattaattaagaaacttgagcataaggacacagcttccaagcctcgcgttccatttaccggcggcctgtaatcatcttttgggagatgacttttgactaaactaaataaccgttttgctggcatcatacccacctgatgcgcggaccctttgccgtcctgcacgggaaaaaaggggctgggtgaaaaaaaaaattcaggcgagcacgtagccgatgtacggatgcacgcttggattggaagcacgggtcgtcgtggtcatggccgccactggatgctaaagtattactgcttgggttggaaaagcacacggttcaggcattgccgacacgtacgtacgccaactccatcgtttcctgcggtcc

SEQ ID NO: 171425 - DNA, 747 bp, Zea mays
  Clone ID: MRT4577_87922C.1
gaatctccccttctcttctagtactatgagtcggctcctcccatcctcgatccatcgcacagcaggaggcgccccctacccgtctcccgcgccagtgtcggcggcctaaccctagcaccgccacccatatctcgccgccggcctccgtcgaccgcggccctgccccacccctcctccgtagccccccggccgcgcaacgcagcattgcccccgccccacggagacgaggcggtcaggcagagctacggttccgagatcgggcggcagaaggctaccggcgagatctcgtcctctcccccacccttatccgatccgactacccggcccatcaagagatctgcccattgctccggtgtgtgtagtgaataaactgagatgtcagtatcaatgaatatgaggcaaaactcagtcagcactcctatccgtaggacgacaaatccctttgattctgactctgattctgaagtaccctcaagaccatcaagggcacaatcagctccaacgcagcacaccaatcaatctgtgcaagaattggaagattacactctacgtaaagcagaagaaacctcaagcaaagcaaatgattgtgttaggggagccgaagctattagggaagatgcgacacaaatccttctgactttgcatcgacaaggtgaacagatcactcacactcatcgagtaagggctgacatcgagcacgaccttaccatgagtgagaaacttttgggaaagctaggagggatattt

SEQ ID NO: 171426 - DNA, 277 bp, Zea mays
  Clone ID: MRT4577_87923C.1
cgctcggattcctgctcgctttctcctcccacaattccatcgcccgccgcgcctattccattcctttttcccttgctcgcccacccgcccaagaggactctccttcgcgcttctaccccagatcgtacttcgagcttcatagccagccgtacccgagagaggatgagaggatcctacctgcctggtaccctcgctcgggagccggccagaatcacgcccagccaccgtacccctccctggacatgtgcgtggacgggcttgactaccacccaacaag

SEQ ID NO: 171427 - DNA, 344 bp, Zea mays
  Clone ID: MRT4577_87924C.1
gtaaaaaaaaaagattgatttcatactgtcttataacatgtgtaactaagtgcagccttaaatattattggtcagcaaaaatattggatatttaaccagtaccggtgaataacccttttcggtcaagacctccttagatgggaaaaatattttacaaggcgcaatacatttttgatttaaaggaattgaaagggtttcaatcacttaccaggcaaaataccccccaatctgtattaataccccccaatccatatttattgaaaataaccgaacaagcccttagtgaattgataattgttccattgtacgctttgagtacttagagagcacaaaattttttccat

SEQ ID NO: 171428 - DNA, 194 bp, Zea mays
  Clone ID: MRT4577_87925C.1
aataaaaataaatgtatcaaatacattcttgaaataaaaggaacgtacaaccatgcctaagggtgaatagtcgattggggcgcgtgatatattctaagtggtactcaacgaccttcttttgaagaaattccgcttcttgtgcattgttgactactccttcttctacctcaagaagcttttagtggctcaaactg

SEQ ID NO: 171429 - DNA, 304 bp, Zea mays
  Clone ID: MRT4577_87926C.1
gcgtatgccggtttgttgggggaaaaaaaattaacagttaaaagggctacagttctaccaatttaggcccattccgtcaggcagaatgggctaaactggtttaagggaaccattcataggggacataaaagtcactatagcctggaatataacttcatgctgggtttgaacagattgaacttattacacgtgcaaacaggggcagcccgaatttttgacactttgataaaccgttcggctttccggtgggtcttataagaaaagggttaatactttgtttgtacaaatcttggaggacgtaatt

SEQ ID NO: 171430 - DNA, 404 bp, Zea mays
  Clone ID: MRT4577_87927C.1
ggtccagaataccccgggccgaccaacgcttcgaccaaagcttcggcttcatcacaaaccgcacattggaaatcttccccaatttggatggcttggccagggacattgaaaggtcccacccaccattaaatttgtgaaggaatttcgtaaacggtacttcaccccccggttcggtccttggttcggttgttcacatgaaacaggaaaattttgacaaggtcattaatcctgtatccgttgcacatttcccaaagttacaagtaatttgatttgcaactcaagaagcttgaaggtattggtttccagacatgctttcccagtgagattggtaactcaacacaagatttggtactggaaagcaagatattgatgggacacaagtgcacatcccttgatcagactga

SEQ ID NO: 171431 - DNA, 1961 bp, Zea mays
  Clone ID: MRT4577_87928C.1
ccgggatgccccaatagtgtagtgtagcgacaaggtgcgacaacagggcagctagggagctcactgatcttcctactgttaattcctccgatcttctcagccgctgttctagagtgtcgtcgtgagctcactctcacaataaggagaagatctggtgctgagaaaggggggcaacgagaggagagaagaaagataatcggctcggcatggcctcctccttcaacaacaaaaccagtcactggccgagcatgtttaggtccaagcacgccgctgagccgtggcaggcgcagcctgacatcagcagctcgccgccgtcgctcctctcaggtggcggctctagcagcaccaccaccatcggccgctgcctcaagcaccccctctcaggttactcaggtggcgaggagcggaccccggatccgaagccccggtggaaccccaggccggaacagatccggattctggaggccatcttcaactccggcatggtcaacccgccgcgcgacgagatcccccgcatccgcatgcgcctgcaggagtacggccaggtcggcgacgccaacgtcttctactggttccagaaccgcaagtcccgctccaagaacaagctgcgcaccggacagctggggctgggccttgcgcgcgcgccgggttgcggggccgctgcggcgcccgtcacgctgcagcctttgatcccgaaccaattccagctgctcgcctcgcccgcgcaggcgccagctacctcgtcctcgtctgggctcacagctttgcctgcaagtactaatgctgttatcgtcaactatgatctactgcaaggactggtagtgcccgggtccgggtccggggccgtcgtcggtgtcagcaccggcggtgcaccgcctgccgccgttgccgcggcgcccacggcagcgcaggagggcgtcgccgtagcactgtgcatcacggacagcgtcacgggcaagagcgtggcacacaacgtcgcggctgccaggctcgacgtgagggcgcagttcggcgaggcggccgttctgctccgcgccgtcggcgaccgcggcggcctcgacctcgtgcccgtccccgtcgacccgttgggctgcacagtggagccgctccagcacggtgccttctactacgtgctggtataatgcatgacaaattgagcgtacgcgacgcctgatcaccatcagcaccacaagcacaataccaccgcggcgaccaacaccgtggcaagggacgcggcgcacgagcacgccacgacgctggggttgctgcagtacggcttcgaagctagcgcggccatggagacggcttccgcggcggtgccccttgctgcgtcgccgggaaccgctgcgagcgtggcgacggctgggctcacatctttgcctgcaagtactaatgctgttgtcgtcaactatgatctgctgcaaggactggcagtgcccgggtccgggtccggggccgtcggtgtcagcaccggcggtgcaccgcctgtcgccgttgccgcggcgcccacggcagcgcaggagggcgtcgtcgtagcactgtgcatcacggacagcgtcacgggcaagagcgtggcacacaacgtcgcggctgccaggctcgacgtgagggcgcagttcggcgaggcggccgttctgctccgcgccgtcggcgaccgcggcgggctcgacctcgtgcccgtccccgtcgacgcgttgggctgcacagtggagccgctccagcacggtgccttttactacgtgctggtataacaaattgagcgtacgtgacgcgtgaagaaagctagagttcccggtgtgctgcgcgaaagcgcggatggcgtacgtaggtgttgtgtgccgatttattaagtcctggtttaatttgtctcgtatattatgtatgcttgattgcttgcacagttgcactgaagtgcactaagaacgtaagaactatatcgtattgcaatccctgtgtatcct

SEQ ID NO: 171432 - DNA, 330 bp, Zea mays
  unsure (1)..(330): unsure at all n locations
  Clone ID: MRT4577_87929C.1
gcgccctctgctcgagcctgttacgatttcctctcttcgccttcctcccctgccggcccctccaaaccctaggcgccgccggtcaggaagtncatttaccagccatgtttggacgaatgacaaggaatagcagaaannaacaaaaataatatgaagagattgaagtataaaatatagnatttttgtattatttnaanaaanntttaanttattataatattannaaaatttaaaaaattaaaaaaaaattataaaaataaaaaataaannaaaaaaaaaattaaatatttttttaantttatatttnntttttatttattttttttttat

SEQ ID NO: 171433 - DNA, 825 bp, Zea mays
  unsure (1)..(825): unsure at all n locations
  Clone ID: MRT4577_8792C.1
ccggccgggaacctccaacgtcaacgtcgactgaccccgccgagctccgtgttctccatcaacacctcgatacgtgcctctgccatttgttttaaaacgtcttaggacgtgcttcgagccatgtctcaatccctccgaccttacctgcaatgcgtacgcagcagcttgaccgctgcgctcacgctttccaacttcgcttctcaaaccgctgagcgacacaatgtccccgagattgaggcacagacatcacccgaagtcctcctccagcccttgactattgcgcgaaacgagaacgagcgtgtcttgatcgagcccagcatcaactccgttcgtatcagcatcaagatcaagcaggccgacgaaattgagcacatactggtacataagtttacaagattcttaacgcaacgtgccgagtcgttctttatcttgcgaaggaaaccgatcaagggctatgacatctcgttcctgataacaaacttccataccgaggaaatgttgaagcataagcttgtcgactttatcatccagtttatggaggaagttgacaaggaaatctccgagatgaagctatttttgaacgctcgagcgcgattcgtggctgagtcttttcttacaccctttgactagaccctcagctggtatgaggctntggagttctctcttgagagtaccggnttgttgcaatgctattttgaccaagcaaaattatgacagtactggcgtgcagaggctccgataaacgagcttcatgctttggnagaggagggaggcttaagataacgacattgcctagatataaactttaccgaccaaatcgaattg

SEQ ID NO: 171434 - DNA, 731 bp, Zea mays
  Clone ID: MRT4577_87930C.1
gccggccgggccttgaccaaatccccgtcctcctcgccgatctgccgcgcggttgagagccgacgagcgagcccaccgctgtctcgtccgccctatgtatatggatgtccgtcgcagggttccaccgacgcactggagcgtccctaggtgccagtatgcgaccggaggcgaggggtagtggatgcgatggcaggcgggtgatgccttaccgttgccgatccggaacacataccttgtcttctcggcgctgttcgcctcatcgatgtagtacctgatgcctcggtgcagccggaagatacgcgcctcctggccgctctactgggtctcctccgccgagatcttctccatctgcgggctcgtcacgtcgctcatctacctcctcatcttcttcggtatcgccttcgtgcagtctgtcgacttcattgagcgactcacgacgaagatttcatcctacactcacgccacatcgttaacgacggcttcgccgacgcctgcgttgacctcgtgtgcgctgctgagaaggccctgcggcgcaacgaacaaaatgctcttaggactaccacgacatcatgacctcggttgtgtcatggaacatcccgtcctacgtgctgaagtctatgatgccagattgccggcggatcgccgctatctcgtggaaatcgctgcgccggatcaccggaagcgtatatggacggactcgctctctgcgcgttcgactacgcgtacatgct

SEQ ID NO: 171435 - DNA, 261 bp, Zea mays
  Clone ID: MRT4577_87931C.1
atggcgcctcctgttgacgtggctggtctgcgccctaggctgggcgatgtggaagctcctctgaagccgaggtcgagtctgtcttccgtggccgaggtcgagtccgagcccctgggtcggcgaggcggagaccgtcggctgaggccagggcggagtccgagcactggggtcgggcggagcggagttcgtcgtcttctgggtctgagcccaagtccgagccctgggtcgggcggagcggagttcgtcgtcttctgggtctga

SEQ ID NO: 171436 - DNA, 392 bp, Zea mays
  unsure (1)..(392): unsure at all n locations
  Clone ID: MRT4577_87932C.1
gcgaaggagctaaggacgacggtgcctgggttaggcgtttagctatagacnaaagcacctgcggcgctgggcgctggtgtaactacgcggccagtttatcttaaacaggtaagcgtgtgcgaaacgacacggctgtgtgcgtggactggctggtggagtgggagatgtactggctgggtgtatttggtatggatccgatcgggctggtgtatgaaaagggtggttacgtactatataaagatgggaaatcggatttggctccaaaaaaaaaaaaaaaaaaaaaaaaaacattaaacaacagaagttatggtagtaacactcaaaataaccaaataaaataaccaaaaggcctagaactcaaaaagaattaaaaaaaaaggggggggcgtttt

SEQ ID NO: 171437 - DNA, 261 bp, Zea mays
  Clone ID: MRT4577_87933C.1
aagctggtcctcaccaacatggcggagacaccacacacggacgccgtacgcgtggacatcgaggagggtaggaccatggcatacgacaatacaccgaaagcgcccttcgatgctaccactcctaaccccaactccgcctcatacccatactcatcattagatgcgccctacaacagcagcttctacgactagacacaaaaacctcttcattctctggaataactaacaggatatacgttgcaccctgatgatatacaaaca

SEQ ID NO: 171438 - DNA, 621 bp, Zea mays
  Clone ID: MRT4577_87934C.1
aaaccttattttgttgaatctggggtctaacaagttgactggaaacatacctcacagaatcaccagctgtaaatccttggtgcagcttcgtctcagtgacaacagtctgacaggaagcttctccactgatctctgcaatctggtgaatttgacaacaattgagctggctcggaacaagttcaatggccctattcctcctcagatagggaattgcaacgctctgcagaggcttaaccttgcaaataattatttcacatctgagttgccccgagaaatagggaaattgtcaaagcttgttgtcttcaatatctcatctaacaggctaggaggaagcataccactggagatcttcaattgtacaacattgcaacgtcttgatctcagccagaatagctttgaaggttcattgccaaatgaagttggtagactgcctcaactggagcttctctcgttcgctgataataggctgtctgggcagatgccacctattcttggtaaactttcacatttgacagcactgcagattggtggcaatcaattctccggtggaataccaaaggagctgggcctgctgtcaagcttgcagattgccatgaatttgagctataataatctctctgg

SEQ ID NO: 171439 - DNA, 458 bp, Zea mays
  Clone ID: MRT4577_87935C.1
ttttttaatttcttttttttttttttttttttttttttgtgagagcgaggatcctcgaaataacacgcgcaaacattgcctggttctacaaccacacacgggaagaacgaaaagcaccagccctgcgcaaccccagacgcacacgatatgtgcgcccacccacccacagggatggccagagatgcaaaccaggcaaaccacctccctcggacagagggggggcacgcacaattttttaatacaccctgggacacactaaggccacaaaacgccctactggcacacggtggcagttctaacaagggcactgtatcaagcctaggtctatctgcccaaaagaactttctaccctggtaaaggactgactactaacgaccatacctgcaaaaggcaactttggggctatttccgagtactcctcctggcacctgaacccactcctaagggaccgcactgtt

SEQ ID NO: 171440 - DNA, 265 bp, Zea mays
  Clone ID: MRT4577_87936C.1
taccgctttctgcaccatctagttctcctcctttacctgaaaggcctacaatgcagggggatactctaactactgtaatcactaaacagccaccccctactgcaccaccaaaccatatgccatctattatggccactgcagtaaacaggctccctctacctgctgcatgatttgcaaccattactaaacatgtgactccatatgaagtattatgtgttctaactccagactctatgaacgattcttttgcagaacccactataca

SEQ ID NO: 171441 - DNA, 530 bp, Zea mays
  Clone ID: MRT4577_87937C.1
gtctctgctctcaactgctgccatggcagccgcatccgacagcacccacctccctccctcagtcaaccacgacctcgacgaaatggcagccgcatccgacagcacccacctccctccctccgtcaaccacgacctcgacgaagatgatgacgatgaggaattcgacgaggacgacgacgacctcgttgacggaaccgacgacgatggcggcgaacccctcgcgtcctcatccgaggcggctcgcctcgaggccgtgctccggcgtctcaccgcggatgaggtccggatccgggtgcaccaggtcacgatccggggctgcgcccgcacgcgccgcgccgcggtcgaggcggcggtcggcccggacgtgtcgcgcgccgccaccgtgcgggacctcgtgcgcgccgccgccgccgctggtgaccggctccgttgcctcggcgccttcgacacagtctccatcaccctcgacgcggcgccgcccgggatccctggcagcgctgtcgtcgtcctcattgatgttgcggaggccc

SEQ ID NO: 171442 - DNA, 486 bp, Zea mays
  Clone ID: MRT4577_87938C.1
gccactcgttctgatcagaccacgacagggtggccacttgagatgatctggacgccctggccgtctacctatactctatcttactgaactctgcctgattgggtattgatgatgctgctgcatcaatatggctggctgagaagaaataacctctgataattgtaggtgctttccgactgacggggtggagggtacttctgagactgggctgcgcatcattacaactctatactgatagactgagcgggtagagtcatcacccgacttgtggaatctaccaaaggggactgactaaactacaattctgatgatggctgatccacacttctgatactaggtgactcatctcgctaaactaatggatgcgaggcgcaaaaccattagattgctctcactagataggcttgcctttactgacgccctaacgctttttagaaggatgcgacatactgcatacctgacctgtgagctttctgtgccatccat

SEQ ID NO: 171443 - DNA, 444 bp, Zea mays
  Clone ID: MRT4577_87939C.1
tatagaagagcacgacgaagatgcctcctacagctggtaattatgctcgagctcggcgagataccgaagttgtcgggagaggtccggacctgtgggacgacagcgtacgtcagccagtcggcgtggatacagagcggcaaaattcaggagaacatactgttcggtatggagatggacagagacaagtacgacagggtgctcgagtcgtgcgcgctcaagaaagacttggagaacctgccgtttggcgaccagacagtcatcggcgagcgaggcatcaacctcagtggaggccagaagcagaggatccagatagcacgcgctctgtatcaagacgccgacgtctatctgttcgacgatccgttcagcgcagtcgatgcgcatacaggatcccacattttcaaagaatgcttgcttgcggatttggcttcaaaaacagtggtttat

SEQ ID NO: 171444 - DNA, 249 bp, Zea mays
  Clone ID: MRT4577_8793C.1
ccagcaagcaacatataaagtagaatccattagcaacaggggagcttcaatggcgaccaagatcttctccctccttatgctccttgctctttctacatgtgttgcttacgcgacatttttccctaaatgctcacaagctcctatagctaaccttctacccccataaccattcataaataatagcatcagtttgagaaaacccaactctccaaaccatataagctttaacaagcaattgaaactagcaac

SEQ ID NO: 171445 - DNA, 189 bp, Zea mays
  Clone ID: MRT4577_87940C.1
cgaggcgggggaaagcgccgtccacttcggcgtaggccagcggggatgacttcaggtgtgagcataaggtaacggggcggcggccctgttgctgtgcgtgccaacccgattgcggatttgtttcgtgggactggctggcccggggagatcttgctggcggtgctgagtgttggcccgatcgaaacctgg

SEQ ID NO: 171446 - DNA, 672 bp, Zea mays
  unsure (1)..(672): unsure at all n locations
  Clone ID: MRT4577_87941C.1
aattcggcacgaggctctttctctctctattctttccatccccgcttctcggaagctcatcagccatggacgacgccgcgggagaggaagaagcttcgatgttcgagaccagccatgtccttggcgccctgctggcctcctcgccgctgctggcgtccgcctgggaccgctgtacgaccgccacagccgcggcgcccgggttcgtgcacggagaggacggcggcaaggtgtacgtggggttctccggggtgcaggccgcgctgtctgcggcaggcgcggcggtggccggtggtggcgccgacgtcttcgcgccggtggggctcggcggggacgcggcggggcggatgttcgcgccgctgctcgcggccgagcccgactcgtccgctgctggggagccggttgccgtgcaggcgctggcgctgcagtgcttcttgaaactctgcggtaaccctgatttccaggtaagtgattactactccaatgaaaaaaatatctgcctgggtatcatttgttttatgcttagcgcgttgattggagcagtttgccttgcccactaataatctgactaaaaatgttatttttcaagttgcacgttcatgtgactatctgatatttttgcctttctgngtggcttgggcctagggatggacttattgtgatgttgatgtgcct

SEQ ID NO: 171447 - DNA, 755 bp, Zea mays
  unsure (1)..(755): unsure at all n locations
  Clone ID: MRT4577_87942C.1
gggctgatttggacttggtggaaagaattgatggatacttcgatgtggtttatggaacctatgaacccaaatatttaaattggtggaaatccaagaaggattttgttttctctcgacaatggtttcgtggacaagatggagcatataccattttgcagactcctgctggtcataacaaaagacctccaaagcatggctacgagcgaacaaagatcaaccctttggttgagacaagtgaattggttacaaattctagtccagttactgttgaccccagccacttccatggcacccttcatagagcgaaaactcaaaatgatcaaaattcttggagtgcacctggtggggagaagtttatgatcagagggaagacttacttaacagattatcacaaggttgttggcggtgatccacttctagagctacttgcggtcgattggttcaaagttaatgaacgctttgattcagttgccttacatcccaaaagccttgtgcaatcagaagctgcaaagaaacttcctttcatattggttataaatttgcaggtgccagcgaaaccaaattataacttggttatgtactacgctgcagagagaccagtgaacaaagattctttgttgggtagattcattgatggaactaatgcataccgagatgccagatttaaacttataccaagcattgntgagggttatgggatggttaagcgtgctgtaggaacgaaagcttgccttctgggcaaagcagttacgtgc

SEQ ID NO: 171448 - DNA, 810 bp, Zea mays
  Clone ID: MRT4577_87943C.1
ccttatccctgctgtaattagaaaaacattctcaaattgagttgatcagttctaagcttgttgaagacttagtggctcttacacaagagcagggtgatagttgtcagggacagcatttggtgctgtgaagcaaaaagtgctgcttctgacgggagcaaagacaagttagcagaagaagagggaaaccagatcacaacggcctcagcaatatctgcagcagccaagaaacttgcagaatgccaagaaacaatggcgaatctaagtaagcagctgcatgctctagaaagtccggcaaatacatatccatcatcagataaagagaaacgcggtaccctgcccccgtccgctgagcctgacgcaacagagaagaaacgacactgtgagcctgacgcaaatgcaactgagaagagagaacacgagcaagattctggccgaagcccacagcctgctaaaagtgctccgacgaccctggtcgttgttcgtccgacggtcccgaagtcaccccgacaatccatttctgttgacacgaagaagaagaagcaccgtgctaaccttctgagcaggcttgtcttcagaaagaaaggataaaactgggactcagcgtcggcctaaaaactgagtcatcagtacagttgttcagcacttgggagctcgttcttgcgttttaagttatacctcgactgatcttaagttatttccaattccaataaaaatgaacgtactgcacctacggtgtgtaatttatttggtatttatttggatgtaagttatgttgtacttgagaaatttgtggaaacatgttcaaacgaa

SEQ ID NO: 171449 - DNA, 795 bp, Zea mays
  Clone ID: MRT4577_87944C.1
cattgggtacctcgaggccggccgggattacttaccgattatccaaggttgttggcggtgatccacttctagagctacttgcggtcgattggttcaaagttaatgaacgctttgattcagttgccttacatcccaaaagccttgtgcaatcagaagctgcaaagaaacttcctttcatattggttataaatttgcaggtgccagcgaaaccaaattataacttggttatgtactacgctgcagagagaccagtgaacaaagattctttgttgggtagattcattgatggaactgatgcataccgagatgccagatttaaacttataccaagcattgttgagatagatgttgacatcggttcatcatccgttgcccggagcattattggtctagtattgggatatgtcacaagcatagttgttgatcttgctattcttattgaggccaaggaagagaaagagctccccgagtacattctgggcactgttcgtctgaaccgtgtgaatcccgacagtgctgtatcaatctaattacgtttctagccgatctatgcaaatttactcttatcctcttttattctgagagaaacagcgtggcattttgaaaatgtgaaatagcattactatttgctgatccccaatcgagggtaacatatgtaaattggcatgaggcatgactacgtgacgcctttcgtaaatagaataaatcaatggttatgtaatattaatatcccatatacgcgtgtcataatctaggtggcttaaaagtgccaaaaaaaaaaaaaaaaaagcggcc

SEQ ID NO: 171450 - DNA, 2728 bp, Zea mays
  Clone ID: MRT4577_87945C.1
ctccaaattctgttggaccctttcccacttgacccccgcccttcaccgtcggaatccacccccactcgcgctgtggcctgcgggagatggccacggccgcgaggctgcctacggttccaccgtcggctgcggcgggagatgtctccgaggtggagctctcggaggcgggatcgccggacctcggcagccggagcagcggtagcggtagcgggggcagcggccggagcacggcggagtactccgggtgggtgtaccacctcggcgtaaactccatcggccacgagtactgccacctccgcttcctcgtcatccgcgccaaattcgtcgccatgtacaagcgggacccgcacgacaacccgggactcgaacctatccgaaaaggtgctgttagtcacactctgatggtggaggagcttggtcggcggagggtcaatcatggggatgtttatgttctgaggttgtacaatcggttgaatcaaacaaagaaaggagagatagcatgtgctactcctggtgaagcccggaaatggattgaagcatttgaacaagctaaacaacaggcagactatgatctgatgagaggggtcaactggaacagattgcagaatgaaaatgagattaatcttgatggtcatcgtcctcgagttcggagatacgcacaaggcttggggaaatttgtaagaattggtaaagggccagaaatgctccttcgtcagtcttcagatcttcaaggccaagaaattgttaatacgaactttggaggtgatactggagacgcatttgaagcacatgaatggagatatgttcggacatttaacggtatcagaatttttgaagatattagtattacaaacccaaaggttggaaaggttatacttctgaaatctgttggggtggtcagtgcaaaccctgataccgtgtttgaagtggtcctcgatcttgataaacataagcgatatgagtgggatatgttgacagctgatttggagttggtggaaagaattgatggatactacgatgtggtttatggaacctatgaacccaaatatttaaattggtggaaatccaagaaggattttgttttctctcgacaatggtttcgtggacaagatggagcatataccattttgcagactcctgctggtcataacaaaagacctccaaagcatggctacgagcgaacaaagatcaacccatcaacatgggaaataaggactttgtatacatcaggatcatcgagtccaaaatgtgttgttactcttatgttggagattgctccaagtttttggggcagatggaagagaaggcactcaaattttgacaaaagcatcccttttgctttgctcagccaagtagcaggtataagagagtacttcgcagccaatccagccttgacatctgagctgccttcaacagtagtgaagtcaaaagcatctgaaactttgatcatccagagtgaacatgaagattctgaacttggtgatgaattttatgatgcacttactagaggtgaatccttcgaagatggggatagtgatgatgatgatgatgccacaactccaaaggctagaaaagtaaagttgaagaatgtgtcatgggctattgcaggcttggctttaaagacaactaaagctttggttgagacaagtgaattggttacaaattctagtccagttactgttgaccccagccacttccatggcacccttcatagagcgaaaactcaaaatgatcaaaattcttggagtgcacctggtggggagaagtttatgatcagagggaagacttacttaacagattatcacaaggttgttggcggtgatccacttctagagctacttgcggtcgattggttcaaagttaatgaacgctttgattcagttgccttacatcccaaaagccttgtgcaatcagaagctgcaaagaaacttcctttcatattggttataaatttgcaggtgccagcgaaaccaaattataacttggttatgtactacgctgcagagagaccagtgaacaaagattctttgttgggtagattcattgatggaactgatgcataccgagatgccagatttaaacttataccaagcattgttgagggttattggatggttaagcgtgctgtaggaacaaaagcttgccttctgggcaaagcagtaacgtgcaattatcttcgccaggataactttctggagatagatgttgacatcggttcatcatccgttgcccggagcattattggtctagtattgggatatgtcacaagcatagttgttgatcttgctattcttattgaggccaaggaagagaaagagctccccgagtacattctgggcactgttcgtctgaaccgtgtgaatcccgacagtgctgtatcaatctaattacgtttctagccgatctatgcaaatttactcttatcctcttttattctgagagaaacagcgtggcattttgaaaatgtgaaatagcattactatttgctgatccccaatcgagggtaacatatgtaaattggcatgaggcatgactacgtgacgcctttcgtaaatagaataaatcaatggttatgtaatattaatatcccatatacgcgtgtcataatctatgtggcttaaaagtggcatcaagtcatctagtttcctgtgttaacttcttattccttaggtagtcagacattaacagtgtgtttggtttgaggaatgaagtgatccatctttttctc

SEQ ID NO: 171451 - DNA, 436 bp, Zea mays
  Clone ID: MRT4577_87946C.1
gaatatacacaccaacaccatttcaaggctgctttcaggccatgcataaactaatgcacacactacgatatgcacacaaccgaaaggtgtaatcaaaacagatacgcctcaacccattagacttatcgcggcaatggtagaggaagagtgatcccacatcataatcatcataacttgcgcatgatcgcccatcgtcttattgtatagtggccaagccccccccatgggagctatcccacggtcataactagaaagcttctctggggctaggctaaccgccgctaaaagtccctgcttacacggtaccaacactaggggttgggcttgctctgcttaggaaagcgcaaagcacatcctgttcatgcagcagatactaaatgcactcccattaatgtggaatatgcggaattgaaatagtcaaatcaaagtgacattg

SEQ ID NO: 171452 - DNA, 930 bp, Zea mays
  Clone ID: MRT4577_87947C.1
acaacatggaaccaaaaaaataactgcaaattcatttaaaaacatctggagagagtatggcacccaatagagatcttagcccctgcatcaagtactgaggaagtcggccatcgacactcccttgtcatccttgttctccctgagttaacaagcgctgcagaagatgtcgcggtgcatgccgagcctcgtcattgagctggtgcagacatggcggctatctctagaggtatccacaactgtgattgtgtccgcctccaactgcttcttaatctgccaagaaaccatacaaacaaaaatgtatctctctgtctccatagcaagtgacagtgtaggaacacttatcctgtcattttcctggtagctaaggcacggggggtggtcctaccatgcgccatatacctaggcagcagcagtaccaaaacgaggaccaggagctcataaacatattccatagatgtacatgtgttaagaactaataagtgtaaatagaccttttatcctatataaatatgcagattgcatgataattaccactgctgaagcgtgtttgggaggaaaacataagcagatatatccattaatttgtatatgataattcgaaaaaggaagttctattcaatatcaggatttgcaaccatcatccatacatttcacataagatgttctacaatattacattcagaaaaagggcacaatctattataaagcttcaataaagtaccacctttaaaacaaacatcctgtatggtgacattggacgctactgccactgagttatctctgccattgggatattttctgtcaccagatttagctttcatgctttgcaaggcaataataacaatgcaagcaggaaaaagtcgatacaagaacaatttatctaccacaaatttgtacggatttggtgtctctcggcagtgtgtctggtgc

SEQ ID NO: 171453 - DNA, 431 bp, Zea mays
  Clone ID: MRT4577_87948C.1
ctccctgctcggttgttgcagctaaatccgccgggaatctcggatttggcttcgccaggagggcaacttgatgcttgcccagccatatatagatggagcccataaaccggccttgccattgcgatccacgccgtggacaccaagcgtgcaagcgttgccatgggggtgagtgcataggggttcgaccgattgggggaattcgtggcggctgaatctctgctggcgctacaagcttattgggtgtgcgcctgatcttatccacactctttgcattcatcgtacgctagcgtacgcatagtacagcatctagcctggatgctactctgcgccatctttcgcctcggagcttgacattggctatacgccgacccttgagcggcttgttcgcaacgtgtgggtgacgttcatgacttcatacggcggtatttgtg

SEQ ID NO: 171454 - DNA, 243 bp, Zea mays
  Clone ID: MRT4577_87949C.1
ctggaacgggtccgtacggcgttgttcttggttcccatcgtaacttaaaagggagacttacgcaatgtccggacgccttgacgtcctgcagatgaacgaggaggatgtcctcaaattccttgctgcaggaacccacttaggtgccaccaaccttgactttcagatggagcagtacatctaccagacggcgagtgacggtatctagatcatcaacctgaataggacttgggagaaactgttgtt

SEQ ID NO: 171455 - DNA, 724 bp, Zea mays
  Clone ID: MRT4577_8794C.1
taggggccttttttttttttttttttgtacagtactcattgagttactagcgccagagtgttacatgtaaatgatggacaggttcatcatacgaagtgaagcattgctcaacactcagctgccaccaggaagccttgctagtctgtctcctgcaagctttaccgtcttatcatttccgttctgttgcgcagcagcagaaagcaagctccacgccgacgtgccagattcagaaggaacaacactgtcgatgaaatgctctgcctccttgaacatccccgcacgactcaagacttgaatcatgtgggaatagtgctcctccgagggctgtatcttgtaaacctccgtcatggacacaaaaaaactgaacgcttcactcactaggccagttctcgcgcaggccttgagcacagataaaaacgcctccggcgtcggacggcacttctcctccatctgtgagaacaggcgaatggcggtctctgggcagccgttctcgacgtttgccgccactatcgaggtccaggaagacgcatccttggcaggcatgtagttgaaggcatcggacgcatgtctcaggctaccaacacttgaatacatgtcgatgaggtagctgttggtgcaagctgaggaagcaaggccacgcttggtcatgtaggcatgtgcttgcagcccttcctcaagagtcccagcttcccgcacgagctcaagatgagacgtgcagtatggt

SEQ ID NO: 171456 - DNA, 419 bp, Zea mays
  Clone ID: MRT4577_87950C.1
aaaaaacaaaaaaaaaaaaaaaaaaaaaaaataaaaaaaaaaaaaaaaaaaaaaaaaaaaagggaaataaaaaaaaataaaaaagaaaaaaaaaaaaaaaaaaaaaaaaaaacctttttttaatccgggggcggcccttttgcgggtcccatgtttccttccccctctttgcaacctttacctttttcttcggggccccctaattcaatttcctggcccctttttttacatctcgttctcggaaaaacccctggtttacccaatctaattgcctttcatccatatccccttttgcccctctggctttttcccaagatgccccgccccaattgcctttccaaccttttgcccgccctatttgctaactggaccccccctttaaggggccttttaaccccggcttttttttgggttccccc

SEQ ID NO: 171457 - DNA, 289 bp, Zea mays
  Clone ID: MRT4577_87951C.1
tgaattatcacgcgatcgtccaatccaacattttgaactgctacccctataaaggctcccttctatccttcgcctgccttctatgttctaactcttatatactgatccctaaattcaatctactgtccttcaatctacaatttcgtaactatgccaaccacattgtcttcaaacaaaaccgctttaatcaacattcaattgaccacatcttacatactaacctatagtcccatttccaacgatctatataacattttcacaaacttaattgctaatactactcccccta

SEQ ID NO: 171458 - DNA, 722 bp, Zea mays
  Clone ID: MRT4577_87952C.1
ttgggtacctcgaggccggccgaatcattattcagacccaccccgatacggcgatacccgatggcgctcgccacgctgctggcgcacctcacggcgggccgcttcggccgcgtgctggcgcttacgagcggcggcgcgccaactgcgtccgccgcgcaccgcgttctccacctcctcctccgcacctccccgccgcccccgctcccgcgcctcgtcgccatcgcgcgctggtctcgcgcccacttccgcgcgccgctcccgctccggctccacgcgctcctcctggcccgtctcgcctccgacggcggcctccactctctcctccgctccgagctccacgtcctcgccgcggggcgcctccactcgcccgcgtccatcctccgcgccctccccgcttcgtccggcccgctcgtcgccgacatgctcgtcctcgcgctcgcccgggcctcccagccgctggccgcgtacgaggcattcctcctcgccggcgcggactgcccgcgctaccgcccttcggccttctccgtgaacgccctgctcgccgccctcgtccgcgccgaccgggtcgacctcgccgaccgggcgttcagggcggcgctgcggcggcgcgtgtcgccggacttgttcacctttaacatcgtcatctccgggttctgcaagactgggcagctccgcaaggccggtgacgtcgccaagaactgaaggcgggggggggggggggg

SEQ ID NO: 171459 - DNA, 421 bp, Zea mays
  Clone ID: MRT4577_87953C.1
ccgctttgtaaacacgtagaccaccaatcctacattccagggtttcaagttgaccaaacagagtggatacagtcatgctcaaagttggcaagctgtgtcaacaagcaggccccatctgctactcgcttcatgggcatgcaacaaagccttggtattcagccgacgcagcttgggaaggatgcacctgcagcaggagttgcacgtagagttagtgcttaatgaaagatgatcgaggttgagtctgttgcagctgctgattaacaagagattcgagaagtagtgaagaagtgattctgtgctgaggatgattatgcagcagaaaaacttgatattgagctgagtggaagttacctgttaccaccacgttattctaagggtgcattggcactgcattggcgtactggtcataaaaatgattgac

SEQ ID NO: 171460 - DNA, 290 bp, Zea mays
  Clone ID: MRT4577_87954C.1
attcggctcgagccgccatctatagtgcgcatacggttaccgtggacctgcatcacgctggactaaacaatccattcaacgcagagtccaatcaatgggccattctgcactagcgccctacgctaacggtcgcgcacacaggcaatggctcaacatctgacagcgccaacgttgcggcgaaggcagatgtcgagctgcattactatagtttaggaccactcaccgacaaggccagtaagggctctacgactagcctagtgtgatgcgccgaccagctatctggcgcgtgg

SEQ ID NO: 171461 - DNA, 587 bp, Zea mays
  Clone ID: MRT4577_87955C.1
acccaccattgctaccgccgtttcatgcagatgagttcatcaatggtttggcagctagaggtccagggaagtttttgtccaaaaggatgaggtccaattggttggacctatataggagatttctcgaaggccccaattttatgccttggttccggcaaaggcgtgctgctgcggagcaagaacagcagaggctctggaggcaggctcgcatgaatgttgacattgaaaagctaatgtcaaatatgtccgaaatagagaggattgattcttttgatgctgttgagcgttatcttctcagagagatggagaaccctggaaaaggaagtgctgattcaataggggcatgccaaaaattgaaggtagacctccaagcagcattcaatgtactgccgaaggacttgcagcaactcctgctctccaaccctaaaagagctgttcttcttcaaggtagtcaagagaaggccctgggtgccaatggcattggcacccagacaagtttgtagcagccccctctgtaacattaccattgtcactattttttgcacacataatacacagttacacatttatatacacccacgtatgtc

SEQ ID NO: 171462 - DNA, 446 bp, Zea mays
  unsure (1)..(446): unsure at all n locations
  Clone ID: MRT4577_87956C.1
ggtcaaagttgtgtgctccctttataacgtaagatgttatacagcgcacagttgtaaacgaatttaatcactcacacacctcacgcgttgacgttaacattttggacaagcactagtcagtgcacaaagagtagcgcaacatgagtgagacaatagtttcccagagcatcaacacgatgcttcccctgcgcttggaatgccacgatggctcggcacagagttgctcctctctccaaatcacatggtaagcatacagccaaggcacctgaatcgtgccccacaggtcatgctatcttgttgcctgtgactttgtgttgcatcacgtccttctctttagacgaatgctctggcttttccgcggcgcttggctcccgtggtgcnntcncctggggcttggtctttcctcctgaaacagttttttcagttccttcccgcgtgggtcaatt

SEQ ID NO: 171463 - DNA, 353 bp, Zea mays
  Clone ID: MRT4577_87957C.1
aagatggtggccacggcgacgccgtctactggtccgccgtcgtcgtggctgcacgagttgatggtactgtacaagagggcgtggaaggtggtgtacaggagcaagcagctgcttctcaccaacttcctagaggccgtgctcgtgggcacgctgctgggcacgatctacatccacgctggctacggcgaggccggggcgcacaagcggctgggtctgttcgccttcacgctgaccttcctgctgacttcgacgaccgagacgctgccgacgttcgtgacggagcggcccatcgttctggcggagacggcggccggactgtaccggctgtcgtctcacgcggcagcgggcacgct

SEQ ID NO: 171464 - DNA, 485 bp, Zea mays
  Clone ID: MRT4577_87958C.1
ctcgaggccggccggggatccttctcccgctgccctgtgcagttccaccagccggcgccccttcttctcattccgctgctagccggatgctctgctgtctcactctcttgcaaggcagagaagaagctgtcccatgcgatgaaggagatcaaggtgctagaagctgtcgcttcaacatctccgtccgagatagagactgtcgtctcctcgcgcatcgtcgaggccctggagcaactgagtgtgcacgcaccgcatgtctctaatgatagtacactgatcgtgtccttatctgtcaggagactgcagaaattggtgatgtgctctgtgaaggtattgaatgtatagcgcttctgtagatgggacttaacgtcacagcacatgtactggtaacgatgaactttaatgtcaccccatgctttggatctggtatccacgagcacattgatcttggcatgaagtatgatactgtcaaacggcatctacag

SEQ ID NO: 171465 - DNA, 515 bp, Zea mays
  Clone ID: MRT4577_87959C.1
cccacgcgtccgccccgacaacccctctgcgggggccgcgtacgccgccatgttcttcgtcttcggcttcgtctcgccctggtgccccgcctccacaaacaacccaatttttgcggagatcgtgccggagaaggcgaggacgacggtgtacgctatggacaggtgcttcgagtcagtgtgggcctctttcgcgccgccgctcgtgggcatcctggcggagcgcgtcttcgggtaccaaccggcctcgtccggcacgagcgtggaggctgacagggagaacgccgctgctctcggcaaggcggtattcgcagagatcgccgtgccagttgccgtctgttgcctcacctacaccgcgctgtactggacttaccccgcggacagacggcacgcgcagatggccgctctgcaggcggcggcgggcgatcaggactgcgactgtgaagcaacttcagttgcccatgctgcaggagccgaaggcttgaaccaagcgcttcttgccgggacaagaacggagt

SEQ ID NO: 171466 - DNA, 317 bp, Zea mays
  Clone ID: MRT4577_8795C.1
gaggcgcgggccaggagccagcgctacgtcttaccgaaacatgtgcctcccgaataagggcgaacgctgtcacacaatctatagccatgcactggacatctaacgatatcatcgacctctccttgctgaatgtcgacagcaatttcggcatcaggaacgtctatctctgatacgcatcagcatgtacccttgcatgtcctgacatagcacacaatgtcgtcgagaccaacgggatatcactagtcgagattgacaaggatctaattcgaacagattgatgactatgcctagtcatactgactcgccaaggacactat

SEQ ID NO: 171467 - DNA, 300 bp, Zea mays
  Clone ID: MRT4577_87960C.1
acatccaccgcctccgccgccgacaacagcgtagtgtagtgtaattccggagagggttggggagagtaatagtgatccgcaatgtcaactgaggaggctgttgtggctgaggtcccggtgaccgaggtgccagcggatgtcccggctgaccaggtggccgaagcgcccaaggcgaataaggcgcccaaggagaataaggcgcctaaggacaagaatctttccgcggcgaatatcccagcggcgcaacctccctacgctgagattattgtacaggcgatcgctgccctcaaggagaggaag

SEQ ID NO: 171468 - DNA, 334 bp, Zea mays
  Clone ID: MRT4577_87961C.1
cccggcggccacttcattgtcatgcgactccctatagggcaaatagagtcctataaaaaaaaacatgagcggcccgcactgtcatgcatatctccacaccccccccttaagcagtggtaacaacgcagagtacgcgggatctgagacgtggacttatttagcttgctttgatcttggactcttattttttctcttatggatatatgatatgatgccttcgggctggcttggatctgaataagtgaatgtggacacgcatgttgtgtcgccctatgttgacaggggaggaaaaaaaaaaaaaaaaaaaaaagtactctgcgttgttaccactgct

SEQ ID NO: 171469 - DNA, 261 bp, Zea mays
  Clone ID: MRT4577_87962C.1
gctccaggtcgtttttttcccacaggttcatctggtggaggagcccgaacacgtgcgccgtcaggggcaccatgtgcgggttaccgaacgtcaggcaccacacgaccgaagatgcccagagctatccggggaccatgtacagaaagctgtcccacgccaccgacatctgaacgccattgaacagcatggtcacgggcgggagcctcgtccacggcggccggcgcctcttgggcacacagaagcaggcagtcgcgcggggaa

SEQ ID NO: 171470 - DNA, 397 bp, Zea mays
  Clone ID: MRT4577_87963C.1
ccagcagcgacgagagatatggatgagggcagcacgatgccagcaaccaaggtctagtggtgatggtcaagggctgattgcagcggtcatggatgacaacatcacatgatttagtctgatgggatgttgctagaaattggcgctggacggcgttgcgcctgttgccattgcacccagatggtgactgttgcgctccatctgtcgagatctgtctagcccgtctctctaccatggtctttctctcaggccaatgcatagacatcgtcacgctcgtttacatcaccaagctttgggcagcaatggcttgcaggatcaacttcattcccaagatatgacaactccattcccaaccgcattgtctgctattcagttattactatatatatgaccgtttttt

SEQ ID NO: 171471 - DNA, 345 bp, Zea mays
  Clone ID: MRT4577_87964C.1
gggggaaaaactaccaagttattttttccccatttcaggcatggcccgaatctgctataaactatataggacattggattactccaatttggtgaatcatcttaattacggaagcgccctcccttggaaaccctgccccgggggggtttggttcctgcttgtcatatatagatataatatgggggggaaaacaactttcggatctactttcaccatctgggattaattcttttggcgccatacaaatggttgctgttccactgaagccatgggatcccccggaggactcctttatgagtctggggaaaataaaagattttgttttccaagaatcttgaggggggg

SEQ ID NO: 171472 - DNA, 306 bp, Zea mays
  Clone ID: MRT4577_87965C.1
tgacattcctcgatgcgtcaactctctccgccttcacgcaggcaagccgatacttcaaggcagtagccacgcctatcctctacagaagcattgaagtgcccagcagtacagagggctacttaaacggccaaaacgctatggcccgtctcatcagaacattagtccaccagccatccctggctcgccatattcactctatcgacaacctcccggtcacgttgcaccccgggttcgttactcttctcttcgcgcccgcgttcggcaccgacccatctccaggaccccgaacgcagctaaacctcttgc

SEQ ID NO: 171473 - DNA, 267 bp, Zea mays
  unsure (1)..(267): unsure at all n locations
  Clone ID: MRT4577_87966C.1
agcagtggtaacaacgcagagtacgcggggtctccctgaatcctaatcgtccttttcgcgtttggctcgactgacgcgttgattcctgcttctttcgttggtctcccattctttttttacaagaactaaaaaaataaaaattctttgggttgggatggcatcacctggccaaatgacagcaagcaatctgttacggactgaaggctttcctgnnnaaaaaaaaaaaaaaaaaaaaaaaaaaaagtcctctgcgttgttaccactgct

SEQ ID NO: 171474 - DNA, 366 bp, Zea mays
  Clone ID: MRT4577_87967C.1
atggagcatcgggtctcgccggacaaggaggacacctttgtcctcctccagaatgctgcctacggccactacctctccttaatagagaaggagacttacgagcaagagatggttagaaagcatggatccagggttatggaccacaacatgctaccaccggtgataccagcaccaggagaaacttcgggacaggagggagctactacacatgagattccaaaccagatagacgacttcgtaaacaacttcttcgcttctggaggtagtggtcacaactctcctatatgcgatgatttgactcttgtagtgaatttggcatgttgcgatggatttgttatgaactatgatggattcttattgttgtga

SEQ ID NO: 171475 - DNA, 305 bp, Zea mays
  Clone ID: MRT4577_87968C.1
tgtcgacgcaggtgcgctacttcaacggcaccaaggcgaagatggtcgccaagaagggcgccgccgaggttagcaagctgctgcccgactccgtcatgcttatgggcatagacaacaacgacctgttcgtgttcgctgccgccgagctgctgcggggcaggttggccgcggggcaaaacagcgacccccacgtgttacttatcgacctgctgtccaactacttggccgacataatggatctgcactccatagcctcgaggcagtttgtctttatatttcttacactggttgaatgtgtgcccttt

SEQ ID NO: 171476 - DNA, 874 bp, Zea mays
  unsure (1)..(874): unsure at all n locations
  Clone ID: MRT4577_87969C.1
attgggtacctcgaggccggccggggacttgaacctctataatacttgaggctctgcgactgtcacacctgcccctcactcatagtcattgtcgtcgcactcgcacacacacacaccatgtcgtcgatagcaagaagtctcaggccgctcgcccgcgccgccacggcctcgtcccgtcgctcccttcgccctgcagtctcccgcgccactccccaaatacgctgcctctcctcgaccagcccccgccgcgatgccgccgtcgacatctccgacatcccccccacgcccatcacgcacctctccgagacggaagccatgatgggcgaggcggtcgccaagttcgcgtccgaagtcatcctgcccaaggcccgcgagatggacgaggccgaaaccatggacccggccgtggtggagcagctgttcgagcaggggctgatgggcattgagatccccgaggagtacggcggcagcgggatgaacttcacctcggccatcatcgcaattgaggagcttgcgcgcgtcgaccccagcgtcagcgtcatgtgcgacgtgcacaacacgctggtcaacacggccatcctcaagtggggctccgaggccatcaagaagaagtacctgcccaagctggccagctccaccgtcggctccttctgcctgtctgaagcccgtgtctggctccgacgccttcgccctggccaccaaggccacccgcacagcgtctggcggctacnagatcaggggcagcaaagatgtggatcaccaactccatgggaggccgatttcttcatcgtctttgccaacctcgcccccgagaagaagtacaagggcatcaccgncttcaatcgtcgagaaggggaccaagggcttcagcatt

SEQ ID NO: 171477 - DNA, 271 bp, Zea mays
  Clone ID: MRT4577_8796C.1
gcaaggcgttcatgaagctctgaactcgcatgtatctcaactatatggtccccaaactaagggcgccccaagaaggactaacaggtttcggatgaagcgatgtggcaccactccattgtgacgcataccatcaataccatgtaccagcatgactggcaccttatttccaccaatatggctatggaagggctcatgaatgacgaggttctaagcactacctacctgaatgccgaagtactacttaggccacaagatgtcaatggatgacgat

SEQ ID NO: 171478 - DNA, 155 bp, Zea mays
  Clone ID: MRT4577_87970C.1
cgggcccacaacaactacaacaccatacttactccatcggttgaggctaccccattgctcttccaccttacaacataatgaccactatctccgctacaaccacatgcatcacccacacctctcgcctgacccaagcgatggtgattccaccccac

SEQ ID NO: 171479 - DNA, 494 bp, Zea mays
  Clone ID: MRT4577_87971C.1
cctcaggcaaagacgctgatgacagttgacggtctggccgtcacactgctatggctgcccgatgaagaaaacgtgcgaatgcgaagccaaggaagggacatgaactctactatagccatggttttattgtagctaatacagttgattcaggatttgtatgttggacaacacactggcttttcatggtggtgcttccacccctggctaaggcatttagcccagctccttagtgatgccgtttcatacagctgatgcagaacacacattgagagaatgacagaggatgtccagatgataatgcacagaatgaatgccaagtaagttgtaaacaagtacaattcaaatgtttaagaataggtagtttattcagagcatggatgggagtgcgaaaaggtgaggtgcgtatgtatacagggttaaaactgtataatgcatagaatgttgatgcctcacctaccacaggaactggaaaaaatgatgcattcaagaataag

SEQ ID NO: 171480 - DNA, 345 bp, Zea mays
  Clone ID: MRT4577_87972C.1
cagcccatattttatttaagaaacctatttacccgctattcgaagagtttaaaaacacattggcagccaacaccaaaaatcatcaccaaacaacaaaaacaaaacaaaatacaaaaaaacaacaaaaaaaaaaaaccaaaaaaaaaaccaaaaaaaaaaaaaaggcccccccccccctacaaaccctttcaccccggaattaaatcccgcacctatcccttcagccttccaaatttccccaatagtgagcctttttaaaccctaccttaaccatggccaaaactgttccccgggtaaaattgcaatccgttcacattcccacacaacttacaacccgaaacctta

SEQ ID NO: 171481 - DNA, 699 bp, Zea mays
  Clone ID: MRT4577_87973C.1
gaatctgaccccgtcggctcctcctcatccagggatcagaggggaggaagaagggggacgcctcgccatgaaggcgctcatcctcgtcgggggcttcgggacccgcctccggcctctcacgctcagcttccccaagcccctcgtcgatttcgccaacaagcccatgattctgcaccagattgaagccttgaaagatgtcggtgttacagaggttattttagccatcaactaccgcccagaggtcatgattaatttcttgaaggattttgaggataagcttggcatcacaatcacatgctcccaagagactgaacccttgggaactgctggccctcttgccctggcaagggacaagctcgtggatggatctggtgagccgttctttgtcctcaacagtgatgtcataagtgaatacccatttgccgagctcatacagtttcacaagagccatggcggtgaggcaacaattatggtcactaaggtggatgaaccttcgaaatatggagttgtggttatggaggacacaactggagttgtggaaagatttgtagagaagccaaaaatatttgtaggcaacaagatcaatgctggaatttacctgttaaatccgtctgtcctggaccgcatcgagttaaagccaacttcaatcgagaaagaggtctttccgcgaatcgctgctgatcagaagctctacgccat

SEQ ID NO: 171482 - DNA, 619 bp, Zea mays
  Clone ID: MRT4577_87974C.1
cacgctagaaaatatgaatcacaaattgctggaacgaaacaacagcatatgaaacacaaatccaatttgctgatagtagataggcactaaaagaggcacttccatatgctactcaaactcaaattcagtctttcgtacaaaatggagtttgaaatagtactgtcgtcaacacttggaatcagctcatttgtaaaacgagttgttgtggttatccttgcaatcaactatgcatgagcaacatataatatgttggtagaaaaggtacattttccttttcctgaaaatccctttttgacaattgtttgtattagtgtcgttggaagtgttaagatgtcaccctttcagaaacaggggtaggtcatgctaattttcctccaggacgccataggtcgaaaaggcacgacatcaggggaagtccgagaacacacctgtctagtggagtcactatgtgctgtaaaggtctttaaggctcacgtcattgacgccatcgtgggaggcatgctaacaatctagtgatgcatcaacaagcaacaagaatagcaaagaacactccatcgaaggacagaaaaggacgatacgtcataccttcaagggagtgatccacaacattgttggtcga

SEQ ID NO: 171483 - DNA, 248 bp, Zea mays
  Clone ID: MRT4577_87975C.1
cttctggctggttgtcctaccattttattggcagggcaattcaagatggattcccagatcccggaattttcattaaaatacctttattaagggccgcttacaaatagggagaggggtggttaaataccctgtgaaacccatttcaaagattcacctattggaccctatattttttaccaattggcacaatggccggaggcttataaggggggggcattttcatattaaaatattcattaaacgccatt

SEQ ID NO: 171484 - DNA, 258 bp, Zea mays
  Clone ID: MRT4577_87976C.1
aaacattacacgggacactgttaataatgggcggtttcaacggccttaatagtgaagaaggaaaccaaaaaaaagatggggttgcaacggggtgcaaaagagagcaaaatggaaacaggggcattcttttacttgttcgttatcaaatttgagacaagctgtgccttgtccagaccacacaatgatttactgaaacttcaaaattgtgatcaaaaaggaatcaccatgacccttgtggggttctgactccacaacatg

SEQ ID NO: 171485 - DNA, 272 bp, Zea mays
  Clone ID: MRT4577_87977C.1
gtactctacaagaacaccacttggagtattgcagcacgtctccacctgcaatacctgtggcgggaccgatgaatactccacgcctaggaacacctgttcgaacgacggccggatgcgaaggacaaagacgatcagtgtcaaggttactgccggagcggattctgaacgcacgctgaggtgtctggactgaggctaatgctggccggagaggaagccctactgcagacctttatgtctggattgacgttgtatctgattctgtgcttaaacga

SEQ ID NO: 171486 - DNA, 1920 bp, Zea mays
  Clone ID: MRT4577_87978C.1
ccggccgggattccacctgtaccccaccgccaccacccacggcacgctgcgcgcccaagcaaaccagggagcgcggccgaccgaccagccagacctgcgcaatcgaaagtcgaaaccgatcgactcccctattattggtccccgtccccatggggcggcggctgagcgcgaccgccgccgcggcggcggcgtcggcggagccgctcctcccgccggcgctgaagcgcggggtgctgatcgagcggtgcgcgtcgcacgccgacgacgagctgcagtggttccgctcctgcctgcggtgggtgtgcatggaccactcgggcccgggccaggccgcgctgtcctggctcctcttcctcgtcctcgccgccatcgtcccggccgccgcgcacttcctcctcgccttccgcgcctcgcgccgccccttctcggccgtcgtgcagctctcgctctcggccgcctccgccgcgggcttcctctgcctctcctcctccttccgccgcgtcggcctccgccgcctgctccacctcgacaagctccgcagcaagagcgaccgcgtccgggccagctacacggcgcgcctcgccttctccttccgcctcctcgcctccctcgtcgcgccgtgcttcgccgccgaggccgcctacaaggcctggtggtacgccacctccgccgaccgcgtccccttcttcgccaacgacgtcctcagcgacgtcctcgtctgctccctcgagatggcctcctggatgtaccgcagcgccatctacctcctcacctgcgtcctcttccgcctcatctgccacctccaggggctcaggctcgaggacttcgccggctccctgctcgaggaagtcgaggagggccgggccggcgtcgatgccgtgctaagagagcacctcgacattcgcaagcagctcaaggtcatcagccatcgcttccgtaagttcatcgtcgctgcgctgctcatcgccacggccagccagttcgcctccgtgctcctcaccacgcgacgcgactctgtcgacgacctcctcaacaccggcgagctcgcgctgtgttcagttgtgctcatgtccgggctcatcataatcctgagcagcgccgccaagatcacccaccaggcgcaggccctcaccggtcacaccaccaagtggcatgcctgctgcaccatcgagcccgtgctggaggaaggggagcccgggtccaaccagaactccatgatcgaccaagaacccgagagtgacagtgacacagaggacagcgaggagaccggcgacgaagatctcctggagaacaccaagattcatatgccgcacgcgcatgtcatctccttccagaagagacaggcactagtgacatacttggaaaacaacagagccgggatcaccgtgttcggtttcacgctggaccgttcgtacctgcacacgatatttatgctcgagtggactctgttcctgtggctgctcggtaagaccatcggcttctcgtgaagaagacggcgatgaaaagaagagaggtggcctgtgtccaacgtccggatggtcgtttttgagaggtttcgcatgtcgcggttgccctttttggggatggatttggatgtgctttgtttttcggtcatcgtggaagggctttttttcgcgtgagcctggctgttggcacgggagcgttgcgcgtgtacacctcaacgcctgtgtatgatagcgattttgtatgatgtgtgtgtataaattgtgaaccgtaattgtccttgtaaatgagcgttgtacagtcgtacactggtaatgctgttttttacaatctcgttgtaagccaacatgttgtagcgagaatttagattgtaaagataaagattcttgtttttttaaaaaaaaaaggggtacgctcgtagctagaactttgctaaaaaaaaaaaaaaaaaaagag

SEQ ID NO: 171487 - DNA, 724 bp, Zea mays
  unsure (1)..(724): unsure at all n locations
  Clone ID: MRT4577_87979C.1
gggtacctcgaggccggccggggccgttctttctccctagaccctcaccaaccaggcaaccaaaccttctccgtcgccgcgcctccagcctagaggtgaaggcatcaggaaatgtgttcgggaactacttccaggttgcaacctatggcgaatcccatggagggggtgttggttgcgttatcagtggctgcccacccagaattcctctcactgaggcagacatgcaagtagaactcgatagaagacgtccgggtcaaagtagaattacaaccccaagaaaggagactgatacatgcaaaattctatcagggacacatgatgggatgactactggtacaccaattcacgtctttgtcccaaacacagatcaaaggggtggtgattacagtgaaatgtctaaggcgtacagaccatcccatgcagatgcaacttatgactttaagtatggagttagagctgtgcgnggnaggtggaaggtcatcagccagagaaaccattggcagggtggctgcaggagctcttgcaaagaaaattctaaagctcaaatcannggagtggagatcnttggcatttggtttctaaagtgcaccaagtcgtacttccagaagatgcagttgattatgagactgtaaccttggaacatatagagagcacaatcgttagatgtcctgatccaaatatgcagagaagatgattgctgccattgatacggtacgagttagag

SEQ ID NO: 171488 - DNA, 238 bp, Zea mays
  Clone ID: MRT4577_8797C.1
aacacacttggcatgacaccctgttcttaattattgccagcacaggagaaacaaggagggggcctcatctgatactcgtccgcactatggctgctctcgacatcctcgcatctctcggcgaaagctcgtcgtcctggccctgctgcaacaactgctgtgcttgcaacacgaagcatccgccggagtgccagtgcaatgacatgtccgtcaacgggtgccatcccgagtgcatgaactg

SEQ ID NO: 171489 - DNA, 649 bp, Zea mays
  Clone ID: MRT4577_87980C.1
acttacaatatcagctcctcgccacccaccaactacccgcagccacacgtctccgtcgccgttggcttgattccggccaccgtcgtcttatcccccctctccccgcacctcctcacagcacgcagcacctccacccgcgcccccctgtctcgccgtcggctcctccccggaacgtatcggcctacagcagtgccgcccgccgtccggctaccgacctcctgtcctacggcgacgacagatttgagcgcagcaacacctcctcaccgccccccccccccacacgccaccaagaaccacgcagcaagagaagcacggaaggaagcgaggatcggccactgttctctcgggacacggtcggatgatgcaagaggcccgaaggaccacccgaggccatgagaatctcaggtgagggcccccacaaacgatctgacggtggaagaggccttcatcgacgaggacgaatcatccaggagagacgcctcgacgaggaggatctccccgaccatgatgatgatcgacgagactacgaagaagaccataagacggatgatgttgaggaccagtcaggtttagtatatcgtggcgcataagatgaggcctttgatgctgggggcagtgctagacatgaatgagttgcgtgatcactgga

SEQ ID NO: 171490 - DNA, 1792 bp, Zea mays
  Clone ID: MRT4577_87981C.1
attccgggtcgcccacctccacccgggcggctgggccgtcaggccctccccaaccgggtaggtggaactccgccccgtgtactaaaacattgcgtacctcgaggccggccggggccgttctttctccctcagaccctcaccaaccaggcaaccaaaccttctccgatggccgcgcccgtgtcgcagccgccggtgtccgccagggcgtccacacggtttctcccccgcgggataggcgcgctcccggagtccgcccccacgtccctccggttatccgtcggccgccgtcgccgcgccgccagcctagaggtgaaggcatcgggaaatgtgttcgggaactacttccaggttgcaacctatggcgaatcccatggagggggtgttggttgcgttatcagtggctgcccacccagaattcctctcactgaggcagacatgcaagtagaactcgatagaagacgtccgggtcaaagtagaattacaaccccaagaaaggagactgatacatgcaaaattctatcagggacacatgatgggatgactactggtacaccaattcacgtctttgtcccaaacacagatcaaaggggtggtgattacagtgaaatgtctaaggcgtacagaccatcccatgcagatgcaacctatgacttcaagtatggagttagagctgtgcagggaggtggaaggtcatcagccagagaaaccattggcagggtggctgcaggagctcttgcaaagaaaattctaaagctcaaatcaggagtggagatcttggcatttgtttctaaagtgcaccaagtcgtacttccagaagatgcagttgattatgagactgtaaccttggaacatatagagagcaacatcgttagatgtcctgatccagaatatgcagagaagatgattgctgccattgatacggtacgagttagaggagattcaattggtggggtcgtcacatgcattgcaagaaatgttcctcgtggtcttggctctcctgtttttgacaaacttgaagctgaactggcaaaagccatgctttctcttcctgcaagcaaggggtttgagattggcagtgggttcgctggtacggactttactggaagtgagcataatgatgagttctatatggatgaggctggaaatgtgaggacacgaactaatcgctcaggcggtgttcagggagggatatcaaatggtgaaattatttacttcaaagtggcttttaagccaacagcaactatcggaaagaagcaaaatactgtgtcaagggagcatgaggatgttgaacttttggcaagggggcgccatgacccctgtgttgtccctcgagctgttcctatggtggaatccatggctgcgctggtcctgatggaccagctcatggcgcatattgcccagtgtgagatgtttccgctgaaccttgccctacaagagcccattggctctgctagcagtgcatctgaactgtcaccaaacctatcataatgtttgtcgtggaacatgtcccagctttccttctatcgaaattctggtctttgctaagcagtttgcaattcggaacccccataaaccctcgactattgtacctagagataaagtgaacggatatcaagatagaaatgcattaatgtttttgtgatgtgtagtataactgatatttaccccttttctttttttgagagaggacgcatgatgtcgtttgagcaataaagtttaatttgggagagataaaaaaaaaaaaaagcggccagcccttgaccggtctaaataaaggaattctgttaagccc

SEQ ID NO: 171491 - DNA, 353 bp, Zea mays
  Clone ID: MRT4577_87982C.1
tccgattcggtcgaccagctcgagggctggcccctgaaaacctggttgtcttgatccaatgaaggacgggtaggaccattccggaaaggaccgtccgatcaccggtcggccgtcagcgatgctggatggaattacaccccgttacaccatgagatcgactcgcatgaatctaggcgagagtggagctaaagacagcagaacacaatgtatcaccttcaaagcctgacttggctctttagctgggtcgaattgctgatgccgtgctgctgctttgagatctgatgggatcctttggatcaagacggagacttgcgagggacattgtcggcgctttggcgttatcaggaaggagc

SEQ ID NO: 171492 - DNA, 559 bp, Zea mays
  Clone ID: MRT4577_87983C.1
gtcaaaaggttgacttatgtctcgggatgtacatgactatatattttttaaataaaaaagacggccatttcttcatgaaattccgagctcctacctattcaggccaatcccaacgttgttccaagagagcctaatcgtttcatctgcgtttttttctccgatctgctgcggctttacaccagcgcctttacaccagcgcctccctctgctgccatcttccctcaatctcccgaatccagcatcatctgcatgtgccctggatggctggatccccttcgtcccgtcacataccaaatccgacagaagcgcgacaaggacatccggcggcgagcaacctcggcacggctcctgtcctgcggcagccgccaccggcaccgcccagtttgaaagctctgcgggatccactctagaaccgcaataatttggctgctatagtttctgtaattctgtgaatccgcaggtcaacaagtgagcaaaaaaggaggattgttcatgttttgatcttgcgtctgctctcctctacatcttattggccaagtagtttctttccccccttgca

SEQ ID NO: 171493 - DNA, 340 bp, Zea mays
  Clone ID: MRT4577_87984C.1
aatccattttttttttttttttttttttttagaaatgtacgtctttatttgctgggaagccttttccttttgtgcggaaactttgtctttgttctctccccgcttagaaacaaaaaagggggctctttttatggggggcccctcaacagaaagctgttggtttttgtaaagccccttctttgaaaggtagttgtaggggggggccccccacgggggcgggttggggaaaaccccgttggtacaaccacaacaagggtggtgtatgcgagaacgtctgttggggtgaaaaaaggggcccccctcaagggggcaagttgttggaaaacccaataatttgggg

SEQ ID NO: 171494 - DNA, 318 bp, Zea mays
  Clone ID: MRT4577_87985C.1
ctcggaattcggctcgagcaggcgtcaaggccccctttttcaaagccatggctttcaaggggttctgggagtccagattcggggtcatgagggaaccccagccgaatcacaacgggcactccaactcggtccataaccagacaaggaccttcgatctggcaagatactagcagatcgagcagtaggccaggcagacccattgttcatgcactctcgaatagcgacggagacaactgatggtatccagaagccaattgtacctggatgcgatgcaggtacaaagcgtaatctcacagagacattggagaaggatataat

SEQ ID NO: 171495 - DNA, 565 bp, Zea mays
  Clone ID: MRT4577_87986C.1
ccggccgggacactatgaaggtatcaggtactatacaatccatactaacgaacgcaccacatcgtaaacgatgcaaccagcctacgaatagcatgcatggagggcacgagtgctgcttcatgggacgtcttgctccttccatcggtgtcagagttcaatatggccactctgaccacaatgaatatcaccaagaattgggggacaacagcgcggccggcggctaccaccccagcagcggcgacacaggtgaaccccatgaacacgcggacacacctaaccatcggggtaagggcgacatatcacatctaacagatctcctcgatcgacggctacgagcgtgttgacgttcttcctcgcgcacacacgccaagtgaacgacagatggaacaggaccaggaggacacacgcctagccgtgtacgagccacaacaccacagagcaatgactgcatccggaacgaccagtaccagatcaccttcagcccgaaaaaccgcatctccaaggtatccaacaccgtggccgtgacgaagatctacatgcaatcgatgtctccacctgacattct

SEQ ID NO: 171496 - DNA, 286 bp, Zea mays
  Clone ID: MRT4577_87987C.1
attcggctcgaggcggctgtaccagtttttgagaagccgcacacgatgaatccttgggggcgttttatatgcggtatggggggctccccacccatcgtagcgtaaaaccctaccagtgctttattcacacccacagatgtccgcaaacttggccgtccccctatacaagtatacacatggttagaccactcttgctgtgtaaattaccggggagtcaattctccccgcccgacttgaatctctgcctcctaaaacaattgcttaggcctgcctacccaccgggggg

SEQ ID NO: 171497 - DNA, 277 bp, Zea mays
  Clone ID: MRT4577_87988C.1
gaatggctttgcattcctatttttagagaacgaattttcaaatagcgactttcctagtctatctggtagggcaacttctggtacatcaatgtctaatatatttcctcacccactattctcagaaccaacaagagtaccccctgctcgatcatatactggatttccattccaagatagtttgaaccccactcctggacttccttctgggattttgcctcaagatggtcctatccacctttctagattactttcatttgcttcactagtttcagctcat

SEQ ID NO: 171498 - DNA, 364 bp, Zea mays
  unsure (1)..(364): unsure at all n locations
  Clone ID: MRT4577_87989C.1
cgcgggctcttatacgagtactatggggaaagctggcgcgctctgcaggtcccggaatcggaanatagaccggggcgccgagctactagatcggaggctgggggggaggtgacggatccgtcccagagagatgcacagatgacagaggcacgcaggacgagaacgtgtagagagggatgccatcgacacattgttgatggtgccgttgccgtcaagcccggcgtccgaggcgggcacctnaacgtgcgctcgtccgacgcccgggttgacggcaaaggcagccgcagaagaggctgccagggatgctatctgtacagctgctgctgctgcctgcggtctggagctggggatctatttggaggga

SEQ ID NO: 171499 - DNA, 2814 bp, Zea mays
  Clone ID: MRT4577_8798C.1
atggcgaccccagggcggctgatgaggcatggtggagaactgttctccacgcaaccagagacttctgtgctggcccagcgccttccccttgtaacaaggggtacccctgtttctaggtaccaacagtggccccgggcccacctcaggggagggtgcaagcctgcaggtggggccaaaacccgtatcctgcgtaagcacaacatgactggggatcggggcatcttcttagcgcgtggcgtattaacccagcgcgcatatgctgtcagcctgctattggtcacaccaaccgtcgtgcccatcttcgcggccgactggtgcatggcccccacgcatggcgtggttttgctttcgcattttcgccaactgctccgcccttttgcctccgagcctgccacgcctctccgcgttcgtgctccccagttttccgccgccgtggttgccatggccatgctggttcgccccaatcattaccagatcgaggaggcgctcgacacggtgcaccgcctgcttggatggggcacgcctgcgttcgccaggaggatccgggccggcactacccccctcggcgatctcgctgccggggagtttgtgctcttcgtctcctatcacttctgcgggttggcgctgccgatttcgccgttcttcctgctgctgctggaggagttcggacttcaactccagcacctcacgccccactccatcctccaggtggccatctttgtccatttttgtgagatgttcgtgggtgtggcagcatgcacttccctcttctaccagttttttgtgcttacaaggacaaatccaacagtgacctacatcgcctcccttggcggcgcgaggtgggagaactggcggaacgactgggtgatcgccagtgccgaggtcaacgaccgccttgcccttccgagtgacggacccaaactcgaccggaagcaatggagggtaaaaccatgcatcgtgccggagttcgggccagtcctagataggattaaggaactggcggttggtggcctgacctcgctgcatgtactcggtgatttcctgaagcgccaagtcatggcacagcaggggaggccacgtctgtgttgctggtttactggccctagtgacattggtaggatccagcgcgggcctaggactgacctgtactggggagcagttggaaattttgggttgcagtcgacggtgctagcccgactgccgacccttgatgagagtggtgtggcgatccgccagaccggtggtcgggaccccgaccaggggatccatatccccggcgcaccggccggaggcccccagcctactgatgtgggacccagagctcctcttgcggcccccagttcctcagataagggcaaggggcctgcaagtaactcctccactctgtgcgtcgccgggaggtcggaggaaaagacagctggcgggactaaggaggccgaacctcgggtccaggatgggcagaggggcgcgagccctccgccgccacttctttcgaatccggcaccaccaccaccgtcgtctgtgtcagaccgaccgccttcaccgtgggggaagcggcagcagcagcaggaacggcagcagcagcaacaacgacagcgggcaccccgcttccaaggccactggaaggttcatggtcctaaggcctccccttcttcggctcccgtggacgctcctcccatgccggccgctatgcctaccggtgggtctggttcccagcagtatacatctgctgggaatgtcgtcggcgatccgttagtggctactacagcctcatcagcgtcggcgccaagcccaccatcggtagcagtcgaagaggttcctgttgcgtttgcttccaccatgcggggtgacgctggtgctgaggtggcgccgtcggccccccaggatccgcctgtcaccgtcgaggcaacgcctttgggcccccaagttccaactaggggtccagaggtggcaatgccgccaacagctaccgcagatctgacggcggcaataccgttgaatacaccgtcggcaaagcgcactaaggcggcgtcctgccaattcgcctcagaacgggccgagcttgagcaagagcgcgaggacttcaaggaggacatctggaaggtgtctgaccgagagcaggaggtgacccagaaggagaaaagcttggtcaagaagaaggaacacttagaccaaagggaggaggctgtcatagcgctccatgataagatgaaagcttataatacggtgctggagaaacagcgggacaagctggctgcggctgaggcgaagctgcagcaggagcttgccgacaaggccaggagcattgctcgcaccgaggaaagcctcaaggcgagggaaacttccctggagaaacgagcgagtgatctcacctggcaggaggaggaccttgccttcagggaggagatgtgggcaaggcggaacaagctgctggatgagcttgagctcgaggcagaggagaaagggaagcgtttggaggggaagtgcgggcaatggaggagcagtcccatcccggcgttggtgcgaccgacgtccatctccgacgcgctcccggtactggacttcgctgctgaccgcctccgacgtatggatcagattcttggcgcccgcttggagaccgagggcagcagactctgccggtcggcaatagagtacgtcttgacatgctttcggagccacgacccggctgtctccttggggccagtcattgcgggtccggtggccgatgctgaagatgctgcccgggagggcgtgcaggacgttgtggacgtggtggtcaggcgcttccagcgggatcctactgacgatgagtag

SEQ ID NO: 171500 - DNA, 789 bp, Zea mays
  Clone ID: MRT4577_87990C.1
ccggccgggttaggtgacactatagaaggccagccgggacgagaggaggagccgaggaggggaggtgcgccaccggaagcggaaacctcgggtgtcgtcgaccaacctcgtcgatccggttgcgacgcggtgtgctagaataactaccgaccatggtggaggaggagatcaccgagggcttgaagaacctcaccgtcaccggagacgcggcggcttcgggcggagaagggcagaggaggggcggcggcatcagcagcaaccgcatccaggtgtccaacaccaagaagcccctcttcttctacgtaaacctcgccaagaggtatatgcagcagcacggcgatgtggagctatccgctcttggaatggccatagcgacagttgtgaccgtggcagaaattctgaagaataatggatttgctgttgaaaagaagatcaggacatctactgttgacataaacgacgaatcacgagggcgtccattccaaaaggccaagattgagataatcttgggaaagagtgacagattcgatgagttgatggctgctgctgccgaagagaggggtgaagttgaagaaggcgaagagcaggcttgaaaggaaaaaaaaacagtaccgacgacaagcggctgttgtggtggtctgttagttttgcttaatttaatgccatgcgcatgagagctggcatgcgttctagcttatctacattgccatggcagtgtctgcaaactcatggattgatggatgaatgctggtttcttccaattttgaccaaaaaaaaaaaaaaaaaagc

SEQ ID NO: 171501 - DNA, 452 bp, Zea mays
  unsure (1)..(452): unsure at all n locations
  Clone ID: MRT4577_87991C.1
ttatttttttggacctcgtgatagtcggtcggggcaatgttataacggatactggcataccttaagagatacggtattctacttttcggtattagtttctgcatactgacggcaggtattctgtgtttgagcttgccattctttgttaattacgaacttacgccagttaggaggctcattctcatttgatttatcacaattgactaggctgtcatgttatgtggcatttaatgaaattgataaactcccacccagagtagctagcagcttttattgtggtaggtagtttggacctggtattcctggtcctcaaagagttttgggagtcaaacagagaatatatatttcttcctcttatctaattatgtccttatgtccgaaaactttctccgatagtatatctacactgcgaagaagatntacgtaaatttcttatacctactacctggctt

SEQ ID NO: 171502 - DNA, 162 bp, Zea mays
  Clone ID: MRT4577_87992C.1
tttatttgtaccaacgttatattacattacggggggggtgctataggaccagggggggaaatccattcaattaacgctgagcgcgggggtactgaagaacgctttttgaaacagcaacagatcaaccatcaataaggcataagttcctgctcagagattgac

SEQ ID NO: 171503 - DNA, 731 bp, Zea mays
  Clone ID: MRT4577_87993C.1
cgggccctccctcgagtttttttttttttttttttttttttttttttttttagccaaagaaacaaatgaagctgtcaaaattggaagaaaccagcatccatccatcaatccatgagtttgcagaccttgccatggcgatgtaaatgagcgagaacgcatgccagctctcatgcgcatggcattaaattaagcaaaactaacagaccacaacaacagccgcttgtcgtcggtactgttttttttttctttcaagcctgctcttcgccttcttcaacttctccccttttttcggcagcagcagccatcaactcatcgaatctgtcgctctttcccaagattatctcaatcttggccttttggaatggacgccctcgggattcgtcgtttatgtcaacagtagatgtcctgatctctatgggaagaatcagagcggcaaatgtatgaatcatgggagccataatatagatgagacataatctacaagacaaggagggtccaagggcgcactcttttcaacagcaaatccattattcttcaaaatttctgcgacggtcacaactgtcgctatggctggggacagaattaagcattaaagcttggttagttttgcctcaaataatacattgatgcagaagtttctaaatggaaagcttttgtaccattgtatgtcaattgaggcttaagttatgtatccaatccaataagaaaaaaatatcaaaatacactgacaa

SEQ ID NO: 171504 - DNA, 363 bp, Zea mays
  unsure (1)..(363): unsure at all n locations
  Clone ID: MRT4577_87994C.1
atatcngcacgagggtgcaggtgcatgaggggcggctccaacacagtacgccatggagaccagcatgtggccaccgctctactcggggccgcgggagccctctgccactacagtgatactatgtccgtgcctagcgttcttactcctctctgtgatcatcactctgaatcggactcactggggggttacgcctctactttttttctactcttaaccacctaatctgcccgcaccggggcacgcaccatatctgacctccggctccggtcacatggttgacgtggtccttcttcccagaggcggggtcactatgctgacgcggagatccctatacggtatgggctccaatctactcgcgacacc

SEQ ID NO: 171505 - DNA, 390 bp, Zea mays
  Clone ID: MRT4577_87995C.1
ctcgtcctagagaaaaatcaaaagagaggctagtgggctctacccatccatacttccctgcagcctatgcttatgtggaaatcacctcgctagactgcgctacttgtcaagaaataaggagatgatctcatcggacaatctggtaaagtagcttcattactgcatcatcaagaatagatgagtgttctctgggaccacgcagatgatgacacacgtgcgtatacttccagaccatggcttgaggcaaacattctatctctaaagataccagggaccttgataagcgagtccattgtgaaaaatgcttgcctgaggatgaagtcattgtgcgagcctgaaacttattcaaaacatgtctaccacctggtgtctccttcaatttcggatctc

SEQ ID NO: 171506 - DNA, 216 bp, Zea mays
  unsure (1)..(216): unsure at all n locations
  Clone ID: MRT4577_87996C.1
agaccacaaaggaggggacacacacacacacggcaccgtgtncgcccgtccggcgcgacccgccattgctattgcttgcttcctcgcgcacctttttttttccaaccttcttattttcacccggccccgcgtgcggggcattaaccacgcccgcggggggccccggttccttcaagaggggtgcaacaagacgctgtttcccaaagggtgcattca

SEQ ID NO: 171507 - DNA, 354 bp, Zea mays
  Clone ID: MRT4577_87997C.1
gggaaaataaatttttgaaaataggggattaccttttaaccccaatgcccaaattttctaacccggttcaaaaacaacccccccccttccaaagtaaaaattttcttgaccccagcttttaaaattacagggggaaagggcccccttttttcctttttgggggaattaacggcctttttgggggaattggccttcttgggccccccctttttaaggggttttttgggcaagaacccccggtttatttttggggggacccccccctgggccaaggggacccccgacaaaaattttcccagctctcttttttttgggatgggccaaaaccccttgcgcgggaataaaccggttttt

SEQ ID NO: 171508 - DNA, 291 bp, Zea mays
  unsure (1)..(291): unsure at all n locations
  Clone ID: MRT4577_87998C.1
gaaggccagaacacgagaaactttttttttccccacaagtttttcagaggggggaaaatccctcattaggttaatgggaaaaaaaaaaagaattccatagtgcatattctaattttacttnatgcccgagatggggagccttataattttaaaattcataatttgccccaaaaaaccaatggccaccacattttaatttttttccgtttcccaacttaagcccttaaattatgggggggggtttgtccttatctttggggtggccctttttaggaccggttatattgggtt

SEQ ID NO: 171509 - DNA, 246 bp, Zea mays
  unsure (1)..(246): unsure at all n locations
  Clone ID: MRT4577_87999C.1
aggtcgcggacgaggccgtacgagggtgcagtccgacgacccacacttatcattgtgtggtatgaccaataataatgcatcaaaataaagttttggttcctaagaacccancctttttttggggcctaaaaaattgggggtcccccccatttaaagggggggggggggggggttaaaatcaacacggccgggnccccgcctctgccgaaaataaggggggggaccgggggggggccccgccggggg

SEQ ID NO: 171510 - DNA, 318 bp, Zea mays
  Clone ID: MRT4577_8799C.1
gggttggaaacaaaaaaagatatgcccaagctcgtctttgactagtttacaatggaactggggaaggggaaatgaacagggaggctttttcttccattggcctggagttcgatgggcccccccgacttcttttttttgcaagcccaagatctgggctttaaacttccctgaaacagaccccctgggataaacaaaattgcgggccaaccttaaaaatggggaacaattgggtctttcccattaaaagatccaaacttttgatatataccatgggccccacatgcggacccgtgggcggacgcttgggcggacccctgg

SEQ ID NO: 171511 - DNA, 237 bp, Zea mays
  Clone ID: MRT4577_879C.1
ccgcccaagtacaagccttttaaattacatacattttttttatttatttttcgtgttttaatataatcagtgtactttcattaattttttttaatacacataatcatacatatttttttatattgctcctactgtattattgattgaaccattgttttatattgcttgattaatgtattgtggttcaaattaacaaagatcaagacaacattgttgctgaaatacctgaaacctaca

SEQ ID NO: 171512 - DNA, 656 bp, Zea mays
  Clone ID: MRT4577_87C.1
aagaagcagcttgaccttgacctaggggtcggcaacgcagccggcggcggcggcgggggcgatctgtccacccatggacacggacatggacgagttcagcaacccaggctgcggcgggacgggcggcgccggctgcgactgccgggactgcgaggactactggaaccacgaccacggccacgccaagcagttcctcctcttcgcctccgaccacaaagattttctgtgcataccgtgggaggtcagaagacagctgagaaatgtgatcaccgacggcgggcctatcaaacttgaagctcccgatggccagatgcacagtgttaaattcgtcaagttcggcctgataactcttacgactggctggcggcgctttgtgaatgcaaatcgcatacgacgaggtgaccccatcttgttcgtctactgtgggagctccacgttcaaggtccacatatgcagttcatccagtcacaagaattctctgccctgttctcaacagcctcccaacatccttagagctgttcctcctcatgatcgtcatgtgctgaatgaacaaatggtgcctggtcctgcacatgttggctataccatatcccttgggacctggctaaccaaagaacaaaagaagaaagtgctagagctagctgatagcagcatga

SEQ ID NO: 171513 - DNA, 291 bp, Zea mays
  unsure (1)..(291): unsure at all n locations
  Clone ID: MRT4577_88000C.1
acggcgcaggcacgcgnacgaagctcggaacccggcgcgagggcggccctactgcaccttgccacacgggaggaaccaggggacggggacggcgcccccaagatggaggccctcacggcgcatgacgacctccccacctgccacagaggagcgccggccggggacgagaactccgcggccggcggagagacaccgccgccggcgcacatgccagcagcagacagctcccgggggcaaccacgacacgcaaacagagaggcaacaaggcatgagagagggggcgagggagac

SEQ ID NO: 171514 - DNA, 316 bp, Zea mays
  Clone ID: MRT4577_88001C.1
gctcgtcgccttcccatcttttcgcgccatggatttctgcagccacctccgtatcgcggatgtgctagagctcctcaaaggatgagcttctgcggtgagccggggcgctggttacttcgacccatcccgcgtggatcgactctcataggacgccccagagaagaatcttgcacaacgcatttcctgctgaaagcgccgtgccaccacctcatcgcgctggacaaggataagctgcacaacactatgctggcggacaacaaccacggtaagagagaccagagagacgtgcccaacacactccgagcatgtccctcca

SEQ ID NO: 171515 - DNA, 506 bp, Zea mays
  Clone ID: MRT4577_88002C.1
ttgcacccggtacttatgcattgttaaatttgtagtttggtgacactctacttgttttgtttctgtagttggtggagcgggcacagttctgggtgaatgaattggagcttatgaacgtgtaggttgcctggcatccgaatttggcacttgctctttcttatcagtgcagtaatgtagcatcacttgaaattattctctttcaacagctattttatgtttgcaaatgcaacgatgtcttttgagaaaatcatatcgtcataccctggtcccctgtcacttgtttcaatactggtgagtgtagctgggtgctacatcagttccttagttatatctgttggctcagtgataattaatctgatcagtgctttgttatttcctgatgttatggaaatggaagtgagatttcagatgtctattcgctggttttgtagtgtcctgatccacacttcaaaaagagacatcacaaaagaagagttctgcagaaccattggtcgattaatcataat

SEQ ID NO: 171516 - DNA, 308 bp, Zea mays
  Clone ID: MRT4577_88003C.1
ttttcaaatgaagctacatttcattttctcacctgtatcatggctatgtgaagtgggtggccatgttggagataaaacttaatgcatattccttcttgcagtgcacagtctgcgagatggtattgatctaatctatcgtcttaatacacacccattctacctttgacacttgatgaaaactgaaggcactggacgaccaagattatcgaacgcaaaaaagcatgtcgtgtagaaattttacctgcatactgttgcgtaagccgttagctggacagactgtcgcaagagtccaaagacacagcgatgtc

SEQ ID NO: 171517 - DNA, 179 bp, Zea mays
  Clone ID: MRT4577_88004C.1
cctcgagcgcttacggcgatgccgcagtatcagtcagaatgattccacaagagctcgtgcagctgcccggttgttgctttactctacaaaggccaagcccagcttacttaggacaaagattggaactggcccaagtgaaggcccatatgaagcactggtgctttctcatcatgacaggc

SEQ ID NO: 171518 - DNA, 1008 bp, Zea mays
  Clone ID: MRT4577_88006C.1
aaacatgtagaatatttacactacgtcctccaccatccggttttttcaaacaaagaacatgcatgggcaagaaaaggtcagtttcgctcgactgctgactgcaagatgatctgtaccaaccgacctctaatcacgcgatggaatattcaacttcccgattccacggcggcgggcaatctggttgtaacagccgcggactgcaactgcaatgggtcctccgtccgttcgttgttagtttacggctttccccatgacaaattccgtatgattgtttcaaagatactaccctcctagtcctcgtcgtcgaccacttgctttgctgtcgtaatctcaccataccaatgaaaacacctagccttagcgtatgctctgggccgcccatgcaagcgggaagaatctcacctgcccacaggacacccatgtgtttacactagagttgatcgatactgtaactgacaaccaaaaatgaatatgaacgaaacggtcttgaccttctcgctcctttgttttttattaggacgaccttgacctgcgtttgctgctttgcttcactgactgtgtgtgtgtgtgagcgcttggtgcaggtgctccgacgaggtgaatccgcggaagcagccgtacaagttctccaaccagaagctccgggacctggggctgcagttccggccggtcagccagtcgctttacgacacggtgaagaacctccaggagaagggacacctgccggtgctcggagagcggacgacgacggaggccgccgacaaggatgcccccgcggccgagatgcagcagggagggatcgccatccgtgcctgagagggcgatgccacacatgaacacaaagcagtgttcatactgctgccctgcacctgcacctgcttcttcccctgctgtgtaaacaggcctgtgtttgttctggctgatagtgatgtaccctaagacttgtaacgtcatgttcgttcttgtgaactatagcgagtgaataaaactggttaatgttggatgtgc

SEQ ID NO: 171519 - DNA, 245 bp, Zea mays
  Clone ID: MRT4577_88007C.1
cgcagacgcgtcatgctgatccacgtgcttccgcgtcctggtcatcttcctccgccaagcatagcagcggcagctcagagtcgcaggagcacgcttcttcctcctctgctacggccgcagtgtacctcaacatctacgacatctcacgctcaactactactctactggttcgactcggcatcttcaatccgggatcaagtccatggcatggagtatggctctggagctcatgaatacacccacag

SEQ ID NO: 171520 - DNA, 145 bp, Zea mays
  Clone ID: MRT4577_88008C.1
tctgtatacataaatccaggtgaacgggggcgtgtattagccataagagagaggtctttccaaccaatattttttggaacacactgatgtcgatgtcctgctctacaattatgccatccataacatgtgttgtctttttctattc

SEQ ID NO: 171521 - DNA, 452 bp, Zea mays
  unsure (1)..(452): unsure at all n locations
  Clone ID: MRT4577_88009C.1
cgcaccaaattaagcatgttatatattattggggggggggggggggggggtgcaatacttntgttacattacagnagntncattcatgatgtacgttgggtttgaccttcccngtccccttctaacagnctagtatgaaactggcactgtnataaaaaagaaaaaagtnatccgatacaacagtnatgttaggagtgaaaatanagnaagacaacacaaatgcagttataattttaaagcagggnngagggttggttatttaacaaacacaggaatttnnaaanaataaggtggttgaaattgattnagntttggtttgtttttaaataaaggttgtngtttttattttagataatgtttttgaccttatttatggaaaaagattaagatgtnaatggtaaaatggttattaagatttataagaaagggatgaggggtggttttttgttgtt

SEQ ID NO: 171522 - DNA, 197 bp, Zea mays
  Clone ID: MRT4577_8800C.1
ggcgacccacgcgtccggataaataaagcgttttttaaaaacattccagagaaatattcattcaaaagatgcgatgttactcttttcaatgatccccacaccttttacaccatattgacaatagtcagtatatgcagatctgattctttctttgatgccttttatttgtatatttatttatttttttatctttacat

SEQ ID NO: 171523 - DNA, 1183 bp, Zea mays
  Clone ID: MRT4577_88010C.1
cctcgaggccggccgggccggggtcgtccatgcatctctacctcgatcgtcagtcccagcttgtggtcgacgtactacgtcatcctaggttaaatttccaccgtcgtcagccacaatatggctgccatgctcgtccgctcgccgccgagcctcctcctcctcgtcgccgtcatcgcgttgtgcgcgtcgtcgtcctgtgtgcttgttgtgccggcggcggcgaccatggctgagaacgccgtgcagcagcccgcgatgccgtcgtcgccacagcagccgggcctagctgctactaccgcaggtcagacgaccaccgccacgccagatgcatcgtcgtcgacgtcagccgcggtggcggcgctcccaccgtcgtcggcgacgacaccatcggcgccatctggaaccgcaaccgccgccaccgctccgaagaagttcccgcaaccgacccccggcggcgtgggcggcgggccgtaccagcagccaggcggcgtgggcgggccgtaccaaccaggcggcgtgggcgagccgtaccagccaggaggcggaggccacggcgagccgtacctgcccgcggcggaggtggcctcggcgctgccggtgccgacgcccgacgagctgcccagcggggccagcctggggttcggcagcaacggtggcctcgggttcggcggccccggcgacgagtgctgcggcggcccgggaggctacggctggttcggcgggcccggcggctttggccccggaacctacggatacagtgggcccctctactggggggcggcgccggcagcggcggggtcctttggacgcgtcaccaacgtcctgctgcctctcgtcgtggcttatgtttcttcatgcgttttcgcttagcttttactgtactatttttactactatggcgccctatagcaaggctctagcttgctggggctcaggcttcgtgcgtttattggcttctctcgacgagccaaagctgttttgtaatgcagtttgtgaaaactacctcccctgtgttcgtcgcgtcgtgtataaggaaaatgtccatagtacctatgcctcgtttatttagttgtacacatataaggagcatatatattattacgtatgaatattacgacattaaacatagtcatatgagctatataatattgcgtcctactttcgtaaaaaaaaaaaaaaaaaa

SEQ ID NO: 171524 - DNA, 532 bp, Zea mays
  Clone ID: MRT4577_88011C.1
cctctttttttttttttttttttttttttttgtggttttttttttttttttccctttttcccccaaacacacacgtttacttctatcccaggcgccccaagaacaaagagccccccacgaaaatgacccaagggcccccccccccccacgccccaaaaaaaaaaaggaaaaaagccccccccccccccctggctctacaaccacaacaaaaatcaccagggggcccccgccaaaaaaggggcgggccttacaaccacccgcccccccggtaaaaaaacgggcccggtccaacacccgccggaaacaccccctaaaccccccaccccgtgggtacaccgcgggccccccccccgcgcgggggcccccccggggggggcccgacccaccccgcctcaaaaggaccccctttcggggggggggaccaatctacgggccaacaaaaaaagcccccgataaccaccccaaaccgagggccggcacaacgtccccgggccccgagaccgcgcccccccaccgcgcgggggcccccccc

SEQ ID NO: 171525 - DNA, 395 bp, Zea mays
  Clone ID: MRT4577_88012C.1
tctcggacgcgtggggccgcacaaactctcacacgcattttcctctccttctcggcttctccccctcgcctggcgccgacccgctccctgtgtgtccagttgtgcactagctaattctagacggcaagcaggcaagaggaggaagaaggaagaccccggcgaggcgccatggaagcagcagctgatgccttgccctgggcagcgcagtgcgcgggcatggccctcctcgcctcttccctctgcgtggtggcgctggccctggtgctgctgctcctccgccgctggccgtggtgcagctgccacgtctgccgggcgtacctgacggggtcgtgggcgcgggacttcaccaacctgggagactggcacgcgcacctcctgcgggagtcgcccaccgg

SEQ ID NO: 171526 - DNA, 682 bp, Zea mays
  unsure (1)..(682): unsure at all n locations
  Clone ID: MRT4577_88013C.1
cgcacgnactggcgtacctgcacaccgggtacgactttcccatcgtgcactgcgacgtcaagccgtcgaacgttctcctcgacagcgactgggaggcgcgcgtcagcgacttcggcattgcgaggatgctgggcgtccatctgacggacgccgccgcgcagtcggcgacgtcgtcggcgttcaggggcaccatcgggtacatggcgccagaattcgcgtacatgaggacggtctcggcgaaggtggacgtgttcagcttcggcgtcttgatgatggaactgttcaccaagcgacgcccgaccgggatgatcgaggaggagggcgtgccactgacactgcagcagtatgtggacaacgcgatctcgaggggcctcgacggggtgctcgtcgtcctggaccccgacctgaaggtggtcaccgagggcgacctgtccacggtggcggacgtgctgagcctggccctgtcgtgcgccgcgtccgatccggcggaccggcctgacatggacagcgtgctttcagccttgctgaagatgagcaaggtctgtggaagagacagatgcctgctgcaaaaacgcgaactgaaattcgtgctgcaagatctgttcaagcaaagggagaaccctgcttctgatgagtaccacccggacgccggacgggacgccaaagtgtcatagattcgggc

SEQ ID NO: 171527 - DNA, 634 bp, Zea mays
  Clone ID: MRT4577_88014C.1
cacaacaacccaacagagaccagcaggagttgttcgttgttatgcttcttgtggtttttgctgggagcgctaactccacacatacaacctgaatgctgacaatgtcatatagcttcgctggttcatctatagctgccatcacagatagcaccagcgtgtgaaaagccagctcttgagcattatacactgcaacaagaaatggcagcgaggaacaaactgtcatcacccttgcatgtgcaacaatcggcagatctatcttcggcgccatgatagtaccatactataacggcacagcatcagcatcatctcgagctacactgagatcaaccgaaaacagtctggaaaacactttgtgcctactgtcaggaacaacaatgtgttgcattcaaccaactgcttacactgaaccctgatgcttatttgcatcaacaactattacacattcagccagctaggtactgcctactgtcagcaacaacaacttcttgcatttaaccaattggacgcactgaacgccgatgcttatttgcaggagcaaatactactaccatctagacagctagctgcagcaaaccgtgcttgcttcctgacacagcagcagttgctgcctttctaccagcagtttgcggctaac

SEQ ID NO: 171528 - DNA, 328 bp, Zea mays
  Clone ID: MRT4577_88015C.1
ataaagcatcaattcgttatcaacttgtgcacgacaattcttcgccatccctggtggagtatgctacaacgatgattcagattcagaccatgaacctgacttgatgaggcattggtcactggaagatgttagctgggaagagattctggatcgtcaaatgaagtagattttcggggttagtgtttaggcactacatgatgaagtatgtgttgggttatgatcaagtatttgtgtgctatgatgaattatgtatgtgtgtggctagacattaacttagtctgttgttatgtaaggccttggcagacctgagccatctatgtataacttt

SEQ ID NO: 171529 - DNA, 126 bp, Zea mays
  Clone ID: MRT4577_88016C.1
gggccgactcaggcgtcgacgacagctatcgagacgcggagggagtgctaacttgtgaatacgtcaatcgacggatgaacatattgaacttgagcagcttcacgggcgtcacaggagtgttccttg

SEQ ID NO: 171530 - DNA, 478 bp, Zea mays
  Clone ID: MRT4577_88017C.1
aaaggaaacagggtttttttttcatttagtgctaaaccagagcggaacacgttctctctcagagccgtgctaacgaactgtcagcacccaaaagggccgctggaacggaacggaacgaactgttagcatacaaagcaagcagcctcccaagggcttgtacctagccagggtcactagcaccttcgctactaataaagtacgctaccaactaccaagtagtacacacagccacagacacggccaacgcgtcgccgctaccggctccactaaccaaaatgggtcccaccacctcctggcctggcctgccctgccctgccctaggacactccacgagacgactccttcactggtcgtccggcggcaccacctccatgttctgctcctcgtacttcaccccgaccaggaagcagatgctcacctggttggggtcgtacacggcgtactcgttgtactcgagcgggccgtccttggtcccccg

SEQ ID NO: 171531 - DNA, 1764 bp, Zea mays
  Clone ID: MRT4577_88018C.1
gggattttggtagccgtgtcaatgatgctattaaagaatttgttcggctatttgaggaggtcactggaaatgagtttgagccttgggaaaggcagaagaagttcgagaagaagagtatgaagatgtatcccttggacatggatgttggggttgatgtgcgtcacggaggtgcagcacttcgtcagctgggttctgcagcagcacattgcaagcttgatccttctgtttctttcctgctgaaacagttatgtggacaagagatctacaggtatgctctgatggagatggcccaggacctacctgaccttcccatagggatgcttaccgatctccatctgaagagaggggaggaaatgctgcttcagatgaggcgagacgcggagacggtggcagagtccggcccagaagcagacgcgttctggaccgacgccagcagcaaatggttcactctgttccccacaactcggccgtacacgatgaggggcttcgagcagatcgccgacaacgtagcatcaggtttcgagacagtgcgcgatataaacgacgcgtctcgtctcatcggggatgcgttccgctcgacactactggatgacccactgtctgaatgctacaagaagctcggttgttgtatcagtgctgtcgccgagggctcggaagactacaagatggttctcaagtacctggagaagacgtacgagcctgtcgaggtggaggatgtggtctatggtgtgtctgtcgagaggatatatgctgttgaatccagcgcattccctttgtacgaggaaatcaggaacctgccaaacaaaatccttctctggtgtgggactagaagctcgaacttgcttaggcacctccacaaagggttcctgcctgccgtctgccatctgcctgtgccagggtacatgttcggcaaagccatagtgtgttccgacgcagcggcggaggcggctcgctacggcttcactgcagtggaccgtccggaagggtacctggtcctggcggtggcctctctgggagaagagatcgaggaagtcaccggaacaccaggggcagaggaggcacgagtcctggaagagaagaaggtgggcgtgaaaggcgtcgggaggaagacgaccgacgagtcggagcacttcagctggagggacggcgtcaaggtcccctgcggcaagctggtgccgtcggcgaacaaggacggcccgctcgagtacaacgagtacgccgtgtacgaccccaagcaggtgagcatctgcttcctggtcggggtgaagtacgaggagcagaacatggaggtggtgccgccggacgaccagtgaaggagtcgtctcgtggagtgtcctagggcagggcagggcaggccaggccaggaggtggtgggacccattttggttagtggagccggtagcggcgacgcgttggccgtcgggtggaatggaaacgtgaggggtgccagaacatcctgggctgcctgccgcctcctggttttgtgtcaattgccgtgtctgtggctgtgtgtactacttggtagttggtagcgtactttattagtagcgaaggtgctagtgaccctggctaggtacaagcccttgggaggctgcttgctttgtatgctaacagttcgttccgttccgttccagcggcccttttgggtgctgacagttcgttagcacggctcagagagagaacgtgttccgctctggtttagcactaaatgaaaaaaaaaacatgtttccttttgctcgcgatctagaaaaaaaacaacccaac

SEQ ID NO: 171532 - DNA, 379 bp, Zea mays
  unsure (1)..(379): unsure at all n locations
  Clone ID: MRT4577_88019C.1
cctgttcttgacctggggggattatagcttaaagcacctagagcggggctgaatatgtgatcctgcaaaacttaactcaaaccacacaaacttggtctaaaaggggagttagagagaaataaaaccaagtttgagagtagaaagaagagagaagttcctttcacttgattgctctttcaaaatataattttgactcaaagaaatatcacaagggaagaattggaacagggaagagataaaaattgcaatgaagtaaatggcacaagacacatgaaaatttttatcccgggcttcgatcaaacgtaattgcttgcctactgcacgttgnagcgtttcaatggacgagggttacactcaaccgatctttttttttgggttt

SEQ ID NO: 171533 - DNA, 149 bp, Zea mays
  Clone ID: MRT4577_8801C.1
gcgcccacacttccgatcgttgtccgtatagattcatacaagggcgtcttctagagcgcggccaagatgaaggggttcgtgctggtcaagctccggtgcttcaattaggtgccctgggaggctctgtcggagattgacaggagcgagat

SEQ ID NO: 171534 - DNA, 512 bp, Zea mays
  Clone ID: MRT4577_88020C.1
caggccacgaatccatccattaatatatatatcaaataaacatctggcatcaactacatagcttgttacgcaaatacgaaaggctctgcgtcagtacatgaaaacgcatgcacacacaatgccacgcactactttctgatagcgacatctcatgggtgctgctgaacaacttcaaccttggcctttgtgttgctaagacgcgagaatgggtgataataagctgcttcgggagcatgccagggtcctgctccagatccttggaatcctttcccatatccttgcggttaccaggtttatgcttgtaagagatgtgttgtcccatacgggcatgcctaaactttggaataagcggtatagtctttaaagcttgctccgttaaatagggggagcaacgctgggtcctgtgcctctacctttgaaactcaaagggtgtatcctgggtcatgtacttgccatgcagatgcctgtatgctttcgcccacttaaccttacaagggttgctcttcattttg

SEQ ID NO: 171535 - DNA, 534 bp, Zea mays
  Clone ID: MRT4577_88021C.1
tgcgcctctccaacaaagcagccgctcgatcacttctctatctcgatcacacacatgaagttacgcggactcctcccgctacaccaccaaagtgcccacccggtggactctcaataatgtctccctgatcaacatcaagcctgaccacaacctcaatgcgaatgcgaatcgtcctcttctgcacatatcacacaccgagtcgccatacgccatgaacctgacacgaggatctacctgccggatgggctgctgcaccgatagtacctgacgaagcacctcaccgaaaacgtccctaaagtctttggtgaccaccctttctggctgaccatgaagacagatgacttggtcaaggatgacgactacatactgatccatgccagatggatcatgatcggtgcagctggcgctgacatcacacgaatcggcaccaaggtcggtgctaactgaggacctgaggctgtctgcattaagaccggcgcgctgctcctggacgcaacacccctcactacttcggcaacacatccccatcaccct

SEQ ID NO: 171536 - DNA, 334 bp, Zea mays
  Clone ID: MRT4577_88022C.1
ggcctgccctgagccagcaccatgccgacagcccgggtggtcgtaagaccatgcgggatacactacgtaacatcatacacacccgttcccttccataaatagcacctgtcctgacagacgcgttcaccgtccatccgcatgcctagctagcccccaacagcgagacagcccggagcaacggatgctcccgtaaccctgtgcgtgcatgcgatcgcaaggaagaagagggagatgagctactactggcagtagcctcccgtcatggtcccggcggagaaaggatacccgggcaaggacggctacccggcagcggggtacccgccggccggctacc

SEQ ID NO: 171537 - DNA, 366 bp, Zea mays
  Clone ID: MRT4577_88023C.1
cttattggcgggggaccattgatttcaccactttgattaaacaaaaataaaaaaccactgcaacaaagaatgaattccctcaaaacgtccaggacaaactccctgtaacaattttatgcaaagctgtcagcatcacttcaaaaaactgcgcataatacttcaaaaaaattcctgctggcgatcctcaccaatcccaccaaggcacatgcaatttccacttcgctaggccctcccataatacactcgtgcaccgcttgcaacctccacgaccttaacagaaggtgctcaaccgatttcacaaaatttcaaagtcactgaggccaaagtccggataagcaccgttcggacaaatgaaccacaaaaccc

SEQ ID NO: 171538 - DNA, 262 bp, Zea mays
  Clone ID: MRT4577_88024C.1
attcggctcgaggcagatgctggctgaccctgtttctggcctaagacagactaagcagaagcggggggtaaccttaaaccttatacgtggtaggtaacggcgtttatgttggcacttctatgggagcttggcaaaccaggcacgcgtcaatactctcgaagctacggtggatgcgcgagagccacggggaccatcctgatgacgataggtgacacatactgccagaacgcatcttgacagcagcaccgctgcacttgggaat

SEQ ID NO: 171539 - DNA, 236 bp, Zea mays
  Clone ID: MRT4577_88025C.1
atttacacctttatattaacaacccgatcgacaccatgggagcgttgttcgtagccctcggggtcctaactatcactgtgagcgccacctgcacgcatacaagcggaggctgaggttgcaatgctcagtcgccggtacatctaccgttgccggagcatatgccacctatggctcacttgccaactacggagcatatcccaccggcagatcacctgccttcgccggtccacccgcca

SEQ ID NO: 171540 - DNA, 347 bp, Zea mays
  Clone ID: MRT4577_88026C.1
ccgtccgtgaatcggatagggttttcttgtacagttctgagccttttctaacacctgttgtctgttccttccctgaccaaaccagtagcacttgattcacccgttgtttcacgagtagtttggtgttgtaggcctgtagggttctttcagaacttctgcacttttgatcaaggttgtttcagaacctgcatcagtgtatgctctgattctgttctctttaataatcctacgaaaggatggcttttggtttctgttcatgtacatgaaaatatttgcaatttcgccactcccaattgttgacactttgctattttgctatgtgtgtctatgatttgtggatcgatgtc

SEQ ID NO: 171541 - DNA, 369 bp, Zea mays
  Clone ID: MRT4577_88027C.1
gggccccaaatttttcgccaacctcggttttaacgccaaaacaaaccatgttcggggcctcgggtttttcaggggcaacaaggttcctgggcccaatcactaagttcaaattcccccttgggggggccccccccaaaatttattttgctcaaagcaagccccttggtggcaaatgacccaaaaaaccaggccctcccccccggggaaaaatgggaaatgaccttggccaggaacagccatccttacccctttatttgggggggggcctccccttgaaaagcaggaacagatttgaccgcctctagggccttgaaaaaccccccaggaaaagcaacaggccggggctgaggaacatgcctaggaattggg

SEQ ID NO: 171542 - DNA, 295 bp, Zea mays
  Clone ID: MRT4577_88028C.1
gccttgagaacgaggaaccaggggcgctgtccagcagcaaggggtacctcactgggaatgacaggagccgagtatctataaggcacacaacgggtcgcacccttagacaaacatacaggacacaatgccaggcccccacggctatccgagtaccagaaaacatggctcgtttactaatggcatagggcagcccaccagaacggataattgagggggcgacccgcagaacatttctggggcaaaaggatagccggatcgccaagggacgggaccagggcagggcctacattgtttc

SEQ ID NO: 171543 - DNA, 463 bp, Zea mays
  Clone ID: MRT4577_88029C.1
acatacggttctaaaatctcgtccgccctgcatgatgacttcagcatggtgctgtggaggtgcgctgcctgcgtgcctgggacacactcttgaagagcatgtaaagtgtgcacttgaaagggcatcggtgattatctggaccgtctggcatggttctttgtcggttagctattgctaagtgtgcaactttcctttggtgtctgaggagaagaggggctcggttaattggtatctgactacgtgcttcatccggggatagttacgtaaaatagtacgttgtcaccggctatagatgaaaggctttgttcagtgattagcatatgttgtctctctagcaatcatgggtctttcgagttctatcgggtagactgtgttaaaatttgcaacatcctacgcatgttcgctacctgcgctgtggctttaagccttggtaggcatgataaaactttatcgtgccgttgta

SEQ ID NO: 171544 - DNA, 593 bp, Zea mays
  Clone ID: MRT4577_8802C.1
attgggtacctcgaggccggccgggaaaaaacaactccattaagccttctgattgtgttggaactagagtcactgggtcttttccacgtgaaggaaccatttttggacgaaaggaggaggttgatgaactagtcagttggttgctgcacagaaggaatataaatccatcaaatgatgaaggatcattcactatacaactgcattctatacattcaaaaaaaaatatagagttgcattctattgttggtattggaggcatcggcaagactacagtagctcaaagcatctataacgatcagagaatagtaaacgcttttgataagaggatgtgggtttctgtttcacataactttgacaagattaatctaattaaggagataattgcgcatgcatctgatgataagaacatcaaattgatacatttcaatttcaatatgctccaagaagaacttcaaagaataatttctaacaagaaatttctattagtgttggatgatgtgtggtatgacgagagttatggggaacacattaacagagagaagtggtgggaactgatagctcccatggaaaatgcagtggcaggaagcaagata

SEQ ID NO: 171545 - DNA, 529 bp, Zea mays
  Clone ID: MRT4577_88030C.1
gggaaacgtggggaacaaaaaaaatgctaggtggcctggctgttgaccctggtgggcgacctcatgttgctcgccatcaactgctacggccagggcatttacttgcaagagaagaaaggccggttgtgcgcccatggcaggtctgctgccttcgaaaatgctactcgcatggtggacgagacttaccttggcagagaccttgcacctttactaccgactatactggtccatttacaagttgctaacaaatacagcacaaggagtactatcaagtaccaacgcttctgcgctaggccgttcgtggagacttgcgagcccgactacgggccgaatatgacttttgacagatacctatataagcaagccgagctacccaacccgctaggagaccatgatctggccgtcaactctattcttacactagggagagtaccacctctgcctccgcaagatgatacaggacctcttgagcccgacgcgctgagctcattggcttctaaaggggatgccagctgaccggccactgtat

SEQ ID NO: 171546 - DNA, 534 bp, Zea mays
  Clone ID: MRT4577_88031C.1
tcggtcagactagcaatcaaataatcgacttcagtatgtatgactccacaccatgaaagtgctgaatcgatgcccttggtttactgtgcctcgctgggagcgcgcggatactgtacaagctgatgggtgtgtatggcagaaccacggtatagtctactgggtaggttgtatatgcctccttcacattatctgtacgacgcatagcagcctcagtcatggacacacccgactgatgcaccgcaggtgaccccgcgccagctgctgcagattctgaccgacatcagcgtcagctgctgggctatgtgccacggcatcaaggccctgaggtaccactgcagctggtggtggacgaaggactgctggacacaacggcatgtgctgtagcaccaggtgctgcacctgatcatgctgaggagccggtgcactggtaccagacgacatacggagtgtggctagcctccttgctgcagcagcaggctgaacgggagcttgaggaactgatcgcagtcgacgtagaacaggatgtcaccgcta

SEQ ID NO: 171547 - DNA, 458 bp, Zea mays
  Clone ID: MRT4577_88032C.1
ccgggctctcactctctatctggaacatcactcttgcaaattcacccttaatgagtcactcttagggtctcagctataggctttagctagacgcaccactacttagggtagccataagctcttcttatcgccaccaatggccactgcacgagttccagaccccgaccgtgtggcggacgaagaagcgcccgctgtgaagaccccgtcgcccttcggcctgcccccagagtgtgtccccgtccatgccggggctgaagctgttgctgacgctgatggtcctgctggtccgcgggagcttgcggtgggccttcagaaggaagtcgtcgagccggagggcgctgctcctgctggagccgatgagcccgccacggccgaaccagccctcctggttgaagcttatcatactgatggtccctatgagactaccgcgggctagcaagaggcaatcatctaggagg

SEQ ID NO: 171548 - DNA, 636 bp, Zea mays
  Clone ID: MRT4577_88033C.1
gagggtaatcttaggtaatataaatataagcaggaaatccaatgcctataattaggtcttcactcaagtttattgcacattaaccggtacatgcattttctgacacatggtttatggttttcagagcagtaaaacttgagcaacgacacaaacatgaaaagttaatatctgggaagagctttgcacttcgtcctggtgaaaaatattatttggttccttcatcttggttgtcagagtggagagcttatattacaacgacgggaaaaaatatttcttcactaccagaacctcagagtcttgaagctgttgtcagttcacttatatgtgaaaaggtaaaccaatatgtttcacttgctgatgtggtctggttcttagtctaaaaggcaataaaagaacataattctgatatttgaatatgtttcacttgctgatgtgtgtctggttcttagccttaaaggcaacaaaagaacataactccgatatttgaatttgagagtttgagcgaaaggatttcagccaagaacaaatgagaacctatataatttcaaagaaggctcttgttagaacttctatacccaatctgtgagatttttattagtgacgtttgtaatctacatctgaagagaagaaatcatg

SEQ ID NO: 171549 - DNA, 173 bp, Zea mays
  Clone ID: MRT4577_88034C.1
cccaaatttccgggttgacaccacacccttctttttcattaaaagtaacacaactttttaacgtgcgacctaacccttaattgcctgggtttgttcattaccttggtttggttctttgaagccatcttattaaaaccccacccatttttaatcttttgaccaactgttttgaa

SEQ ID NO: 171550 - DNA, 520 bp, Zea mays
  Clone ID: MRT4577_88035C.1
acaagcttttttttttttttttttttttttttctttttttttttctgtttttttttttttttttttttttttttttttttttttttttttttttttttttttttttttttttttttttttttaaaccaaaaaattttttttgggggggggcccctcaaaggttttttccaaccaacggggggtcttttttatagtttccccctttgtaaacattttttccgttaaaaattccaaaccttttccctgcgggaaaatatattcccccaccctggccccccaaaaaaccggcccaaaccaaaaaaattaaaacccgcgcaccccaatatttccaccaaccaaaaataataggcctgcccccctttccaattttccaacccgcaaaaaagggcgccccccttttttaatgaatttcccaacccccggggaaaggctctttgcgctttggcccccttttcccttctccggtttctggtcccttaagggcgggtattcggttttgcccggcgtttttttctacacc

SEQ ID NO: 171551 - DNA, 1008 bp, Zea mays
  Clone ID: MRT4577_88036C.1
cgggttcattatctactgcaagttcgttgtctgtgtgctgaattcttcgttatatgaatgacagtcgtcaaaatcgtttttctaattccctctccttacacccttcgaaggtggccacgatctcagatagattatcctaaaatcccctccggtatcttgcttctaaataaggcctaaccggctagggcatttttcttaagccgcgctaaaaaaatcgagaagagttgcttaaccaaactattgaagactctcttttatattttccaactcgtgacttttaggatatagtagtgttatttttgcaaaccatgcaattccctgactaatttgcggctcaacaaataaaagtccgttcactgcatcgcttattattgacttgtcaagcaagtgcactactgcagcagagagcgtctcctgtagctcaccatgacttcacctttgggcctcatggagatcatgttctccgtctccgggaagggagaaagcagccggagctcgaagttcctgaggagatggctcagtatcactttgatctgcaggtaggcgtagccctcgcccatgcaggcatgcttcccggcgccgaaggaggtgtaggcgaggtcgccgccgaccctgtcctcctccctccaggcggcgaagcgatccgggtcgaacacatcagggtccctgtagatgccctggagcagattattcaccaccagcgggctcgccagcatgcgcccctcggggacctcgtactcggagccgtcctgagtgcgcacggtgaacggcctgcgcgcgcggcggaggatcattggggtcaccgggtgcagccgcagcgcctccttgacgctgcggtggaggacgtccatccggagcaggacgtcgtagtcgatggctgcggcgtcgttctgatcgttcctctgcagcagcctctgctcctcagtggctgcgtgcagccactctgtgtggcggagcaggcgcgccgcggtccaggtcgtgaccgttgcgctggtgtaaggcccccgc

SEQ ID NO: 171552 - DNA, 1123 bp, Zea mays
  unsure (1)..(1123): unsure at all n locations
  Clone ID: MRT4577_88037C.1
cttctacttcggnttgccaccggtctcgccaccactcccggcgcctcgaaccatcaacctgtcgcaagaggtcgcgggcggtccgatcggtggtgccgtgcgcgatggcggcgccgcctaccgtgcggggctacgggccagcgtcgccgtcgtcgtcggtggcgctgcctcgggcgcgatcgcgggtgcctgcgtcgctcgtgcccgtgccgacgcggcgggcgccatcggtgcgcctgcgtgcggcggtcgcggacgtgccccgcggcggcctgcagctccagcggcgggaggtggaggtactgtcggggaccgtgttcggcagagaagaggatgaggtgttggagaaggtcggggaggagaaggtggacgggtggatacgggagtcgatcgcggagatcgtgcggcacataggcgaggcgccgttcctggtgcacctgttcagcagcggcgacggcgacggcgagcacgtgacggtgcggcgggagaccgcggcgccggagagctggccggacgtgcggcgccggtgggggatgggcgggcagcggaggccggacggggtcatcctggtcgagcaggtggcggccgtggccgtggacggcggcgcctcggcgtcggaggcggcgcggcaggtgtgggggctggtggtgcaggcgcgcggcatggagcacgcctcgtgttacgtgctcgacacctgccgcgtgcgctcgtcggccgggttctgcacgcacttctgcctcgcgcgggccaagtgcttcggcgaccccgtcgagctccagctccgcaacgcctggctcaaccgcctcgccggccgccgatagccgccacccgtggcctcggctaccactggactgatagtattagatgcgccaaggaccaaacgcaatgatgatgggtcctcttcgctggcaagaacgaggaagagaagcacgcgaaatcagaatccatcagatcttttcgttcagttctgtttctccctgaattggaggtatcatgtgtacagattattggctgtaattcttactggcttcgcttattcaatcaagaagcgattcatcgaggcaaattacaaaaaaaaaaaaaaaaatttattgcctactccgaaattttcggatctcctcgt

SEQ ID NO: 171553 - DNA, 956 bp, Zea mays
  Clone ID: MRT4577_88038C.1
ttttaaattcctttttttttttttttttttttttttttttttttttaaaaaacaaaccttactgacacaataggttaaaattaccagttgatacttgatacagaaacacctacagattttacacagctggagacaatagcatttcctcatctgagacaaagtccagcctttttgcaacacatcattgagtccaaaatgtcaccataactaaggttgtgatatccactaaaatagctagactaatcacttggccaccccttcaaatagatgttggatgcgttcctgaacatcctctggggtgtatttgatgaacaagtctcgggcagcttcaggagatgatctcaatctcccaattaagcctctatatgcaggcataacagaatccactatcgctgacttaacatctgctcgtagctgctcatctgcaatcacccaatctgactgcaccgcgcaaatctcctccaggtagctgttgaacatctgcatcttctgaagcatggattttgcagtgatactgccaacgccaggacctccggtctgcagcactgatatgacttttgcccaggccccacgctggtactccacactccacctgcgcaccctgctcattatctgcttcatccattcatcaccaagcaaaaccccaagctcactgtcattgaccttgtgaataatgtatttcccattattcatcaagaatatggaagcaagtggtggacccctgtatatctttgatttggtctccaaatttttgtgaagcacatccatgatccaagctatgtgcacagctagcgacgaagtagggcgatcagggtcgacagcaatagccgctgtgccaacagcacccaagtcaccttccatcacctcttccaatgtttgccgtgaaccacaagcagcacggagatagttcatgacataccgagtgggaagcccggcccggccggcctcgagggtcc

SEQ ID NO: 171554 - DNA, 245 bp, Zea mays
  Clone ID: MRT4577_88039C.1
aaaacaagaaaaatcccaatcaatattttggttttttttaggaaacacatgccggtttgagggccccattgttgagttcattttatttttaatctaaaaaatggcccctccaaccatgggttttttcaagggagggtttattaaaaaaaactggttttttggcaacaatttttgtttttgcgggaagtttaccaccaaagggttaccccctgtttggggattaaaaaactggtggcgcttttggg

SEQ ID NO: 171555 - DNA, 432 bp, Zea mays
  unsure (1)..(432): unsure at all n locations
  Clone ID: MRT4577_8803C.1
cagacacntgggtgccacctccggtgcatctcccaccgccggtccacctgccgcccgcggtccacctgccaccggcggtccatgtgccgccgcagcaccggtaccaggcgatcttcgggttgggcctccagttcttttcttaaagggggggggaaacggccaattcccggggctgttggcagggcatatagcgcagcaactgacggggatgtgcgggctgcaaaaaccgactccatgcccctacgctgctgacggagggggcccccactgaagaaaccatgtgcttgaatatagccggtggctagctatccagtgcggtcacttagcggggacgactgagtaattaagtggcccccacccctcgggtggcagtgtccctgtgagcactgccctgatgaacaattgaaagagaagaaaaagtattggttcaac

SEQ ID NO: 171556 - DNA, 439 bp, Zea mays
  Clone ID: MRT4577_88040C.1
ccacccaaaaaccttctttttggaagtttacctcataaccaatctaaaagggggcccccccaatgatgggttgggggtaaacccctgtggggtttgccaaaccaggtgggttgaagggcaccaattgttgcagttgaaagaggggcccagcgttaggcccaccgggcaggtaaaacggcaccacctgttgtggggtcaagaaggcaacagggctcacatcacctagctggctaaatgggggaagctgttgctgttgaaaataaccagcaaagttcaatgctgccagtgggttgaagggaaaaaattgctgggggtgggcagcacctacctgactgaagggtagttgttgttgcaaataaccagcagagttcaatgcacccagttggttgaatggaaaaaactgctgttgctgaaagtaggcaccagggttccctacccc

SEQ ID NO: 171557 - DNA, 487 bp, Zea mays
  unsure (1)..(487): unsure at all n locations
  Clone ID: MRT4577_88041C.1
agaagcgtgcctcgcctgcagactgggaacctcaagcgacgatgttattcacgatgagcagtaaacaacgagacgtgcgagtgttgctgccgtggcgggcaanctccctaacccggggggggggatgaccgatgactaattcctcaaanacgtcnacgccttcatcgagggacgcggtctcacagacaagcgagatgccttccacaagggggcactgatggctcgggggcggaatcgcccaaacggttacgaaaagatcgatatgtggggcggggaagagaaaggctggctactacacgaagacgcccaccggtggagtcaaccattccagctatacttccttgtgggtctgtgtgctgggtccgctatcgggcggggcatgggtcagaccggtgtgaacggagctcancaatattacttcaacgaattcaacctgaacgggccagagaacgaactactacaagggctgatcaacggtgcaccctac

SEQ ID NO: 171558 - DNA, 479 bp, Zea mays
  Clone ID: MRT4577_88042C.1
aaaaaaaaaaaaaatctttttcagggccaaaaccaatttttggccccggagggcttggccccccccccttgttttgccaaaacaggggggcaaggaaccccccttccccggacaaaaaaaaagatttcaaaacttttccccccaggggccctagaaaaggggcaattcaaaaccccaatgttttgaacccggaaaaccttgccccctattttttttggggaaaaaaattcccttttccttccaaaaaaacttttcaaaaaaaaaagcggggtttggaaagggaaaaaccccccccccggggccaaatttggacccaaaaagggggggaggtttttaaacaaaagttcacctttggatggaaaaaaaaaaaaaaaaatgtttttgcccctgtgggaaacactttatcttttagccaaaaatttaaacccttgcccgttggaaaacagttaaattcccttaaaaaaaggaagtttttcccc

SEQ ID NO: 171559 - DNA, 374 bp, Zea mays
  unsure (1)..(374): unsure at all n locations
  Clone ID: MRT4577_88043C.1
cccacgcgtccgntttttttttttttttttttttttttttttttttttttttgggtgttttgttttttttttaggtttccaaagaccaaacccgaagggcccaccttaaaggagccaaatttaaaaacccgtgcttgcgaagaaataacccttttataagggcacccaaattaaattcacaggccgggattttaaaaaaccgggactggaaaaacccagggggtccccaaaataaacgccttgaaaaaaatgccctttttgccaagaggggtaataagaaaaaggcccccaccaatggcccttcccaaaaggtgcccaacccaaatggggaaaggggccccccctttgagggggctttaagagcccgggggggg

SEQ ID NO: 171560 - DNA, 2051 bp, Zea mays
  Clone ID: MRT4577_88044C.1
ctccaaagctgttcccttgtatagttagccacaggcaagcaatgctctgcctgtccagccgtccttggctgggttacatacatcaaggccattttctcttgacaccactgtcctgtgatatcatcgattcggcagcatcattttcttctgatcagtgtccctacggtgtagttgctgttgagggagatgccttacgtattttcaccattgaacgcctgggagagactttcaatgagacagcaatccctctccggaacaccccaaagaagtttgtggttctaagaaagaaaaaatacattgctgtcattgagagtgataaaggtgcattcagcgcagaagagcgagaagctgctaagaaagagtgccttgatgcttctggtgcagcggagaatggaaatgcgaataatggcgatcctatggagaatggtgatggtcaagatggtgccgaggagggcaacacatttcctgatgaacaatatggttatccaaaagctgaatctgagaggtgggtttcctgcattaggatcttggatccaaggagtagggacacaacctgtctgctggaattgcaggaaaatgaggctgctgtcagtatttgcactgtgaatttccatgataaggagcatggaactctactggctattggcactgccaagggtttgcagttctggccaaggaggacccttgctggtggattcatccacatatataagtttgtggatgaagggaggtcacttgaacttctacacaagacacaggtggaggaagtacctcttgcattgtgccaattccaggggcgattacttgcaggtgttggttcagtgctcagattatatgatctgggtaaaagaaaattgctcagaaaatgtgaaaacaagctttttccgaggacattagtatctattcatacctaccgtgatagaatctatgttggcgatatgcaagagtcatttcactattgcaagtacagacgagatgaaaaccaactctatatatttgctgatgacagtgttcccaggtggcttacaacagcacaacacatagattttgacactatggctggagcagataagtttgggaatatatattttgctcgtcttcctcaggatatctcagatgagattgaagaagacccaactggaggcaagattaagtgggagcaagggaagttaaatggtgcccctaacaaagttgaggagattgtgcagtttcatgtgggtgatgttgtaacgtgtttgcagaaggcctctttgattcctggtggaggtgaatgtcttatttatgggactgtgatgggcagtgtgggagcactgcttgcatttacctccagggaagatgttgatttcttctctcacttggagatgcatctgcgtcaggagcatccaccattgtgtggaagagatcacatggcttacagatctgcctattttccagtgaaggatgtgatagatggtgatctctgcgagcagtatccctccctcccagctgatatgcagaggaagattgctgatgagctggacagaactccgggtgaaatcctgaagaagctagaagacatcaggaacaaaatcatctaaaacagcggcttagtgtgaagaaactaggcagggcagtgccggtgctctttgctttaagactgtatccagttcgagctgttgccgcacttcaagatgtgacagcagcgcatccaacaagtttggagcacgctgatctgtacgatctttcctgatgctatctggtccagtcggcgatttattgctgagatagagcatgtacggcaccagaatgagtttttttgtatctcgtagaagtgatttagctgatgtcgttgactgtttacttggcttgatgtaattgagtgaagttattcatgttggattattcgtgtagtacggggttaccttggtaatgtactaccacaagggcttggttgctaggaagggaattggagggttccaattaagccttcaatcctctctaatttcctcccaaacaagccctaacagatttttgaagcgcagatgcgttgctgtcaaaaaaaaaaaaaaaaa

SEQ ID NO: 171561 - DNA, 354 bp, Zea mays
  Clone ID: MRT4577_88045C.1
ccggccgggatgcaccatgttacggccaccaactcgcgagatcactgagaactagtgcacaaacatcggaggagcaaaggggagcaaggaatactacttccgtatgttcccaggtctgtgaccgcgcgcagcaaccggaacaatcctgtttccctctagcaatgggacaggtttaaggtgtttcccctgggctccgtgcgcaagagcattttcttccgctcaaacccgggcgccagctccaagaccgtgcaacttggcatggctgcgcgcgaccgacctgcagtggtagtaccccaacagggcgccacgtctataaaaggccggactgtcacgcggtggcgtgaaagaagggag

SEQ ID NO: 171562 - DNA, 299 bp, Zea mays
  Clone ID: MRT4577_88046C.1
aatctagcatcatataaagcacaactctcgctctcaacatatgtgctcgccaaaatatcggagccgggcgtatgctcccttggtctctcgcgcaaatacatactacacgcaaccagttttcccacaggtgctcacaggactactataacattcccttccttccccacaacactatgaccaacttgcgtcttctgtatgtgaaaacactattcttcaaccctataccattcaacaggaactcgcaggtgccatcttacctttatgacccagcttcctccaacaataataacctctattac

SEQ ID NO: 171563 - DNA, 3661 bp, Zea mays
  Clone ID: MRT4577_88047C.1
gtttcatacaacatgtacaggtatatgcatataggttcaagaaagaaaaacttcatgtccaaaaggaaggagaatgaattctccgcaaaatcataaaaaacattacaagtttatatcatgtttatgtgcacttcataacctttatgaacaatattttgctaactaaaaaggattgtacatatgactaatacttttgtcaacacattgtttcagaaactcactgcaaactactattcttattattttatggccttcaacaccaacattttattgcttacgtgcatgtacataccagctcctataggcaacaccaacgtaatacgacatcctgactgctcatactattatatttgtaaactaaactatcctgctaatgttatatgaacaaatatatattcagaataaatctgtcacttctatgatgaacttttggaacacactgctgaaatacaatgtaatatatatggtcctctcagtctaccgtaggtttgctgtaactactacaattacaatctcagcacatcaacttctgtaagcactggaaccagtttaaatttgcccttaaatttatggcagcatatggtacataataactgctaacaactactctaagtgtacatataattttaatacataaccccaacgaaactgatcgtaaaaatggttcaggttcaccatgcgcgcatggcgcgcaccatacactagtaaaagtgaaacatgatgcaaagggacaaatggaataacacataagaacttatcttattgctttaacattttcagtatgtttcttattgtattggacaaatttataagcataccttcggctcctgaataatgggatgcacgaagattctttgaaggctaagcactacgaagtcgggacccttccaaagatactttttgtagggtaatgttcatctatttataggggagacgaactgactttgtacatatttacagtaatgcccatccatttttacataagccatttacaaatgacattagggtagtaatgtacttcctcctttctcagctccgcaaattccaaccctcgtcgtccggtagccttccttttggacttgtggcccaagttgccgccttcagccattattttcgttgcttgcgtatagacgaaatgcctttgtacactgcttttagccaaagcttagctttgtccgtcagtgagaatattcctgaaacacacttgtgattttgaaaatggttgcttatgattttcgttgcttgtgattttgctcttcgtttttcgactttatgattttacccttctgttttgaaaaccaaattaccgtttgcctcaccctctcaacgccattagtgaaaatcagatttggtgattaaaaaaataaaaaatgtgaaaacaatggatgaaaggtccaaactgccctccttatattatatatgggtgttacctaacaagagtaaaatcacaattacataatataacaaagggcaaaatcacaatacatgtatagacatttttgtcttttttatatcagatttaacaccattaactacatgaaacgacgcaggggtatgccaaagcctcgtttccaaaaccaagggttaaaattacaaagttaaaaaacaaggttaaattacgattgcaaggctagagaggttatactaaatgcctctatagtttacgtggctgacctctaacataaaaatgatttagttctgctaagagtttaaaaataatttagaaagcctaaaatatataaaaaacggttgatttgaaatagtaaaattgaacgatgatcgcgagcgttgatttagatctagtcatcggctccgacttctccggtcaagtcctccccctacctctaccagctgcccgtcgcacacaaaaccccaggctgcccgccgccgccgcgacccgccacgccgccatgtccgctgccgcggcgctccggccgatcgagccacttcccctcccgaccgggctctccctctcgccgcgcctcaagcttctgctcaccttctttcgcgccgacctcaccgtccggcccctggacgagtggcagctcaagtccgccctcctcgcgtttctccgcgacccacctctccccctcccgctcctccccgactcagacctctccgtgagccgcctccctgacctccagaagcgccgtcgcgaggagcccgtagcctctggggtcctccacgtccgcgacctctccttcctccgcccccgcaagggagacggcgaggccgaggagatgaccggggagcaggagaagtacttcgagtggcggagcaccctggttcagaagctcgaaggcatcgagctcaacctcgagggagtgaagttccggatgaccgtcgagatcccatcgtctgacgacttcagaacgatgaagaagtcatgggaggatttctactcctccgagctactcaatagcaggaatcctgtgagaaagatagctaaaaggccagacacaattgttgtccgtggcgtgccttccaggtggtttgcagagacaagagtatcatccaaaccttccacgctggtcacccacactgttttctcagcgcttggtaaaataaggaacctaaatatttccaatgatgatgagatagaagcaaaaggacatggagtcaacaaggggctcatatctggacttaattgcaaagttcaggtgcaatttgagagctacaatgacttccaggatgcaatgaaggcattatgtggacgttctttagagaaggaaggatcacggttgaaagtagactatgacgtgacctgggactgtgaaggtttctttcgcatttctcaatatgagccagttcgtaacaatttagaggagagggattcattagcatcggttaatagccagaggaaacatcacacttcacgaattgaatcagattataggaagagattcagggagtgatgacataagcccatggtatgagcgagatttctttgtcctctggagagggaaaacagctgcattgtaccatcgtatcgtttcattctcagatttcaagttatatttctcatttgttcacaattaaccgaacagaaaaacccattctgatacttactaatttgtatttattattagtatcggttttatccttgatgatacccagagaaaagagagcgccacaaaacgaactgtttgtttttattccaaagaattcttagatgttgagcattggcgcctgaacccatgctcattgatcaaaaaaaaaaaaaaaaaaaaaaaaaaaaaaaaaaaaaaaaaaaaaaaaaaaaaaaaaaaaaaaaaaaaaaaaaaaaaaaaaaaaaaataaaaaaaaaaaaaaaaaaaaagagggctttggcaaaaaaaaaatttttttttaaaaaaaaaaaaaaaaaggggcccggggccccattttttttcccttttaagggggggaaaaaggccccctgggaaaaaaaagacaaaaaactttcccgggggaaaaatggtaaaccttgaaaatcccaaaaaaaaaagcaacctgaaattaaaagtgtaaaacccgggggcccttttggggggggaaaaccaaattttttggggggattaaaaaagcgcttttccaacgggaaaaacctgttggccaattggattaaaaaaccgctcctccctcgggaaaggggggtttcgattggggggtttttcccatt

SEQ ID NO: 171564 - DNA, 246 bp, Zea mays
  unsure (1)..(246): unsure at all n locations
  Clone ID: MRT4577_88048C.1
cttaaaaaagtttatgaacaaaactgtataaagtaccagcaaatcaggcgactattccaatcctttccacactcaaaattgcaacaagtccaaggagaaaaaatgatccagacaatgataactcaatagagggggggggggggggagaacttaaatcntncaaggcacaactcctgctcaagtgccaaaactcatgatcctttctactcaatcagatcatcatcntcatcaggaagaggttgtgca

SEQ ID NO: 171565 - DNA, 230 bp, Zea mays
  Clone ID: MRT4577_88049C.1
ggctcccgtcccccgtcgacagtcgagtagaaccctatcctcccgagtccccaccatggcagcaccctctgcccggctcccgctgagaccaccgaaccggcgaacttggagggccggtcggggctgcacaccaagccggggatggccgctgggcttgcgagctcgcgcgcttgttcacgtaagtacctcccgcctctgactgcccaggccccaacgctaacggttctaga

SEQ ID NO: 171566 - DNA, 227 bp, Zea mays
  unsure (1)..(227): unsure at all n locations
  Clone ID: MRT4577_8804C.1
ggttcttgatcgccttcaccgccgcctgancggggaagaagcgcaggtgttggttgggcgccnncnaccncgggctacatacatccacctatacacagcctgatgggcagtatgactggcaaaaatcgactccctgattggtatacatatacgaataaaacacaccctctcgtttccgcgcgcgaaaaaaaaaaacacaaggagacgaaaaaaccggaggcacccac

SEQ ID NO: 171567 - DNA, 576 bp, Zea mays
  Clone ID: MRT4577_88050C.1
aaaaaaaaaaaaaaaaaaaaaaaaaaaaaaaaaaaaaaaaaaaaaaaaaaaaaaaaaaaaaaaaaaaaaaaaaaaaaaaaaaaaaaaaaaaaaaaaaaaaaaaaaaaaaaaaaaaaggggcggcccctttaagggtcccaaattccctgccctttcctagcgaaatctaatttctttttatgggcctcttaatagcaatcgcggggccggagattcccgcgccgggcgcgggtaaaacccggggcgcccccagtttgttgcctgggacgcgccctcccttttgggcccttttggcgcgaattgctgtgggggccccgccccagcgcctctttctaaaatgtgggcaccgccctagagggccgatggttacccccccttgcctgggtttttagccccggggggggggggggtccccccaggggtgacccgtccccttccttgaggcttacgccccatttctttacgttttttccctccttttccaccccattacggcgattttccccgtaaatgtttaatcggggggctcctttgagggtccccctttgacgttttagggcacctgctccccaaaaa

SEQ ID NO: 171568 - DNA, 523 bp, Zea mays
  Clone ID: MRT4577_88051C.1
cgtcgtggctggaggagcccatggtgaaggcggcgttcgagaagttcggcggcaggatgaaggagatcgagggattcatcgacgagtgcaacaacaacccggagctcaggaaccggtgcggagcagggtttttgctctttctatactgctcaagcccttctccaatccgggagtcaccgggaggggcatccccaacagcatctccatttgacccgtgcggcctctccatccaatgggggtttgccttattgcgtgcacgctagctagctgcttggaaataaaaataattaaaataaaaggtctcgtctgtactattgtattgtaccatggatcatatcgtacatgttgtgtcaatgcaaagaggcacgtttgagttaaaaaaaaaaaaaaaaaaaaaaaaaaaaaaaaaaaaaaaaaaaaaaaaaaaaaaaaaaaaaaattaaaaaaaaaaatatatagctaaaaataaaaaaaaaatgctaaggtgaaattggaaaaaaaaaaaaaaaaaaaaatagggggg

SEQ ID NO: 171569 - DNA, 398 bp, Zea mays
  Clone ID: MRT4577_88052C.1
gggaaatgttttttttaaaaaaaccgcaagaaaaaaacccggccctttgttagaaaatttacgagtgggggggagcctttttgaaccccggttccctgtatttaataaaaaaggggggtggcggctcgttgctccattttttaaaagtttgggggggaggagggcattcaaaattttttttggaaacgggataaacccaagtatttttgaaacttgcctaaccccgaaaaaaaaaattgggccccgtataaaaaactatgggcttcaaataattgggaggccaatggggggtttccaattaaaaaaaattgggggttttggaatggggaaagttttgaaattttcacttgccaccgggggtacccggggccggggtaaaggggtaaatgtttttgacc

SEQ ID NO: 171570 - DNA, 598 bp, Zea mays
  Clone ID: MRT4577_88053C.1
atttgtctccctctctccacgagttcctctcgaccaacagacagcagattgtacggataacagccgacgacctctctgaaaatccagatgacaaaggcccgcgacgaggttccagtcagagatcaaggacgcgcaccagaggcgatcgcggcacatgctactctgtcactgctaccatgcaatggtggactccctcctgctgtgacaaaaagaggtcaagaacctatgccttgtactcgatccggccggaaataccgcactgatctcacatgctcaaggactctccagtgtcgcaggccacccgacgctttgcccgactctctacgagcttaccatcgactagatggatccttaggcgatcgagcactggaagaacctcatagcatgccgcatgagtaaggctgactacgcaaaggtggatggtgcaatataccggatatacgcatatgatatggacgcgagtagctagacatgctaataactagatctgatggtctcactgtcagatgagatctttggctcacgtctcatttctcatccttaggcactagactgtatatcccatgtgctgccatcagaagaggagctactgcatcag

SEQ ID NO: 171571 - DNA, 240 bp, Zea mays
  Clone ID: MRT4577_88054C.1
ggcgaatcccattctcatcccccacccatctctctcccctcgccgcccccgcgattccggcgagtttcggcggcacgcagcacaccgccgacaccccctcactccggtccttcctcctctccggccagattcgcggctaccgcgcgcaacccctcccaatccccgtggatagggtcgtgggcatgtccccggctcgagctgcgtgccaagatccacggcaccatcctcctccatgatcca

SEQ ID NO: 171572 - DNA, 584 bp, Zea mays
  Clone ID: MRT4577_88055C.1
aggtccagaccgcacccgacccccccgatctggttgaatccgtccaatccaaggagcactcgcaatcgcaccggcggcggagatgggcggcgaccatggcggccacggcccgagcggcggcgacttccggcagaaggtgtggagcatgacgggcgggccctattgccggcccgtccactggcgccgcaacaccgccatcgccatggtcggcatcttcctcgtctgcatccccatcgccatgaaatccgccgagctcgagcaacgcccgcaccacccagtccggccaatcccatcccagctttggtgcaagaactttggcaagaaggagtactgaaggatgtgccgactttcacagagaaagtcattcttttacctttgtgccttcttttgtcataaccggtcctcagcgatcgaagctggaagaagtacgcgaccatagcgttatgtaactcttgtgacttcttattatcacatacaaggagtgcctgtttgtttgcgattcaaataaactcgcgatgcatgagcgcctctatggatctactttaggatcaaatcctatggttatagacatcgtttgttctctt

SEQ ID NO: 171573 - DNA, 320 bp, Zea mays
  unsure (1)..(320): unsure at all n locations
  Clone ID: MRT4577_88056C.1
tcgccccgcgtccgcggncgcgtgggcggacgcgtgggcggatcgcgtgggctggggctcggcagtncatgaggggcgtgatcctgtttgaggagaccctgtactagaagagcaggatggcaacccttttgttgatgttctgaaggagggaggggttgtncctggcataaagggtgggggggggggcattttttttgttggntctgataaggagactaccaccgaaggtcttgacgtccttggtgtgcgtgtgtgcctgtnctacgaggtaggtggcggttttgtgatgtggggcggtggtctttngattggncctaatg

SEQ ID NO: 171574 - DNA, 403 bp, Zea mays
  Clone ID: MRT4577_88057C.1
gcttggaacctttgggctgatttagtgcttgtttatgtgcttggcccgaggtaaatacgcagagagagaggggctaatgggtatcggagtaaagaccagtcgagaagtcggtcgtagctaggagcctagagggtggtatactatcggacgttgtcgataaagcccgaactcctcacgtaatgaataatgagtcgcgtggcgtagcccgcgacccttcggtaacctgccctcacgcgaccctattagttttagttctattgttgagcgtcctaccccccccacggccctctacttcaactactactgggaattaatcaacgaagtatcgtgtgtttaccccttttacggccctctcgcaactaatcagaaacgactaagcattaagtagcgcataacgtgacgt

SEQ ID NO: 171575 - DNA, 367 bp, Zea mays
  Clone ID: MRT4577_88058C.1
ctttatatagctgaggattgtcaattgtgcttgtatatatagctgactagctgaggatgggggacctctcatcttcaattgtgcttgtttataactttatatagctgaggattgtcaattgtgcttgaaaaaaaaaaaaaaaaaaaaaaaaaaaaaaaaaaaaaaaaaaaaaaaaaaaaaaaaaaaaaaaaaaaaaaaaaaaaaaaaaaaaaaaaaaaaaaaaaaaaaaaaaaaaaaataaaaaaacactaaaataaaaaaaaaattaattttaaaaaaacacattaaattacaaaaaaacaaaataatatctctcattttttatataatcaacacctattattctcctatttctctatatttttta

SEQ ID NO: 171576 - DNA, 287 bp, Zea mays
  Clone ID: MRT4577_88059C.1
ctcaaactccgaatccagctcgatctaatttatcttctattatctatcccgctaggatccatgaaaatattttgtcactccacttccacgaagcccttttccttataccattctgcacccccgaaatatggctctttatcacaccaccaaattgcatcctaataagctaacacaccagatgcatgaacttgacattttaccaatacactcattttcatctcatcaatatcttctctacaacctattactaaagctccacaaaatacccacaagagatcttaataatc

SEQ ID NO: 171577 - DNA, 287 bp, Zea mays
  Clone ID: MRT4577_8805C.1
aaagtggtgacatgtggggttcagagtaacgagaaccgagcaaagtggtgacatgtggggttcagagtaacgagaacaggttcttctgacctcagttttcagtaaaaaaaaaaacaaaaacaaaaactcccacgaaggagaggcggtgaaagaaggcatccttgtcataaaccaaacaggggagggaaattttccttctgctagattttgctggagctgctagccaaactatgttatatgcacccaatgctgcgctgtgatgatactctgttatgtatttcttttga

SEQ ID NO: 171578 - DNA, 114 bp, Zea mays
  Clone ID: MRT4577_88060C.1
atctccgacaacatcgtatattactatagttctgcatatggttgcacctaaatagtagtgatccgcaatgtcgacagaggaggctgttgttcctcaagtcacgctgaccgaggt

SEQ ID NO: 171579 - DNA, 442 bp, Zea mays
  unsure (1)..(442): unsure at all n locations
  Clone ID: MRT4577_88061C.1
ccccgggccaaccaacccttccnaaaccccttgtccaaccccttgtcctcattattctttaaggtatcccttctcttaccacggagggtctaacatactaagtttgctgtgtcaccccattacacttatttttattgaaccatttttcttaatcatttgttaccattactccccctatcttaataatttttttttttttttccccataactttatttcacccttttttaactaaaaatatttttaaattctttttttttccctactttttctatattatatatctcctatttatctcttattattactttctattaaacccttattattttgcgtgttgttcctatatttctttattttttattactttttttattttttattttttttttatttttttttttttttttttttcattattttatctattttttttcttaatt

SEQ ID NO: 171580 - DNA, 276 bp, Zea mays
  Clone ID: MRT4577_88062C.1
aaaaaggggccgagtgtcaacctaggtaacactcggtaaagtttgttttgccgagtgttttacagggacacttggcaaaatatattttaaaaattttttgggcacaggggggtttagacttttactattttataacctaagaaatggcctccacctttttttttttttactaaattatggaattttggtttttttttttcaggggacaaaaggaaaagcacttttgtttttttgggggttgagttccaaaatccgtttttttgatgggaaggtttg

SEQ ID NO: 171581 - DNA, 174 bp, Zea mays
  unsure (1)..(174): unsure at all n locations
  Clone ID: MRT4577_88063C.1
gttacaaatcacaaagcagcaggaacaaangttttcaaaccgaccaagacgaccacaggggaacgatacaccaaacggggcaccacccgaaaaagccaaataaaagcaggcgatacccggagaccccggaaccccaaagcagaaaccaccggagacatgacgctgaggacccac

SEQ ID NO: 171582 - DNA, 117 bp, Zea mays
  Clone ID: MRT4577_88064C.1
gcgtccgtgaagaaaaatacgagaatgtggcatgcttatagagtcggtggatgcttgatgcttcctggcttgcttttgacatggatcgtggatatatatggtagtacagcgtagtgt

SEQ ID NO: 171583 - DNA, 438 bp, Zea mays
  Clone ID: MRT4577_88065C.1
cctcgaggccggccgggatacctcccctactctccgcttgccttctgcgactccatttcaacctctgtaccttagcagcgcagtctcgcctctctccagtgctctctcagaagacccacatcaacatgtgagagtactgcccatcgtccactctggccaggcgaccaccacaggagaccttatctactcgcttgcgaggcatctgactgatcgtgcggtcgacagctacgacaccgcgtgtgctgaaatgaaccatcgactcttcaagcgacgctggtctgactcgacaagctcaaggctgacggcgcagagatgtatcaccattgatattgctccgggtgacattgataccaccgagtactactgcacgccctttgatgcccctgcacacgccgacttcatcacgaacatgatcactgcgacctcccagactgactg

SEQ ID NO: 171584 - DNA, 582 bp, Zea mays
  unsure (1)..(582): unsure at all n locations
  Clone ID: MRT4577_88066C.1
catacatctatccatcggtttctcagctgctgctgcatacgcacctcggccgccgccatcgtcgtcgcctagctagctctgctcctgggtcgtgcgcctccatcgccgtacgttcgatcgagcacagcacggccggccggtgggcgcacgcgcacgcgttagcttatactacgttaaacgtacgagactgcaggagctagcgagcaacggcgtgccgatcgatcgatcgacagagcggggcagatcgatgagctgcaacggctgccgcgtcctgcgcaagggctgcagcgacgcctgcgtctccgccccagcatcgactggatccacggcgcgcagcngcaggccaacgccaccgtcttcgtcgccaagttcttcgaccgcgccgacctcgtcncctccctcgccgcagtccacagctacaccaccaccanaggtaattaatgcatncatacataccatccaccacacagataatacaccccagagcncaancatatatattaaaagattatnnttaatacacacaatatacataaatagataaatagatataaatnatatntaaaaaagataataattgtt

SEQ ID NO: 171585 - DNA, 620 bp, Zea mays
  unsure (1)..(620): unsure at all n locations
  Clone ID: MRT4577_88067C.1
cggncgcgtgggcgagcacatcaacctcgttcgctgtccgttgtcctctccctgccccaagggtcctggcgcggcaagatcaaagcctcccaacagccaacaagtcgatcgcaaatcgcaagaacaagagaagaaccaatccgacaacgtctccattctccctcacatctccttgcttgcccagcagctggcactccccgtctcccctcgcatccgcatcgaatcgaggcatatcaccctatatatcccattccgctcggttggattcagcttccccctccctctcccccatcgataaaaccgatgcgtcgcccggcctcgcgtaccctaccggcgacgggacgaggggaaggttacaggcacggcgcgtgaagggtcctggccgtcctgcccagtgctgcccggtccgtcgcgatgccgttgtttgagatgtggctgcctcctgtgcctggcgagggggctgtggcggcggcgggggggctgttcctcgacggcgccgatgcagcggcgcacggcgcgctcctcgcggccatgcctggttgctccttgtcgttcgcgctccggtaccagcgttgccgggggtcgccgccggggttcctgtcgttgacgatgccggtaaa

SEQ ID NO: 171586 - DNA, 372 bp, Zea mays
  Clone ID: MRT4577_88068C.1
atggctccgccgcgcgtgagggcggcgccgccgtgtttggggcgggattgggtaaaacgatgggggccgttgatcgtgacgcggacgtccgagattagaagagggagtaacgcttcgtgcatgaatcggatccgttcgattttgatcggacggatcgggggagatttcggagtaattagatccgcgccgttgatcgcagaatggacgggccgtgcggcgtaccgctccgcggggcggccagatctaatctggtgcgcacgtctcggatctgacggctcacggtgccccgtaccccttcgccgtgtcacaattgctaaagagtccctgagttctaaagaaatgaacccgccgtccaccgcgggggtttgctga

SEQ ID NO: 171587 - DNA, 274 bp, Zea mays
  unsure (1)..(274): unsure at all n locations
  Clone ID: MRT4577_88069C.1
gggccgaactcccggggtctgggtaacagcctaacagggtatatagccgacgcaggccctagcgcgcagcggnacagctggaggacgacgagcgcccagagacactggagagcacaacgancgcatngcatcagagcctgcatctgaaaaaacgttaagaagagataccaagtgttgggatgaatgaaaaaaaaaagaccaaaaaggaaggggggggcttgcccgactcatatgccgtgttcaatttctccgccgatgagtggcttggatcgga

SEQ ID NO: 171588 - DNA, 165 bp, Zea mays
  unsure (1)..(165): unsure at all n locations
  Clone ID: MRT4577_8806C.1
gaccgacaaaaaagagctgtgctctcgtacgctccgtgagcggcagggtggaggatgtgacggggtgagtagnttctccttccggacgcttaaatataacacggggctcctctcctccttcccgtgctctactacccctatcaatcatcttctttaattccacaa

SEQ ID NO: 171589 - DNA, 1488 bp, Zea mays
  Clone ID: MRT4577_88070C.1
ccggccgggaccgccggtgcacgcccgaccgcaactgtggactcaccaacgccggcatcccgtgccaccaatgaccaaaaccttctccggctctccagtccctccacgacggctctacaccccctacctaccgcatgtccgtcaattttaccgccaactccccatcccgccgtttctcctatatatgcgcacggacatctcggtcgcggccggcaggaaggcaggaagaaccgccgccacgccacacaaaaagcagtgactcagtgagaaaggacagcaagcaagccctccctccatctccgccccgtcgccatggtccttctcttcgtggagaagctcctggtcggcctcttggcgtccgtcatggtcgccatcgcggtgtccaagatccgtggccgcaagctccggctgcctcccggccccgtccccgtgcccgtcttcgggaactggctgcaggtcggcgacgacctcaaccaccgcaacctcgccgcgctgtcccgcaagttcggcgacgtcttcctcctccggatggggcagcgcaacctggtggtggtctcgtcgccgccgctggcgcgggaggtgctgcacacgcagggcgtggagttcggctcccgcacccgcaacgtggtgttcgacatcttcacggacaaggggcaggacatggtgttcaccgtgtacggcgaccactggcgcaagatgcgccgcatcatgaccgtgcccttcttcaccaacaaggtcgtgcagcagtaccgccacggctgggaggccgaggccgccgccgtcgtcgacgacgtgcgcctcgaccccaaggcggccaccgacggaatcgtgctccgccgacgcctgcagctcatgatgtacaacaacatataccggatcatgttcgaccggcgcttcgaaagtatggacgacccgctcttcctccgcctcaaggcgctcaacgcggagcgcagccgcctggcgcagagcttcgagtacaactacggcgacttcatccccgtgctccgccccttcctccgcggctacctcaaccgctgccacgacctcaagacgcgccgcatgaaggtcttcgaggacaacttcgtacaggagcgcaaatgatcagcccacgaaggaaaaaaaaaaagggactcgcttgatttgcgttgctttgctttccgcgcaaggccgaaagcttaaggtcggggcaacgacacaccgagagcgacggagatataccacgctctgctgcttcatgatagctggaaggacatcagcatgacacgcatgccaataatgtagtagaagactagtttatttgtcacctactaggcaaagagtgcggtggttccatgaaccaaccattcgtgcgtgcgtgcccaccgcacgaccacgagggggcatgcaacatatactttacaaaattcattcggttgttgacttggtttcaattcattgggttgtgaagacataactaacatggatgcgatgcgtactcacaggatggtg

SEQ ID NO: 171590 - DNA, 487 bp, Zea mays
  Clone ID: MRT4577_88071C.1
gggcatcccacacaagaaaaagggggacagatgacggggtgcgaacaaaaaaaaaaagggggggagggggggggggggggggccaaaggggaagaaccgggaatgggggggaaggggaagggggacgccacgggggggggggcgggaggggggcgggggggaccggggcggggagaggccacccacggccgggacccccccccccccaacaagggccccggggcaaaaaccccgggccgccaacaaccgggggcccccaggaaccagagctggcccccacaagcggcggggggggggggggggacgccgaagccaaaagaccccaaaaggtggatgaccgacggaagggacggcaaaaataccaaaccgctgatggccacaatgtggccggaacggctgggacaaggggccgggcggcccacaccccacgtaggaggaaaccgcccccagggggccgccccggggagggggcaggacccacgggcaa

SEQ ID NO: 171591 - DNA, 1069 bp, Zea mays
  unsure (1)..(1069): unsure at all n locations
  Clone ID: MRT4577_88072C.1
ttttcacgaaaaatacaaatttgagagaaggacaaagttcaaatatggacagggtagtagtacaaaccatactgcagcatttttttctcgcaacaaaataccggggcattattaacatgcagaaatgcagagaacactgacgatgtcttgaaggcgcccttttcaacgagctggtccctgggcgatcgcgcggttggccaccacgaggctggtcgtgccgtacacgggcagctcgtccgcgccggcgccaccaaggctgtccagctcgaagaggtcggagctggcgtcgctcccctcctcgtccgcctccagctcctcgaggctccgcaccagctcctccacccttctccgcaccaccgacacctcggcttccgggcggagctcaccgtcctctgcaccgacggttccgccggcgcgtcaccgccttcgcagtgctcgtcgccgacatgctcggaggctgtggctgcggctgcggctgcgagattttgggcggaggggttgcagccggagccttgggcttcctctggaggcgcaccgaggagaacagagccttaagggcgcacgcgaacgtcgccggcgacgggggctgcggtccgggcgatgatgatgatggcaccgaggcctttggtcggattcttgctacggggaaacacggcctggccttcttcttcggtttgctcttgggtggcggtggagggtttgcggttgcctcctcggcgtctgtggcggcggattcctctgacaatgacatccgcggcggggggctgtggcggcggcacgtgaactcagtgtctgtggtcgacgccgacgagcaggagaagctgctgtagctagccgacgagtcggacgacgacgtggtcgacgacgcgtaccccgagtggcgcgggcgcgcantccccgtctcccggcgtcgcctgtncccgtccgcgctcgatgaggactgcctgggtctggccgcctccttattcgcccaccagaactgcgccgtcgcggccgccttctcctccgcaccactccnacgcgcggngtcaacgagacgtccgcaccgtcgccgccgtcgtcgagggag

SEQ ID NO: 171592 - DNA, 210 bp, Zea mays
  Clone ID: MRT4577_88073C.1
ggggttgtgatcatgatcaggccgctacggagcgtaaaatctgctcgagcgactctagaccggtctatgcgcgcgatacttcgtcgtctagaagcacacccgatatctatatgccgagcgtgaccacacaagagaccggatgatgcagatctaatcgcgaacacgttgctgctgctgtagagagagccaggtgcaccgtgtcagctgcga

SEQ ID NO: 171593 - DNA, 326 bp, Zea mays
  Clone ID: MRT4577_88074C.1
attcaactccagcacatatcatttttttaaaaccttcctaatcattctccactgtactttcttaatacacaccgcccttccccatttctcattctaacctaatactagctttattatcatttacatctttttaattttccccaactacttaacttttgcatgttaatagatatctgtaactatatctttacattacattatatatcaaaataaataaacactttttcttttcttttcaaaaaaaaaaaaaaaaaattccgccccccacttatttaccttctcaacctctcaattaattcattccgctaccttcactctttccacct

SEQ ID NO: 171594 - DNA, 746 bp, Zea mays
  unsure (1)..(746): unsure at all n locations
  Clone ID: MRT4577_88075C.1
aattcggcacgaggcggaagctgcaagttgctatgccactgcgagaggaagaggagtcaccgccacgcgccagcgccaccgtctcatgtttcctgctccccgctgcgccgtttcgctctctcaggcccataccaatgcctccggtaccagcacctgcggcggggtcgggggcgggggcgggatgaaggcgctgcggcacccgacggcgtcgcaggtgaggcggctgtgcaaacagggtcgcctggacggcgcgcggctgctgctcctcgacgcgctcccgagcccgccgccgccgccgctctacaacgcgctcctcatcgcttacgtggcccgcgccctcccggaacacgcgctgcggctctacgctctcctcaaccacgccgcgcgccccacgccgcgctccgaccactacacgtactcctgcgcgctcaccgcatgtgcccgcacccgccgcctccgcctcggaaaatccgtccacgcgcacctcctccgccgcgcgcgctcgctgcccgacaccgcggtgctccgcaactcgctcctcaacgtctacgcctcctgcgtgcggtaccgtggcgacggcagcgtcgacgtcgtccggaggctgttcgacgcgatgcccaagcggaacgcggtttcctggacacactgttcggttggtacgtcaaaaccggacgtncccagnaagctctggnagatgttgtgcgtatgctggaggatggcatcaagcctacgccagtcagcttcgt

SEQ ID NO: 171595 - DNA, 330 bp, Zea mays
  Clone ID: MRT4577_88076C.1
cacccatcacactcagtcatcagttgattcactaggcagtaccattcagtggtttaaacttttgcactgcagaagaagttaggggcgcaggatcctctatatcctatggtccacctcatccacccaggggaacagcttgatgcgttatgtaagctttaaccataatttgccgattgggctaagaggcatgcaggtggaactgtgtgctactgaggcaagagaagataaccctcatgataacaatgatcagcatggatccgcctcaggatcatgcatcatggacacggcctaccactgtggattagaacgccatcatagactggaggctgc

SEQ ID NO: 171596 - DNA, 572 bp, Zea mays
  Clone ID: MRT4577_88077C.1
aatgcggcgcctgactttgcgatggccgcgatctcggttgcattcgcatctgtactcatctaccgtgcttttgataagaaaacccttcccacagacggtcgcagacgccgaccacgggagcagcacgatgccccacacaaagcacacacactctatcttacagcacgacggccaagccaactcatggggcagaaacccgttcgggcggctggtgaactgccgctaggaccacacgctggtccccaccaggcaggcgccccaacacaatgacagagcaacacctgtaccccagggccagaggcgttgcggatgaaccctaccacatgcatgcactggactattaaggacaagtacgcatacgctggcacaaactctatgcccaagtcctttatagggaccataattaacttgttgcatgttctctggtgaggcaatcaccaggatccatgcacctgctgaaacactgcatgatggagacctgctcacacgggagcgctctagcaggaaacagcatatgcatcacagctggaagcatgatgtgactccggcataggcagacaccatgagtctat

SEQ ID NO: 171597 - DNA, 301 bp, Zea mays
  Clone ID: MRT4577_88078C.1
agtcgtattaacatgttcactgacgcatcccgacagaatctaaatttactgaggttatgctaacacccacacatttggccatatctatggaatagtctgctggtggggagctatttgagaggatgtcgtaatgctgggtggacttagtgaggacgaggccagatttttctttcaacagctgacttcacgagttatttcttgccaatcagctcaaattcgccagcaagatttggatctagaaaacacactcctggaacatcctagatcacctccgctaaacatacgtgattttggttactcc

SEQ ID NO: 171598 - DNA, 1355 bp, Zea mays
  Clone ID: MRT4577_88079C.1
attcgtttgtgttgctgcttcgtagtttcaattacagccaacagtactcgaaattgctgctgggaacttaaaaacaaacatgttttcattaaaacgagtagacagcaaaatgatttcattcttacgagtacacaacggagcttcacaagcctcaaagtcgccatatgtgatatgtcccattagctttggctgacaagttatttgtgcgcactaaaatgtaaaaatctagctatacctaagatctactgtttggaaccagaagaaaaatctgacgattcagacccatttgaaaccgcagacagccacatctccatttcagtttcacctgtgggctccctacaaatgcacccctcaccccaccccaaataccattttttgtagtttcaggaaaatgcaggagaaaaagagccttttgagcctcagttccaatctgacttcttttgcttctcatcgttgggatcatcaagtttcctcttgaagatatctgaattgcgaagcctctccctggattcatgcgccgtcggtatcctcctattgtgtctgtcgcccattccgattgagtctctcttgtttccatggtgggcatccttctctttagcagctctaggaaagacgaggttccaagctctttggatgaacttgaaactctcgatatcaccactcctgatgcttgcttctagctgaatatgtagaatgcagataaagacgcgagcgacaggaaacccggagaaatttgatgtcactaatctcttctttttcacgtttctaatgattgatccaatggtctcatcatcaggataaatgtcttgcaatgctttctcatgttgggatataatcggtgaacagtccttggctttggtgttgtctgaagattcttgatggtttcgtacattcccttcaaaatctgacgtggataacctcttcttttttctacttctaatcatggatcctatggtcgcatcatcagagtctgggtcatgctgagcttcttgatgctgtgatccactcagtgaactatccaccaatggaactttcttactttttgatctgcttttaagtacttgtaatgtgtcttcatcagatgattttctctgacttgtgtcatcatggtcatcacttgccgtgtgtaattttttccttctgggcctggagcttttagccttggagccatggttctgttcgcctagcatggggttcagatcatcaagcgagttgtcttgttgttctatagtccgatctccagttgaaagagattcacctgcaaccttttttctccttgtgacattcctgagacctaactgtgtaagcttacgagaaacttgagcagaagatcggacgcgtgggcggacgcgtgg

SEQ ID NO: 171599 - DNA, 163 bp, Zea mays
  Clone ID: MRT4577_8807C.1
gataaacagttattgcacatgtgcatgttgttacaggccaggctttcaggcaagttgatactccaagaaggcgagaaatttgtccttgtgttatttgatactccatacaaccaggccgcatatggtattgctggataaactagggagtctggttgttaggata

SEQ ID NO: 171600 - DNA, 444 bp, Zea mays
  Clone ID: MRT4577_88080C.1
tcccacgcgtccggtttgcattgcttgatttggttttcttgtgtgtagaaaaggtcagatctattgttttaaattaattcatttgacagtcagtggaaggttctttgctacttgcattcctgtattaatgtgatatcttggtattacagtgctaccacttatttctattgatgatttatgcggcatagttgtcacaacgatgcttaggcatcctgttggttgttgatgtcgggttcatgctatgatccggcatctttctgctctatcttgcctctggttctgttcaatgttgtgatctacaggcatcatccccatctggccactagtgcaatcttctgtacagagcgctgaaggaaagctagggcgctacttaaaaacatgatatgtcaccttgagtatgtttgaggaatgtattaattattctgagcattggtttctgtaggt

SEQ ID NO: 171601 - DNA, 400 bp, Zea mays
  Clone ID: MRT4577_88081C.1
gcgacgcgttgtcgctctcctggtgagcgttgaggccatccacaacctgtgccgagcctgagcctactattgagcggtcatgctactcatacctgacaaggcttgtgtacacggtcatgtcatgcgtgattggctgcctaatgttatactggcgtgtcaaaggccatgttaggagtatggcatgccaaactggtgccgtgccgcatgatccagtaaatgctgcctgagctacgctccagacattgtctgatgcgaacgcggacatctagcatgctcctcgtctgctgatacacacaacaggaccgttctatccagattgcatgagggccatacgcaatgccatccatgtcctgatcatagcctgctgtctaatctcatcgacgggatctggtcatgctgg

SEQ ID NO: 171602 - DNA, 127 bp, Zea mays
  Clone ID: MRT4577_88082C.1
ttgggtattacatctagtgatgttgttggagttgctctaagcccaatagaatcacgtacaatcagtagttaatagttttgtttgtatatctttagctaattttagccgataactattagcttcctaa

SEQ ID NO: 171603 - DNA, 212 bp, Zea mays
  Clone ID: MRT4577_88083C.1
aaaaccaaacatccgccctttctttctatatataatcaactattacaacgggggcttttttatttttttttactccacactcacacagcccaaaaaatcccaactaaccccaaaaattctccattaaatcccaccattgcacaaacaaaatacaattcccttcaccccccacacccaccatacacttattaaagccccccttttccccaaaa

SEQ ID NO: 171604 - DNA, 687 bp, Zea mays
  Clone ID: MRT4577_88084C.1
atttcgcaagcctactcctctgttacttctccttcgtcgggcactcgcctcccattctccgccaccgccaattcggtacccgtgttccgccacatctgctgagagcgagaagagatgggtggccagggtgatgggccagaaagaggcatacgatctacgtcacggcgtatttttgcgtaggtggctggtatcgccaccgaggcgagatcatcgtcatcgaccatttaaagcgcagagcaccctcttgcgtcggctgcaccgactcctggagactcctcggagatgcggccaagagacacgttggcatgaaccctatcaacgacggctgtggtgcctagcgtttcattggcaagaggtttagtgactgctctgtctggagtgatattagggtgtggtccttcaaggacattgctgtgccaggagaaaaggcaatgatagatgttcttcacaagggtgaggaaaatcactttgtggccgtacagatctgctctatggatctcatcaagagtgcgtgtagatcgatgaagattactttgtgaggatgatccagaatgctgttgtaacggtccctgcctacttctgcgagtcgcagaggtatgccacactagatgctgggcgtgattgctgtccttaatgtgctgcgtatcatagatgaacccaccgctgctgatattgcctatggtcgtg

SEQ ID NO: 171605 - DNA, 1359 bp, Zea mays
  Clone ID: MRT4577_88085C.1
atggtgctcgaggcaacgatgatctgcatagacaattcggaatggatgcggaacggcgactacgctccgtcgcggttccaggcgcaggccgatgccgtcaacctcatctgcggcgccaagacccagtcaaacccggagaacacggtaggcgtgatgacaatggccgggaagggtgttcgcgtgcttgtcactcccaccagcgacctcgggaagattctcgcctgtatgcacgggttagaagttggcgctgaggcaaacttggctgcggcaatccaggttgcccagcttgctctaaagcatcgccagaacaagaggcagcagcagaggattatagctttcattggaagtcctgtgaagtacgacaagaaagttttggagaccattgggaagaagctgaaaaagaacaatgttgctcttgacattgttgactttggtgaatccgatgatgaaaaacctgagaaactggaagcattgattgctgctgttaacagcagtgatagcagtcacattgttcatatccctcctggtgaaaatgccctctctgatgtcctcctaagcactcctatatttactggtgaagaaggtggaagcggttttgctgcttccgcagcagctgccgcagctactggagcatctggatttgaatttggtgtggacccaaacgtagatccagaattggcacttgccctgcggttgtctatggaagaagagcgggcaaggcaagaggctattgcaaaaaaggctgctgaagatacttctaatacagaacataacaatgtcccaagctcaaacagtgattctgttatggctgaaggagaacctgcctcaaatgctgctgctggtgacaaagaacaaccaaagcaggcacttgcaatgtcaatggagggtggtgcttcaggatctgcagctgtgactgactctgctatggcagaagctggtgcagttgaccctgacttggcattggctcttcaaatgtctgtccaggatgcaaacatgtccagtgacactgatatgagtaaggtgtttgaagacagaacgtttgtgtcatctatccttaattcgcttcctggtgttgatcccaatgatccatctgttaaagatttgctggcatcgttgcacagccagggagaggtgccccgcacggcggagaacttcttggccctctgcgctagcggctactacgacagcactgtgttccaccgcaacatcaagggcttcatgggcctccatctgggcaccaagttcgccgacgagttcagggagtcccaaggtagcacactatgcagtgcaggagctaacagcagacccaacgccaacggcagccgattcttcatcacctacgccaagcagccgttctga

SEQ ID NO: 171606 - DNA, 895 bp, Zea mays
  Clone ID: MRT4577_88086C.1
acccaaatgtagatccagagttggcactcgccctgcggttgtctatggaagaagaacgagcaaggcaagaggctattgcaaaaaaggctgcagaagatacatctaataccgaaaatatcaatgcctcaagctcaaacagcgattctgttatggctgaagcagaacttgcctcaaatgctgctgctggtgacaagcaagaacagccaaaggatgatgacgatctactacagcaggcacttgcaatgtcaatggagggtggcgcttcaggatctgcagctgtgactgactccgctatggcagaagctgctcttcaaatgtctgtccaggatgcaaacatgtccagtgacactgatatgagtaaggtgtttgaagacagaacgtttgtgtcatctatccttaattcgcttcctggtgttgatcccaatgatccatctgttaaagatttgctggcatcattgcacagccagggagagcaagagaagaaggaagacaagtcagacaaaacagaagacgagaagaactgatgtagccatgttcatgcttccatgctcacaaagaaattgaacattggtctgcattggctgcgcttactctcttggctatgaaatttgcttatcctcatgtaacagtgctttgtttataacttaatgccgagggaatttgtattgtgactgcaacaatcttctcgtcataaatgttcaagtgatttcgtgttaaaaaaaaaaaaaaaaaaaaaaaaaaaaaaaaaaaaaaaaaaaaaaaaaaaaaaaaaaaaaaaaaaaaaaaaaaaaaaaaaaaagaaaaataaaaaaaaaaaaataagaaaaaaaaaaatgaaaataaatgttaataaatataaaaaatgaaaaagggggggggttttttttaaaggaaa

SEQ ID NO: 171607 - DNA, 1536 bp, Zea mays
  Clone ID: MRT4577_88087C.1
agtttctactcttgctccccaaaccagcgcaaaccctgccctgacaccggcagcgacacgtccaccggcggcgccatggtgctcgaggcaacgatgatctgcatagacaattcggaatggatgcggaacggcgactacgctccgtcgcggttccaggcgcaggccgatgccgtcaacctcatctgcggcgccaagacccagtcgaacccggagaacacggtaggcgtgcttgtcactcccaccagcgacctcgggaagattctcgcctgtatgcacgggttagaagttggcgctgaggcaaacttggctgcggcaatccaggttgcccagcttgctctaaagcatcgccagaacaagaggcagcagcagaggattatagctttcattggaagtcctgtgaagtacgacaagaaagttttggagaccattgggaagaagctgaaaaagaacaatgttgctcttgacattgttgactttggtgaatccgatgatgaaaaacctgagaaactggaagcattgattgctgctgttaacagcagtgatagcagtcacattgttcatatccctcctggtgaaaatgccctctctgatgtcctcctaagcactcctatatttactggtgaagaaggtggaagcggttttgctgcttccgcagcagctgccgcagctactggagcatctggatttgaatttggtgtggacccaaacgtagatccagaattggcacttgccctgcggttgtctatggaagaagagcgggcaaggcaagaggctattgcaaaaaaggctgctgaagatacttctaatacagaacataacaatgtcccaagctcaaacagtgattctgttatggctgaaggagaacctgcctcaaatgctgctgctggtgacaaagaacaaccaaaggatgatgacgatctactacagcaggcacttgcaatgtcaatggagggtggtgcttcaggatctgcagctgtgactgactctgctatgacagaagctggtgcagttgaccctgacttggcattggctcttcaaatgtctgtccaggatgcaaacatgtccagtgacactgatatgagtaaggtgtttgaagacagaacgtttgtgtcatctatccttaattcgcttcctggtgttgatcccaatgatccatctgttaaagatttgctggcatcgttgcacagccagggagagcaagagaagaaggaagacacgtcagacaaaacagaagacgagaagaactgatgtagccatgttcacgcttccatgcgtacaaagaaattgaagaccggtctccattgactgcgtttactctcttggtcgtggagtttgtttatcctcatataaccgtgctttgattataacttaccgccgagggaatttgtattatgacactgcaacaatcttctctccatgtatgttcaagggattttcgtgtttcaatgccctccatatatgttcaattgatttccgtgttacaagttctctttggctgtttaatttgaagcgacgcactatatattattttattgc

SEQ ID NO: 171608 - DNA, 1575 bp, Zea mays
  Clone ID: MRT4577_88088C.1
ccggccgggataccatccgtcccttctagtctcctaataactagtttcctatcttgctccccaaaccagcgcaaaccctgccctgacaccggcggcgccatggtgctcgaggcaacgatgatctgcatagacaattcggaatggatgcggaacggcgactacgctccgtcgcggttccaggcgcaggccgatgccgtcaacctcatctgcggcgccaagacccagtcgaacccggagaacacggtaggcgtgatgacaatggccgggaagggtgttcgcgtgcttgtcactcccaccagcgacctcgggaagattctcgcctgtatgcacgggttagaagttggcgctgaggcaaacttggctgcggcaatccaggttgcccagcttgctctaaagcatcgccagaacaagaggcagcagcagaggattatagctttcattggaagtcctgtgaagtacgacaagaaagttttggagaccattgggaagaagctgaaaaagaacaatgttgctcttgacattgttgactttggtgaatccgatgatgaaaaacctgagaaactggaagcattgattgctgctgttaacagcagtgatagcagtcacattgttcatatccctcctggtgaaaatgccctctctgatgtcctcctaagcactcctatatttactggtgaagaaggtggaagcggttttgctgcttctgcagcagctgccgcagctactggagcatctggatttgaatttggtgtggacccaaacgtagatccagaattggcacttgctctgcggttgtctatggaagaagagcgggcaaggcaagaggctattgcaaaaaaggctgctgaagatacttctaatacagaacataacaatgtcccaagctcaaacagtgattctgttatggctgaaggagaacctgcctcaaatgctgctgctggtgacaaagaacaaccaaaggatgatgacgatctactacagcaggcacttgcaatgtcaatggagggtggtgcttcaggatctgcagctgtgactgactctgctatggcagaagctggtgcagttgaccctgacttggcattggctcttcaaatgtctgtccaggatgcaaacatgtccagtgacactgatatgagtaaggtgtttgaagacagaacgtttgtgtcatctatccttaattcgcttcctggtgttgatcccaatgatccatctgttaaagatttgctggcatcgttgcacagccagggagagcaagagaagaaggaagacacgtcagacaaaacagaagacgataagaactgatatagccatgttcacgcttccatgcgtacaaagaaattgaagaccggtctccattgactgcgtttactctcttggtcgtggagtttgtttatcctcatataacggtgctttgattataacttaccgccgagggaatttgtattatgacactgcaacaatcttctctccatatatgttcaagggattttcgtgttacaaaaaaaaaaaaaaaaaaaaaaaaaaaaaaaaaaaaaaaaaaaaaaaaaaaagaaaaaaaaaaaaaaaaaagcggcc

SEQ ID NO: 171609 - DNA, 453 bp, Zea mays
  unsure (1)..(453): unsure at all n locations
  Clone ID: MRT4577_88089C.1
aaaannngggggggggtttattaaaaatttcccttataaaaaaaagggttttggggggttttttttttttggaaaaaatttcggggggggggggaaaaaaatttttggaaaaaaacaatttttttggtttttattattttttaggggtggcccttggtgggaaggacaacgggccaaaaattttttttgttttccgaaatttttcgaaaaaggaagggaaaatttttcccccccggtttgttggggtggaaaaataaagggagggtttttttttgggggatttgggggttcatttgttggtttttttggggcgggnnnggggagcaaaaccggttgttcccgccttggggggggggggcaaaaatgatgtnnnnaatccccttttcaatgcctttgaaccccaaaatgtagaagaggggtttgccttttttgagaagtttaacaaagtttttt

SEQ ID NO: 171610 - DNA, 555 bp, Zea mays
  unsure (1)..(555): unsure at all n locations
  Clone ID: MRT4577_8808C.1
gngctcttctgggcgccaggttctgcctgcagccgcgcggggacagcttcacgcggcggtcgctgttcgactgcctggtggcgggcgccgtccccgtgctgttctggcggcggagcgcgtacctgcagtacgggtggtacctgcccgtggacgggcgcgagggggagtggtccgtgttcatcgaccgcgaccagctccgcgcggggaacctcacggtgcgcggcgtgctggcggatatcccggagtcgcgggtgcggctgatgcggaagcgcgtggtgaagatgatcccggggcttgtgtactccgcggcgggcgtggagggcatcggtggcggcatgaaggacgccgtggacgtcatggtcgatggcatgctgcggcgggtcgctgagcagcgcccgagatggcggacgacgtgattttagcttctgcaacagagcaaattgatcattcatttttttttactggggtttttccacacacacaaaaactacactttactcgagtgttccaacactcgattttttttttctttctcttctcttcctatctctcttt

SEQ ID NO: 171611 - DNA, 791 bp, Zea mays
  Clone ID: MRT4577_88090C.1
gccggccgggtcgggaggtctgcgtcgttcttggcattggggacaacatcaagggcctcttggccacgctgtcgcgcgttgacgccatcatctcctatgattcgtcccctcgctcaacctgcatcctatcataccctatcccgtgccaagtccccgattcacggtggctgtgtggtagtcggtaatgctgcatatgaacttgggcgacattcagtgtgaggtgttctgcaaccaggtgccccgcacggcggagaacttcttggccctctgcgctagcggctactacgacagcactgtgttccaccgcaacatcaagggcttcatggtataaggcggcgaccccatcggttccggcaatgcagggcctccatctgggcaccaagttcgccgacgagttcagggagtcccaaggtagcacactatgcagtgcaggagctaacagcagacccaacgccaacggcagccgattcttcatcacctacgccaagcagccgttctgaaaaaaaattgaacagagtcacccaagaatgtgcatgtatggaatgacagcttcagattaacgacaaccacaattttccaattgtgtggttttgatggagtcatgtatggataaccaggaggccatctaaataaatccgtatgcacttcaatcatgtgctaatattgattgtgcagtacatacatattaatatagtgatccatgatgtctcaacatttttagatggtaaaatcggtgcctgtaagtgtgagagtaaacttagcttataatactattactgtcgtactacggt

SEQ ID NO: 171612 - DNA, 1625 bp, Zea mays
  Clone ID: MRT4577_88091C.1
cattgggtacctcgaggccgggccggggtgatacacatccgtcccttctagtctcctaataactagtttctatcttgctccccaaaccagcgcaaaccctgccctgacaccggcagcgacacgtccaccggcggcgccatggtgctcgaggcaacgatgatctgcatagacaattcggaatggatgcggaacggcgactacgctccgtcgcggttccaggcgcaggccgatgccgtcaacctcatctgcggcgccaagacccagtcaaacccggagaacacggtaggcgtgatgacaatggccgggaagggtgttcgcgtgcttgtcactcccaccagcgacctcgggaagattctcgcctgtatgcacgggttagaagttggcgctgaggcaaacttggctgcggcaatccaggttgcccagcttgctctaaagcatcgccagaacaagaggcagcagcagaggattatagctttcattggaagtcctgtgaagtacgacaagaaagttttggagaccattgggaagaagctgaaaaagaacaatgttgctcttgacattgttgactttggtgaatccgatgatgaaaaacctgagaaactggaagcattgattgctgctgttaacagcagtgatagcagtcacattgttcatatccctcctggtgaaaatgccctctctgatgtcctcctaagcactcctatatttactggtgaagaaggtggaagcggttttgctgcttccgcagcagctgccgcagctactggagcatctggatttgaatttggtgtggacccaaacgtagatccagaattggcacttgccctgcggttgtctatggaagaagagcgggcaaggcaagaggctattgcaaaaaaggctgctgaagatacttctaatacagaacataacaatgtcccaagctcaaacagtgattctgttatggctgaaggagaacctgcctcaaatgctgctgctggtgacaaagaacaaccaaaggatgatgacgatctactacagcaggcacttgcaatgtcaatggagggtggtgcttcaggatctgcagctgtgactgactctgctatggcagaagctggtgcagttgaccctgacttggcattggctcttcaaatgtctgtccaggatgcaaacatgtccagtgacactgatatgagtaaggtgtttgaagacagaacgtttgtgtcatctatccttaattcgcttcctggtgttgatcccaatgatccatctgttaaagatttgctggcatcgttgcacagccagggagagcaagagaagaaggaagacacgtcagacaaaacagaagacgataagaactgatatagccatgttcacgcttccatgcgtacaaagaaattaaagaccggtctccattgactgcgtttactctcttggtcgtggagtttgtttatcctcatataacggtgctttgattataacttaccgccgagggaatttgtattatgacactgcaacaatcttctctccatatatgttcaagggattttcgtgtttcaatgctctccatatatgttcaattgatttccgtgttacaagttctctttgcactgtttaatttgaagcgacacactatatattatttt

SEQ ID NO: 171613 - DNA, 475 bp, Zea mays
  Clone ID: MRT4577_88092C.1
cccacgcattctcagaccgagcctcgaaccagactacgatatacactgaactgtgcaaccgagcggcgaacctgcagacagacataacgagaaccacagcggaccaggacaccgacgacgagccggacgacctaaacgccaacctacaggccaaacacccgaaccaacagacgacgcgcgccaagtcaagccccaaagcgaaccccgccgtgggccgcggcatcacggtggccaccaccctcgccgccgccgccgccgcagcagatgccgcctcagatgcctcctcggccgcgtcgtaaaccggtccgaacacggctgacatcgtgctggacgtgtacatcgacggggacacggacgcggacgcgaacgccgacgccagcgacctggactgcgacctgaacgccgggctgagctcgacgtcgtgcttgacctaggacaagcaccacgacaagctgctctgctgggacgactactt

SEQ ID NO: 171614 - DNA, 1891 bp, Zea mays
  Clone ID: MRT4577_88093C.1
gggtacctcgaggccgggccgggctcgcggtcgggcgtctaggagagagagctcacctgagcctttcccaagttgtttctcttctcttgctccgcaaaccagcgcaagcccttccctgacagcggcggcgacatggtgctcgaggcgacgatgatctgcatagacaactcggagtggatgcggaacggcgactacgccccgtcgcggttccaggcgcaggccgatgccgtcaacctcatatgcggtgccaagacccagtgggtgcagtcgaacccggagaacacagtaggcgtgatgacgatggccgggaagggcgtccgcgtgcttgtcactcccaccagcgacctcgggaagattctcgcctgtatgcacgggttggaagttggtgctgaggcaaacttggctgcggcaatccaggttgctcagcttgcgctaaagcatcgccagaacaagaggcagcagcagaggattatagcattcatcggaagtcctgtgaagtacgacaagaaaattttggagacaatcgggaagaagctgaaaaagaacaatgttgctcttgacattgttgactttggtgaatccgatgatgaaaagcctgagaaactggaagcattgatcgctgctgttaacagcagtgatagcagtcacattgttcatgtccctcctggtgaaaatgctctctctgatgtcctcctaagcactcctatatttactggtgaagaaggtggaagtggttttgctgcttccgcagcagctgccgtagctactggagcatctggatttgaatttggtgtggacccaaatgtagatccagagttggcactcgccctgcggttgtctatggaagaagaacgagcaaggcaagaggctattgcaaaaaaggctgcagaagatacatctaataccgaaaatatcaatgcctcaagctcaaacagcgattctgttatggctgaagcagaacttgcctcaaatgctgctgctggtgacaagcaagaacagccaaaggatgatgacgatctactacagcaggcacttgcaatgtcaatggagggcggtgcttcaggatctgcagctgtgactgactccgctatggcagaagctggtgcagttgaccctgacttagcgttggctcttcaaatgtctgtccaggatgcaaacatgtccagtgacactgatatgagtaaggtgtttgaagacagaacgtttgtgtcatctatccttaattcgcttcctggtgttgatcccaatgatccatctgttaaagatttgctggcatcattgcacagccagggagagcaagagaagaaggaagacaagtcagacaaaacagaagacgagaagaactgatgtagccatgttcatgcttccatgctcacaaagaaattgaacattggtctgcattggctgcgcttactctcttggctatgaaatttgcttatcctcatgtaacagtgctttgtttataacttaatgccgagggaatttgtattgtgactgcaacaatcttctcgtcataaatgttcaagtgatttcgtgtttcaagctctatttgcttgtgtttatttcaagctgtaaccaggccattcgatctcgtgtatgccgtatgcggcggatctgctcggttataagcgttgccctagaattttacagcgacatgggaggtggctggtatctaaatcagggctagtttggaaactcaaatccccttcgggattgaaggagattagagagaaaattagttcatttccaccccaatcccctctagtcccaaagggaatttgaggttccgaaagtagccataatatctgtaatgcgctacacatttgctcacgtacattgatacctagtggcacctgcgtagttttgctaaatatagagaaatgcagtgttt

SEQ ID NO: 171615 - DNA, 461 bp, Zea mays
  Clone ID: MRT4577_88094C.1
aactaaacaaccgggggtttttaactttggtttattcgccaattaattcctttttagtttcttacaaaaaaaggcaaacaccctaggggggtcttgggtttatatggggcggggggctaaatcgaaggggttgccccagttagcatgcatgtttgttttgaactgagtcgaaaaatccaataaagcgtagtccttgaccatgctggtgtagtgggggagtttgtcgtagtagcggccccagataatgaagccgccgtagttgtccgctttttgggcggacggggcgacttcataataaactttttgggggggcacccagccgtgcgttattttcgaccccggggggccgacttaaaacctgggggcggggtggtcaaacaggtccagggcctcctgggtggacgggagcgagtttccggagcctaacccgccaagggagagggtaaccggcacccccacaa

SEQ ID NO: 171616 - DNA, 290 bp, Zea mays
  Clone ID: MRT4577_88095C.1
gtggcacccacgcatactcttctcccgcccagtccgcaccccggtagagccaagcactggtgtccacctcctgctgcctcctacaccagataaccgcccgccttggcgcgtcggcgcgcctggccgccgtcccgacgcatcacgtccagctgctcgtctgcaaggcccgcaccagggaagggggcgagaaccagagctacgactcacgccgggccgcgcaaacgctcctccctggcctcacggccgtggcgctcgccaaggtggggcccgacgtcgaggaatacggagaa

SEQ ID NO: 171617 - DNA, 162 bp, Zea mays
  Clone ID: MRT4577_88096C.1
ctggtctagcactcgcggggccgacacacgcgctccaccctcttagtcattcgtctcgcgtcgatcctatgcttcccgttctcaagaagcgcagctgcccatgcggcactgtccacgcgaagcctccgaccgccacgcgccgagctggctggccgccggcct

SEQ ID NO: 171618 - DNA, 377 bp, Zea mays
  Clone ID: MRT4577_88097C.1
ggattcaataccatttaccaaactctttcatcaattctcatctttcttctcacgaactattaattcatcatgtcgagcacagctggccaagtcatcaaatgcaaagctgcggtttcatgggaggcagggaagccacttgtgattgaagaagtagaggttgcgccaccacaagctggtgaagtgcgtttgaagatcctctacacctctctttgccacactgatgtttacttctgggaagctaagggccaaactccattgtttcctcgtatatttggtcatgaagctggaaggattgtggagagcgtaagtgagggtgtgactcatctgaaaccaggggaccatgccctccctgtgtttaaccgggagtgtggggactg

SEQ ID NO: 171619 - DNA, 115 bp, Zea mays
  Clone ID: MRT4577_88098C.1
tcccacacgtgcgcagacgcgtgggcgtaccgtgggcgagacgcgtgggctggaagcgtgggatcgggtacagtcggctaggtaatctggtggtacgacgacttgcgacgacatg

SEQ ID NO: 171620 - DNA, 380 bp, Zea mays
  Clone ID: MRT4577_88099C.1
cggacgcgtgggctgctactagcgtaccacctttttttaatcgaaagtactgtacaagtcgccatgtcgagtacaaaattcagtgtactccaatccaacagaagcgcggggacccagcaaatttgggtcttggtgcccagcgtggcatggttgaactgtaaaactaaaaaaaggtggtacgctagtagcagtgctgtagaaatgaatggatcgcacgcactatcataaaagttagtataaatagtaggcaaggcattagtggggctgaatagaactgtagcctaagctaagcagtgatgctcgtgccttgccacgcacgagacaacgtaacagattacatcagcgctatagtgatctatcctcaataggaagaaagtttg

SEQ ID NO: 171621 - DNA, 279 bp, Zea mays
  Clone ID: MRT4577_8809C.1
ggaacgaatagcctgaatccataaacaaatggggggctgaacatcgtcacacaaggggggggtccctgcgtggggggggggccatttcaggcaaacaaaattttgtgtaaaccgatacatgttccccgggggggtgcagcaacactcatttacttacaaaagcccagagggcttgttacataaacattttttcattttttctggggcaaggggggggataacctcgaacaaaaaataatcacaactattgcctatttttttccaaaccacatttggcaa

SEQ ID NO: 171622 - DNA, 288 bp, Zea mays
  Clone ID: MRT4577_880C.1
gtcttgcccggtgtgcaccgtcgaaaccagtgtcagcagcacagagaccaacggcgtggtatcctactgcattagatgcttcctagctaggggcgctctgtaccgcttcgagtacgcaggcaaccccaggctattccttgccaaagcgcgaggagggacgagcacgctcgatgcctatgaccctgactacacagaggctcgacaggccagatacctgctgacgaacggattcaggcgctacaacctgatcaagagcaactgcgaggacttcgcgatatactgcacgac

SEQ ID NO: 171623 - DNA, 537 bp, Zea mays
  Clone ID: MRT4577_88100C.1
acaaaaaaccaacagcccacaggcaaaaacaagcgggaaatttttaacccggatttgcaaaccacccggcaaaatccgtaatcaaccttttaacgttataggaagggacccaagggggggtgggggttccccctaaaaaaaaaaaaaaaaagggcaaaggatgctggcagttgggagggaaccccacccgccccaaaaccctaagggtggaaacccggggggtggggggaacccaacccggccagttttctttattcccggggccggaaaaaacttaacccgggaaaaaaagggggatatgaccaagggcccggccccacccttgggttttaacagggggaaaaaggaaggccaaagggctgccccccttaagggggggctgccggacttgaaaaaccgaaaaaactcctttggaaacatcggccctccgttcactgggccaaacctgcccctgaaaaagctgccttccaggccaaccttaattacggttttctgaccaccaaaggctactatgaaacgggggacttctggaaaagg

SEQ ID NO: 171624 - DNA, 359 bp, Zea mays
  Clone ID: MRT4577_88101C.1
cacgaggatcatggtacagtatgaaggcaaggagaggcatttcatgcccgaggagatcctccgccatggtgctcgccaagatgagagagacagcagaggtataccttggtaaaacggtcaagaacgctgtcatcaccgtgcctgtctacttcaacaactcccagcgccaggcaaccattgacgccggtgccatcgccggcctaaatgtcatgcgcattatcaacgagccaaccgccgccgccctggcatatggtctcgagaagatgcctgtcagcaacaaacgaaggacggtgctcgtctttgatcttggtggcggtacctttgatgtctcgctcctcaacattgatccaggagtcgat

SEQ ID NO: 171625 - DNA, 136 bp, Zea mays
  unsure (1)..(136): unsure at all n locations
  Clone ID: MRT4577_88102C.1
tttttaacggaaggcatggtccatttttggatgggaaaggnataaggtaccttgaaaaacaagataagtggcggccctttatttaccaccacttttggagaaaccaccattattttcttaacgggtaaaaaggggg

SEQ ID NO: 171626 - DNA, 405 bp, Zea mays
  Clone ID: MRT4577_88103C.1
aacgacactttgaagaggataaaatacactgctactacatatcaacatgggggcttagggaatcatcacttcttattgtgatgagtcaagcaccgagatgatcaagcggcggtagtagcgcacttgcggttgtatgccatccccctgatcccaaaggggtccatgccgaattccagcaggcggtaaaaccccaccaccctcgtttaggcgtagagcacgatgttgcaactccgtgtgccctactcgaaacgaggcactatatgacggcacgtcccagccggaggccctgattcgacgggtccaccaccacgtgcaacaccacggagtgaaacacgccgtccccggccgaacgcgcgaacgccacggaccgaccttcctcctccccggccgacagccacaccacac

SEQ ID NO: 171627 - DNA, 579 bp, Zea mays
  unsure (1)..(579): unsure at all n locations
  Clone ID: MRT4577_88104C.1
ngaagttactaacggtaagctttgccttttatagatgtcaggnaataatacatacccatcatgacttctttaaacttgggcattgtgttaaactcaaaggtctgcctttttaacttaataaaacaggtctaccttatagaagattttatccccttatccaccccaaaatggccataggaaaatgcatttattgttgaatatgtgctaccaagcataaggtaatttattctggttctttcctatcaactggttttcaattatgcatcctatttgaaatgttgggtcatctcaacacaaaatattagttgattcttttcttagtattgcatctctattagaaaattctgattatatgttgaatgctgaacccattgtgccttgctttcatttaaacattttatttatgctgggagcaaaattaacattttttctctgattacaggttcggtggaacaattattggcaccgggagtttgccgggcatgtcaaaatctctatgggcagattctgacaggagatctctaaaaggttcaatgggctgaaccttcatcaatagtttaatacttcgttcagaacttc

SEQ ID NO: 171628 - DNA, 728 bp, Zea mays
  unsure (1)..(728): unsure at all n locations
  Clone ID: MRT4577_88105C.1
taaaatcgctttgggtttccaacgcaaaaccggcccgcacttctccgcaccgttaccgaattgatccttcccgcaaagctgcaatggagttcgcctcccgcagtcgacccaccaccacagcagccgacgacgaagaaaacgactgtcttcgccgcttccccgaccatccgccgtcgcagccgcagggacacggcgagcccaatacatccggggtagacgctgcactactggcgaggaggcagaaactgctgttggagctgctcaagggatccatccaacagggcttgatcttgcgtgagctcgtggagactgagcacgccatgggctttattgctggcagccacaatcctgtgccagcactcccacaggatttcttgcgttgctggacgccatcgatgtctactttggaagcgcatctccgccagccatgcccttgtggctgtggaaactccatggcggtcagggcacctccagtgaacccacacttggagcggtcatcgcatgcacccgagcaaacaaggccaggcaatgatgctgagcagcatcaagaggacaggtcatctggggtgaggacacatccatttaacggccattntaaactgtgtcattcaccgagcaagcagactccagtgccaggcaaagctggtgtcaatcagatgcggccatcgtccggacaccaacaggccattgtttgggaaaagattggtgtggagggtgttcataacatg

SEQ ID NO: 171629 - DNA, 1724 bp, Zea mays
  Clone ID: MRT4577_88106C.1
cattgggaccctcgaggccggccggggctcgatagtgactgtcatccatgtccattatatactatactccctagctagctcctagcaggcagagcagcgagctagctgtgtaagaagaagaggaggactggaggaggaagaagactatcgatcgatcgatccatccatccatccatccatcgaattaatggcggcgacaacaccgtacaagcccaagaggatcctgatcacgggcgccgcggggttcatcgcgtcccacgtggcgatccgcatcgtgaacaggtaccctgagtacaaggtggtggtgctggacaagcttgactactgctccaacctcaagaacctcctccccgtcatgggctccggcggcaacaacaacttcaagttcgtcaagggcgacatcgccagcgccgacctcgtcagcttcatcctggccaccgagggcatcgacaccgtgatgcacttcgcggcgcagacccacgtggacaactccttcggcaactccttggagttcaccaagaacaacatctacggcacccacgtcctcctcgagtcctgccgcaccgccgcccagatccgccgcttcatccacgtcagcaccgacgaggtgtacggcgagactgacggcgacgccgtggtgggcaaccacgaggcgtcgcagctgctgcccaccaacccgtacgcggccaccaaggccggggccgagatgctggtgatggcgtacggccggagctacggcctccccgtcatcaccacgcgcgggaacaacgtgtacgggcccaaccagttcccggagaagctcatccccaagttcatgctgctggccatgaggggccagcgcctgcccatccacggcgacggctccaacgtccgcagctacctctactgcgacgacgtggccgaggcgttcgaggtcgtcctccaccgcggcgaggtgggccacgtctacaacatcggcaccaagaaggagcgcacggtgatggacgtggccagggacatcagcggcctcttcggcctgcgcccggaggaggccatccagttcgtcgacaacaggcccttcaacgaccagaggtacttcctcgacgacgagaagctcaaggggctcggctggcgcgagaggacgcgctgggaggatggcctcaggaagaccatggagtggtacgtggccaaccccgactactggggggacgtgtccggggcgctgctgccgcatcccaaggcgggaggcgtcagcgtcagcgtcacgacggaccacggcgcccggggatcgtcggagatgctcgacgatcgtttcatttccatcccctcttctccgggagcggcgacggttgcaggagacgacgatgacggcgcaccagctgcaatgccgtacagcaatggcggcgccaccaatggaaccaccaccgtgcattgattgcatgcctgcctgcctgccggccgggccgggcatatcacatcacatccacacctgaacaattataattgttttttcaagctatatattgtattatttgctactactactagatcgagtattattgttatgtagtatgttgtttgagtccgcacgtgccgttgtattccgctgttttgttggatccacacatcacctcccgttggattaaaatgagtatttaaactgtaaggacaaatttattattttaaaatagatatctatgaaatttgttgttgaccaggaaaaaaaaaaaaaaaaaaggccccta

SEQ ID NO: 171630 - DNA, 696 bp, Zea mays
  Clone ID: MRT4577_88107C.1
gcgccccacctgcctgcctgcctgcctccgctcctcgcagtgcctagacatctgctgcttctgctcctggcactagttcctgccttcttttgctccgctcggttggttattgctgctctgctgctgcgtcctcctgcagtctccacctcaacttctccgccttcctccttttcctcctccccctcctcgcgcagctctcgtgcttcgcctgttcgttcggggacggtcgtgcgtggcgccagcggcgtcggagttcgatttccggtgagcgcttttcgcaggaaaggttgggtcttgtcggttgggattactcgaccgtcgctacgggaaaccgtgccccatctctgcagcggattgatttctgtccgtgctgcgaggttggtgtggtggtttgtctgtgcttccactgtcggaccgaagattccgtcatcgtttcgtgcagtaaccggagcggtgtttagtggggagaagatttggctggaaggcttggtgcttgcaaataaacaccacacaagaatcgaatgcgccgcaccagtgccgattgacgagattcgagtctggatttcgagcgtgatatggtttcatcaggcacctttggactctaaataccggttccaaggacaaggttttccattcgaagaactgtcgctgagggaagaagaaggaaaagaagaagaggtcaatggcatcgctgtc

SEQ ID NO: 171631 - DNA, 391 bp, Zea mays
  Clone ID: MRT4577_88108C.1
ctcacgcgtccgatcctctgtcgcatgcgctgtacttcaagctctacttcatgaactgcaggtccaagggcaacaccaccagggacgccggcatagacgccaccgcagcaagagccaacaagaacgcgaacaagggcacggccggccgcacggccaacaagtcgaggaagaagtccgtgacgaggtccctgaaggtccggctgcagctcatcgtgcggcatatgaagcagggtctgaacaaggaccgctacgcgcagggcgcccgcacgtacgtcgccgtctacctggactacctgctcgactacgtgctcgaccaggtcctggaccttgccaacgacaatgacaaggaccacatgatgacccgcaacatgctgctcgacatgctcatgga

SEQ ID NO: 171632 - DNA, 272 bp, Zea mays
  Clone ID: MRT4577_88109C.1
tttttttttttttattatttagggggtttgggggtttctgtttttgggggtttaatctttttttatacaattctttatcctatgatgaatgcttgcttactgcgccgcggaagaactaaagcggtttaaaaccccgatgagcgacacgggggccccaccaactcgcatgttttttttttgtgctgaaaaaaaaaaaagcccaccggcttcacctttttggatcaaaggagggtgggacgggcgcaacattttttgatggtttcacccacatg

SEQ ID NO: 171633 - DNA, 232 bp, Zea mays
  Clone ID: MRT4577_8810C.1
ggaagctggttcgcctgcatgtccggcccggacttgccttttggcccccccccccttccgattcaggggcccaggacttgttacatctacatccctgaccctgcaggaagatctctggccccatgaggaactgtctcggactcgtcaggaacactatccgcctctcgaggacgactcaccaagaccaatcatgagacgcccagagtacaaatatacggaccttacagggaga

SEQ ID NO: 171634 - DNA, 2074 bp, Zea mays
  Clone ID: MRT4577_88110C.1
tttcttcatcgacggagaattctagacgccgcccgaagccacaaaggaggcggcgggacgagggtatggtctcctccatcgcctccctccctgcacggagcattccagacaccgtccgaagccacgaagaggccaacacgaggagggtatgatcttctccattgcctccctccctgtgtggtatgaactatcctcttccatcgcccagataagaagttcttctgcattaagattacttccttgccttcttcgtgcacacacacggccgcatggcgtgccagtgggatgcagtcagcgaacggcgcgcgggcgtgaggcagtcgtgtgctgtgcgcgagaatgggaggggttgcaggaagccgggacgggagccatacgctggggcgcttgagccggattgctccagcttggacgcctcctctggatagctgatggactcgcttccctaactcaagagttgccatgtgtcttcaagccgccctgatgagagaacccacaaggagatccaggccaagaatgacaacgtcgggacggacatggggctaaccttctagagcattgagaccataggcagagaggtccagatcaagaacgacaacatcaagacggtcatggcgccaccttttagagcgttgacaccatagttggagaggtttagtgctaggcgagatggggtgacatgagcagggctacagctgcgttggggctgctttattctttatttctttaatcttctatagtttcgtgacttaatttatttattcccattaaagatagaggataaaaaaacctagaacattaagatatcttttctccaccaaaaactcattttaagttatagaacagtatacatcgtatcgagatttcaatggtccacagggatgttttacagttctggtttgcgtagtgcacagatgtttattaatcagggtatattacctatgcattatgcataaatggatcatctctatgttgtggctgggctgattacgctagggcagaattattgcatagactgcaggaaattctgcatctagatgcttctgttaatttaaaggttccaaaacgaggagaaaacaatccaatattacagtatatatactattggatgctgccttgaaaaaatgttgaaaaaacatacaagtgttacggtaaagaactgtggaactcctaatttcttttgtcgggatttggatgcatcttctgttttggacaaagtattaagtctcttggaagacaaacttctgaactttattgtccttggtgcttgttggaagggatctctggttttggtgagtttatctatgtattggttctcaaagcatgtttgaatttgcatcaaacctctaccacaaatatcgacattttatacttatctgaggtggtaaattcagttttcttctctcattgactgatgtcgatttcgactgtttatattacgttttaatcataataaggtttacaaactgatattgcaatatagttattagttacttagattgtccttacaagcattttcatgtgtcaatagccataattaggaaaaaatatggttcagagatacatctcacaattcatgctgctgaatttaggtgctcatatgctccatcttgatattctgtcactatttatcatcattcttttatttttgttctaccctacagattaaggtttacatattttacagcactatgccttgaaaaccttgatcatgcgccgtcggccacgctggaaccccgacagtcgccgcgacgacccatcaatcacgaagccatggaggcagaggtcgctgcgcctgactgagctactgatgccagcactcatggctcctcatagttcctaattgaccttttctgttctgtcagtaagctagtagttggtagacatacatgcttattttctgtcatgttcgttcgtaatgtttgtattaccatattgtattttttttattttgccggactgaagtttgaactgttgcagccaacagccgtacatgttatggaattctcccatacgcaactgagataaacacacaataaaaagcaaagattagagaggtcattgatgcattcct

SEQ ID NO: 171635 - DNA, 521 bp, Zea mays
  unsure (1)..(521): unsure at all n locations
  Clone ID: MRT4577_88111C.1
caggctttctgcttgttgcttccaaccttacaagcacaaaactcaggtctgattatcgtcataggttactgtctctgtgctcagatgtggggctagttgctgaatctaaaagtgggaggagtggtgctgatttgatgggtccgttacttcctgcagttgctgatatatgttctgattttgatccagtgtccactgttgagccatcattattgaaactattccgaaacctttggttctacgttgtattgtttgggctagctccacccatacagaataatgaggcacctacaaaaccggnttccacttcattaggtacagcagaaagcagcagtgctatagcccttcaagctgtagctggaccatacatgtggaacagccaatggtctgtagcagtgcaacgtattgcgcaaggaacacctcctctggttgttagctctgtaaaatggcttgaagatgagctagagttaaacactctacacaacccaggtagtcgtggtggtaatggtaatgaaaattctgct

SEQ ID NO: 171636 - DNA, 401 bp, Zea mays
  Clone ID: MRT4577_88112C.1
attcggctcgaggcctatcgaggcatttttttacgcaggaagctcaacttgatgaccgagggatcgcatgccgccgatgggctgctctgaaatcagatggcgcagagaatgagactgggtgtagcctagaacgacaagtgacgcagatgccgcggcacatccgaacaggtcaccaagggaatgctcaagcggtacggaagcactacatcagacttagcctctgcatactatgattgtgcaagacctaacataggaattggtatcatgcagaatcaagttttacggtcagacaacaggatgctcgacttctagggatgaaagaacttgtcagatcatagttagatggtcacgaagcatcacacccagctgatcaaactgttctcagggaacaagctgcgatt

SEQ ID NO: 171637 - DNA, 550 bp, Zea mays
  Clone ID: MRT4577_88113C.1
gatggcgtcgccccaatgatctcgacggagaacgggaggctcctaaacgataccgggtgcccaggcacacgagtgcgagtacgcacgagttctggagtccccctgacccccacgtgcgcgtcgctggaacgcaaggtattggattagctctcgccgacgacgaggagagaagagctggtggctgtcgaggggctcgcggggatggggatctcgaggcccctggcgctccttctggagctgctgatcgccgtcgtcggcgcgaccgccgaggagcccgtagtggcggcggactcggtggccgtcgcggtggaggccgaccgctcctcaaggcgttatcaggatcgccggcggcagtgctcaccctaccacatggaccagctgccgggaccgagatcggcctctgaccgtacgtagcggtgcgatctctcgaactgatgacgacgacgatgacatgaactccctagactcagctattgcggagaacgccgactcattacccctatgcttcgcgagattgcttctctcgaatctggaagatctctacctgccc

SEQ ID NO: 171638 - DNA, 495 bp, Zea mays
  Clone ID: MRT4577_88114C.1
ttgggtacctcgaggccggccgggtactcttcctacagagctaatactcacctcggcgacgcccaagaatcaatacagcaaaccaacatgtgcggcaacatcggagagatcagcgtcataccatgacctgactaaaaggaacgacagaagagcagctgatctgacaacgtagtggatccagcggaacacactcccccattcggacgctagcattgtactcgtctacgtcctcgagcgatacctcgaatgccatggtcgcgcagctccacgcgagcctatcctctccactgatactcaagctaatcaggcaaaccaagataacctgccgcggtaggctacttgcgagccaggcctgcactggcaagaccgcgctctgcatggggataaccaagtccgttggagcttagacggccatcggctacagcactgcctcgcagatcttatcattcgacatatccaagacggctgcgatgacgtacgccagaccatcaccca

SEQ ID NO: 171639 - DNA, 424 bp, Zea mays
  Clone ID: MRT4577_88115C.1
aacctcggaattcggctcgagcctgtctcggacacccaacgacacttgattttacgaggaactcgccctctcacgagagcaggtttgcatttgagagcacaacagctccaacatacagcaggagaaacgggaaagcgtctatcactacgacaaccgtgagaaggtgcaaaacgacgaggccaacaccgcccgggaggagcagcttcagcgctaggaccaacgaccgccactagaaagatctacgccatgctgcactactccccaaccgagcactggaccaagcggagacgccacccgttcattcatctcaccccgccgaccccgctgatcctgcggacgcccttcctttacctgcagacaccctaccttccccggcaacggatggagaccacattaacctcttcttatgaggaacaagcatcgc

SEQ ID NO: 171640 - DNA, 324 bp, Zea mays
  Clone ID: MRT4577_88116C.1
aacctacagcagctacacgctggcgctcccacggtcgacacgacggtgacgaccagtgccgcactctacctcggccccgaagtcgaacctgaaaattttggaaacaatggaagaggaagagtatagcgctgaaatatctaatgaacaagatggcgaaacagaatgaaatgctggtgagagtgatgtcttcagaaccagttgatgtagatgcagcatgtttacgaagagtacggatgatatttgactctgaggaagatgcctttcagttttatgtgacatatggttgtcacgcaggttttggtactacaagaacatctaacaata

SEQ ID NO: 171641 - DNA, 602 bp, Zea mays
  Clone ID: MRT4577_88117C.1
tgcgtgctgacgccacacgccggggcgggatcaagagtttggtgccccggagtggggtgtcggcgcctcattcgggtggagccgagccggggacagacagtcgtgagagacgtcaggacaagaatgtttcacttaaggacttgtgctgctaagttgaggccgttgacggcctcccagactgtgaagacattttcacaaaacagaccagcagcagctaggacgttggggcagattcgctgctttacctcccccgttgctgctgagcccttcctcagcgggactagttccaactatgtggaagaaatgtactatgcttggttggaaaaccccaaaagtgtacacaagtcatgggacatttttttccgaaacaccaatgctggagcgcccccaggcactgcctaccagagcccacttcccctgagcccaggctccctgtctgcaatggcccgagcacaacccctggtggaagcccagcccaacgtggacaagctggtggaggatcacctggcggtgcagtctctcatcagagcctaccagatacgagggcaccatgtagcgcagctggaccccctggggattttggacgccgatctggactcgtc

SEQ ID NO: 171642 - DNA, 842 bp, Zea mays
  Clone ID: MRT4577_88119C.1
aaaataacgacactgtcatcaccaaacacgaacacaaacacaaaacgaaaagcattccttccctctcgctctcgctcctccatctccgtttcgtctcgcagtctcaagatcagcgccgctcccaagagttaagaagagagagagagagagagagggataggaaggaaggagatggggatgcaatcagtgtgcggaggagcagggcggtggcggcgagcagtggcgtggtggggggccgtcctggtcctcgcccatttactcaactgcggcagcgcggggctcctggacaccaacccgggcttggcctataacttctacgcgacgacgtgccccagcgccgaggccaccgtccggagcatcacctgggcgcaggtcgccggcaaccaggccctccccggccagctcctcaggctgcacttccacgactgcttcgtcaagggctgcgacgcgtccatcctgctggacaacgcgcagagcgagaagacggcgccgcccaacggctccctcggcggttacccggtgatcgacgctatcaaggcgcagctcgagaaggcctgcccgggcgtcgtctcctgcgccgacatcgtcgcgctcgccgcccgcgacgccgtctcctaccagttcaaggcttcgctctggcaggtggagaccggccgccgggacggccccgtctcgctcgccagcaacaccggcgcgctgccctcgccctctgccggcttcaacggctgctgcagagcttcgccgccaagggggctcgacgtcaacgacctcgtcgcgctcttcggggcgcacacatcggcaaggcagctgctcagcgccacgccaggctgtacaaggcaacg

SEQ ID NO: 171643 - DNA, 1773 bp, Zea mays
  Clone ID: MRT4577_8811C.1
ccggccgggactcccgcccgatacatttctcgtacatcgctctcgctctcgctgtctctcatggtgcccaggcgattggtcgaggccggccgggacgccacagctacagagtcagaaagaaatgcctgtggctgtggacttgtggtggacgcggacggacctggtggtgtcatgtgttgtgtgcagcgactcgacagagagagaggcggcgctgtagaaagaaagggtcttgtgtgctgcgtcctccctctatttaggcgattggttgccccgagcccggccgggctcccgcccgatacatttctcgtacatcgctctcgctctcgctctctctcctgctgtccacgaccgaccaaaggcgccgggcacagactcttcgtcggatccaagagaagctcgcgccctccccgaccatggtctcggcggataccatccgtacggctatcggcgtcatcggcaatggcaccgcccttgtgctcttcctctccccggtgcccaccttcgtgggcatctggaagaagcgtgcggtggagcagtactcgccgatcccgtacgtggcgacgctgctgaactgcatgatgtgggtgctgtacgggctgccgctggtgcacccgcacagcatgctggtggtgaccatcaacggcaccggcatgctcatccagctcacctacgtggcgctcttcatcctctgctccgcgggggcggtgcgccgcagggtcgtgctcctgttcgccgccgaggtcgccttcgtcgtcgccttggccgcgctggtgctcaccctggcgcacacgcacgagcgcaggtccatgctcgtcggcatcgtctccgtcttcttcggcaccggcatgtacgctgcgccgctctcggtcatgaaattggtgatccagacaaagagcgtggaatacatgcccctgttcctgtccctggcctccctcgccaacagcatctgctggaccgcctacgcgctcatccgcttcgacctctacatcaccatccccaacgggctgggcgtgctgttcgcgctgggtcagctgggcctgtacgccatgttctacaagaacaccaagcagatcatggaggcacgcaggcgcaaggccgaccagcagtcaaccatgatggaggtggtcaccgacgcctccgccacgccgcccccgccacccaacaacaacaacggcggcggcggcggcaacggctactgatcgcatgcaacaggaaggacgacgacgatcgaccagcaagcaaaagccacatacatagcgtcgtcgtagcgccccgccgcccaccgaatgcttgttgttccgattccgatctccccaaggggacgatgctccgttgcattctctgcatatcctactaatataacgaaacgaaacaaaacaaaagacagcacaaaagggcttgctgggtttcacatttaccatatataatcgtctgctgctgtcttgttgctggtatcgctgctataaaaaaaaaaaaaaaaaagcggcctgatggacacaggcaacttctccaagaaattccaaggtggaggtggagcatcttcaaacaagaacgacccggcaaaggctccgagcaagctgtcatctgcattctctggaactcaagacaaatgcgcagcctgccagaagaccgtgtatccattggagaagatgacgctggaaggcgagtcgtaccacaagggctgctttcaatgctcgcacgggggctgcatcctgaacacctcctcctacgccgcgctcaacgggatcctctactgcaagatccatttcccgc

SEQ ID NO: 171644 - DNA, 311 bp, Zea mays
  Clone ID: MRT4577_88120C.1
gcggccgccgccttccgtttttttactacgcgattgctatagaatatggggagacacacctgggctagcggactctcaaatctgacccatttccacggttcaagtgcgccattacctaggatctgcgtgcttgaggcttggggttccaagaatctaagaggggggagatggggctcacacatcacaaacctgttcagggaagtgttcaccaaaaatgatataaagatgctcatgggccggctccacgcaactgcgaaaaccactatgtcctacaaggtaaagctgagctaaatcgtgaccaccatgcccac

SEQ ID NO: 171645 - DNA, 285 bp, Zea mays
  Clone ID: MRT4577_88121C.1
acacgtctccactcatcaggaatattcgttctcgccggcgtctacggcctacgggtcaagtaacttttaaacgttcgtccggccaatgaacggtatggaggcatagatgatcgatgtggtgctcaacgaccgcctgttgaagaatgtgcggttcaagtgcaactatgacgacaccatctgctacctcaataatctgtttacatcacatactgtgactcgcccctataatatcctcattcataattgttacaacatctacaattaccacatcaccctcaaagacta

SEQ ID NO: 171646 - DNA, 874 bp, Zea mays
  unsure (1)..(874): unsure at all n locations
  Clone ID: MRT4577_88122C.1
ccccccccttcttctttctctacccggggnttttnccggccgctcgngggcggccgggccactgtcatcaccaaacacgaacacaaacacagacacaaacgaaaaccatcccttccctctcgccctcccttccccttccttctctgtctcctctcgcagtcgcaagatcagcgccgctcccaagagttaagaagagagagagagagagagagagagagagagagagagagagagagagagagagagagagagagagagagagagagggataggaaggaaggagatggggctgcaatcagtgtgcggaggagcagggcggtggcggcgagcagtggcgtggtggggggccgtcctggtcctcgcccatttactcagctgcggcagcgcggggctcctggacaccaacccgggcttggcctataacttctacgcgacgacgtgccccagcgcagaggccaccgtccggagcatcacctgggcgcaggtcgccggcaaccaggccctccccggccagctcctcaggctgcacttccacgactgcttcgtcaagggctgcgacgcgtccatcctgctggacaacgcgcagagcgagaagacggcgccgcccaatggctccctcggcggctacccggtgatcgacgccatcaaggcgcagctcgagaaggcctgcccgggcgtcgtctcctgcgccgacatcgtcgcgctcgccgcccgcgacgccgtctcctaccagttcaaggcctcgctctggcaggtggagaccggcccgccgggacggcccccgtctcgctcgccagcaacaccggcgcgctgccctcgccctccgncggnttcacggnctgctgcagacttcgccgcaaggggggctcgacgt

SEQ ID NO: 171647 - DNA, 826 bp, Zea mays
  unsure (1)..(826): unsure at all n locations
  Clone ID: MRT4577_88123C.1
gcttcgagggccggcccgggcccgtcatcaccaaacaccaacacaaacacagacacaaaccaaaagcattccttccctctcgccctccctcctccatctctgtctcaagatcagtgccgctcccaagagttaagaagagagagagagagagagagagagagagaggaaggagatggggatgcaatcagtgtgcggaggagcagggcggtggcggcgagcagtggcgtggtggggggccgtcctggtcctcgcccatttactcagctgcggcagcgcggggctcctggacaccaacccgggcttggcctataacttctacgcgacgacgtgccccagcgccgaggccaccgtccggagcatcacctgggcgcaggtcgccgccaaccaggccctccccggccagctcctcaggctgcacttccacgactgcttcgtcaagggctgcgacgcgtccatcctgctggacaacgcgcagagcgagaagacggcgccgcccaacggctccctcggcggctacccggtgatcgacgccatcaaggcgcagctcgagaaggcctgcccgggcgtcgtctcctgcgccgacatcgtcgcgctcgccgcccgcgacgccgtctcctaccagttcaaggcctcgctctggcaggtggagaccggcccgccgnngacggcccccgtctcgctcgccagcaacaccggcgcgctgccctcgccctccgccggcttcaacggccttgctgcagagcttcgcccgcaagggggctcgacgtcaacgacctcgtcgcgctcttcggngcgcacaccatcggcaaggccagctgctccagcg

SEQ ID NO: 171648 - DNA, 145 bp, Zea mays
  Clone ID: MRT4577_88124C.1
cccacgcattcgtcctttctttgggaaccactatgcatctcggggggcaataaaaaacggtactggcggataaataggacacacatattaagacgctctagttccctgcccaagagatgcattgcggagggactttgccatatat

SEQ ID NO: 171649 - DNA, 390 bp, Zea mays
  Clone ID: MRT4577_88125C.1
gagcacctgggcgcggtggacgacgcgttcacccggccggacagcgtcgagtgcatccgcaaggtgaacgccatggcagacaggtactgggacctgtacgccggtgacgggcccgagcgtgacctgccggggcacctgctcacctatcccgtcgccgtcgccactgacggctcggtcaatcagctgccggggatggagttcttcccggacacgcaggcgcgggtgcttggcgccaagtccgactacctgccgcccattctcaccacgtaggcgtgtgctctgagcctctcactggatcggaatgcccttcttcttctgtttgtcttttggatttactgttttcccccttctggacctgatctgggcgattatggtttggagtaagagcag

SEQ ID NO: 171650 - DNA, 828 bp, Zea mays
  Clone ID: MRT4577_88126C.1
ccggccgggtgatgtcatgaatgttgggcctgaagtccaggtattggtttaatctttagattttgtaacgctggtgttatgactgtggtaccctgttctgacttggctgcaaatactctctttgggtttatctttgctcaaaagtcaggtatcttgaaaatctgcatttttacaagttggaatgtaataaacctctctttacaggagcgctttttcactgaaagtggaacgtattgcaagttcttttagtacactatttactatcactttgttgatttgctaggtgataacaaagttctgctctgaaagaattgccaagtatgcttttgagtatgcattccttaacaatcgaaagaaagtgacagcagtgcataaagccaacatcatgaagcttgctgatggtttgttcttggagtcttgccgtgaggttgcaaagaagtaccctggaattcaatataatgaaatcattgtggacaactgttgcatgcagcttgttgcaaagcctgaacaatttgatgttatggtatgtgtattcacttttatcaattaattgacactgtatctcacctaggtgatgtttgatgtggttttcttattctacaatggcaaattacaacaccgtttgtatttatgatcttggacatgtcacatgctatatacctacaatcttatactggtcttttgtggactatttaaaaacgaaatgtactatgctctgcaaatgtgatataaaagtatgttagttcctagtgttgccaagctcatattttcctttgttttctctcgcattttccagaataatctgacgattccagatgatttactttg

SEQ ID NO: 171651 - DNA, 280 bp, Zea mays
  Clone ID: MRT4577_88127C.1
gttatcacagtaacagtacaaacgagtgtggacatattatgaatattcttgcacttccactcggataaaacgtacaagaagcttattaccagaaactgacggaggtgacacagtatggcagactgcgctgatatgttaaagcatgtgcaaaaaagacggcaagacgtgaactcagtcttgatgggagcaggcaaccttgatctaagacctcactggaggttcatagaaatattacggagggccagctgatacactgcgctaaggctggcgagcaccatgg

SEQ ID NO: 171652 - DNA, 163 bp, Zea mays
  Clone ID: MRT4577_88128C.1
ccggccggcgaggtggagttggcgtggattccgctgatgggtgcgaaccctccgttcacatgtccactcgttactgctcggatgacctgaccctgtttttcttgctggtacgcacgctcaggccatcagggcattgcacctgccccttcatagccatgcagca

SEQ ID NO: 171653 - DNA, 702 bp, Zea mays
  Clone ID: MRT4577_88129C.1
aattcggcacgaggctcgagttaaaatgccggcgctcgtcaaccaccagtccaccacctctcttgctcctttcggcacgtggtcggctcctccgtttcccaccacaacaccccatgtccgtcgcctcccttcccccacacggcgccaggccctgagcagccagcagcggacccaccaccctctccgcctccgatccgccgctcgccggggaggcctctggtctcgggtccgtctccagaccatggccaccactgccaccatctccctcctacagcacgtccgacctccggcttcgggcggtagtcttctcccccttcccctccagcgcctccgccctattcactgccgacgctcggcgccagcctcccatcactccctccatcgcagtctccacctccgtctccccacccgcggcgcacccgcggaccggccccgcgccacggctgacccgtcgtccgcgctcgacgcggcggccggggagggggccgccggtgccaccaccgcgctgctcgacgtgagcggcatgatgtgcggcggctgcgcggcgcgggtgcggtccatcctggcggcggacccgcgggtggagatggcggcggtcaacctcctcgctgagtccgccgcggtgcgcttgcgggcgccggcgccgccgggcgcgggggaggagctcgcggcccggctcacggagggcgggttccccgcccc

SEQ ID NO: 171654 - DNA, 539 bp, Zea mays
  unsure (1)..(539): unsure at all n locations
  Clone ID: MRT4577_8812C.1
gttgtcctttaatgacattccaagcaaccttgaagaaacgacccgtaaacccatcagggcccggggtcttatcataggttagggatttaattgtggcccagacttcctcttccaaaataggctgatcaagatcatctaaaattctaaatcaaccgaaggagtgtcgaaggactgcagatcaagggtgaattccctctggacagcagacccaaatagattattatagaattcccaaactgcatcctcctgctcaagaatcacctggtccacctttgtcttaagtcaaatattactatatttcaaaaaatccttataatttcacaacatataaattatatattatgaatgtatttatcatagtgaatctaaaaatatgaaattgtgtcatataatctatataaaattttgaaatctatggtcaaagatacaaatgtttgacttatgataaagctaatacgacntgtnaaaacaaacggaggttttacatacagaaggaacatatgtttatttttgggccattctccttatttcctgtcctg

SEQ ID NO: 171655 - DNA, 237 bp, Zea mays
  Clone ID: MRT4577_88130C.1
cgaatgtggtcagttatcagatgcggatctttttgaagccacttaccctgctgctgcgaggaggctccatgaagactggatggatgaccctgctatccctatagtcactggttcacttgggaagggatgtaaatcatgtgctgccaccactataggccagagcgtgcgtgacttgacagctacaaccattggccaaagcctcgtgattaagagacatacacacatggaaggatgtac

SEQ ID NO: 171656 - DNA, 629 bp, Zea mays
  Clone ID: MRT4577_88131C.1
tttccaaagggagccctcgagccgtcgaggcgacggcgacgacacccacagccacaggccacacgacaccaccgctcggtctcggcgtccgcctccacgcacgcttcctcccgcaggccatccatccgatccggagcaagatgaaggcggacggcacgtcccagcagaagcgggagcaggcgacgcagcaggggatccacgagtcctactaccgcgacatgaccgtcatgttcggcaagtgggagttcgaccccatggcgctgccggagccgccgtgccccgtgcacctctggcagggcgacgaggacggcctcgtccctgtcgtgctgcagaggtacctcgccggcaagatcggatggatcaactaccatgaactccctggcaccggccacttcctgtcgtcggtgcctgggctcggagacaacgaccttaggacccttttcagtgacaagcagtaaacaaacaatcctccctcacgacgtatcgaagctttcgagcatggtggcggtggtggcgcattagttcattttattattgcaagggcccgtggttgtcgctgattacagatgataaaataatggtgatgtagatgcaagaccaagtgaaatactatatcagagatgcaatac

SEQ ID NO: 171657 - DNA, 1471 bp, Zea mays
  Clone ID: MRT4577_88132C.1
ctagccctcgagccgtcggcgcgaggcgacgacacccacagccacaggccacacgacaccaccgctcggtctcgcggcgtccgcctccacgcacgcttcctcccgcaggccatccatccgatccgatccgagcgtccaccatgtgggtgacgtcgatgccgcaggtgtgggacgaggagggcgcggccaagggcggcgcggtgaccccggcgccggccgcggccatgctgggctcgctggcggggtggctgtcccggaccgtgcagccgcagccgccggcgccccgggtgtgcggcaccgcggggggcccgcccgtgacggcgcccaggctcaggctccgcgacggccgccacctcgcctactgcgagagcggtgtgccccgggaccaggccaggttcgccggcgtcttctcccacggattcaccggctcccgcgaggacagcgtccgcgcctcccaggaagttgcggaggagctgggcgtgtacatggtgggtttcgaccgcgccgggtacgggcagcgcgaccccaaccccaaccggtccgtcaagagcgcggcgctggacgtggaggagcgcgcggacgcgctggggctcggccccaagttctacctccgtggcatctccctcggctgccatgccgtctggggcgccctcaaatacatccccgacaggatcgccggcgcggcgatgatggcgccggtggtgaactactggtggccagggttctcgccggagctggcggcggaggtgtacgcgaagcatgaggtgggcgaccagtgggcgctgcgcgtgtcgcaccacgcgccgggcatcctccactggtggatggagcagagctggctgcccacctccacggtggtggccggcaccacgccgctgcccaacgagcgcgacgccgagatccggagcaagatgaaggcggacggcacgttccagcagaagcgggagcaggcgacgcagcaggggatccacgagtcctactaccgcgacatgaccgtcatgttcggcaagtgggagttcgaccccatggcgctgccggagccgccgtgccccgtgcacctctggcagggcgacgaggacggcctcgtccctgtcgtgctgcagaggtacctcgccggcaagatcggatggatcaactaccatgaactccctggcaccggccacttcctgtcgtcggtgcctgggctcggagacaacgtccttaggacccttttcagtgacaagcagtaaacaaacaatcctccctcacgacgtatcgacggccaagctttcgagcatggtggtggtggtggcgcattagttcattttattattgtaaaggcccgtggttgtcgctgattagagatgataaaataatggtgatgtagatgcaagaccaagtgaaatactatatcagagatgtaatatacatacatagtgatgacctttctgttttcattataaaacaaattgtctaagcaaaaaggtcccta

SEQ ID NO: 171658 - DNA, 1002 bp, Zea mays
  Clone ID: MRT4577_88133C.1
ccacgcgtccccggcggggatccactcatcatcgtccccctgcccggtcgctccactccccttcccccgcgcgcacaaacaacagcagcccgatgtccgccgccgcgtcctctgccaccgcctgcttcctctccccgctcccgccgcctcgccgcccgcgtcatttcctcaggcacctcgcgcgcgccgcggtcaccaagcccgagcccgcctccgcctcctcgctcgccctcccctcgccgtggctttgggcccggcggctctgcgagctggtccccgccgaagccgggggccggcttctgtcgtcggccgcgggctccctcatcgtcgcgctcgcctcagcgtcgcttgtcctaggtgacaccggcgccgcctccgcgttcgtcgtctccacgccgcggaagctgcaggcggacgagctcgccaccgtgcgcctcttccaggagaacacgccatccgtcgtctacatcaccaacctcgccgtcaggcaggacgcgttcacgctcgacgtgctcgaggtgcctcagggatccgggtccgggtttgtctgggataagagcggccatatcgtcaccaatttccatgtcatccgtggcgcgtcagacctgagggtgacacttgctgatcagtcagtgtatgaagcgcaagttgttggatttgaccaggacaaggatgttgctgttttgggtatcaaagcaccaaagaataaactaagacctatacctgttggtgtgtcagcagacctactggttggtcagaaagtgtatgccattggaaacccatttggccttgaccacactcttacaacaggtgttatcagtggattgcgtcgagaaatcagttcagccgccacaggacgtcctatacaagatgtgatacagaccgacgctgctatcaaccctgtgaacagaggtgggccactccttgatagttcgggaaacttgctaggtggaaacacagctatctgctggccctcgggagcatcatctggtgttgggtttt

SEQ ID NO: 171659 - DNA, 465 bp, Zea mays
  Clone ID: MRT4577_88134C.1
cagacgcgtgggtctatatggagggtgagctaaagctagatgatcagtgggttaacaacgtctatgaggatcttgacaacgttcaggatgggcttgtcttgtactcagagtattaatggatgctgaagaggggatcttcctgcaggaacccctgtagacgttcctcaccctgtattttaagtagcctcgcccggtagctcgaggctagatactttatgaaccaatatacaagatcccgcgcacgcgttatctgactgaagtactgcaccctcagcctgacctacacagaatgaaagacatcgcgagagcaggagtgctggatctggtggtaattgagttcgagggagagaacatatacccgttgcttgctggactaactacatccccttgcaagcactctggcattgcactttgctctgcgaggaaaactaactacttcgataaaatccttgagttagacatata

SEQ ID NO: 171660 - DNA, 709 bp, Zea mays
  unsure (1)..(709): unsure at all n locations
  Clone ID: MRT4577_88135C.1
ggtaccctcgggcctgccgggaacacccagtagtgttgtgagctctgattttantcttttcgatctcagcatcaatggaaaggcatccatggatgaccaacagtcaacagttagaacaaggaaacgctggagaaccatcagatctcagaaatgttctcttgaaatctcttgcataccgtcaccctttgttcaatgaaaacacaaacatggctttagtgcatggcaaaggccaggtgccaggttttgttaatggtcatgggggttttgattttatcccagaaggtactatggtattcaagggtaacctgtatggcagcacagcaaatcaaattttaaaccaaagatgcaattctatttctgagatgtcagggcacagaccaactatttcatacaaaatgccccaatctacccaatgtgttaggaaaacagagtctccaaagagagagacatgcgaaacttctgctgctctgtcgtctggctctgatattcaggtttctggtggcttgaaaacagtcatttgtcaagagaataatatgagtagctcagatcttattagcccagaaaaaaccaatgaagtgcatgcccctacttgtgcaattgttaaagctgtcaagaatatggatagccgcaggctcccagacatatctgatgagagatcacctccgcttcgtatggatgctgctgcagaaagtgatttgtttgacatgtt

SEQ ID NO: 171661 - DNA, 477 bp, Zea mays
  Clone ID: MRT4577_88136C.1
cggccgctcgaggcggctggcggggattcacagccaccgctccgacgccggcgaagctaaatatccgagtatcctcagtagcacccatcaagtggtgttctttgccaataagcaagattcttcaaggtgatggttgagttgcaacactgctgatctccatgtctgtggctccacacttcaatcttggacttgttcccagggacatgaatggtagcattccagttagttctgcaaattcctctgggccaagtattggtgttagctctttggttaccgatggcaactcatcactctctggaggtgcccagtttcagcatagtacgagcatgaatgctgattcattcatgcgccttccttcctcaccgatgtcattttcatccaataacatatctggttcgtcagtcattgatgggtctaccatgcagcaaagtccaccctcagagcagatgcagaagcggagatcatctagtgcaacat

SEQ ID NO: 171662 - DNA, 231 bp, Zea mays
  Clone ID: MRT4577_88137C.1
cggtcctgattcccgggtctgcccagtctaactcaccaaccaagcatacctcactcactacaaacaatatacaacacgcgaaagttctctctcgagatgcgatatttaaccaacacctggcagagattacaacatcatctactacaaaagcttctacgtggattgcttccattaacttgcacgccttgcaagcacttaaagaccaattttgcctcatccactataactact

SEQ ID NO: 171663 - DNA, 246 bp, Zea mays
  Clone ID: MRT4577_88138C.1
gcgagacagatttacctctggttcccgcgcccagagaaaagtggttcggtgtttactatgaacgagctggacggcccgaaccccaaatccacgttgctgttgcgaaaaccaaggatatctagtgatggtaagctaatctattattactgtcgattgaattattacatgaatggaatggataactgtagcgagtttatctacatcatgagttaaaaaaactacctctttctggacagagacacgatt

SEQ ID NO: 171664 - DNA, 374 bp, Zea mays
  Clone ID: MRT4577_88139C.1
acgcccacgcgtacgcccacgcgtcttactagttctagatcgcgagcgggcgaggttatttttttttttttatataatcaaaatacattaaagataattaaattaataaagaattaaaaatttatgtacgttgaattaatgacaaattatattactacattataaaatatggatggccaatcttggctcttttacaactagattaatgtggtaaaaaaactgtcgaaggggtctcttattttttaaactgtaaagctttggaaaacgaattactacaaattacattgtacataaaaaacataataacaggttcttggtatataaatctggtgaatattaaaacatagcgtataaccatactaaataacatgaca

SEQ ID NO: 171665 - DNA, 574 bp, Zea mays
  Clone ID: MRT4577_8813C.1
ttgctaagtagtgaaaggcactgaaggggaaaacttgctcgcctgacttcgtagaagaagaaaaagcggacctccagccgacgactgcgcgatctgatgtcgttactactcttactccggaccggggttctgatgaggctacgtcgacgcaaccgcttaggctgtggtattaataatgggaaccgcccaagaacaggcgatgaattctctcatggcgtccgtgattatcaaattcagtactgatccctcaccctttattctacggctgacctgggctcacatcctaatcctgaacgcctgatgtgctgagatccagacccgctcgcatcgctcttatcctggacacaaaggtgtcggatgccaagaccagctcctacaacaagccccatgactcgatctggtcgcacttcctgtagaacctctccaactactacacttgaaagctccatgtgatgataaggaaattccggccactatgtgatctaatgtgcctgcctattggctattaaggtcaaatgcataagaggagtcctactccgctctcaattgagaaagaacaactgcgtgtctcgag

SEQ ID NO: 171666 - DNA, 549 bp, Zea mays
  unsure (1)..(549): unsure at all n locations
  Clone ID: MRT4577_88140C.1
gataacaatcagtattaatcagaggaaaattaaggtcgccaataggtgaatcactggattcaatcaaccaccacccaccaaatccaattgccaggttgactaaggtaagttttacttttacatcgtatataccggggccaaacgaagaaaaagaaaagagtatattcccaaaatgaaaagaaaaaatatgtacggtggaactggttggatcagcacagcactagtctaattaattcctgagtctcgatgctgttcgtttggtaagaggtagtgcaagcacagatgacaccagacatccacggcacgacaacaggtgcattgggacgagcatcttgtaaggctctgaatacttanacttgtctttgaagttcagtttggggtggtcagcctgtttcaaccagcactcctgatgtttatgctcatatttgtcttgtcagaagcatccaaattccgatgggcaataaacccatatattgcacttcaattcccctggcttggcgttcgtagcttgatcaagacaagcttgacaacaatcagcaacatattctt

SEQ ID NO: 171667 - DNA, 242 bp, Zea mays
  Clone ID: MRT4577_88141C.1
aattcggcacgaggccgtcatggcgctcactacacggggtgccgccgcctccgatcccagcctcggctttctcaccaagcgcgacaccgaggtcaagctaccccgcgccacgcgggtcaagaacaagacccctgcgccgatacagattacggccgatcagatcctccgggaggctagggagggggaggagcctgagatgcgcccacccactgggaacatgacagagcccgcgagatgtgtcc

SEQ ID NO: 171668 - DNA, 288 bp, Zea mays
  Clone ID: MRT4577_88142C.1
agggaaagctggatataattctgaggtgcgagacagataggattcgcatagaggtggagaagagaggggcctggcgcatactgggagaaggatacacgatacttcagcttatacggcatgtatgccaagataatgccggaggtccttagtgtctctgcaatgtgaagaggcgatgggatttgtaaataggtgtaagttatccattatgtggactcgaaaggcgtcggccaagctgttgtgtgcaatcttcgcagggctacagcatcatctgaagttgtctttatccca

SEQ ID NO: 171669 - DNA, 634 bp, Zea mays
  Clone ID: MRT4577_88144C.1
ccctgctacttcgcctccctcttggtacctccaatccatggatctgcttgtccgactccttggagctccactctagactgggatgccgactgcggagctggcaagacctacccttagaatggtgggaccgcgccggagaacgcattacttaccctcaagaaccggccatgcgacgtaggagcggtttcttcctcataaacagccgagcatgcacatgcgagaaggcattttgctgacatacacatattcatgggcatgcagcttgccgatattgtgccttagacacattcatgggatattacacatgagatccggactgttcaccacacgactgatatatcacacgttggatccgtgctgccttcctacttgatagtggtatcataaggaggatctgagacccccaacacttgaaactgttgcagtccagatgatggtaggctccgaaagggtgaaagattttggggcgacatgacagtatgctatgaagaggagcagatctggcgcagtggaagtcggccctagggctgagctgacttggatctgatgtgtgccaaatgataaatgctgtaagtggctcagaactacatctggcttgagctggctattgcattggtacacacacatgcatggg

SEQ ID NO: 171670 - DNA, 489 bp, Zea mays
  unsure (1)..(489): unsure at all n locations
  Clone ID: MRT4577_88145C.1
ggtttttttttttttttttttttttttttttttttttttttttttttttttttttttttttttngggaacccaacagggcccttgggaaaagaaaaccccttgcctgttgttaacccttgtacccccaaaggttaatcaggggccggggaaataaaaagcttgggaatcctttgggtggtcataggaggcaggacagggttttttaaagtaaatgggacctaatgggtcaaaggacccttttttttcccaaacaaatgcttaggatttttaccctttgaaaactcgaaaagtttaatcccttggtccccaagtttggttggtatttttttaaaactgggaaagggatcacaattttggtcccttgaatgggaaaataaaccccccaaaaaaacaacactctttgaattgggtgcccttcctttggggacgacaactttttttaaaggaaaaaaaaatggtgacccatgggcctttttgggatctgggtt

SEQ ID NO: 171671 - DNA, 224 bp, Zea mays
  Clone ID: MRT4577_88146C.1
cgtgtctaggctcgctcgcagacagatacaagctcctcggtaagaacaaaggactccagtaaacacaaccattctggctcacgatcaaaaagacatgcagtgctcctacgcgaacactttcactgcaacgcttaccttaacgaagacgacgagcctaaaccacaccctccaaactataaacacacacaacaatcggaatcgaacttccctatttacaacatctg

SEQ ID NO: 171672 - DNA, 216 bp, Zea mays
  Clone ID: MRT4577_88147C.1
aaaccacaaagggcaaggcaatttttttaaggaaggacccccagcagcatcttaacagggttggctcagttctaacaagcctcaactgggggaacaaaaaaaaatataagcggggactacgagcaccaacatgccccctgacaaaacacaaacttaacgcttaggactgcctgttcttttttttgacaccggacttggggacctggaggctgggga

SEQ ID NO: 171673 - DNA, 293 bp, Zea mays
  Clone ID: MRT4577_88148C.1
taatgagatccacatctgcggacaccgcgtgtggctcctacacgtgctggaggccttcgtcgtcatggcgtcaccttgacggagggtcctctacttgctcatgctccacacgggcctctttagcggcagcggtggctaccggaaccactactacggcgtctactgactcggcctgctagcccaaggtgttcaccaagggctgaggattcttatcgatgcagctcggacatgggttattatattatgcgctgctttagcgtgatgacttaataaggagtacccatatatattta

SEQ ID NO: 171674 - DNA, 281 bp, Zea mays
  Clone ID: MRT4577_88149C.1
attcccaaaaaatatgccgaatggcattaattgaaaattcccttgatttcccgaagaaacttcaaatcaagctggaaaatcaaggcccctaagaatttaagatcacgaacccccccccctccaccaaaaaagggttaccatttacatacaacgggaacaggcttttttcctcaacacaaatatccggcctccacttgcacatgggaagatcaactgggggcggttccagcgactggagttcgccatagccctcctccacttggaaagcccttgccgggccc

SEQ ID NO: 171675 - DNA, 300 bp, Zea mays
  Clone ID: MRT4577_8814C.1
aatcgctgggggtttaatttctactctacaagcctgaatgagctagagatccatctgctgctgtacgtgctcgtcaggtacgctcgtaaaaaagaaaagaaaaaaaagagatcgagatcgatctgttgacgacgcccccgtcgccgatgggcgacctctctgtccgccatagccgccgctggtgcggccgtttcgcggccgtcctttgcctgtgcgcggccttctgcaagccagatgaactcccgatggatccacacgcaccattattccaccctccgccgacgcacagtacaacgcaca

SEQ ID NO: 171676 - DNA, 493 bp, Zea mays
  Clone ID: MRT4577_88150C.1
ggaaagcaatccgaaacatgtttttattggttaaaacaaggccatgctacattggactacatcatcaatccatgccgggaaaagaacataatataactccagccaacccatcctttttccctttttatcggggggatataaaaatacaagacagggttcttcttggttttttttctgggatgaagggaagggtgagaccgatcagagccagggcgggttgtataaaggagggaccacgggcttggtctgcaagtacttttccagggggtccatgcccatgtccttgccaaatccgctcattttgtaccccccgaatggggcgtcggggtcgaatgcgaagtaacagttgatccaaatggcacctgcacggatggaccgcaataccgtgttggcaatgtcaatgtttttggtcacaattccagctgctaggccgcaccgggtgttgttcgctttttgaatcacctcctaaaccgttttgaattccatgagcccc

SEQ ID NO: 171677 - DNA, 141 bp, Zea mays
  Clone ID: MRT4577_88151C.1
attttatttcgacccacgcgtggcatattatttcattcatttcctaacatacatcttatctgttaatacctaccaacatataaccatcccgtggatcaacatccacccttcgttcctaaataacctaaccatatttataac

SEQ ID NO: 171678 - DNA, 349 bp, Zea mays
  Clone ID: MRT4577_88152C.1
gggtgggggtttttttttttttgttgttttttttttttaaacaaaaattcttggggggccttaaggcaatgctgccttattaaaaacctttttggggaaaaactcacaccttgggggaaaactttaaaaaggaaaagaggcccgcccgctccttaaattatttatagggtcataggtgagcccacaggccacaggccttttgggcctttttcaaataagagaactttaatcggggggaaaagaaagggggaataaggttaagggtgttggcttttaaaactttttaggggtgtttcctttttgggatcccctcccccttaaaggtcctttttttggctcccgggggata

SEQ ID NO: 171679 - DNA, 2281 bp, Zea mays
  Clone ID: MRT4577_88153C.1
attttatttttatggcgccgcctgccgcttgggctcctgcatctccaccacgtcgtcttcgctcgcttcgcctcctcctccaccaccactacgtccccctcgcttctctttacttccctaccacctgttcgccgaaacgctgcagccgcgaaaaaaaaacgagagagtaggggtactggaggtaaggaaaagaagaagaaaaaagggactactcgctcgctgttcccgtatctgctctgccgaggcctgtgtcgttaacctgtgcggcgcttctcgcccggcggcggcagcgacggagagagcgtgctcttgctccgctgctgtgccgtgccgctcacctgctccaggaaccacaccgtttctcctcgctgtagctaggcgtgattcctcaacaggggccttcgctacgctgcacatagaaaaagaataagctggctcgaagataatggcatctcttactccaggaatactattaaaggttctgaaaaatattaactcagatgtgaaagtatgtggagaataccggtccatacttctccaagttattagcatagtccctgcaatcactggttcggaactttggccagaccatggtttcttcatcaaagtttcagattcttcacactcaacatatgtttccttgtccaaggaggacaacgaactcatctagtcaaacaaactacaactcggacagtttatatatgttgagaaggtgcagtcaagtgttcctgtcccagttcttgtaggggtccgcccagttccaggaaggaacccttgcattggaaacccaaaggatttgatgcaaatgtcaactccctctgggattacggaagcaccggatcatcaacggaggacttccaagtcagctgatatgtctgaaagtgaaaaggaaaatttgcagaggaaggtagttatcaaagagcagaaggcagttgttgcttcccgttacatgcttggggtatcaagcaataacggaaaaattaccagtctcaactccagcattgatagtgacaaaagtaatggaggaagcaccatatctgaaccaaataaaaaatctgttgccccgaaagtcagacaagaggcaaaacctcaggaacggccaaatgatacatctactggtaatgctaagttagtttccacaaagcaagaaattagcaagggcacacgcaagaatggtggcgcttcacctagtccgaatggttgtgctgtagtcaagaagcaaatgccaaaggagagcaaaaaggaatctgctacagaaagaagatcaccaccaaagcttgataagagttcaccaacaccagcgaggacttcaccaacaaagctcggtccagcagtaaagcagaatggaaactctagtccaggtccagtcccttctatatctaccgttaaaagaagggttactgaaactatctcttgggactccctcccaacaagcctaatcaaatcaggaaaggctgttgtacggaggaagaacattgctctcactgtagcagctgaggctcaaagggaggctgctgcagctgcatatctggtaaaaggccttgggattttttctgagataaggggatcttatgaagcggatccacaagctgcaatgaccaagtttttccagctgcaccggctcatcgtcgagcaaagcgctgtgtggaacgcctactcgcctgagcctagcaaagaacctcggccggagaaggagaagccgtcgtcgaggaaggctactaccgcgtcccacaaccaccagaacaacagagccggtacacgcaacgcaggcgctaaggatccccacgaagacggttccaggggcagcgagaaggccgagtgggcccgggaggacgggttcaaggagatgtgcaggtcatgggtcgcgctgagaagggagtcgcggtcgtggttcctgagcttcctggaggacgcactcgagtcagcaggattcgtgatggagggtggaagcaggaagaacgcgagggaacgcgtgcggggccggggacaggccaacggtggggacggcggcgggaggatcgcggcccggctgtcgcagctcaaggagacgagcgactggctcgaccagcagctgcagctgcagggcgaggcggacggctcggccgagaccgtcgagcggctgaagcggaaggtttaccagtgcttgcttggaacggtcgaaaccgccgcgtcggcactcgaaggaaggtagtacaagacacgactgagggaaagatgtagataagcggggtgctgattctaagttatataaattaattaattaacctgttgttttcgtggc

SEQ ID NO: 171680 - DNA, 728 bp, Zea mays
  Clone ID: MRT4577_88154C.1
caaacattgatattttagttgataaaacctatataaaatatgatttgtaagaaataacagggatatgatttgtgagctcttatgaattttatacatacaacggtttgaaccaaaaaaactatccatatcttctgaaaaggttaaaaaacaatgcttgatgattactttcaggaatgccaaataatacatctactggtaatactaagttagtttccacaaagcaagaaattagcaaggacacacgcaagaatggtggcgcttcacctagtccaaatggttgtgctgtagtcaagaagcaaatgccaaaggagagcaaaaaggaatttgctacagaaagaagatcaccaccaaagctttataagagttgaccaacaccagcgaggacttcaccaacaaagctcggtccagcagcaaagcaaaatggaaactctagtccagtcccttctatatctactattaaaagaagggttactgaaactatctattaggactccctcccaacaagcgtaatcaaatcaggaaaggtacgctttatgtcgtctggtaatttggtgcctttggttctcacgagttgaaaatgtgtttcctgcttctgtaaattctgtgcacatgtattggaagccattgtctgcttataggttaaacttcattaaattcttctttgccatctttactaaattaaccatttgctagtgcagtaaaccagctgtctcctcgtgccgaataaa

SEQ ID NO: 171681 - DNA, 847 bp, Zea mays
  unsure (1)..(847): unsure at all n locations
  Clone ID: MRT4577_88155C.1
gccggccggttcgggacaccgccactccgccacagttcgaatattcctagcttgagattgcaagaggaggggaggggagccgagcgctcagctctaattttctccatctattgctaacaggtgcgccgctttcttcgccttccgccttatctttgcctggcccatccttaagtccgggcattctggctgttgcgatcgagggctgctgcgcccgctgattggagtcactcttcttgacgccctccactgtcattgccttgtgctagtttcgtgagcagtatttggttcaagctaactgccaggctgccagctgttatgcgaaggctgttatttttccttatctatttcagccgcgaactgtgtttgtgttctgatgggggatatataacctgcggccctgcgccttctgaatcgtatcccaatgcatttcggtgcaacggccgttgttctgcagtggcagcacagtgttgccatcattattactgtgattcagtatgcgttctgccgttctttagtttcggcattcatcattatgccatcatcggttgcgattcgttctagtgaaaaaaaaaatctgccttgcttacattcaaaggcttctattggctggaatttttttcaacccttgtttcgcaatacgctcagccaatcagttgattggctcatcctaacgaaatcgtttgcttcgcacggtttacctgngcttcttttttctgtctggagaatacttgttgattttagaaaaaaatggaaatgattgccccttacatcataatggaaagcaggcatggttggcgcttttgttattgtgtctggcgttgtgcntggcatgaactgaaattccact

SEQ ID NO: 171682 - DNA, 173 bp, Zea mays
  unsure (1)..(173): unsure at all n locations
  Clone ID: MRT4577_88156C.1
agctgaactgagcgtactaagctcgcatcggctcgacaatanacgctacatgatccactagcgcggtagagtctgctcagcagcacacttcgacgactgaacgcgtcgtcggccgtagctgccgctctattatgacaccatcgncgtcgacgataatcgacagtttgtgcgat

SEQ ID NO: 171683 - DNA, 388 bp, Zea mays
  Clone ID: MRT4577_88157C.1
cacgcgtccgaatattttgagcattcaaaaacacatttttcgaagcacattaccaacaaccggagggcagtttctaccaagagatggtccctacttgcgcttattgcgctttttgcgagcgcaacaaatgccgccattattccacaatgctcacttgctccaagatccattattacacaggtactgccaccatgtacttcaatgagcttggaacacccacctgtgcaagcctatatgctacaacaagcaattgcggggagcgggttacaacaaccaatttgccagttgcaacaacaatccttggcacatctaacaatacaaaccatcgcaacgcaacagcaaccacaattcctaccaacactgaaccacctaaccatggtgaaccctg

SEQ ID NO: 171684 - DNA, 427 bp, Zea mays
  Clone ID: MRT4577_88158C.1
ttgtttttttttttttattttttttttttttttttttttttttttttttttttttttttggggggagccccaagatcatagatctactagtttcaggtggataccgcccccaaaattaaaaatctaggcaaacggaaaagggggtcctatttccccctgtgttttttttttttttttttttttttccaggaaaagggtggtcctaacctcaaaccccgggggaaaaacccccccatgaaccaatttttactttaagccggaccccaactaataatcaatccaaacagaacaaagcggggtgaaatgaccccaattttacgcttttacctaaaaggggaaatggcataaattttaaaaaactttttgacaccttcggaggctaacgtaagggcacttgggctcaccaaaaacgggtggccaaaatttt

SEQ ID NO: 171685 - DNA, 261 bp, Zea mays
  Clone ID: MRT4577_88159C.1
tctaaaaagcctactgcaagctgattagtagttaccaataacagcctatgataaaaaggagacggtgctacaaatgggctgtcatagttaggctacttattggaaagattactgtcatgactgaagtcatgcataaagtgaatgaagcaatctctaataccttatcatgagctcacatatgctcataagtttaaaaaccttgtactattcaagtcttttgcaatcaaatatataagcacatttactacatactggactcct

SEQ ID NO: 171686 - DNA, 848 bp, Zea mays
  unsure (1)..(848): unsure at all n locations
  Clone ID: MRT4577_8815C.1
ggaaaaacngggccgaggacagtattcaggagaactcacgtttctcttggtcagccagtgacatcaccaacttgttgacggtagggagagcaagttcttcggcgatttgagaagaaacgaggagcgagagagcgtgggtgcgtggggggtgggggctgcgcccggggcccccggatcacggaatcctacccttaccaaccctagcctccattggtcgccgtctcgggccatggcagggccggcgccggatcgggccgccctgactgtgggtccgggcatggacatgccgatcatgcacgacagcgaccggtacgagctcgtgcgcgacatcggctccggcaacttcggcgttgcccgcctcatgcgcgaccgccgcaccaccgaactcgtcgccgtcaagtacatcgagcgtggcgagaagatagatgagaatgtccagcgcgaaataattaaccatagatcattgaaacaccctaacattattaggtttaaagaggttattttaacaccgacccatcttgctattgtcatggaatatgcctctggcggtgagctttttgagagaatatgtaagaacgtgcgattcagtgaagatgaggctcgctacttcttccaacaactcatttcaggagtaagctactgccattcaatgcaagtatgccaccgtgatttgaagctggagaacacacttctagatgggagtgatgctcctcgcttgaagatatgtgacttcggttattccaagtcatctgttcttcagtcccaaccgtcgacaactgttggaacacctgcttatattgcacctgaagttctgttgaaaaaagaatatgatggcaagattgctgatg

SEQ ID NO: 171687 - DNA, 108 bp, Zea mays
  unsure (1)..(108): unsure at all n locations
  Clone ID: MRT4577_88160C.1
tttcttgcaacgtaaacggagccgcgaaattattgctgtgctgactacancttaaccaacaagccaaaagcgtgcacaacaatcggcagtcaccatttacaatggact

SEQ ID NO: 171688 - DNA, 416 bp, Zea mays
  Clone ID: MRT4577_88161C.1
cttggcttcttggtcgggtacagggtgctctgcggcgtcatcctctccttcaggtgccaccgcacggggaggtgagtacgggagaaaggcgggaaaccatgccagtggcggccattggcatgcaagcaaattgcaaatagtactccgctcgtttgaatttcacctcattctccccctcccttttggtgattttatccacgagacgtcgattcgaattaggttggatacgaatatatgtatatgtttgggagatactactgattgtagtggtcagtggatgatgttcctgtgtatcaatagtggggttgatggcatgatgctaatgggagaataaaaaatttgggtgtttctgctccaaaaaaaaaaaaaaaaaaaaaaaaaaaaaaaaaaaaaaaaaaaaaaaaaaaaaaaaccac

SEQ ID NO: 171689 - DNA, 274 bp, Zea mays
  Clone ID: MRT4577_88162C.1
ggccatggtaggcctttccctaagccagctgctcccagatccacagttcccctatgctgaagtggggcgggcttcatagagacttgggaatgagctgaaggtgaaacattttctccctggatttatactagtctcacatgatccagccatcaccttagaccaccaagccttgattggtgcagccagttgtcgtccttccggggaaggatttctcagttctttggctgataggaagctgtgcgtgtgtgtgtgtgtatgtgtgtgtgtgtatgtg

SEQ ID NO: 171690 - DNA, 280 bp, Zea mays
  Clone ID: MRT4577_88163C.1
tcggctcgagcgatcggccgcactgaaatgatcagagtgattctcctcctcctcgtccgcgcgctccgtgttcattgctccagtctctcacgcctctcgcgccagcagctccaccaccaccaacgctaacgacgctcagggaaagggtgtctaggttgcgtacaggcgaaaggcacgcgccgccgctgccgcgcgatcctcttcgtcgccatcgtcgctcagatggatccgtcgtcggagccgctgtacgcgcaggtcgagccgtacgacttcgggttcc

SEQ ID NO: 171691 - DNA, 293 bp, Zea mays
  Clone ID: MRT4577_88164C.1
cacgggcgtaccgtcgacaatatctactctcactagccacgccctatcctgggcataaaggataccgattggtgctatcatggagtcgagacttacccagacgctgcacgcgaaacctgctgacgactgcatcaccttccatcagaccctcctacactaatacattgcaattcctaaatcctaaggactggtaccaacatctcattacattctacaattgactctatgctagttagcgatttaagatcttacgatctctagaaaacagtttagaatcttacataccaacgacc

SEQ ID NO: 171692 - DNA, 765 bp, Zea mays
  Clone ID: MRT4577_88165C.1
ggccgcttttttttttttttttttacagccaggaatatctgatacttacataacccaatttcatattcataaaatatatctgaaaaataaacagcgataatgtgcagcctcactaaactagccacttattacactcgatgagtaaccagctaacaaatggggtccggaatctacaagagctacactaacatcccgaccactgcttgtgggatcagagtacagttccagacttccagacttacattccaggatccaggctagtccaaattcttggttgtcatgcaattcagcagtccaggcgttaaacttctaccccgtgagccgcaaagtttgcggatacgttggctgcgtcccagccgatgcggacgaccatctcgccaaagacgctcttggcgcgcaccgcgttcccctccttctcccatgcctcgagcagtatcgcgaacgtgtcgccgtcgggtgggatggttgccttggtacgctcgaagacgtcctgcgcatcctgcgcgcgaccctcgacgcggcaaatcgccgagagcagcgagttgagcgcgacggcgtcgtgcttgaggccgtagcggtccatgacgtctaaggccgcgattgcatctttgatgttgccagcggcgcagtaggaggcgaagacggaggcgaaggtggcgacggagacgagcccgccgccgccctcctgcttcatggagcggatggcgtcccacatgggctcgaacatggcggccttgccgaggatgtcgacaaggaggttccatg

SEQ ID NO: 171693 - DNA, 2166 bp, Zea mays
  Clone ID: MRT4577_88166C.1
cattgggtacctcgaggccggccggggttccccaattcccaacgccgccgcgacggcgctgctagctagtctttggtgttgcaggtgttcgattcctgattccaaattccagactccaaactcggttcttcaatcgacagattccgatttacatcccaaagctcttcggattgaaatccagccgcgacccaagagataagagtatttgggattagtagatagggagggtagataggatagtagaatagaagaggagcactttcgctgatgattacggcggaggagaagagccccgaaagggaggaggaggaggaggaggcgaacccgcgcgcggaggcttttctggagatcatctgccgcgtcccggcgggggaggtggaggcggcgctgtccgcttgcggcatcggccccacggccgaggtcgaggaactggtgctcaagtcccgcgaatgctacaagcgccctaagtccgccgtccgcttcttccgctgggcggggcagtccgtgtcgcacaccgcctacgcatggaacctccttgtcgacatcctcggcaaggccgccatgttcgagcccatgtgggacgccatccgctccatgaagcaggagggcggcggcgggctcgtctccgtcgccaccttcgcctccgtcttcgcctcctactgcgccgctggcaacatcaaagatgcaatcgcggccttagacgtcatggaccgctacggcctcaagcacgacgccgtcgcgctcaactcgctgctctcggcgatttgccgcgtcgagggtcgcgcgcaggatgcgcaggacgtcttcgagcgtaccaaggcaaccatcccacccgacggcgacacgttcgcgatactgctcgaggcatgggagaaggaggggaacgcggtgcgcgccaagagcgtctttggcgagatggtcgtccgcatcggctgggacgcagccaacgtatccgcgtacgactccttcctctccactctcgttcggggcggcctgttggacgaggccttcaaatttctgcaggtgatgcggagcaagggctgcttgccggggatcaattttttttctacagctgtggatctggtcgtccgcaagggtgactacctcaacgccgtagccatctggcacatgatggtctctgaagccggcctcgttcccaatttctcaatgtacagcgccatgattggtctccactgcaatgctggtagcatagacgatgctcttgggttgcttgatgaaatgcccctcaacggcgtctttgcaaattctgtcacatacaacaccatactggaaggattcatcaagcatcgcaaggctcgtgaggctgaaagtttcctaacggagatgagcaagaatgagcaactgcctactgcatccaattgcgctgctgctatcagcttgttctttaaggagtttaacccatctgcagcaatcgacgtgtggcgctgtattgtggagcacaacattaccccagctgaggactctgccaaagagctaatagcagggctgcttgaatttggcaggtttactgaggtgacgaagcgtgctgatgagatgattgacatgagagttgagttgtcacggtccacaatggagaatatgaagcgtgcttttgctaaggctggcaggcaccaatcatatgacaacattgcaagaaggctaaagcgatattagctgcacatgaatgctttaatcagctgaaactttgcggctcacggggtagaagtttaacgcctggactgcttaattgcatgacaaccaagaatttggactagcctggatcctggaatgtaagtctggaaatctggaactgtactctgatcccacaagcagtggtcgggatgttagtgtagctcttgtagattccggaccccatttgttagctggttactcatcgagtgtaataagtggctagtttagtgaggctgcacattatcgctgtttatttttcagatatattttatgaatatgaaattgggttatgtaagtatcagatattcctggctgtcagcagcgtcaggcgcctctgctgatcctttgaccatattgtttttcgtggaagaagctttttaactattttttttaccgggaaggtttgatcggttggtgttttctcttgtcattcttttaatcagatcacttgctcatgtggcaagttatttgacc

SEQ ID NO: 171694 - DNA, 333 bp, Zea mays
  unsure (1)..(333): unsure at all n locations
  Clone ID: MRT4577_88167C.1
cccggcccgccattcccgggtcgaccccgcttccgggctgtctctctcggccccctgtgggtgtgcgcgcctggtgggccgctgccggcgccgccgcctctacccaggtgttgcggctttcgttggtctcctcgccgccgtcgtgccccctcccggttgcgttctttccgtttgttttttttttgcgcccttcggttcctggatggctgtggcgggggttatgggacttctggtcggcgggctccgtcgtgagctctcgttggctcctgtgctgctggctgnggtcgtgtctccgctcggtactctgctgcgctttcctttgggacttcgcgt

SEQ ID NO: 171695 - DNA, 231 bp, Zea mays
  Clone ID: MRT4577_88168C.1
aacttatctagagtagtacgtcggaattcggatctagactcgggaagatctggagttgcgctcatagtcacagttctcgagaataatgcgtctgctactagctacaattcctgaactagtggtattagtgctagagctggtcttctcatgaaaaaaatctctggctctgaagacagggctagacattcttggtgtgttcatgagctttgtggctgtagaagtcgatccatc

SEQ ID NO: 171696 - DNA, 378 bp, Zea mays
  unsure (1)..(378): unsure at all n locations
  Clone ID: MRT4577_88169C.1
gacacggaggncccccgcgacgacggggaacttacgccgggcgggggacatcacagaggacgacaaggcggcgaagatgctgatcgacacgccgggccaaacccgcgacagggcgaaggcgaaggccgaggacgacacgctgatcatccaaggggagcacaagaaggacgagggcgcggagggcgccagcaggagcaacagcaacgggagggggaagcagaccatcgcgagctcctacgacaagcagatggcgctgccagatgagggcgacaagagcaaggagcgggaccaggcacaagaacggacgtgctcaccggcaaccggaccaacacccatggggaacgcacgggcagggaagagcaggtgcaacagacaaac

SEQ ID NO: 171697 - DNA, 461 bp, Zea mays
  unsure (1)..(461): unsure at all n locations
  Clone ID: MRT4577_8816C.1
ggccggccgggccctgaanttttcactgtgggagatgctacgagcgatgtaagtttacatagtgctatgtggctattagtttgtaccgctcgaattggaggctggaaacaagatatgcatatgctgcatctttatatatggcaaagaacataactagtcatataatgtcatgctttcccttaatggggcttctccgatcagtcaagcaggcaacactgtttatgtgcctagttttatttgcagcccaatcttagggcatgtttggattccatgtgctaacttttagctcaaaatagccacagtgcatccggagaggagggctcatactaataggtggcgaatttcttagccaagtcctgaactagttgtcatcctactagcgaaccatagctaatttttagccccaactactaactatccatgtgtttccaagcagatccttatgtttgttccttgggtac

SEQ ID NO: 171698 - DNA, 357 bp, Zea mays
  Clone ID: MRT4577_88170C.1
taccggttcggaattcccgggcaaaatgttcgcttatctcttgtttttgcttgcctcagtctacttgcaagatctgtgttcagttgactggggtgcttctcagcttctttgatgtgaggagattggcgcacgaaatcacgtagcagtagctcttattccccactcgcgttttaacctgagctgcggcagttggcattcttcattcagtcgtaatggatgggatagctcgtaataagggcggtgcttcgcctggtacaggaaagggaagggaagggaagggaagtgatgggggagtgcgaggacggcaaggagtacaggtgctgggaagagctgctgccggacgcgctggggctcatc

SEQ ID NO: 171699 - DNA, 240 bp, Zea mays
  Clone ID: MRT4577_88171C.1
tgagcatgactgtgttgatattggacgaaatggtgctgctctggacaagttcaatgtggccaaggttagcgggtttatcagatcatgatcacctggacgctgtttgtgatcgacgaagctatcatcgcgatcgtggctctccagggatagttatatctcttatcggaagtgtctatgaccaggcagacgcacttcatcgtgattacagggactcagaacggagttgctcgaagtctctca

SEQ ID NO: 171700 - DNA, 699 bp, Zea mays
  unsure (1)..(699): unsure at all n locations
  Clone ID: MRT4577_88172C.1
atatgggagaccagccatgatccactatatgggagaccagccaatgatccaccatatggaagaccagccaatgatgaaccatatgggagacctgccaacgacacaccatatgggagacctgccaacgatacaccatatggcagaccaaacaataaaccccatgattcagtagattacttctctaaaagaagagagtatcctagtggaagtccatttgctagcgacgctccaccatctgcttcttatgatagatatgcagcatctgctcgcttgcctactagagaaatgcccttgcctgttagtcctggtgctgattacatgtcgcatcgttcttatcatgaccatatgcctactgatagctattctagtagaggcattcagcaattaggcctctcaagagctgggaatagtaatatgcaacaattaggcgtcaccagagctggaaattccaatgcttatgattacaccgaggctgtcgggcagatgcatggacgtgaggattatcaaagagtggcagatgttacagggtatcanagtagctctgttgaactgaggattccaaatagttctctggaatctattgttnggagctggtggtgtcaatctagcagagatccgccagatctctggtgcaagaatgaagttacttgaagcccatcctggttctttggaatccatcatggagatccaaggtatgcc

SEQ ID NO: 171701 - DNA, 523 bp, Zea mays
  Clone ID: MRT4577_88173C.1
gctgttatatccgttttgattgttgctgctggtactggtgaatttgaagctggtatttcgaaaaatggtcaaacacgtgaacatgctttgcttgctttcacattgggtgttagcaattaattgttggcgttaataaaatggattctactgagccaccatacagtgaaactcgttatgaagaaatcaagaaagaagtttcttcatacattaagaaaattggttataatccagctgcttgaccatttgttccaatttctggatggcatggtgataatatgcttgaaccatctgataagatgccatggttcaaaggatggaccgttgagcgtaaagaatgaaagacagaaggaaaatgtctaattgaagcttttgatgccattctaccaccatcttgtccaactgattaaccattacgtttaccattacaagatgtttacaagatttgtcggtattggaaccgtttcagtcggacgagtttaaaccgggattttaaaaccaggtttggtctgggtttttgaccagc

SEQ ID NO: 171702 - DNA, 279 bp, Zea mays
  Clone ID: MRT4577_88174C.1
gagctagatcgggagcagccgatatagaagatacaagagtgcatacatatacatgcaacggtgtcaagacaatatagagggacctaaaacgaatgtactagccggccattaacatggttgtgacggtgaaaacgaccaccgatgcgacacaaatggcgtgggaatgcatgaaggacatcggcgcggtgccttgtagcatgcatggcggcacacatctggcctaacaacagccgcgcagagggaatgtccaatgggacgcgcactatattgcgacattaa

SEQ ID NO: 171703 - DNA, 295 bp, Zea mays
  Clone ID: MRT4577_88175C.1
gggggccatgggaaagatcaacctgcttaaacgagagcatttatcagaaacacaggtacacaggtgtcccaccacgatttagactccgttgagaattttttttctgatggtttccactagttaataacggcttatacatggtccatgcaaagctacaatgggggtcttgggcatcaacggtggaaatagaggggtgctcatgctttcacaacttacggagagccaaggcacacatgagtacactctggaagggagaaatcgttgttctcccacctggaaagacaggggaaagaga

SEQ ID NO: 171704 - DNA, 363 bp, Zea mays
  Clone ID: MRT4577_88176C.1
cctaaaaaaaaaatcctttccaattaaaggggtaattaagggaaatggtaaaaatgccccccagggggaggggggaaaaaaagttactaaaagccggtaaaagaaaaaaaaaccgagctagggagctaggcagggggtccattaaattattacaaaagaaaaaaatttgggacccggggggcaacccggaaaattcgaaccgggacctggagggggaccaatttttccaaaaaggaggggaaaaaaaactgggggaaaaaaagggaaaaactgttccccgggaaaaaaagttatcccgtaaaaattccacaaaaaaaaaaagccgaaagaaaaaaaggaaaagccggggggggcctaaagggg

SEQ ID NO: 171705 - DNA, 358 bp, Zea mays
  Clone ID: MRT4577_88177C.1
ccaaccattaacccttggggttaaaagggttttgggccggttaaaacccttagcagggaaaattttttcccatttttttttattcccccccccttcacttggatttgaaatattccacccccccttttgggaaaatttggggaaatttttaatcctcttttttcttaaaaaagggtttaaattctttttggcccttaacctccaaggggaagcaaaatttttgcccccaaactttttgaacctttttttttggttgggcccttcccggttttccttttttttgctttcccggttttttaaaggcaccccccaattttttggggggggggccatttttttttttacaaaaacaaaattt

SEQ ID NO: 171706 - DNA, 849 bp, Zea mays
  unsure (1)..(849): unsure at all n locations
  Clone ID: MRT4577_88178C.1
gccggccggttcgggatccccggaccccgggccagtctcacctccttccctcgatcgcacgccactcccgtaggaatcccgaatccccccacccaaattcccgtctagccgtctacccgatcgccgtccttctcgctgcccgtaaaccctagcccagccctctacccccgccgtcgttgcccgtgcgctgtcgtgctcgggctgcccccgcggcgccgcgagccaaaccctagctgcctcctccagatcccgattccgcagggaagccggagaggtgagggccgccccgccgcagatggagcccgcgggggcgcgcaaggagtggcgcgccgtccccgactcctcgctccgctccaatggcgccgaggatgccgcggagcatgggaagctggggcagtcggaggaacgagctatctacgaggaaggggcgggtggactgggcgacttctgtaccatcactattgatgggagcggagggctcagcgaggacatcctgcagcagcgcctgcaaagtgtcgcacggcagcgggaggagctgcagcaagtcgagatcgagttgcgtgcgcaggccattgcacacccgcagatcatcgaggcgcaacaaagcttccaggctgctgccaaggagcatgctgcagctgtggcaaagatcaaggagcaattgcatgagcgggagcagtacattcttgaattagaaatgaaactcaatgacaaggatagagaactaaatgctctgaagattgatcatcaaacggtgtgggcaaatcaagatcttctcagagaacagaccanagagctggcaagtgtcagaagggaacgtgacaactctgaagctgaaagagcccaaca

SEQ ID NO: 171707 - DNA, 859 bp, Zea mays
  unsure (1)..(859): unsure at all n locations
  Clone ID: MRT4577_88179C.1
acacgctccgggccgggtcgcctcctttctccgtctcattcccccaatcccacgccactcccgcaggaatccccacccaaattcccgtctccccgatcgccgcccttctcggtgcccgtaaaccctacccccggagtcgcccgtgcgctgtcgtgcccgcgttgccaccgtcggtggtccgcggcgcccgtaaccaaaacctaaccgcagcctgcagatcccgattccgcagggaggcgggagaggtgaaggccgcctcgccgcagatggagcccgcgggcgcgcgcaaggagtggcgcgccgtccccggctcctcgctccgctccaatggcgccgaggatgccgcggagcacgggaagctggggcagtcggaggaccgagctatctacgaggaaggggcgggtggactggaggacttctgcgccatcaccattgatgggagcggagggctcagcgaggacatcctgcagcagcgcctgcagagcgttgtgcggcaaagggagcagctgcagcaggtcgagatggagctgcgtgcgcaggccattgcacacccgcagatcattcaggcgcaacaaagcttccaggctacttccaaggaacatgccgcagctgtggccaagatcaagcaggagcaactgcatgagcgggagcaatacattcttgaactagaaatgaaactcaatgacaaggatagagaactaaatgctctgaagattgatcatcaaacggtgtgggcaaatcaagatcttattagagaacagaccanagagctggcaactgtcagaagggaacgcngacactctgaagctgaaagagcccaacatcttacacaaattcatgagctcccaagacatctgcg

SEQ ID NO: 171708 - DNA, 444 bp, Zea mays
  Clone ID: MRT4577_8817C.1
caataagaaacgcagccgcagtaggggaataggagcatgcttctctcctccacagccttactgggcgaggacgtgcacctgcctccactactctgacgtatacgtctacggccgcgcgaagatcgctcacccaagtgggccaacgccaacgcggaggagttgatcgcctgcgagcgggactaccccgaccaggtgatggacctgcggcagctgagcaaggagccgctcagctacctgactggcgagttcccggccgactacggctgggacaccgcggagctgtcggcggacccggagacgttcgtcaagaaccggtagctggaggtgatccactcccggtgggccatgctgggggcgctcggctgcgacttcccgtagctgatcgcccgcaacggcgtcaagctcggcgacgtctagtggtgcaaggacgagtcccaaatcttc

SEQ ID NO: 171709 - DNA, 269 bp, Zea mays
  Clone ID: MRT4577_88180C.1
aacaaacaattcccccccgacaatgggaggggtcctgccttaccactagcaggagcagaaaaacaaaagggcccaaggcccacttcacctgcatttttttccgttcaaaaaaaaacaacatgggtcacgggtccccgggttctaaccccacagaaaaaaaaggcataatcgggcactttttggcccccacccccctctctctctctctctctctctctctaaacaggtggattccgggaccagctacaacattatccagccggccgttt

SEQ ID NO: 171710 - DNA, 4298 bp, Zea mays
  Clone ID: MRT4577_88181C.1
gccagttcattgcaatagaggaacagcatagggctgctcaagagaacattctttacaaagatgagcagttgagggaagcccatgcttgggtttctcaagttcgagaaatggatgcattgcagtctcagtccctacaagttgagttacgtgagcgcatggagcaatttaatcaatattggattagttctcaacaacagtatgctgaaatgcagcggagccttctccatacaatacaacaactccagcaagaattagctgaggcaagggaacggtctggtgcacaaaaggatggcccacatgtttctagggagggatcagctgaatcatcacttgttcaaagcatagcgaacagcgtgacttcaaatggtagtgcaactgcagatgggagccagcaactgttgaaaaacaatggaagtgtggatgtctctcttaagggcaataatgcctcagctgtacctgttccatctttattgggaataggtggtccggctgcgcatattgctgcaatgcattcttttatgattcatcctcaaggcattcctcaacctttagcatcacccaactctggcattcctcagtttggcagttttcagacacagcctatgattcaaccaaactcacattggccaaatcagcaggaagtacaaattgtctcacaaccacaagatgaaacaaactatcagacatcccaatcaggtcagactgcattgcaacaagacactattaatactgatgagctgtcccccaaggcaagtgagggtggccatccagaccatcttaatgcccaggggaaacaacagcagagccctgcaagtgcacctactgaatcaactcatgaacttactgttgttgaaacaaacatagctgaacatgtaccttatgatgaacaacaaaaaaccttaaaagaacaggattcactatcaaatataaaaagccatgttggaagagttgagcctcaagagcaaaatgctgaatccaaggttgaaagagctgcatctgacaagcaacctgaacctcaatctagacagcataaacctttgaactttcctccaactacccagcttcacttgaaaaagagtgcaacagagaatcctaatgttgtaaatcaggttgatataatgaaatcagttgcaggtggttttagttcgcagttacctcgtgcaccaaaggaaccttctctcctagatgagagatctctattggcttgcattgtacgtgcagttcctgctggaactgagggtggaatcaggataagttcaactctgccaaataggcttgggaaaatggtgggcggagcgacccacacgcacgcaaatccgcaaggaggtgaccctgccccagtcccacgccattcccgcaggaatccccacccaaattcccgtctccccgatcgccgcccttctcggtgcccgtaaaccctacccccggagtcgcccgtgcgctgtcgtgcccgcgttgccaccgtcggtggtccgcggcgcccgtaaccaaaacctaaccgcagcctgcagatcccgattccgcagggaggcgggagaggtgaaggccgcctcgccgcagatggagcccgcgggcgcgcgcaaggagtggcgcgccgtccccggctcctcgctccgctccaatggcgccgaggatgccgcggagcacgggaagctggggcagtcggaggaccgagctatctacgaggaaggggcgggtggactggaggacttctgcgccatcaccattgatgggagcggagggctcagcgaggacatcctgcagcagcgcctgaagaggcgttgatgcggcaaagggagcagctgcagcaggtcgagatggagctgcgtgcgcaggccattgcacacccacagatcattcaggcgtaacaaagcttccacgctacttccaaggaacatgccgcagctgtggtccagatcaagcacgagcaactgcattagagctgaggaaaacatcaaattaccatgagatgaacctgaacagtcaaggatagaaaacgaaatgcaatgaaatttgatggataaagaattagagataatgaagattgatcaacagatggtgtcagagaatcagcatctgccaggagagaacaccgacgagtcggaaggtgaaagagggcaacgtgacacctaagatgatgaaagccaacaacatcttaaaaaaaaccacgatcaccaggaacttttgcgagaaaaagaaagccagttcattgcaatagaggaacagcatagggctgctcaagagaacattctttacaagacgattttgtggctagtcatccagagctgtttgtgattgagggagacttcattcaccttcgtgatggagcacagcagattatttctgccactacagctgctgcaaaaatagctgctgcgacagcatcttctgcctcttactcatccttactgccttctgttgccgttactcctgtggcacaaaatactcggcaaaagaggaggcccgcagttgattccagatcatcaaatgcaattccctctggaaacggcttcacagatcaatttaacatcattcagggtgtcagcgacgtaacaatttcaggcaaagtaagaaatatccaagataatggcttcatagatgaagttcgcactgggcagccatccgtgctcacagctgctactgccaacggagcaagacatgacaaatgtgcaaataataccagacatggttatggtggaaaacaacaggggaggaccactgggacgacatacctttccagaagatgaaccaactttcactgggcgatgatgctgttggaattggaaaccatgcgagtggcgatgatgcggttggggaaaccatacgagtgacgatgctttggcttcgaaatgatggtgaagatgacctggattaaagttattctagattcattttttattttgcactattggtcttcacagagcctgtatggttgggggccttgttttggcaaagctgtactgatatatccctaccccaagaatcagaagcctgccaaagttttgcgactatgtacctcgtctgcgcttgtgtattgtggtgcacttgaatgatgcgaatgttatatcgaatccccgtccttgatcgtgatgttcaagaaaaaaaaaaaaatataaaaagccatgttggaagagttgagcctcaagagcaaaatgctgaatccaaggttgaaagagctgcatctgacaagcaacctgaacctcaatctagacagcataaaccttcaaacttccctccaactacccagcttaacttgaaaaacagtgcaacagagaatcctaatgttgtaaatcaggttgatacaatgaaatcagttacaggtggttttggttcacagttacctcgtgtacctaaggaacctgctctcctagatgagagatctctattggcttgtattgtacgtgcagttcctgctggacctgagggtggaatcaggattagctcaactctgccaaataggcttgggaaaatgttggctcctcttcactggcatgattataagaagcaatatgggaagcttgatgattttgtggctagtcgtccagagctgtttgtgattgagggagacttcattcaccttcgtgaaggagcacagcagatcatttctgctactacagctgctgcaaaaatagctgctgctacagcatcttctgccccttactcatccttactgccttctgttgctgttactcctgtggcacaaagcactcggcaaaagaggggccctgcagttgattccagatcatcaaatgcaattctttctggaaatggcttcacagatcaatttaacatcattcagggggttagtgacgtacctgtttcaggcaaagtaagaaacaccctagataatggcttcttaggtgaagttcgaactgggcagccatctgtgctcacagctgctgcgaatggagcaagacatgacaaaggtacaaataatgtcatacagggttatggtggaaagcaacaagggaggtcaactgggatggcttacctttccagaagatgaagtagttttcactcgacgcaattggttttgagggtggtgaagctgttggaaaccatacaagtggcattgttttggcctccaaacggccgatgctgaagatgacctggattaaagttattctagattttttttgttgcaccattgctattcacagcgcctgtatgagggccttgttgtggcgaagcctgctgaaattttgcgactatgtaactcgtctgtgcttgtattgtggtgcacttggaatgatgtgaatgttatagcaaatctgggaaatgtggtcacattttgagct

SEQ ID NO: 171711 - DNA, 219 bp, Zea mays
  Clone ID: MRT4577_88182C.1
tcactccctaaagtaagtcgtattaattagtaccactcccgatcgagagtccttcgtatctagaggcgtataacctacgcttgctgatccgcctcatgcatcttagtctacaagtgttcggaatgggtctgtgtagaatgctgctctagaggatggtaaagcctcaggcgtggtcacatcctacaaccgcgacttcacttgtcataaagtgggtgattc

SEQ ID NO: 171712 - DNA, 193 bp, Zea mays
  Clone ID: MRT4577_88183C.1
ggaacccaatttgcctcttgaaaggaaccatgttcctacacgaagatgaggaacttttttggattaggggggaaggcagaggtttaataagcaagcaaagtcaatagcgatggtgtttcgtcttcaacggaatcatacatctttgggggaagaaagtattttagcttgcccctctagaatggatcagcaaggt

SEQ ID NO: 171713 - DNA, 492 bp, Zea mays
  unsure (1)..(492): unsure at all n locations
  Clone ID: MRT4577_88184C.1
ttttcaagaacgttgccaccttatacattgaataatgaaagccagacaaagcactacgaacaataagagcctaatggctaataataatcaacacccaactatacacaaagttattgaacaagcagcaacaaagccttatgcacaattccatgatggaaatggtccctaatccctaaaatgaatctacaacttgcgagacaccaggctccctcccccatttcagatgctgccgagtgcatttttgagattccctccaaaatacaacatgaggtcgccgccgtggaccctgccctccggtagattaaaatcgaggcctttctgagcactgctgcagccagcagccgagctttggcagtttctgtcttggtctggcttcttggcagccaagaagtttgaataagacggtgatttcatcgagagcggaaactaacacctctttngtatcaggtgctgtcnttttgggcaaatgctacctccattaaaaagcagcgt

SEQ ID NO: 171714 - DNA, 316 bp, Zea mays
  Clone ID: MRT4577_88185C.1
atggctccaacctaaacggttgagggtttatacataacggaaggaggccaagcaaccttgttcttgaggctctacatctgtacatggcaagcgttggcctacctgtacagcaacacatgttgtactactagataaacattgatacaatcgtgagtttgtattgaaaacggtgtcttgtcgagcgcaattctagctagtagcagactaaattacaccgtcctatcagcgtggccatttacgtcaagacacattgacccccgataggggatcaatgtttatacaatcagtagccgttatagaggggctgcttaagatt

SEQ ID NO: 171715 - DNA, 582 bp, Zea mays
  Clone ID: MRT4577_88186C.1
cattgggtacctcgaggccggccgggagacagagtacaggaaaagggaaaaggctacaccgcccgcgacgaccacgatggcatgactcgctccaagtccaagccgcggccaccttgatgaaccggtcaagatcggcggtcggtcgccgtccgcctacgctgccgatagaccgacgcgtcgtcgacactcatccagggagttcaacgactaccacgaagacagcagcaatgacgtagattcctccatgccaacgagagggacgacgacgacaagtgcatgcgaggtcgcaaagctcagagtgtacggggtgcaaactaagcagattgtcatctcgggaattggcacggagggcagcccttagagcgttggaactgatactctgatccatgactgaagaccgtagcttggaaaatgaagaagcatgaatcacacgctcaaccaggaggcagagcatcgatgtttgcttcaactcaaaaaatgctaagcacggatagcagcagatgtattaactgcggctggagccaattgctataacggtgaatgcgatagatatgggcactaacatgccgtgctgaatgctag

SEQ ID NO: 171716 - DNA, 511 bp, Zea mays
  Clone ID: MRT4577_88187C.1
gcggccggcccgacgtactctttgagcacgagagggtcaggacgcgcacactcgacaaggagacttatccataggatgggcaaggacgctctgactagacgagcgaaagcaccaactggacgcgccagcagaccggatacggggggcagaccaagcctgccttccacacaaacgccaagcatcgcaccaagacgattgcatctgaagcgtgcatggcaccatctgcgagcactactcacagaccgccatctacatatgcgagcattttgagactggggtatacacgaatgccaagggcacatgttttcttttacgcttttacgtgctcctgtctgggtgctgaagcgcacctgtggctctactactactgatatataaacatgtcggccgatttcactgttaatgtagacggtgacaagcagaccatgctatgtatccaattccaatgcctgacctttgtctgcagtgttggtcgacttttggctatatgaaagctctgctgacttgaatc

SEQ ID NO: 171717 - DNA, 322 bp, Zea mays
  Clone ID: MRT4577_88188C.1
cccacgcgtccggtcagtgtcgtcctgttcctatttactatatcaaatgattatggtgcatctaaattgacacacacgaaatgacagaactgaagaaagaacaaagagcgaagccatatccgttgctacgtaaaagtcgatcttcccgcccaccaacgcacatactttttatttacaccattattattgtattcattgtcatgttagtactactctgttctagtattgagcaactactagttaattaaggtgagcacaacaatgctagctgaggattcatagtagcttatgattcttttggcgatggcggaaagatcgactt

SEQ ID NO: 171718 - DNA, 333 bp, Zea mays
  unsure (1)..(333): unsure at all n locations
  Clone ID: MRT4577_88189C.1
ttcaacccccattatatttcccccccccccctttacccacccacagcgtgttttttaaaaagcaaaatgcgggctcaaaaacacccnttacacaaacacacacaaaaccttttccgggttttggagaccaaaatcaaaccatttatcccatccccccctctataaacccccctacccccatttaagtacccccccccacctaggattgcatcccctatcccccaactaaatagccttgccaaaccaaaaacccgtggccccaaaccaataaatacccccgtttcccccccgaaaaacaccccaacccatcccccctttaaaaaatccccccct

SEQ ID NO: 171719 - DNA, 1610 bp, Zea mays
  Clone ID: MRT4577_8818C.1
gcacgaggtcgacggtagagagagcaagctcttcggcgatttgagaagaatcgaggagcgagcgagcgagcgagcgagagaggaggaggaggagctggggcttgagcctgcgcccgggggccccgggtcacggaatcctacccttaccaaccctagcctccattggtcgccgtctcgggccatggcagggccggcgccggatcgggccgccctgactgtgggtccgggcatggacatgccgatcatgcacgacagcgaccggtacgagctcgtgcgcgacatcggctccggcaacttcggcgttgcccgcctcatgcgcgaccgccgcaccaccgaactcgtcgccgtcaagtacatcgagcgtggcgagaagatagatgagaatgtccagcgcgaaataattaaccatagatcattgaaacaccctaacattattaggtttaaagaggttattttaacaccgacccatcttgctattgtcatggaatatgcctctggcggtgagctttttgagagaatatgtaagaacgtgcgattcagtgaagatgaggctcgctacttcttccaacaactcatttcaggagtaagctactgccattcaatgcaagtatgccaccgtgatttgaagctggagaacacacttctagatgggagtgatgctcctcgcttgaagatatgtgacttcggttattccaagtcatctgttcttcattcccaaccgaagtcaactgttggaacacctgcttatattgcacctgaagttctgttgaaaaaagaatatgatggcaagattgctgatgtttggtcatgtggtgtaaccctctatgtaatggctgttggtgcatatccttttgaagacccagaagagcctaagaacttccgcaagacaattcagcgcatcttgaacgttcagtacgccattccagactacgtgaacatatctccagagtgcaggcatctaatttcgaggatttttgttggtgatcctgctatgcgaataacaatcactgaaatccggaatcatagttggttcctgaagaaccttcctgctgatcttatggatgatgatagcatgagcaaccaatatgaggagcctgatcagccaatgcagaccatggatcagatcatgcagattttaacagaggccaccataccacctgcctgttctcgcagtataaatgttctagctgatggactggacatggacgacgacatggatgatcttgactccgattcggatcttgatgttgacagcagcggtgagattgtatacgcaatgtgagtaacatctcagtaaccatctcagtatctcaccagtcaaccaaagaaccaatcaggcatgggacaccctgatgttgtacactctgccaaagacctagcatccttttgtaaaatatctccctgtagttttctcaaagaagcgcaagcccaacctgttctggggaacacggatgctgtagtcaaactggggttattcagattgtaaaactggcctcttgcttcctgcttactctcaggcttcgacttgtgtgttgctgttgaatatgtacttacaagaaacttctacggagtactcatgttgatctgttcgaagaccaaaaaaaaaatat

SEQ ID NO: 171720 - DNA, 338 bp, Zea mays
  Clone ID: MRT4577_88190C.1
aaaccggaaaagccttatgatttccatgggagatctgaattttttttttacaggatttccatgggaaatgggcttatcacacaccaatgggggaattgggatcctattactaaataacaccgaattcatacatacaccatttgctttggagctgcaagcaaaatggtactgctagggctgaacaccccaaaggtccacgccctggaacgcaattcatttaaaagcttgcagggggccccagttgagtctgcctcaaaacactggattaaactaatggcatgagatttattttaatccaataccagcctggttcttgccataaatgcacatgcccacct

SEQ ID NO: 171721 - DNA, 455 bp, Zea mays
  Clone ID: MRT4577_88191C.1
aagagaacgaccccaaaattttcaacaaacattggaattttggggaaaaaaaggaaacaaggggggcccaaaattttatccaaaaaccccccgacccttttggggaaacattttaatcagaatcccaaccccctagcgaaaaacggggccggaaccaacaaatatttttttattaagggggcaaaacggccccgggagggcccccaagcgggggatttttcaagcgggggaattggcaccccgggggggggcatcaaggggaaaaaaaaccacaaagccccccccgccccaacgggggggggaggggcttacttcaccggcggctcctttttctaaaagggggcccccccaaggggggggggggccggaaccgggggggacccggggaccgggggggtcagggtggccctcaccctcggggaaccccccccccggccccgggggggccccccggg

SEQ ID NO: 171722 - DNA, 921 bp, Zea mays
  Clone ID: MRT4577_88192C.1
gtcccgaattggcagcgcagagagccagaggatgcgttaatgttactctactcctatatagcagtccaaaaaaaaaaaaaaaaaaaccacttccacttcgctctgtcctcccatgcgccggattaccactgaccacttcacagtcacagtagtacagagcggcagagtggagaagtagactctaggtgagatggcggccgtggtggcggcggtggaggcaggggtggtggcggtggcaagcgggaggggatgcagcagccggctggtgcggggcctgtactggcgccttcgcgcggttctgcggcggctgcggtcggagcgggccaggcgcggccggaggttcagcttccactacgacgcgctcagctacgcgctcaacttcgacgacggccgcgccgcccccgccccggcccccgccgcggccgacctcgtccttgcccccggcgacaacgacgcgctacggtgaatcggcgtccgacgatccgctgccaagagccagctggggtctctcttccttgctccggacgccgctgccttttccactctcctgtggtttcgctttttcgataaatgggggttgtgtaatggaaaaaaaggaagatggtagggtggtgtcgcctccgcgttctgcgattctttgcattgacgcgcagctagctagctagggggattgcgcgggctcccggtgatcaggaaagcagcgcttcggcgctgcggtgacgccgtgatttgcagggagatcgagagaaacacatgtgttcttcttcgccgtctcggtgcttgcttcctttctcgagtagtattatttcttgcttgtgcttcagaattcctcgtgtggttcgatcctgcaaattttttccccaaaaaaaaaaaaaaaaaaaaaaaaaaaaaaaaaataaaattaaattaaaaaaaaatata

SEQ ID NO: 171723 - DNA, 169 bp, Zea mays
  Clone ID: MRT4577_88193C.1
ctatgttttcgttcactgtgtgcggacctcgctgtcctgagcacagcatttcactcactgcgtgtcaggccacctccctaaagtgggggcatgggtggtagactactacttaaagaacattaggggagagcactgtaccactttggatgacatatgatgaggaaacatt

SEQ ID NO: 171724 - DNA, 2273 bp, Zea mays
  Clone ID: MRT4577_88194C.1
aaaaccgggggaactatggcagcagaggccttttgaaaaaagctacggatgtgtttcaggagggtgttgctgttccagggacagtcaaggagttcaagctggtgtttgaggccggcctccagtttgaacagagtatgcttgcggcaaagcttgaggctgctgaggaagaaggggctgaggatgagaacgagggagggggcaggaagagtgggatggataagttatcgaagaaattcctcaatgaattctggttgaacgatgaggatgatactgatttgaggatggcaaggtttgagcggctgttggatcgcagaccagagcttcttagcagtgtgctgctgcgacagaacccacacaatgtggaggaatggcacaggagggtgaaactctttgaaaaggatcctgcaaggcaagtagcgacatatgttgaggccgtgaaaactgtagacccaatgaaggcagttgggaaaccacatactctgtgggtggcatttgcaaagatgtatgagaaacacagtcgtctagatagtgctgaagatatcttcaaacgggctactcaagttaattataaggcagttgaccatttagctagtatctggtgtgagtgggcagagatggagttgcgccacaacaattttgacaaggctattgaactgatgaggcaagcaacatcagaaccctctgttgaggttaagaggcgggctgctgctgagggggatgagcctgtccaaatgaaagtgcacaaatctttgaaactgtggagcttttatgttgatctggaggagagcctcggaaccttagactctacccgtgcggtttatgagagaatattggatttacgaattgccactccacagataattctcaattatgcatatctcctcgaggagcacaagtatttcgaagatgcatttaaagtgtatgaaaggggcgtgaaaatattcaagtatccccacgtgtaaggccatttgggtaacctaccttacaaagtttgtacatagatacaagcgaagcaagttagaacgagcaagagaacttttccatgaagctgtccaacaggctcctgcagaggaaaagaagcccctatatttacaatgggcaaaactggaagaggactatggtcttgcaaaacgtgctatgaatgtatatgatgaatctgtaagagctgttcctggcagtgaaaaaatggccatgtatgaaatctatatagcacgtgctgccgaactctttggtgttccaaggacaagacaaatatacgagcaagcaattgaatctggcctcccagacaaagatgttctgacaatgtgcatgaagttcgctgagctagagagaagccttggtgaaattgatcgttcgcgtgccatctatgtgcatgcatccaactatgctgatccaaataatcctgacttttggaagaagtggaatgattttgagattcagcacggtaacgaagacacattcagggagatgcttcgtatcaaacgcacagtggctgctagccgtagtcagacacatttcatactaccggagtacttgatgcagaaggatcagaagttaaacctggacgaagcagttgacactctgaagcgtgctggcgtccctgaggacgagatggcagctttggaaaggcaactggctaccggaccatctactgccccaccagcagcaccaagcactgccccagcctctgctaacaggatgatgaactttgtcagtgctggagtagaggcccaggttgagagcagcaggcaacaggctgctaacaatgaggacattgagctgcccgatgagagtgacgatgaggaacccgatgtccaaattgcggagaagagcgttcctgctgcggtatttggtgagctcggcaagagagctgccgagaacaacgaggaaagttcaggtgcccaagggaatgagcagctgggcgccctcgagaggataaagagacgacgccaatagtaagccgttgctaagattgtgcagccgtggtatcagcacgagcttttatttaacgatgttgtacttgttacatgtaaacaatttctttgtacaaacattgaagggagttgatcggcgtggccatttctgtgtagtcttgggtttgtttcttctccctcgaaagaacatgacaccaaaacatcatttctttggttcgtttctagattttattcgtccgatttgatagtcagaagccagctattcttggccgcaatcttattggcagtcgtaatacaatacaaaaaaaaggagaaaactaggaatattttctaaaaaaa

SEQ ID NO: 171725 - DNA, 268 bp, Zea mays
  Clone ID: MRT4577_88195C.1
aagacgtgcctagattggccgtgtttattaggaccaagcgagtgcagttttaacgctatactccgcccactgctgccagcggtttctaacggccagtggttatatgtaacatgaacaggacgttaagggtagcccaaatacactatgggtgggctacaacagcttactgtggacggttggaggcctgcgctagttcagcaggggtcttctctggtggacgaaacccgtcatagggactactgtcggacgcagaggccggactagctct

SEQ ID NO: 171726 - DNA, 743 bp, Zea mays
  unsure (1)..(743): unsure at all n locations
  Clone ID: MRT4577_88196C.1
ccggccgggaattaatttccctcctccacattctctcattccattgtcgcgtggcgtgtcgcaagatgctccgagtcattccttgctttttgtagccaaaccgagcagttgtcagtcattccttcttgtccaaaatgctgccgaggttatcgctactcttccattctttgttcgtctctctctccatcgcgcgcgacagcaatagcaatagcaacagcaccaccaacaacaaccaatatgctgcgaccagcggcacagtctgggccacgccccacgatagttactcgtcgtcaataggcgttctcggctgcaaaatcgacaccaatcgcgtcgcttattggcccaattctgtcgattgcgacaatatctgcatttccctcacctaccaagaccgctccgtatatctcctccgtatcgatcaatcccaaggtgcgcacgacgttagctacgatgcctggaattacctctacactggttacagtgccaccgacaagcctacagccggcggtcccatcgaaatgaccttcgaaaacgtcgatgcctccaaatgcaagcacttgatcgatacaaagggtagcaagttacccctcagcgccgccaacagcatgaactttctcacgagctgcctcgatcgcaaagacagcacttgggtcgccgacaattacgtcctgtataacatcctcgactctatctgtacgctgngccacgacgagaagtgcgaactggactacccgncgcgaacc

SEQ ID NO: 171727 - DNA, 210 bp, Zea mays
  Clone ID: MRT4577_88197C.1
ttttaaccaccaccatatggtcaccattaccatgactaatgaacactgccttgtgctgggcgcttccctgttaaaccgatactgctactatagccatcccattgcttaagtaaagaccggtgtgatccttctgaacacttgccctcctgtgcgacgatgaccctgcattgaaacaactcgatccgcaagtgctctagatattaactaatg

SEQ ID NO: 171728 - DNA, 331 bp, Zea mays
  unsure (1)..(331): unsure at all n locations
  Clone ID: MRT4577_88198C.1
gaacaacggggaggngttcaggatttctcagcacaacaccaagaacgggcacaagagcaggnacaaaagcaaggacacgcgcaacaaccgacacaaagngacggcgcccggggaccagcccaacacggacggcaaccacaagggcgacacgnccggggacaccaacaccaacaccngcagaggcgacagcgacgaccagcaaaaccaacggccccgggaccnacaaggagaacaacaccggcgcgacccgcggacccggccacggcaacagcaacggcagacgaaggcggcacaaggaccaaaacgacgccacggagagcaacggcaagga

SEQ ID NO: 171729 - DNA, 927 bp, Zea mays
  Clone ID: MRT4577_88199C.1
cattgggtccctcgaggccgggccgggagtcccatagggaggaagttgagagttctaataagagcaacggccaataccattagcgagttatttttctgcaatatatgtcagcaaccgatcatttggttatggctcgtgtcatacaggatgtattggatccctttacaccaaccattccactaagaataacgtacaacaataggctacttctgccaagtgctgagctaaagccatccgcggttgtaagtaaaccacgagtcgatatcggtggcagtgacatgagggctttctacaccctggtactgattgacccggatgccccaagtccaagccatccatcactaagggagtacttgcactggatggtgacagatattccagaaacaactagtgtcaactttggccaagagctaatattttatgagaggccggacccaagatctggcatccacaggctggtatttgtgctgttccgtcaacttggcagggggacagtttttgcaccagaaatgcgccacaacttcaactgcagaagctttgcacggcaatatcacctcagcattgccaccgctacacatttcaactgtcaaagggaaggtggatccggcggaagaaggtttagggaagagtagaaaccataggccactgcatggtcacactatagaaatatcatcaataatgtgcactatattgaatcaatgcaccacctctatatgctgaatgttatgtatctcaaactatgattgtactgacttgaaaggttgagagcttagtctcttagcagaatatagcacaatattactagtatataccatgattaatcagacaaagtattctccttggagaagcaagtacagtctcaggatcttactagagtacctgcttgtttcaacaggtattaaacaaactcagcagtctgaattatct

SEQ ID NO: 171730 - DNA, 1894 bp, Zea mays
  Clone ID: MRT4577_8819C.1
aaaaaaaaaacaaaaaaaaaaaaaaaaaaaaaaatataaaaaaaaaaaaaaacggaggagggggtgggacattgggtacctcgaggctcgaggggagtggcgtcaggcatcaccaactcgtcgacggtagagagagcaagctcttcggcgatttgagaagaatcgaggagcgagcgagcgagcgagcgagagaggaggaggaggagctggggcttgagcctgcgcccgggggccccgggtcacggaatcctaccattaccaaccctagccttcgttgatcgccgtctcaggtcatggcagggccggcgccggatcgggccgccctgactgtggggccgggcatggacatgccaatcatgcacgacagcgaccggtacgagctcgtgcgcgatatcggctccggcaacttcggcgttgcccgcctcatgcgcgaccgccgcaccagcgaactcgtcgccgtcaagtacatcgagcgcggcgagaagatagatgagaatgtccagcgtgagataattaaccatagatcattgaagcaccctaacattattaggtttaaagaggttattttaacaccgacccatcttgctattgtcatggaatatgcctctggcggtgagctttttgagaggatatgtaagaacgtgcgattcagtgaagatgaggctcgctacttcttccagcagcttatttcaggagtaagctactgccattcaatgcaagtatgccaccgtgatttgaagttggagaacacacttctagatgggagtgacgctcctcgcttgaagatttgcgatttcggttattccaagtcatctgttcttcattcccagccgaagtccactgttggaacacctgcttatattgcacctgaagttttgttgaaaaaagaatatgatggcaagattgctgacgtttggtcatgtggtgtaaccctctatgtaatggttgttggcgcatatccttttgaagatccagaagagcctaagaacttccgcaagacaattcagcgtatcttgaatgttcagtacgcaattccagacaacgtgaacatatctccagagtgcaggcatctaatttcgaggatttttgttggcgatcctgctacgcgaataacaatccctgaaatccggaatcatagttggttcctgaagaaccttcctgctgatctgatggatgatgatagcatgagcaaccaatatgaggagcctgaccagccaatgcagaccatggatcagatcatgcagattttaacagaggccaccataccacctgcctgttctcgcagtataaatgtcctagctgatggactggacatggacgacgacatggatgatcttgattccgactcagatcttgatgttgacagcagcggtgagattgtgtacgcaatgtgagtaacatctcagcagccatctcagcagtcaaccaaggaaccaatcaggcatgggatgccctgttgtatactctggcaaagggcatgcttccttttgtgaaaaacatccatgtagttttctcaaggaatcgcaatgtgttctgtggaacacatatgttgtagtcaaactcgggttactcagcttgtaaaactagcctcctcttgcttcctggttactgggctttggatactctcaggcttcgacttgtgtgttgctgttaaatatgtataagaaacttctactcaggttgatctgtgaatctggattcgggtagtggttttgctcagtgttgggtgtattcccgatttctgcatttcgaactctgatgattaggtcttgtatttaggcggtttctggatttcaaaatttgtgttttttttgtgcactgtctggttacctcctatatgaggaaagcttctcctcaccgatggatttgtttacgacaaacagaattgctgacg

SEQ ID NO: 171731 - DNA, 362 bp, Zea mays
  unsure (1)..(362): unsure at all n locations
  Clone ID: MRT4577_881C.1
ggtttatcttctcccctcctctgcccccatctcgcttctcgcacacggcagccgggatttccgaagcggcgcgcccttcgcccccagccaaaaagcattcgaagctttctaaatcgttttggaggaggcacaacaagaaatgntcgtgtcgtgcaggctctctgggtgcttggagtcggctgcagtgggcccttcaacgaacaaaagagcctagtctcttcggcacgccagcgctacggggtcttgctcgtcgaaggcgcttcgatcccgtagccctggtcgttaagggctgcaacctgtcgtcacttccaaagtacactttcactgaagngcctctgggagataggggtgcttttgtgaag

SEQ ID NO: 171732 - DNA, 454 bp, Zea mays
  Clone ID: MRT4577_88200C.1
cagacccaaaaagaaaagcgacttcctacagatatacacaagaaaagaacgccacaatgccagagaaggctactgatatctctaaaaagatacctactgccgcacacttaccatgtaccctgaagctcatacccgtaggctagaattcactgaatgaattaagaagtatcaaactggcaaaacatcaaccacgacacgcgtggcttacacattgaatactaaatcaagtgaccattgactgttaaatatacggcctgcgctcatctactgaacacgtaacgaacaagaccaggtgcatgacctacccgcttacaaactaaaactaacagatggcacacttattcactgctgacacatcgttcttgccaaccacactgatggtctcgcccctgggaggcgctgcggagttatcgaccatatctaggaccttctttctcacgacgggtcaaatatg

SEQ ID NO: 171733 - DNA, 818 bp, Zea mays
  Clone ID: MRT4577_88201C.1
attgggaacctcgaggccggccgggagtccatagggttatttttctgcagtatttgtcagcaaccgatcctttggttatggctcgtgtcctacaggatgtgttggatacctttacaccaaccattccactaagaataacatacaacaatagtcaagttctggcaggtgctgagctaaagccatctgcggttataagtaaaccacgagtcgatatcggtggcaatgacatgaggactttctacaccctgggtactgattgacccggacgccccaagtccaagccatccatcactaagggagtacttgcactggatggtgacagatattcctgaaacaactagtgtcaacttcggccaagagctagtattttatgagagaccagatccaagatctggtatccacaggctggtatttgtgttgttccgccaacttggcaggggtacggtttttgcaccagaaatgcgccaaaacttcaactgcagaagctttgcacggcaatatcacctcagcattgccagtgctacacatttcaactgtcaaagggaaggtggatcgggtggaagaaggtttagggaagagtagagaccatagaccactgcatggctacactatataattatcatcaataatgtgcactatattgaatgctcaatgcaccacctctatatgctgaatgctatgtatctcaaactatgatttgtaatgacttgaaggattgagagcttattctcttaacggaatatagaccaatattattagtacaaaaaaaaaaaaaaaaccgccaaaaagaaaaaaaaaaaaaaaaagcccctaggggc

SEQ ID NO: 171734 - DNA, 327 bp, Zea mays
  unsure (1)..(327): unsure at all n locations
  Clone ID: MRT4577_88202C.1
catgtttttaaaccaaattacaaatatccctacccctttctcaattaattataactgacacataggatctctattaggaataacattaagaattcaactaatttctggaattttaatttcaatgcattatacatcttctataagagaagcatttgatagtgtaattcatttaacacgagatgtacaaaatggttgattcatacgaagaattcatatcaacggagcttcattattttttgttttaatctacttacatattggacacgatatatttaactcttcatttancattancagtacatgaatatctggaatctctattctttt

SEQ ID NO: 171735 - DNA, 237 bp, Zea mays
  Clone ID: MRT4577_88203C.1
aaagcgttcaaaataatttcgtggatctttaatactaaacagtatgggcataaatgcttcgaatatacgggccccaaaaggaaccctcggataatccaaaaacggggctaacacccagcaacccttgaccttggatttgacatagcaaaagccagataaagccaaatgatcgccttgtgggcatccctggatccactttttttatcgattgaggtttggagatccagtattccatgg

SEQ ID NO: 171736 - DNA, 354 bp, Zea mays
  Clone ID: MRT4577_88204C.1
ctaaaaaaaaaaaaaaaaaaaaaaaaaaaaaaaaaaaaaaaaaaaaaaaaaaaaaaagagggagaaaaaaatattttttaaaaaaaaaaaaaaccaccgcccccccattttaaataaatcctaacttacatcccccttcctcctaatacctccaactcttttaattccaactaaattaaaccaactccccctttttacaacacatattaaattaaaaaaccccttttttacaccaacttaactctttaaacaaaaaaccccctttcaaaaaattttaaataacaaaaatcacctaaccacaccctttactaaaaaaattccctccacataatcaccatttccttaccccctctt

SEQ ID NO: 171737 - DNA, 120 bp, Zea mays
  Clone ID: MRT4577_88205C.1
attcggctcgagcacggccgccccacagttttgacttgggtcctcatgcatatgttcatgttctggacacccttcagcttgaagccctattgccagacaacggacggatcgctcttcagc

SEQ ID NO: 171738 - DNA, 565 bp, Zea mays
  Clone ID: MRT4577_88206C.1
acataagcaccattattgatacgtccagaggtaaacattattagcaagctcaagctagaagttgggggcaggcaaaacagtctctgctcctgcgcaaaagctactagcttacatagcacagttgagcaaaaaaaagtatgttcgtcttcagcgtagcatcttaagcggacttcacggtggccgcgttgatgatgtcgatgaactcaggcttcaaagaagctccaccgacaagaaaaccatcgacatcaggctgtgctgctagctctttgcagttcgcagcagttacagagcctccgtagatgatcctagtagattcagcaacctcagcaattgcttttgtttgtgcagcaacaacatccatggtagacccagcctccctctgctcaagggtctcaccaacacatgcaatgacctttagtccctgagacagggcatacgcaaccttgtctccaacaaattcatttgattctcccagcagagctctcctttcagagtgtccaagaatgacccagggaacaccaaggttgacgagcatctcagcactgacttcaccagtgaaagcacc

SEQ ID NO: 171739 - DNA, 611 bp, Zea mays
  unsure (1)..(611): unsure at all n locations
  Clone ID: MRT4577_88207C.1
gggaatgttccctcttcanagttggtgaggtcgttgtcagtcctccttatgtgttcctcccggtggtcaagagccagctgcgccaagagttccaagttgctgctcagaactgctgggtgaagaagggaggtgcattcactggtgaaattagtgctgaaatgctcgtcaaccttggcgttccctgggtcattcttggacactctgaaaggagagctctgctgggagaatcaaatgagggactaaaggtcattgcatgtgttggtgagacccttgaggagagggaggctggttcaaccatggatgttgttgctgcacaaacaaaagcaattgctgagaagatcaaggactggagcaacgttgttcttgcctatgaaccagtctgggctattggaactggcaaagtcgccaccccagctcaggctcaggaagtgcacgcctccctgagggattgggtaaagatcaatgtcagccctgaggtctctgaatctacaaggatcatctatggaggttcagtaactgctgcgaactgcaaagagctggcagcacagcctgatgtcgatggtttccttgtgggcggtgcttctttgaagcccgagttcatcgacatcatc

SEQ ID NO: 171740 - DNA, 1290 bp, Zea mays
  Clone ID: MRT4577_88208C.1
ccggccgggctatgttatcatgtgcaccttctcttccttcctctgcaagaagccaaatccaatttagaagcgcccctcctcctctcccccatccgtacccaatctaatcgacaaccggccgagatgggccgcaagttcttcgttggtggcaactggaaatgcaatggaaccgcagatcaggttgagaagattgtcaaaaccctgaatgaaggaaatgttccctcttcagatgttgttgaggtcgttgtcagtcctccttatgtgttcctcccggtggtcaagagccagctgcgccaagagttccaagttgctgctcagaactgctgggtgaagaagggaggtgcattcactggtgaaattagtgctgagatgctcgtcaaccttggcgttccctgggtcattcttggacactctgaaaggagagctctgctgggagaatcaaatgagtttgttggagacaaggttgcttatgctctgtctcagggactaaaggtcattgcatgcgttggtgagacccttgagcagagggaggctggttcaaccatggatgttgttgctgcacaaacaaaagcaattgctgagaagatcaaggactggagcaacgttgttcttgcctatgaaccagtctgggctattggaactggcaaagtcgccaccccagctcaagctcaggaagtgcacgcctccctgagggattgggtaaagatcaatgtcagccctgaggtctctgaatctacaaggatcatctatggaggttcagtaactgctgcgaactgcaaagagctggcagcacagcctgatgtcgatggtttccttgtgggcggtgcttctttgaagcccgagttcatcgacatcatcaacgccgccaccgtgtgaagtccgcttaagatgttccaacccttcacccctgttgcggtgatgtgctgaagacagatcagactatttttttgtttaaccgtgccgtgctatgtaagctactaactttgcgctggtgcggatgctgatttccctccccctagctttttgtgaggctactctacagcttgattcagcttgctaataatgtttgcctctggacatagcgatagtggtgtttgtgtagccttttttttgtgtgtgtgaattacgatggatccgttttcgcccgacgcccttttgtggcactagtctacagcgtctacacaaatttgtgagacttagtttgggcattttagtttgtgagactagtttgggcctttgttgtgccccccccccccaaaaaaaaaaaaaaaaaaaaaaaaaaaaaagaaa

SEQ ID NO: 171741 - DNA, 1260 bp, Zea mays
  Clone ID: MRT4577_88209C.1
cgagcctcactccgcctgtgttatcatttgcaccttcttttccttcctcttcctctgcaagaagccaaatacaatttagaagcgcccttcctcctctcccccatccgtacccaatctaatcgacacccggccgagatgggccgcaagttcttcgttggtggcaactggaaatgcaatggaaccacagatcaggttgagaagattgtcaaaaccctgaatgaaggaaatgttccctcttcagatgttgttgaggtcgttgtcagtcctccttatgtgttcctcccggtggtcaagagctagctgcgccaagagttccaagttgctgctcagaactgctgggtgaagaagggaggtgcattcaccggtgaaattagtgctgagatgctcgtcaaccttggcgttccctgggtcattcttggacactctgaaaggagagctctgctgggagaatcaaatgagtttgttggagacaaggttgcttttgctctgtctcagggactaaaggtcattgcatgtgttggtgagacccttgagcagagggaggctgggtctacaatggatgttgttgctgcacaaacaaaagcaattgctgagaagatcaaggactggagcaacgttgttgttgcttatgaaccagtttgggctattggaactggtaaagttgccaccccagctcaggctcaggaagtgcacgcctccctgagggattggctaaagaccaatgtcagccctgaggttgctgaatcaactaggatcatctacggaggctctgtaactgccgcgaactgcaaagagctagcagcacagcctgatgtcgatggttttcttgtcggtggagcttctttgaagcctgagttcatcgacatcatcaacgcggccaccgtgaagtccgcttaagatgttacgctgaagacgaacatacttttttttgctcaactgtgctatgtaagctagtagcttttgcgcaggagcagagactgttttgcctgcccccaacttttagcttgagcttgctaataatgttttcctctggacgtatcaataatggtgcttatgtaccccttttttttgtgccgaattacggtggatccgtcatctgaaccatgtgtttggtgtatgtaattgcgtcacccgatgcctagggtgtgagactgaagtttttggacatttgggacaaggtagccttgtgccccacattggtcgaatgctgccaaaactgtcccggtcatctgtgctccgtctggattagcctgatctgcg

SEQ ID NO: 171742 - DNA, 494 bp, Zea mays
  Clone ID: MRT4577_8820C.1
aagcttgggtacctcgaggccggccgggggggcactaagctgcgatccagagagggacaaaaaaaaatgaggagtctagcttctcgtgtcgtttgtttctgcatgatctcctcgttgttcatctctgcatttgcagccagtcgtcagccggcgatctttcaatcggactatgcagacgatccaagtcctgctccgacaccgcaccgacctcatgcggcaccgataccgccaggtgacagtcgtatctggatgaacagccatgacggcggaacgagtacgctgccccgagatgcagcgaccccctctgcgtcaagatgaaatgaatcaacgatacctcagacttggatcccctggtggcctgtttgggagatcttagttttaggcacaaaacgggtgtaaatcactggcccaataatgacaataatatttccagagttaattacttaaaaaaaaaaaaaaaaaaaaaaaaagtactctgcgttgttaccactgct

SEQ ID NO: 171743 - DNA, 195 bp, Zea mays
  Clone ID: MRT4577_88210C.1
gtgggtagaaagcagtatctatactgcattaacttgtatataataatgcatataatcgataataaaacggaagacacgcggcttcagttgtgtttactggaactgtaaattagaaacgcttaggaaggcgactctagccgagttggttagatggtctttacctgaattggttagatagaatgagtatcacttttt

SEQ ID NO: 171744 - DNA, 1588 bp, Zea mays
  Clone ID: MRT4577_88211C.1
tctcgagtttttttttttttttttttttagatattcaatcctctatgcctggggagatcgaatatatatcgtacaataattgtctggctgcctccgtgcaacgattagctgacaagttgcattcgcagatcaggctaatccgtacggagcacagatgaccggtacagttttggcagcattcgaccaatgtggggcacaaggctaccttgtcccaaatgtccaaaaacttcagtctcaccctaggcatcgggtgacgcaattacatacaccaaacccatggttcagatgacggatccaccgtaattcggcacaaaaaaggggtacataagcaccattattgatacgtccagaggtaaacattattagcaagctcaagctaaaagttgggggcaggcaaaacagtctctgctcctgcgcaaaagctactagcttacatagcacagttgagcaaaaaaaaagtatgttcgtcttcagcgtaacatcttaagcggacttcacggtggccgcgttgatgatgtcgatgaactcaggcttcaaagaagctccaccgacaagaaacccatcgacatcaggctgtgctgctagctctttgcagttcgcggcagttacagagcctccgtaaatgatcctagtagattcagcaacctcagggctgacgttggtctttagccaatccctcagggaggcgtgcacttcctgagcctgagctggggtggcaactttaccagttccaatagcccaaactggttcataggcaacaactacgttgctccagtccttgatcttctcagcaattgcttttgtttgtgcagcaacaacctccatggtagacccagcctccctctgctcaagtgtctcaccaacacatgcaatgacctttagtccctgagacagggcatacgcaaccttgtctccaacaaattcatttgattctcccagcagagctctcctttcagagtgtccaagaatgacccagggaacaccaaggttgacgagcatctcagcactgacttcaccggtgaaagcacctcccttcttaacccagcagttctgagccgcaacatggaactcttggcgcagctggctcttgaccacaggaaggaagacataaggagggctgacaacgacctccacaacatctgaagggggaacctgtccttcattcagggttttgacaatcttctcgacctgatctgtggttccattgcatttccagttgccaccgacgaagaacttgcggcccatctcggcgaggtgtcgattagattggggtgcggagcttcggacggcgaagagagagagagagagggagaggggcgcttctagattggatttcgctgctttttttttttttttttttttttttttttttttttttttttttttttttttagcagcggcaataattttgtattggctggtattgcatcccactgcaatcgtttacagtatagtctaaccaaacataaagcaatggtaatagattaccctgttaactgattatgacactaaatgaacgaaccaaacaggacctctatgctcccccccccccagttgcctccaacatacagcccccggcggaacagga

SEQ ID NO: 171745 - DNA, 1149 bp, Zea mays
  Clone ID: MRT4577_88212C.1
atgtgcaacgaaatccttggcaactacaccaaaaaggaagaccaattaatgactaccgccttcggcacccggccgaaacgaaggctgaatcgggtgatggacacgttaaacttcgaatacccggattacaagaggcttgacaaaggggccgaaggggtaaaaaggaaaaggattgttagcatcctgagtaggcaagctgctcgggtagatgagacaggagaagaagctcctctgacgccctctgctgctgaagcagccgaaatcctgaagagaaaagaacagccttcggctacagaggagaaagttaaagaacaaaagaagcaacgaattgtaaatgtaatggaagcaattgaacaaacactgtcctcagcttcggcggccaaagtagcgattcatgcggataccaaagctgaagctgaaggtgctgccgaagccaaagatgctgatgaagccgaaacaacaatgtcagatattgataggcttgtgtcagacgtatttgcagatgtgactgtggagacaaatgtagctccagaagaaaccatggccacagtgcctgataaagaaaaagaaattgttaaaactccttcggatgaaggggattttgaccttcgtcacgtgggcggccaggagctttccgaggaagacaaggaagagctgaaagaatatagcatgctgctaagcaaagcgctgagaatgcagcaggatagtgaggacatgaaacacaaagttatagttaaaggattagaggaaaaaataaaggaacttgaaacttatctagaagaaaaaactatcctactgcaaatagctgaaagttccctcgcagaatcacgatcccaaaataccaagttaagcgaggaactaaatgaagctcgatcgatcttggatgagagttcacggtgcttcgaccaggagacgaagaaacttaaaaaaagagtcgaggccaaaactgagaagaatacgaagttgtacgagtctattaaggaccttcggaacaagtgtgtagattttgcgactcggtgtgctgaccggcttaaggggatattcaactcatttggagctgcttctgaaaagtttaccccttcgaccgaagatatcctagagcctttaatcatattgaaaacaaagttgaagcccttgacgaagttataa

SEQ ID NO: 171746 - DNA, 2148 bp, Zea mays
  Clone ID: MRT4577_88213C.1
ctccattaatattggcagcaagctaggatcatcagcatctgagcttatatattactacatcgatcggttgccaaatggcggggatgacagtcggcaataagctggcgctggctgcggtgctgctgtgcgcggcggcggccatggccacggcgcagcaggcctccggcgtgcgcgccacctacaacttctacaacccgcagcagaacaactgggacctcaacgccgtgagcgcgtactgcgcgacgtgggacgccagcaagccgctgtcgtggcgcatgaagtacggctggacggccttctgcgggcccgccggccccaccggccaggccgcgtgcgggcagtgtcttctggtgagctcaagctagctgatgaaatgaaaccatgcatgagtgatgcatgagacccgtgctcgatcggggttaataatggtgtactgatgcaggtgaccaacacggcgacgggggcgtccatcacggtgaggatcgtggaccagtgcagcaacggcggcctggacctggactacgacacggcgttcaagcccatcgacaccaacggccagggcttccaggccggccacctcaccgtcaactaccagttcgtcaactgcggcgacaactgaactgatagattattcacctgtgcatgcacctatatgtactagcaccattattccaagagttatatggatgtgatcccacacgtaagagccaataaaacatatatgcccagtggaataaactgaattacctaaaaaaaaaaaaaaaaaaaaaaaaaaaaaaaaaaaaactctccctctctctctcttcgccgtccgaagctccgcaccccaatctaatcgacacctcaccgagatgggccgcaagttcttcgtcggtggcaactggaaatgcaatggaaccacagatcaggtcgagaagattgtcaaaaccctgaatgaaggacaggttcccccttcagatgttgtggaggtcgttgtcagccctccttatgtcttccttcctgtggtcaagagccagctgcgccaagagttccatgttgctgctcagaactgctgggtgaagaagggaggtgctttcactggtgaagtcagtgctgagatgctcgtcaaccttggtgttccctgggtcattcttggacactctgaaaggagagctctgctgggagaatcaaatgaatttgttggagacaaggttgcgtatgccctgtctcagggactaaaggtcattgcatgtgttggtgagacccttgagcagagggaggctgggtctaccatggatgttgttgctgcacaaacaaaagcaattgctgagaagatcaaggactggagcaacgtagttgttgcctatgaaccagtttgggctattggaactggtaaagttgccaccccagctcaggctcaggaagtgcacgcctccctgagggattggctaaagaccaatgccagccctgaggttgctgaatctactaggatcatctacggaggctctgtaactgctgcgaactgcaaagagctagcagcacagcctgatgtcgatggttttcttgtcggtggagcttctttgaagcctgagttcatcgacatcatcaacgcggccaccgtgaagtccgcttaagatgctacgctgaagacgaacatacttttttttttgctcaactgtgctatgtaagctagtagcttttgcgcaggagcagagactgttttgcctgcccccaacttctagcttgagcttgctaataatgtttacctctggacgtatcaataatggtgcttatgtatccccttttttttgtgccgaattacggtggatccgtcatctgaaccatgggtttggtgtatgtaattgcgtcacccgatgcctagggtgtgagactgaagtttttggacatttgggacaaggtagccttgtgcccttgtgccccacattggtcgaatgctgccaaaactgtaccggtcatctgtgctccgtacggattagcctgatctgcgaatgcaacttgtcagctaatcgttgcacggaggcagccagacaattattgtacgatatatattcgatctccccaggcataggggattgaatatctattcttgtttttacaaatgaaatacggatccaaacaatgtccgaaaaaaaaaaaaaaaaagcggcc

SEQ ID NO: 171747 - DNA, 533 bp, Zea mays
  unsure (1)..(533): unsure at all n locations
  Clone ID: MRT4577_88214C.1
taccctcgaggctcgccgggacacccaacccaacccaaccgggctgttagccatcgtgaaagggaaggcaagtcgaggatggaaggaaggcaaatcgaatgaggcatgggcatgggtgatccgcacgcgccgctgactatcccccaactgatagctcctcctcgatgacgcgctcctcaccgacgctaccctccctagggaggccagggcggaccagctcgacgagcaccgccacgtggggggggtcaccatttangtagtgaccaacgagtccagtaagggcataaccaagccggcaatgacacacggacgccgtgacaatcacctcaatccaccggcaagacatggaactaccgctactaccaacaagcgcatcaaggagatgaatagattgggagtatgactggaaacccttctgaaataggcaaatcaagtccttgagagggaaggggtggagaaaattccatgccgtattaaaggctaacaatcaccccgcaagggtctgactaaaggacccgacctgattcacgaag

SEQ ID NO: 171748 - DNA, 1692 bp, Zea mays
  unsure (1)..(1692): unsure at all n locations
  Clone ID: MRT4577_88215C.1
tacaatttagaagcgcccctcctcctctcccccatccgtacccaatctaatcgacacccggccgagatgggccgcaagttcttcgttggtggcaactggaaatgcctggaagagcccgcgttcttcttccaatgcgcctgtgcttccaggctccagcccagagcaaatcgtaaaagcccttcataagtttcgtgatgcatgttgtctgtaggagcagaggagttcgatatccaacttttggagacccattctcgtttgctgcacgaattaaccttacgtttcttgtcatggagctcggggcttgctcaatctgagcataggttggagctcctcgcgaattgagtactcattggcagtaatggaaccgcagatcaggttgagaagattgtcaaaaccctgaatgaaggaaatgttccctcttcagatgttgttgaggttgttgtcagtcctccttatgtgttcctcccggtggtcaagagccagctgcgccaagagttccaagttgctgctcagaactgctgggtgaagaagggaggtgcattcactggtgaaattagtgctgagatgctcgtcaaccttggcgttccctgggtcattcttggacactctgaaaggagagctctgctgggagaatcaaatgagtttgttggagacaaggttgcttttgctctgtctcagggactaaaggtcattgcatgtgttggtgagacccttgaggagagggaggctggttcaaccatggatgttgttgctgcacaaacaaaagcaattgctgagaagatcaaggactggagcaacgttgttcttgcctatgaaccagtctgggctattggaactggcaaagtcgccaccccagctcaggctcaggaagtgcacgcctccctgagggattgggtaaagatcaatgtcagccctgaggtctctgaatctacaaggatcatttatggaggttcagtaactgctgcgaactgcaaagagctggcagcacagcctgatgtcgatggtttccttgtgggcggtgcttctttgaagcccgagttcatcgacatcatcaacgccgccgccgtgtgaaatccgcttaagatgttccaacccttcaccctgttgcggtgatgtgctgaagacagatcagactatttttttgtttaaccgtgccgtgctatgtaagctactaactttgcgctggtgcggatgctgatttccctcccccctagctttttgtgaggctactctacagcttgattcagcttgctaataatgtttgcctctggacatagcgatagtggtgtttgtgtagccttttttttgtgtgtgtgaattacgatggatccgtcttcgcccgacgcccttttgtgacactagtctacagcgtctacacaaatttgtgagactagtttgggcattttggttttttaggatatggtagcctttgttgtgcccacagccccacattggtcgaatgctgccaagattgtactaatcattgatgccctgtacggattaacctggtctccgaatgcaatcgttgcacggaggcagaagccaattattgtacgatatgcgatatcctcagccataggacgctaggatcccttgccaagcactcgtatttgcactatggccgcgattatttggggttcggcctattcggttctatactaaggtgttaanaaatgccacacattttatgcc

SEQ ID NO: 171749 - DNA, 2918 bp, Zea mays
  Clone ID: MRT4577_88216C.1
gggtacctcgaggccggccgggaaaccggcgggactctcccccctcccccagtccccactactgctactgcgagacagcgcagcacaggctgccgcccgctggccgctgcgagcagagagaatccaagaacgcgcaagagccccccctcgtcaccgccgtccatgggcggcgctgcgggcgaggcgatgtgggccgctgttgtggcggcgacggtggtcttcttggccgtcgaggtttcgggtgccgcgtcggcgttgccacggttcgcggaggcgcctgagtaccggaacggggaagggtgtccggctgcggcggcgggggtgtgcgacccgggcttggtgcacatcgccatgacgctcgacgcgcactacctgcggggctccatggcggcggtgtactcgctgctcaagcacgcgtcctgcccggagtccatcttcttccacttcttggccgcggaggccggggcagtggacggggcggacccggagccggagctgctgcggcgcgcggtggcggcgtcgttcccgtcgctgcggttcgagatctacccgttccgcgccgaggccgtggccgggctcatctcggcgtccgtgcgcgccgcgctcgaggcgccgctcaactacgcgcggaaccacctagcggacctgctcccgcgctgcgtgccgcgggcgatatacctcgactccgacgtgctcgccgccgacgacgtgaggcggctctgggagacgcgcctccccgccgccgccgtggtggcggcgcccgagtactgccacgccaacttctcccgctacttcacgccagcgttctggtcagacccggtgctcggggcccgcgtcttcgccgggcgccgccggccgccgtgctacttcaacaccggcgtcatggtcatcgacctccgccgctggcgcgccggcaattaccgccaacgcatcgagcgctggatggaaatccagaagcagaagcgcatctacgagctgggctccctgcccccgttcttgctcgtcttcgccggtgaggtcgaggccgtcgaccaccgatggaaccagcacggcctcggcggcaacaacgtccacggtagctgccgcccgctccacgctgggcccgtcagcctcatgcactggtcgggcaagggcaagccctgggaccgcctcgacgccggcaggccgtgcccgctcgaccacacctggaagtcgtacgacctctacatccccggcgactctggaggcgccgcctcgccggcgtccgggccggcattgtccgcatccgtgttctcttggtagagagatagcttctagttccattgtcttgctgtggctgttgccgccgctgctatgatctagctgccgctcgtggtgggctgtacagggcggcgttgggagcggcggtggcgacatgacaggggaaatcaggaatgagttgatagagaagggggagcctttgccctcgggggtagaattcagataagttattggggagagattttgattctttttggtcgggctggtgattcttgggttcccaattctctcgattggatgttgtaaagacttggaattttgttcaattattgatcattctttcattctttttacaagcagcgaaatccaatctagaagctcccctctccctccctccctctctctctctctcttcgccgtccgaagctccgcacccaatctaatcgacacctcaccgagatgggccgcaagttcttcgtcggtggcaactggaaatgcaatggaaccacagatcaggtcgagaagattgtcaaaaccctgaatgaaggacaggttcccccttcagatgttgtcgaggtcgttgtcagccctccttatgtcttccttcctgtggtcaagagccagctgcgccaagagttccatgttgctgctcagaactgctgggtgaagaagggaggtgctttcactggtgaagtcagtgctgagatgctcgtcaaccttggtgttccctgggtcattcttggacactctgaaaggagagctctgctgggagaatcaaatgaatttgttggagacaaggttgcgtatgccctgtctcagggactaaaggtcattgcatgtgttggtgagacccttgagcagagggaggctgggtctaccatggatgttgttgctgcacaaacaaaaacaattgctgagaagatcaaggactggagcaacgtagttgttgcctatgaaccagtttgggctattggaactggtaaagttgcaccccagctcaggctcaggaagtgcacgccctccctgagggattggctaaagaccaacgtcagcagaagaggttgctgaatctactaggatcatctacggaggctctgtaactgccgcgaactgcaaagagatagcagcacagcctgatgtggatggttttcttgtcggtggagcttctttgaagcctgagttcattgacatcatcaacgcggccaccgtgaagtccgcttaagatgttacgctgaagacgaacatactttttttgctcaactgtgctatgtaagctagtagcttttgcgcaggagcagagactgttttgcctgcccccaacttctagcttgagcttgctaataatgtttacctctggacgtatcaataatggtgcttatgtatccccttttttttgtgccgaattacggtggatccgtcatctgaaccatgggtttggtgtatgtaattgcgtcacccgatgcctagggtgtgagactgaagtttttggacatttaggacaaggtagccttgtgccccacattggtcgaatgctgccaaaactgtaccggtcatctgtgctccgtacggattagcctgatctgcgaatgcaacttgtcagctaatcgttgcacggaggcagccagacaattattgtacgatctcctccggccaggggattgaatatctattttttttac

SEQ ID NO: 171750 - DNA, 1474 bp, Zea mays
  Clone ID: MRT4577_88217C.1
gcacgaggagagatgaattgggatcacatgagaggccacaaacctcaccccacctatattatcccgtgccccttgtctttcttcctccacaagcagcgaaatccaatctagaagctcccctctccctccctccctctctctctctctcttcgccgtccgaagctccgcaccccaatctaatcgacacctcaccgagatgggccgcaagttcttcgtcggtggcaactggaaatgcaatggaaccacagatcaggtcgagaagattgtcaaaaccctgaatgaaggacaggttcccccttcagatgttgtcgaggtcgttgtcagccctccttatgtcttccttcctgtggtcaagagccagctgcgccaagagttccatgttgctgctcagaactgctgggtgaagaagggaggtgctttcactggtgaagtcagtgctgagatgctcgtcaaccttggtgttccctgggtcattcttggacactctgaaaggagagctctgctgggagaatcaaatgaatttgttggagacaaggttgcgtatgccctgtctcagggactaaaggtcattgcatgtgttggtgagacccttgagcagagggaggctgggtctaccatggatgttgttgctgcacaaacaaaagcaattgctgagaagatcaaggactggagcaacgtagttgttgcctatgaaccagtttgggctattggaactggtaaagttgccaccccagctcaggctcaggaagtgcacgcctccctgagggattggctaaagaccaatgccagccctgaggttgctgaatctactaggatcatctacggaggctctgtaactgctgcgaactgcaaagagctagcagcacagcctgatgtcgatggttttcttgtcggtggagcttctttgaagcctgagttcatcgacatcatcaacgcggccaccgtgaagtccgcttaagatgctacgctgaagacgaacatactttttttttgctcaactgtgctatgtaagctagtagcttttgcgcaggagcagagactgttttgcctgcccccaacttctagcttgagcttgctaataatgtttacctctggacgtatcaataatggtgcttatgtatcccctttttttttgtgccgaattacggtggatccgtcatctgaaccatgggtttggtgtatgtaattgcgtcacccgatgcctagggtgcgagactgaagtttttggacatttgggacaaggtagccttgtgccccacattggtcgaatgctgccaaaactgtaccggtcatctgtgctccgtacggattagcctgatctgcgaatgcaacttgccagctaatcgttgcacggaggcagccagacaattattgtacgatatatattcgatctccccaggcataggggattgaatatatattcttgtttttacaaatgaaataaggatccaaacaatgttcaaaaaaaaaaaaa

SEQ ID NO: 171751 - DNA, 333 bp, Zea mays
  Clone ID: MRT4577_88218C.1
ggcagaacgccttcacggctgcactaaaccgggcgctactgcagactccacggggagggccacgcacgctcggggatggcgaccgtcccaaaccacaagacgaccaatgccaggagggagccgccgctgtgtccaccaaacaacaacgtaccaccggttgtagagccacctccgaccacaatgaggccgtcgttgatggaactacccatgaaggacgaggacagtgcagcagcgctgcccacgttcgtagtcagacacaggggcagggagctgttactggcggcgtgctacaactacgaggcgtgggacctatccgacagggagtccacacca

SEQ ID NO: 171752 - DNA, 748 bp, Zea mays
  unsure (1)..(748): unsure at all n locations
  Clone ID: MRT4577_88219C.1
cggctgtgctgtctgtcacgtcgagctcggggcctgctcgcagtccttcctctcacgtttagcccagatcgaatcttgctccagctcgtcgtcgcgcccagccgagcccttcttgcatggtcgtccgccgtttccctgtgccgaggtctcatccggccacagccttgctctcctgcgctgagctcccttgctgtggatttttcccaacgcgcttctttgttggccatcgctgctccctgatgctcgaactcactggtcgccggtctctagctctgtttcatgtgcgcgcgcctttggctcaacttggagcttgtcccacgcgtccgcccacgcggccccccacgcgtccggtccggcgtcttgctccctgctgtgctcgccctggtcccgacgcgcgctcacctctgttcctgtcgggtccggccatggagttcgcagcgacgcccactgttctgcctacttgtgctcgccccagcacttgtgcttgccctcggctcgcattggcgctcgcgtgcctgctcatcgtcaccgctgcgcgttcgctcttcgtctatcgggtttcgtgcgtgctcgcatttgccatcgagccgtttgaaccgtttttccctgctcgacctcgtcgaacccgaatcccggacgttgggcanatgtaagcgaggtccgtgtgcatcgcttatcaagtgctcggtcaaagacttcaatcaaagttcgtcgttgtnccgtgcgtcatcaagaaatcccaagagtc

SEQ ID NO: 171753 - DNA, 425 bp, Zea mays
  Clone ID: MRT4577_88220C.1
ggggttgggttttttttttttttttttttttttttttttttttttttttttttttttttttttttttttttttttttttttttttttttttttttaaacggacccaaggggccaaattaaaaaacaaaaagggggggaacaaaaggggggcccgggcaagggggatttagggggggggggaaatcaatgggccccaaaaaaagggaggggaaaaaaggggggggccccactaaacaacaggggaccccgaatcccccctggtatcagctaacgggcaggggcggggcctattcctgggaccgaaaaaccatggggggcactaattattattggcaaacttaacattgcttaaaactggaactggatctcctttggggaggtgagcccgcaaaggggggcacccatggccttgttcatcggggggg

SEQ ID NO: 171754 - DNA, 687 bp, Zea mays
  Clone ID: MRT4577_88221C.1
gccggccggttttccgaagaaacgattacgatagcatacacatctgagctagacgcctagatccaatccgtgcgcgtgcagaggacatgtgtcggtgtacatgaacacaacttacgctctcatgcccgaggagaagaggaagatgaacctgggcaagcagtcgaggacgacgtcgatggaagaatgtgctgcattttcgaggagtacgcggctcaccgtgcagaccatcctggccaacaacgaagagaaccacgggacggactacattaactacgacgacatattcgacagcctgaacgaccgcggaccacttctgcccgttcgacgtgtgcaaccgctatcaacatcgcggtctactacaccgccgccgagatcgctgataaggcgcatgtagggaagaatgacgaacagataactactctcgaggacaattacggtatagggtccgatgcgcacgacgctggttccaccgaatgacggggcacattattgcctctgaactctctttgtatgatgaagagtgactcaaaatgaacaaactggtactactgcgactgtgtttcatccagtgatgctaatctactctgacgctatatgtcgaggcaatagaatatatatgtgcttgaagagctacaatgcttgttcctatccagcttttgtaatcgtccatataatgataatcgttgc

SEQ ID NO: 171755 - DNA, 242 bp, Zea mays
  Clone ID: MRT4577_88222C.1
gacggacacactcgtatacataactagccacatctaatacgcgcaggcaggctcgggggctcatgccaccaatggcaagggatggcgatacgcctcggagcggcaacagctcaggggttcgcgggaccggctgacaagaagcaatgcgacggcgtcacgcacgtggtggatatgaacgattacagtgatctaaatgggctcaccaaggtgaacatgctaggagtgcgcatgaccgtctacta

SEQ ID NO: 171756 - DNA, 135 bp, Zea mays
  Clone ID: MRT4577_88223C.1
aataggaactatgttagattgcagattcaaaaagaaactccgcgtttttccaccgctagctaaaaaataaaagccaattcttttaaaaactgagttggttctaaacaaaatctataagatttttagaattcattt

SEQ ID NO: 171757 - DNA, 269 bp, Zea mays
  Clone ID: MRT4577_88224C.1
ggggacgggggaaatgggtcttttggctgaaaaagccacaccccggggggggggccccctggttaaaccttggggggggggaaaaaaggaagcgggtttccggggttgggccagcattcacggaaacaggttccacctggaaaaaaaattaaggggcctcgggtaattccttttaacagggcaaaatgttgggggctagggaccaaaagactggggcttttgttgagctaccccaaagggggccacccgtttgcttttttttttcgggg

SEQ ID NO: 171758 - DNA, 445 bp, Zea mays
  unsure (1)..(445): unsure at all n locations
  Clone ID: MRT4577_88225C.1
ccggttatcgttactggngttttgtgatttcttgtatttgagtagttcggtgatttcttgtatttgagttatgtaatagcagtgtgactgagaataaagttatgtaggtgagatcgnnggtgcttnatnagtnttattgaaatncgaccgaaactgttgtattaatgctttttcttgcgttcaccttgttttagggggggggctgggaanaanaaaaatttttttatttttaattttataagagggggagatagaaaaattgaaaaaaaataaaaaaaaaggggggtggggtttttggggttttaggtttttgttcgggttgttggttggtttttgttttttttttgtgtggggttagtttggtttgtttcggggttgttttgtggtgttttttttgttttttttgttgtgttttgttttttttttttttttttttgtttttttg

SEQ ID NO: 171759 - DNA, 398 bp, Zea mays
  unsure (1)..(398): unsure at all n locations
  Clone ID: MRT4577_88226C.1
tcttacgcgtggtcttttaacggtcattctatttcaatttaaaaaaagggggggnaanaaaaaaaaaaaaaaaaaaaaaaaaaaaaaaaaaaaatattaaaaaaaaatttnatacaacataaaaataaaaaaacaaaaactttaaaagcccccccccccgtatttcccaacccttcccctcagcccccccaattttcccttttaaaaattcctttaaaaccattccaaatcatttcccataccttttccctttgaaaacttttttccccttccaaattccccacctttccccacccggaaccctaaattttaaaccccggttcccccttttgccccccctccccccctaaatccctttgcccccccccccccttttcacttgaaaacccctttccccc

SEQ ID NO: 171760 - DNA, 679 bp, Zea mays
  unsure (1)..(679): unsure at all n locations
  Clone ID: MRT4577_88227C.1
ccgcccaacgccgtccgcgccagcggcgtgcgcggttggagaagggtaccctcatatnntcatatnnacatacnngcatannnactacagnncaccagnnccaccagnngctgnaccagnaagnaaagcagnagctcnngtggcgcnnacgctcagaagaagcagagctcgtggcgcacgctcatggaaggagccatctctacttccccaggcgcaaggctcgccgtggtcaccggcgggaacaaaggtattgggctagaggtgtgccggcagctggccgggaacggcatcaccgtcgtcttaacagccagggacgagacgaggggcgcagctgccttggaggagctcagagcgctgggtctttccgacgtcgttttccatctgctggacatcacggacgcgtcgagcatcgctaggctagccggtttcttgaaggcccgtttcgggaggctagacattctgataaataatgccgcgtttggcggcgtcgaatacgcccggggtcctgctgctgctgctgggtcagtgacaagtgaagaagaattgagcggcatggatagggatcagaggcttgaatgtctgtggaggaatacccgggaacttacgacgctgcaagaaggctgctgctgacgaactactacggcaccaagcatgtgatcgaagcgttgctacctctgct

SEQ ID NO: 171761 - DNA, 198 bp, Zea mays
  Clone ID: MRT4577_88228C.1
agactgctaaaattgtccgtggaagaacaacagatttacagggggtaggtaatcttcggcgccggcggccgccggtccccgcgatggatgttgaaaccggaaatatacggtataatctgatgaagaatactccatacagacagatgaaggtaactataaaataattattattataataaattctatcagctggaaggc

SEQ ID NO: 171762 - DNA, 203 bp, Zea mays
  Clone ID: MRT4577_88229C.1
attacgcttgtagtcattattgggcatcacaaaaattatggctctctgaactcgtcgattgttattacatgccatgttccttcaatccaaacctaaaaaaaagtaaattagaatgaacaaactaaaacgcataaactaaaaaaaaaacttctgcgatggactgaaacagcacacctggcataaggaagaacggctcgcctaac

SEQ ID NO: 171763 - DNA, 662 bp, Zea mays
  Clone ID: MRT4577_88230C.1
ctctttgctgaagaagaagaagaatctgatctatctgataacttcattgtgaaaacatgccaaaagttcattccagtcactgttgagctcattcccatgtttctcctgccagattattatgatgataatcgttttttcacaaatcaagatggtgtatggaaagctacaccattgctcttgactttggcagtgattgagctgagtgatattgcctttgctgtaggtataggtattaacatttatgttatacagattgactcaataccagcagtttttggcgtcacaagggatccacttataatactatcatcaaatatttttgctatttctggtttgcggtcgctctatgtgctcgtttctgaaagcatgggtgaattggagtatctacagcctgccattggtattgtgttgggcttcattgggacaaagatgatctttgacttttttggttatcatataccaacagaagcttcgcttgcaattgtaactacatgtcttagtggaggcgtcatattaagtcttaggaaagcatcaaaagagaagggggacaagtagactgatgcaacaacacatgcaggtaaaggaatggatcagcttgctccattttttgggcagataatgaagttacaaaagaaattatgataaacatggcttaaggtgcc

SEQ ID NO: 171764 - DNA, 539 bp, Zea mays
  Clone ID: MRT4577_88231C.1
ataagatcaaatatgaactatgaatctagtatttaatatgtaatagggctaattgcaagttgtcagatgtcacaatactgattgctctgacatctgacatctggtgagttgagaggacatttactatcctaagcgctaaccagcgaccaggaaccgttagcggaagccgtacgcccttgaccagtgcacaacgcagcacacaaacaatgaacagtgtgatgggtcttcggccgatcgcggcacgagacattggatccatggtgcatgggctggtggctcatgagacaaaagtgaatgatacgagaagcgatgagcattgatcatagattcaaacatggccgagagccgacacacgactataatttgggatgtggggcctgctgcttgattccggaactggccgcttgccgcttgacagacaaatgtacaaaagaaacaagaagcatccgcaatgtacattgtcccttgccaccacagaccacagatcaggaacgaaggaagaacggaaaccaggcggcaggttgaagattcaacacact

SEQ ID NO: 171765 - DNA, 110 bp, Zea mays
  Clone ID: MRT4577_88232C.1
tctcgtatgggtgcgctgaatacaaacaaagtgaccgttacattaaaacagcgccctagggaaaacccctttcgttccctaacttacctttctggaaacaaatccccttt

SEQ ID NO: 171766 - DNA, 1043 bp, Zea mays
  Clone ID: MRT4577_88233C.1
ggccggcccatctattttctaaccctaattccacctggcacctgtcccggccgccgtgagccattgagcccacgaccacgagctccagagtggccgtcgccgagtctcgggctcttggctcacgcggcgcggctccccaggccccacccacccccacccccacgcgcccggcggcgtgctctctgctgtctgctctgcacccaggaccttcggccacaggagctcagccctatccctcgacggtgctcgcggccggcgcgcggcggctcgacccttccccatctccagctgcacgcggtctccaccgcctggaatccagggcctccgacgccaccccacctccaccgcctggaatcgaggaccgtcggcgccgccgtcccctgcctgctgcctcgactcaactgtgtcagggtatttgcaaacagtgacaaaggttctgccttgccttgctgtggagccatggctgcaaagatacgcgtggtgatgaagtcttttatgagccaaagcaaccaggtcgcagggcttctgccattcacaaagaaggtcggactacctgaatcgcgagccttgtacaccgtgctgcggtcgccgcatatcgataagaagtccagggaacagttctcgatgcatgtcaagaaacagtttgtggaactgacagccaaaccgcacgagctccacaagaagttcttctggctaaaacgcctgcgcatacctggggcccagtacgaggtacagatttctttcaagacacgcctggatatggcgagcctaaggtcccaggctccttgatggctcacgatgatcgttcttatcgtcccgcgaaagtttgaagtgctgagactggtactcagaacttgtatccatcaacatttcatatgaagacatgcttattttgatgactttcgaaaaatgtagctgctaactatttccagtgcagttttgagtgcttatggcttgattcacacaaatgtagctgctacgttcagaaataaaaaaattatggaaatacagcatgatatcgcttgattcaaaaaaaaaaaaaa

SEQ ID NO: 171767 - DNA, 177 bp, Zea mays
  Clone ID: MRT4577_88234C.1
gccacgcgtccgaggacccctgctggatacaatgtgaccacaagtatggcttgttgcgtggcgccgctgatgggtagccaagtaatagttatgtagcaaatatctactatgaactattattaacctgataattattgcttgaggaactatatcccgaaagagatgatgtgatccatg

SEQ ID NO: 171768 - DNA, 909 bp, Zea mays
  Clone ID: MRT4577_88235C.1
tgggaccctcgaggccggccgggaccacccccacacccacgagcccggcggcgtgctctctgctgtctgctctgcacccaggaccttcggccacaggagctcagccctatccctcgacggtgctcgcggccggcgcgcggcggctcggcccttccccatctccagcttcacgcggcgcggctccccaggccccacccacccccacacccacgagcccggcggcgtgctctctgctgtctgctctgcacccaggaccttcggccacaggagctcagccctatccctcgacggtgctcgcgtccggcgcgcgtccgcccggcccgtccgcccacgcgtccgccgcctggaatccaggcctccgacgccaccccacctccaccgcctggaatcgaggaccgtcggcgccgccgtcccctgcctgctgcctcgactcaactggtacttgcaaacagtgacaaaggttctgccttgccttactgtggagccatggctgcaaagatacgcgtggtgatgaagtcttttatgagccaaagcaaccaggtcgcagggcttctgccattcacaaagaaggtcggactacctgaatcgcgagccttgtacaccgtgctgcggtcgccgcatatcgataagaagtccagggaacagttctcgatgcatgtcaagaaacagtttgtggaactgacagccaaaccgcacgagctccacaagaagttcttctggctaaaacgcctgcgcatacctggggcccagtacgaggtacagatttctttcaagacacgtctggatatggcgagcctaaagtcccaggctccttgatggctcacgatgatcgttcttattgtcccgcgaaaagttgaagtgctgagactggtactcagaacttggatcccatcacattttcatattaag

SEQ ID NO: 171769 - DNA, 1056 bp, Zea mays
  Clone ID: MRT4577_88236C.1
cattgggaccctcgaggccggccgggtccggcccatctattttctaaccctaatcccggccgccatgagcccacgaccacgagctcccgagtggccgtcgccgagtctcgggctcttggctcacgcggcgcggctcctcaggccccacccacccccacacccacgcgcccggcggcgtgctctctgctctctgctgtctgctctgcacccaggaccttcggccacaggagctcagccctatccctcgacggtgctcgcggcggctcgacccttccccatctccagctgcacgcggtctccaccgcctggaatccagggcctccgacgccaccccacctccaccgcctggaatcgaggaccgtcggcgccgccgtcccctgcctgctgcctcgactcaactgtgtcagggtatttgcaaacggtgacaaaggttctgccttgccttgctgtggagccatggctgcaaagatacgcgtggtgatgaagtcttttatgagccaaagcaaccaggtcgtagggcttctgccattcacaaagaaggtcggactacctgaatcgcgagccttgtacaccgtgctgcggtcgcctcatatcgataagaagtccagggaacaattctcgatgcatgtcaagaaacagtttgtggaacagacagccaaaccacacgaacttcacaggaagttcttctggttaaaacgcctgcggatacctggggctcagtatgaaatccaaatttctttcaagacacgtctcgatatggcgggcctaaggtcccaagctccttgctgactctcagatcttccttaccgtcctgaatgttcgaagtgacttgtatccatcgacatttcatatgttatgaagacatgcttattttgatggcttttgaaaaaaaacaatgtacctgctaagtcttcattaccttcacagataacaagtcaagaaaatgcagcatgatatgacttgattcacaaaaaaaaaaaaaaaaaagcggctttatggttgtactgtttccgatgcagtttaagcagtcatcatgctgaatcccttttaatacag

SEQ ID NO: 171770 - DNA, 455 bp, Zea mays
  Clone ID: MRT4577_88237C.1
tccatcgcgtccgcccagtggcagctggacgtccggcatgcctctgttagttccccaaccttttgcctttctgccagtgcctgcgccccaactgggagtagttcggtcgcctcgtattggctcactttccccgctatgattgatggtgcccaattgcgatctgacctttcggataccctctattgttcttcaaggcattttatattatacagccacttgcacatgcattctgggatattcgatatcatactatgaactgactgtgtctcaatattaaccataatctaaaaaagtcctcagattatcggaaggtatatatgttactcccccgcgggggggtccgatatagaggatcctaagcttctttcccgttgcatggaacgtcaaaatttttctattgtgccacccaaaataaacttacttgaccgatttttacaacccctctaatggttaat

SEQ ID NO: 171771 - DNA, 670 bp, Zea mays
  unsure (1)..(670): unsure at all n locations
  Clone ID: MRT4577_88238C.1
ggtaccctccgnggtctcggccgggnacttcggngccataataaacaggtaagtggcattttggttgggatgcaatagcaacatctttcatattagttcactgtttacatcaccgtgcgcccaagtacaagactacgcataaccacttccttagtgagatgcactcgtaaatcattagcagctggcgtctactattctctgctttggcacatggagattgcttgttttgagaatgggatgggagtggatcagttcgatgggggtggtgctttgaactaacggtgataataaccgataatttcacatggtcatgcgtgtttaccagttttatgtccgtccggtaatttcggttttgtagtttctgccgtagcgctcaggggctcagggttattccagtacttttgttcatcctcatgaccctaacagtaacaatcatctcattgttccaggcaaggctccagtaatcgttgctaagggcgggttctccggtctatttcctgattccagtgattttgcttatcggattcttgggaccattagctcccctgacacagtcatgtggtgtgatgttcggttgacaaaggatggcgatggtatctgcctaccgagcataaacatggataactgcacaatgatagacaatgtttttccagaggggaagaagacctac

SEQ ID NO: 171772 - DNA, 505 bp, Zea mays
  Clone ID: MRT4577_88239C.1
atcgatgacgcgtgggtgcccccccccttttgatgaaaacatgaaaaaagcactcactatgaatactcgttagaaattacaggcgacgagagcactatcagtgcaaagccgctacactaggtacatacattacagtggccgcagccgaagcacaggcgcgcaaccccaacggcaacagcgggaaaagaaaaaggaaagaggcacaatcttgttgggtgcggtggccctaccctggcccctgggaaggaaagggcaccgggagctcatcgctattcggacacggcctcctgttcgtcttcgtcctcgtactcctcgtcggcggtggcgtcctggtactgctggtactctgcgaccaggtcgttcatgttgctctcggcctcggtgaactccatctcgtccatcccctcgccggtgtaccagtgcaggaaggccttgcgcctaaacatggctgagaactgctcgctcaccctgcggaacatctcctgatggaggtggagttccccac

SEQ ID NO: 171773 - DNA, 844 bp, Zea mays
  unsure (1)..(844): unsure at all n locations
  Clone ID: MRT4577_8823C.1
agtcctatggtgtcttctatgccgcacacctaggagcagtttgtgccctcttcttcaagctttggttgtctagccatcccctgctcccttcgttctcctgcgctcggcctcctttcagctgcgacgccggccaccgtctaagctcgccaagcatccaccgctgctcggccagggcgccgttccccttcgcactcgtcgtgggcgctgcctgtcgtgcccctctgctacctccacgcccaagctccactccatggctgcacctcccctccatggcttcttccagctggagctcgccgtcgtccctggaagagatctttagcagttggatgttgaagcgaagaagacccctgcgtgacgcccacatggtgttcgacgaaaagtctgaaccagagtttgtcgctgtgaccatggatgtggagcgacttaatattggtacgttaagtgatcacgtgatgtggagaaccagagctaagtcgaccacaagatgctattaatcgtgggcttcttcgcaaggtgatgctgatggatgaatttaaggattgacctgaacaagtgtcagaccaaaactgatcgtcaagtggtcgtcgtctaacaaacactaacctagtgttattccaggtaccagatttgtgctgctgtggatggtgctaagcgccggtgggcacgaccttcttataggtctaagtagctcttctatacttcttattaaagatggtcacttaagctagcatgtatttcaaacttatgaaaattatacatcattcaaagtgaaatactttggataaactttataatcactctgatcttgtataatgaaatnctaatgtaactcgtaactttttgc

SEQ ID NO: 171774 - DNA, 1203 bp, Zea mays
  Clone ID: MRT4577_88240C.1
atgagggagatcctccacatccagggtgggcagtgcgggaaccagatcggggccaagttctgggaggtgatctgcgacgagcacgggatcgacgccacgggccgctacgcgggggactcagacctccagctcgagcgcgtcaacgtctactacaacgaggccagcggcggccgcttcgtcccgcgcgccgtcctcatggacctcgagcccgggaccatggactccgtgcgctccggccccttcggccagatcttccgccccgacaacttcgtcttcggccagtccggcgccggcaacaactgggccaagggacactacaccgaaggcgccgagctcatcgactccgtcctcgacgtcgtccgcaaggaggccgagaactgcgactgcctccagggtgattattatttcttagcccttttttcggttattagggttaaccctgtggggggcgttagatttagtccagatctgagcctgtcggctctgtatgacatatgcttccgcacactaaagctctccaccccgagctttggtgacctgaaccatcttatctctgctaccatgagtggcgtgacatgctgtctgaggttcccgggtcagctcaactctgatctgcgcaagcttgccgtgaacctcatcccattccctcgtctgcacttcttcatggtcggctttgctccgctgacctctcgtgggtcgcagcagtaccgtgccctcacggtccctgagctgacccagcagatgtgggatgccaagaacatgatgtgcgcggccgacccccgccacggccgctacctgacggcctcggccatgttccgcgggaagatgagcaccaaggaggtggacgagcagatgctcaacgtccagaacaagaactcgtcctacttcgtggagtggatccccaacaacgtcaagtcgagcgtgtgcgacatcccgcccaggggcctgaagatggcggggaccttcgtggggaactccacctccatccaggagatgttccgcagggtgagcgagcagttcaccgccatgttcaggcgcaaggccttcctgcactggtacaccggcgaggggatggatgagatggagttcactgaggccgagagcaacatgaacgatctggtcgccgagtaccagcagtaccaggacgccaccgccgacgaggagtacgaggacgaagaggaagaggagaacgtggcagaatag

SEQ ID NO: 171775 - DNA, 2110 bp, Zea mays
  Clone ID: MRT4577_88241C.1
cgtgccgccacccgccacagcacaaggtcggtccacaggccccctcctccagctcgaaggtttggatcgaagccccacggcaacagcatttcaaatccgtcctagtactcccgcaaagcccgcacagcaccagccacccgtccttttccctttctttccccccgcctgcgtccgacgcccgagtcccgaccggccggccccgtcgaggcagcagcacacagccagcgggcagccatgagggagatcctccacatccagggtgggcagtgcgggaaccagatcggggccaagttctgggaggtgatctgcgacgagcacgggatcgacgccacgggccgctacgcgggggactcagacctccagctcgagcgcgtcaacgtctactacaacgaggccagcggcggccgcttcgtcccgcgcgccgtcctcatggacctcgagcccgggaccatggactccgtgcgctccggccccttcggccagatcttccgccccgacaacttcgtcttcggccagtccggcgccggcaacaactgggccaagggacactacaccgaaggcgccgagctcatcgactccgtcctcgacgtcgtccgcaaggaggccgagaactgcgactgcctccagggtgattattatttcttagcccttttttcggttattagggttaaccctgtggggggcgttagatttagtccagatctgagcctgtcggtgaagtatttggtagcatgtcaagattggtccatgggccaccagagcatgacagcgtatgttgtgaaattgactgagttcaaaatatcacttaaccatggttttcaagtttgccattccttgggaggaggcactggatctggcatgggcacccttcttatttccaagatcagggaggagtacccagacagaatgatgttgacgttctctgtattcccatcaccaaaggtctcagatactgttgtggagccttacaatgctacactttctgttcaccaactcgttgagaatgctgatgaatgtatggtgcttgacaacgaggctctgtatgacatatgcttccgcacactaaagctctccaccccgagctttggtgacctgaaccatcttatctctgctaccatgagtggcgtgacatgctgtctgaggttcccgggtcagctcaactctgatctgcgcaagcttgccgtgaacctcatcccattccctcgtctgcacttcttcatggtcggctttgctccgctgacctctcgtgggtcgcagcagtaccgtgccctcacggtccctgagctgacccagcagatgtgggatgccaagaacatgatgtgcgcggccgacccccgccacggccgctacctgacggcctcggccatgttccgcgggaagatgagcaccaaggaggtggacgagcagatgctcaacgtccagaacaagaactcgtcctacttcgtggagtggatccccaacaacgtcaagtcgagcgtgtgcgacatcccgcccaggggcctgaagatggcggggaccttcgtggggaactccacctccatccaggagatgttccgcagggtgagcgagcagttcaccgccatgttcaggcgcaaggccttcctgcactggtacaccggcgaggggatggatgagatggagttcactgaggccgagagcaacatgaacgatctggtcgccgagtaccagcagtaccaggacgccaccgccgacgaggagtacgaggacgaagaggaagaggagaacgtggcagaatagccatgacctccggtgtcctttttcagggccaccgcatccgacaggttgtgtctctgtgaatgagtttgtttcttttctctgcttctcgtggcttgcgtcatggattggtaattggttaagcttccgctggggttgcgcctgtgcttcgactgcgggcactgtaatgtaactactgtaatgggttaaagtaggcttcacactggtggtgctggtctcctgtaattcctgacgagtatttgtagggagtgattttatcttcttttgtgtgaaaaaaaaaaaaaaaaaaaaaaaaaaaaaaaaaaaaaaaaaaaaaaaaaaaaaaaaaaaaaaaaaaaaaaggggccttagtttt

SEQ ID NO: 171776 - DNA, 1770 bp, Zea mays
  Clone ID: MRT4577_88242C.1
ataagcagcatttcaatccgtcctcacgtagacgagacccgtgcgccgctcccgcccccgtcttcttccttcccccgcccgcgcccgaccccagcaggcaggcaggcaggcgtcagccatgagggagatcctccacatccagggcgggcagtgcgggaaccagatcggggccaagttctgggaggtgatctgcgacgagcacgggatcgacgccacgggccgctacgcgggggactcggacctccagctcgagcgcgtcaacgtctactacaatgaggccagcggcggccgcttcgtcccgcgcgccgtcctcatggacctcgagcccgggaccatggactccctgcgctccggacccttcggccagatcttccgccccgacaacttcgtcttcggccagtccggcgccggaaacaactgggccaaggggcactacaccgagggcgccgagctcatcgactccgtcctcgacgtcgtccgcaaggaggcagagaactgcgactgcctccagggttttcaagtttgccattccttgggaggaggcactggatctggcatgggcacccttctcatttccaagatcagggaggagtacccagacagaatgatgttgaccttctctgtattcccatcaccaaaggtctcagacactgttgtggagccttacaatgctacactttctgttcaccaactcgttgagaacgctgatcaatgtatggtgcttgacaacgaagctctgtatgacatatgctttcgcacgctaaagctcgccacccctacctttggcgacctgaaccatctcatctctgccaccatgagtggcgtgacatgctgcctgaggttccctggtcagctcaactctgacctgcgcaagcttgccgtgaacctgatcccgttccctcgcctccacttcttcatggtcgggttcgccccgctgacctcccgcgggtcgcagcagtaccgcgccctcacggtccccgagctgacccagcagatgtgggacgccaagaacatgatgtgcgccgctgacccccggcacgggcggtacctgacggcctcggccatgttccgcgggaagatgagcaccaaggaggtggacgagcagatgctgaacgtccagaacaagaactcgtcctacttcgtggaggggatccccaacaacgtcaagtcgagcgtgtgcgacatcccgcccaagggcctgaggatgtcggggcaccttcgtggggaactccacctccatccaagagatgttccgcagggtgagcgagcagttcacggccatgttcaggcgcaaggccttcctgcactggtataccggcgaggggatggacgagatggagttccccgaggccgagagcaacatgaacgacctggtcgcagagtaccagcagtaccaggacgccaccgctgacgaggagtacgaggacgaagacgaagaggaggccgtgtccgaatagcgatgagctcccggtgccctttccttcccagggcagggcagggccgccgcatccgacaagattgtgcctctttccttttacttttttatgtgcttcttgtaggttgcatgatgaatcggtaattggttgtgcttcccgctgttgccgttggggttgcgcgcctgtgcttcggctgcggccactgtaatgtatgtatgtaatgtatgtagcggctttgcactgatagtgctctcgtcgcctgtaatttctaacgagtaatcatagtgagtggttttttcttgttttttaaaaaaaaaaaaaaaaaaggccccta

SEQ ID NO: 171777 - DNA, 1848 bp, Zea mays
  Clone ID: MRT4577_88243C.1
aattcggcacgaggcaaatccgtcctagtactcccgcaaagcccgcacagcaccagccacccgtccttttttcctttctttccccccgcctgcgtccgaagcccgaccggccggccccgtcgaggcagcagcagcacacagccagcgggcagccatgagggagatcctccacatccagggcgggcagtgcgggaaccagatcggggccaagttctgggaggtgatctgcgacgagcacgggatcgacgccacgggccgctacgcgggggactcagacctccagctcgagcgcgtcaacgtctactacaacgaggccagcggcggccgcttcgtcccgcgcgccgtcctcatggacctcgagcccgggaccatggactccgtgcgctccggccccttcggccagatcttccgccccgacaacttcgtcttcggccagtccggcgccggcaacaactgggccaagggacactacaccgaaggcgccgagctcatcgactccgtcctcgacgtcgtccgcaaggaggccgagaactgcgactgcctccagggttttcaagtttgccattccttgggaggaggcactggatctggcatgggcacccttcttatttccaagatcagggaggagtacccagacagaatgatgttgacgttctctgtattcccatcaccaaaggtctcagatactgttgtggagccttacaatgctacactttctgttcaccaactcgttgagaatgctgatgaatgtatggtgcttgacaacgaggctctgtatgacatatgcttccgcacactaaagctctccaccccgagctttggtgacctgaaccatcttatctctgctaccatgagtggcgtgacatgctgtctgaggttcccgggtcagctcaactctgatctgcgcaagcttgccgtgaacctcatcccattccctcgtctgcacttcttcatggtcggctttgctccgctgacctctcgtgggtcgcagcagtaccgtgccctcacggtccctgagctgacccagcagatgtgggatgccaagaacatgatgtgcgcggccgacccccgccacggccgctacctgacggcctcggccatgttccgcgggaagatgagcaccaaggaggtggacgagcagatgctcaacgtccagaacaagaactcgtcctacttcgtggagtggatccccaacaacgtcaagtcgagcgtgtgcgacatcccgcccaggggcctgaagatggcggggaccttcgtggggaactccacctccatccaggagatgttccgcagggtgagcgagcagttcaccgccatgttcaggcgcaaggccttcctgcactggtacaccggcgaggggatggatgagatggagttcactgaggccgagagcaacatgaacgatctggtcgccgagtaccagcagtaccaggacgccaccgccgacgaggagtacgaggacgaagaggaagaggagaacgtggcagaatagccatgacctccggtgccctttttcagggccaccgcatccgacaggttgtgtctctgtgaatgagtttgtttgtttcttttctctgcttctcgtggcttgcgtcatggattggtaattggttaagcttccgctggggttgcgcctgtgcttcgactgcgggcactgtaatgtaactactgtaatgggtcaaagtaggcttcacactggtggtgctggtctcctgtaattcctgacgagtatttgtagggagtgattttatcttcaaaaaaaaaaaaaaaagaatattaataaaaaaaaaaaaaaaaaaaaaaaaaaaaaaaaaaaaaaaataataaaaaaaaaaaaaaaggggcggc

SEQ ID NO: 171778 - DNA, 401 bp, Zea mays
  Clone ID: MRT4577_88244C.1
tataggtggcgctcgtgcgcctgccggtaccggatcgctagttccgggccagacctacgcgtacgcttttaataaatatttatgttctctgatcctgtgtaaaggggaacgcgatcgagaaacagaccaccagatcgatcgagacctacacggctagcgacaggcgcaagtacattcttatacggtcgggtgtgcatggtaaaacgacccacggaggccaaggtcgggtcctttgactgactcaatgccggctacacggactactttcacaaggcgcgcgagaacaagggcgccactgagcctccgttgcgccggacgcgcagccacaacgacccggaccccgaccgctagccattagagggatccaatggagggtagtgacacagaacctagaaccagta

SEQ ID NO: 171779 - DNA, 1735 bp, Zea mays
  Clone ID: MRT4577_88245C.1
cgctccgagccggccgggccggggactctagccccgccgccgccccctccctcccgacgccatgagggagatcctccacatccagggcggccagtgcggcaaccagatcggggccaagttctgggaggtgatctgcgacgagcacggcatcgaccagacgggcaagtacgcgggcgactccgacctccagctcgagcgcatcaacgtctactacaacgaggccagcggcggccgctacgtgccccgcgccgtgctcatggacctcgagcccggcaccatggactcgctccgctccgggccctacggccagatcttccgccccgacaacttcgtcttcggccagtccggcgccggcaacaactgggccaagggccactacaccgagggcgccgagctcatcgactccgtcctcgacgtcgtccgcaaggaggccgagaactgcgactgcctccagggattccaggtgtgccactcgctgggaggaggcactggctccggaatgggtaccctgctcatctccaagatcagggaggagtaccctgaccggatgatgatgacattctcggtgttcccatcgcccaaggtgtctgatactgttgtggagccatacaatgctaccctctctgtgcaccagcttgttgagaatgcggatgagtgcatggttcttgataacgaggctctctacgacatctgcttccggacgctcaagcttaccactcccaccttcggtgatctgaaccaccttatctctgcaaccatgagtggtgttacgtgctgccttcgcttccctggtcagctgaattctgacctccggaagcttgcagtgaacctgatccccttcccacgtctgcacttcttcatggttggatttgctccactgacctcgcggggctcccagcagtaccgcgctctcaccgtgccagagctgacccagcagatgtgggactccaagaacatgatgtgtgctgctgaccctcgtcatggccggtacctcacggcatctgctatgttccgtgggaagatgagcaccaaggaagtggatgaacagatgctgaacgtgcagaacaagaactcttcctacttcgtagagtggatccccaacaacgtgaagtcgagtgtgtgtgacattccaccaattggcctgaagatgtcctccacattcgttggcaactcaacctccatccaagagatgttccgccgcgtcagcgagcagttcacggccatgttcaggaggaaggctttcttgcactggtacacaggcgagggtatggatgagatggagttcaccgaggcagagagtaacatgaacgacctggtggccgagtatcagcagtaccaggacgccactgccgaggatgaggagtacgaggaggaggaggaagaagaggaagagacctaagtcattctccgcagtgcttggtacagatatgatattccttgtatcgctgttagtactcgtcagtttgaggttcgtgtggtgatgcttgctaggtactagatgggtggtattgcttatgaatgcgatgttgtcgtgacagaactgcatttcattttgtattatggttgttcaagatgttatattaccatgaggtgaggtagcttgactgattgttgctacattttatgcagcagttcaagtgatttatgtggtaactgtattagacgatggtggatcggcagatacgatatcttcgatgatttattagtttagaaaaaaaaaaaaaaaaaagcggcc

SEQ ID NO: 171780 - DNA, 757 bp, Zea mays
  unsure (1)..(757): unsure at all n locations
  Clone ID: MRT4577_88246C.1
ctctttcccacgtcttcttccttccccgcccgaccccggcgagccagcaggcaggcaggcaggcgtcagccatgagggagatcctccacatctagtgcgggaaccagatcggggccaagttctgggaggtgatctgcgacgagcacgggatcgacgtcacgtgccgctacgcgggggactcggacctccacctcgagcgcgtcaacgtctactacaacgaggccaggggcggccgcttcgtcccgcgcgctgtcctcatggacgtcgagcccgggaccatggactccctgcgctccggacccttcggccagatcttccgccccgacaacttcgtcttcggccagtccggcgccggaaacaactgggccaaggggcactacaccgagggcgccgagctcatcgactccgtcctcgacgtcgtccgcaaggaggccgagaactgtgactgcctccagggtatttttttgtcatttatttgctccacccaacctcatctctcgcgctgttgaattcgttgttcagttaaccatgaatgtcttatgcactgttgaattcgccaagtggcctgtgttattgttaagcattggtctctagacaggttgttatggcagtacgtatattgaaattattgcttgtcgctgtggatttagctattttttgtacctatcatgatggaggagcggcgatggggtatttctgttactgggtaagcaatcgtacagtctgcgtcggatccttaaacataanatatcatatc

SEQ ID NO: 171781 - DNA, 1030 bp, Zea mays
  unsure (1)..(1030): unsure at all n locations
  Clone ID: MRT4577_88247C.1
cgggacactcgacactcgcatccccgctcaatccccccaccccgcctcgccggaaccctaaccctagccccgccgccgccgcccccgccccgccgccatgagggagatcctccacatccagggcggccagtgcggcaaccagatcggggccaagttctgggaggtgatctgcgacgagcacggcatcgaccagacgggcaagtacgcgggcgactccgacctccagctcgagcggatcaacgtctactacaacgaggccagcggcggccgctacgtgccccgcgccgtgctcatggacctcgagcccggcaccatggactcgctccgctccgggccctacggccagatcttccgccccgacaacttcgtcttcggccagtccggcgccggcaacaactgggccaagggccactacaccgagggcgccgagctcatcgactccgtcctcgacgtcgtccgcaaggaggccgagaactgcgactgcctccagggatttcaggtctgccactcgctgggaggaggcactggctccggaatgggcaccctgctcatctccaagatcagggaggagtacccggaccggatgatgatgacattctcggtgttcccatcgcccaaggtgtctgatactgttgtggagccatacaatgctacgctctctgtgcaccagcttgttgagaatgcggatgagtgcatggttcttgacaacgaggctctctacgacatctgcttccggacgctcaagcttaccacacccaccttcggtgatctgaaccaccttatctctgcaactatgagtggtgttacctgctgtctccgcttccctggacagctcaattcagacctccggaagcttgctgtgaacctgatcccgttcccaaggctgcacttcttcatggttggatttgctccgctaacctcgcggggttcacagatgtaccgtgccctcactgtgcccgagctcacccagcagatgtgngactccaagaacatgatgtgcgccgnccgacccaggcacggtcgctacctc

SEQ ID NO: 171782 - DNA, 877 bp, Zea mays
  Clone ID: MRT4577_88248C.1
actaacgccatccccctcttgctccaattccccaaccccccaccccccaccggcgccgccgcaccgcacctcgccgccgtccgtcctccgaagggaagggaagggaagggaaggaaaggggagatgagggagatcctgcacatccagggcgggcagtgcgggaaccagatcggggccaagttctgggaggtggtgtgcgcggagcacgggatcgaccccaccggccgctacgccggcgacaccgacctgcagctcgagcgcgtcaacgtctactacaacgaggcctcctgcggccgcttcgtgccgcgcgccgtgctcatggacctcgagccggggaccatggactccgtccgctccggcccctacggcggcatcttccgccccgacaacttcgtcttcggccagtccggcgccggcaacaactgggccaagggccactacaccgagggcgccgagctcatcgactccgtcctcgacgtcgtccgcaaggaggccgagaactgcgactgcctccaaggtttccaggtgtgccactcgctgggcggcggcaccgggtccggcatgggcacgctgctcatctccaagatccggggggagtacccggaccgcatgatgctcaccttctccgtcttcccctcgtccaaggtctccgacaccgtcgtcgagccctacaacgccaccctctccgtgcaccaggtcgtctagaacgccgacgagtgcatggtgctcgacaacgaggcgctctacgacatctgcttccgcaccctcaagctcacaaccccgagcttcggcgacctgaaccacctcatctcggcccacatgagcggggccacctgctgcctgcgcttccgggggagctcactcggaactccgcagc

SEQ ID NO: 171783 - DNA, 282 bp, Zea mays
  Clone ID: MRT4577_88249C.1
ttttgtttatggaaaatcatgtgggcgatgtcatgcttatccttacatacagcgttccaaagatctgcagatgcaaacattacccgatcattattaaccgattctgcgaacaacccacccaggacaccctgcatactctcgatggatggtccaacatacaccgaagggtgaatcaattggaaggcgcaaaaaacatgtgcgggtaaggtcttttgctactgaagaggtcctccatctaccagccgggtgcttatcgacgactgcatgacccgcatatatatt

SEQ ID NO: 171784 - DNA, 550 bp, Zea mays
  Clone ID: MRT4577_8824C.1
gcgtacggcctgtgacatgaaagggggaggctcatggcgagttctccttcttccttgctacacggagttgcgatccttgctctcatatgctgctccttgtcatgctcggcggcggccggagatgtagttgctctcgacggacgtcgtaatcagtggaaacctccgccgactccgttgccagggaagcagcatactccggtgagtccagtcccaactccggcgactccggtgccagggagaccggtgactccaaatcctccagtctctgttcctcctgcaccgtcaacgcccgtgcgcagatacccggtgaccccaagtgcttcaacccctatttgtgtgccgcggcctcccccggtgcagcgggaggtgtcggctctttcgccgcaccgcaagaccctacagaaggctgttaagaacgtgctttaattaagaaagcaccaaatgctaccgctcagacatattttctatgttatagtacaagaggattgtgttgctaatcaattaagggaatagataatatgatatcaatgtagtactccctccgttccat

SEQ ID NO: 171785 - DNA, 283 bp, Zea mays
  unsure (1)..(283): unsure at all n locations
  Clone ID: MRT4577_88250C.1
gagtaagctcggactccgctcgagctctcacctgncgtcgccgccatcggacactccaacgtgtggcactcgcatcccaagaactacggccctggatctacggcttgccgtatgtgcgctaacgcccacggcttgatccggaagtacgggctcatgtgctgcagacagtgcttccgcagcaacgccaaggacattggcttcatcaagtaccgctgaaacttggggagctccatacacggcaataactgaggcacgacatgggacctcanagatagcatgtact

SEQ ID NO: 171786 - DNA, 359 bp, Zea mays
  Clone ID: MRT4577_88251C.1
aaccacccaaaacaatagggcagggggggccacaaaatcgggccccgccggcggaagggggggtgggttatacaattataggggcggggggtcaaaaaaccaagaaattttgggcccgggggttagaaaacatccgccccccgaaaatttttaaaccaaatccttaaaattgggccagaaggggggggccacctttttaaaacggggctcgggcatttggaaggaaagggagggccgggtgcaaaatactggggggcggccttagcggggccctggtagggagcgatcaagacgggggggagggggtggaaaaggggggggtggggcccggggttcatgccggggacgatgacgagggg

SEQ ID NO: 171787 - DNA, 1140 bp, Zea mays
  Clone ID: MRT4577_88252C.1
atcccgcatcgcgcatcgcatccaccgccgagctttctttctttctttctttctttctttctttcttttttctgggagaagaggaagaagaggggaggcgcgacaaaaagggcgccgcgccacgcatcgcccccgacgccggcatctctccctcgctctccttctcccgatctgatccgaagcgcggcgtcgacgacgacgacctaagggcacgatgcattcgaccaacctgctgctggaggagcccatccggatggcctccatcctggagccatccaagaccagcttcttcccggcgatgaccaagatcgtcggcacgctcggccccaagtcgcgctccgtcgacaccatctcctcctgcctcaaggccggcatgtccgtcgcgcggttcgatttctcgtggggagacgccgcctaccaccaggagacgctcgagaacctcaagctcgccatcaagtccaccaagaagctgtgcgctgttatgctcgacacggtgggcccggagctgcaggtggtcaacaagagcgaaacccccatctccctcgaggagaatggcacggtcgttctcacccctcaccggggccaagacgcctcctccagcttgctgcccatcaacttctctggactcgccaaggcggtgacaccaggggcaacaatactcgtgggacaatacttgttcactggcagtgagaccacctcagtttggttggaggtttctgaagtgaaaggagatgatgtggtgtgtataatcaagaacacagccaccttggctgggtcactgttcacgctgcattgctcccagattcacattgacttgcccaccctgtctgatgaggataaggatgtaaggaactactctcgaaattgtgatttatatatccttgtgtaattgttgctttgaaatcgtctccttcctatcagaatttcacctttggtaacctgaaaatttggtggcggaactagatttgttgtaaagctgcagccttgtcctttagccaccctaagacttacatgcatgagttgctttcaggtcattagaaaatggggtactcccaataagatgacttccctttctctgtccctacacagacatgcagaggatgtgcgccaggcacgggaattcctgtcaaaattgggcga

SEQ ID NO: 171788 - DNA, 420 bp, Zea mays
  unsure (1)..(420): unsure at all n locations
  Clone ID: MRT4577_88253C.1
aaagccgaaagagcgggagtagaaccgccaaaactatcatgctagaactgcatgcaaaagattaccgaagggcgcactaacagcacatggcagaagcctaagtgctttttatgcatgcacagtcctacatggtgggggggggggagatgtttttcacaataaaagcaggcaactgaaacgtatggggacgacccactcggagctagaccagggagcgccaaacggaggacaggctaacatacaaggttcgnggaccggatgattggctacagttgttcgaagaacaaccaaagaatgcaaaattcaccatcaatcgctgtgggatgatctgatcaggggttcagtgcaagggccaagccaaacttgggggagctggccacggccttggtgtcgaattcaccacagatcttaaagagttac

SEQ ID NO: 171789 - DNA, 436 bp, Zea mays
  Clone ID: MRT4577_88254C.1
tagttaaaggcctctttccgatgcttgcagatcctcggcatccagccgaatcaaccagtaatacaaatgagtcagttctgaaggttgctctagaccatggcaaggcatgtggtgtgatcaagtcccatgaccgtgttgtcgtttgccagaaggtgggagattcatcggttgtgaagatcattgagctggacgattagggcatattttgccgaggccggaatttgttggctctatgtatattcctatagctttctttacaaatgagcagtttttccctatggtgccacatcataggacttgcttagcgatttaaaactcgattatgtgccacctaaatgggcagatggaacaatgaaatcatactgtgccctttatccgttgctattgttaacctgagcctgtttttttcgttttatttctcatcaaaagggttgct

SEQ ID NO: 171790 - DNA, 794 bp, Zea mays
  Clone ID: MRT4577_88256C.1
cattgggaccctcgaggccggccgggacacttttaaactttcgtacagagccatcagcttaagtaacaattctcaaacctacaacatgctactccgtctgtccttcatagcactcgttctttccatcaatgcctgcgtcgccaaaacaccctctccccctacaaacattcgatccctcttttctgtgcccgcaggcacccagctggattacccaccaactgatgtccccggcccataccccagggaaccatggattgcagcctaccaaaaggctaagcacgcgggtctcattccttcgcttccccaatcacaagatgaagacggttccgctgtgtaccctgcctcttaccgtggccatatttgcaatccgggattgaaccgctgcaactcctctgtcgatgttatcagtgctcctgctggaagagctggtatcagttttgacgatggaccccagcctccctcaatgccactgcttgaatacctcaagtcacaatctcaaaaagccactcatttccttattggatctcggattatcaataacccagacacatttcaagccattgataaagccgagcatcaccttgccgttcacacatactcccatcctatgatgactacactctcagacatcgagattgtcggcgagctaggatggaccatgcaattgatccacgaccgcagccgcaagggtgtgatttgcgctcattggcgccctccctatggcgacattgaccagcgagtgcaagctatcgcaaagcacgtggttggctaaagagcattctctggctgtatga

SEQ ID NO: 171791 - DNA, 712 bp, Zea mays
  unsure (1)..(712): unsure at all n locations
  Clone ID: MRT4577_88258C.1
gcagccgttgggccactttatttgcgcttccccggacaagggaatatacnnaggtcccaatggccctgccctttcactngtggtttcagnagnaaaggcgcttcttcatgccgtttgnagaattcaatgggatgttctaccatgnacnnaccgttcattcanngtttgcttccttacatnnacaatgnnaatatngnntgctgtnactaatgcacgagatgagggnagnacnnagtgcactaaacctaaagtatcccttcggggnagcactctgcctactaagtgggctanngggtgtagagcttggcttggcatttcacctgtggnncggccttcnnaaactagtccanngtgacatttcaagnctgtnatcattccctaacctaggcagnatctaggnaagaaaactaatgactaaccctctaatcaaggnactaaagnnttgatccttcnnctgggagggcttcnnnacgacctcacagnnaattgcgttgatnnattgagtctgtcttagctttacccagcctnnagcttcctttgcagccacnncgatgtaagaaaaactaatgatcaagnncttgatgagaatgggctttattggtagggtntnngttgcgaattggnngttgggggaaaaatnncgtgattattatnnttttttacttgttgnnaagaagtgccattagtnntaacattgtnannaaaatgtgtc

SEQ ID NO: 171792 - DNA, 281 bp, Zea mays
  Clone ID: MRT4577_88259C.1
atttatacatcaaatccacacgctttatatttgctacattagccactggatctagggttagttgccaatcaaccgaatatatatcctctacattcaatgcatgaccgataatgaatttctcctttcatactatttggaacattcctaaaactgtctgtgtatgacagacgatatctatacgtctaaacctcactggatgaactatatggctacctcatggtgatggtttacttcatctatgccaactcatttagatctactgatatgactcaattacacat

SEQ ID NO: 171793 - DNA, 633 bp, Zea mays
  Clone ID: MRT4577_8825C.1
attgggtacctcgaggccggccggggaagatgaagagggcgttctcggtgaggacactaggcacggcggggcagcccggtgctgctcgcctacctctaatcacccgaagcgccgtatgttagtactacgacgtgtctttcgacccgcgtcaacacactttgttctcggtaaagccaacaactcctttacgcccgttgctaaccaagataggacgagaaaaaagacacattgacatagcatagccttatacaatccctaatcatactagaagacacgatcctattagggctcttggagagagcacaggtcatgtacaatgactagatagcatatagatagaaatggttatcccctgaatgtgatacgaagattctttgttcgaacatatggtcatacaaactgagaatctccatgcacacggtgtcagatacgacatgccacatgagcacactatctttcctgacgatctggctgacaccccggtgacaactatgcaggacgccaggcgtttgcatcccattgctgattgtatcgatatctgcaaagatcatgtgtgaaactcttccaggattgctgacataaagaagtgatagcaatgctggatccactgctctttgtgatacgagctgtttg

SEQ ID NO: 171794 - DNA, 360 bp, Zea mays
  Clone ID: MRT4577_88260C.1
attcggctcgagctcttacacagccagccttcgtgcgctcttgctatcgctctgtgtgtgacgagacttggcgggctaccgccggtgctctcacacaggacgcggacgcgttgaccgaccacttggccggagagaggactcaccaggaatgggcctgtgcacataggtcgagggtgatgagcttgttgcaaatgcggtagcgatactgaacgaagaccgcttgtaaggtccaaggggatggagcatgtctgaagtatcatgaaactggcaaaccatgaaagacaagggccagatctggggggatatctacggtacaaaggttatgccgatgccacaaattagctcttaacgctctacatt

SEQ ID NO: 171795 - DNA, 534 bp, Zea mays
  Clone ID: MRT4577_88261C.1
taggaattcggacgaggctctcgctccctcgggcctacgaacggtgcacaggatgtgccccggtcccttccccgtatgagttggcaccagttgaggcaacgaacaatcacaagccgggggggtaatgcctggcgtacaccataaggtatacccttggacggacgggatagcagcgggccacatatatctatggatggtcagctggctaagtatctgcagatgtaggggttataactacagctacgacactgcagtttgaagctcgggcgcatcacaatgcaggaagctgatgatacatcttcccgcaactaagaagctgcgtgtgcgtagttggtgcgagtatggatcatcatgctgctaacactattagagtagagagacttcgacgctgataaaatttaggacagttttgacgagttaacttccagacttattaatgaacatatagggaagaaggggcagactggtatgcttatagcaagaactggccctgatgacacgggcgtgaagactattcagttgactctgactaat

SEQ ID NO: 171796 - DNA, 236 bp, Zea mays
  Clone ID: MRT4577_88262C.1
gggtcggtcctcccctgtgaggctccccgtcatggggcgcgctgcagaccaaccataagccgacgccccgttgtctcgctggtggttgtcgaagccgaacccttctttcagccggtctgccgcaggcctccactccgcctgatgctctctcagctagagaagctttggagatacgaaagcgcccggatcatcgggcgcgtctgcaccgactgggaaaatggaaaacatacgtgcac

SEQ ID NO: 171797 - DNA, 264 bp, Zea mays
  Clone ID: MRT4577_88263C.1
ggggaaaaacaaaaacaccctccttgagaccccaggaatcaatttttggggttccccagaaacaaataaccgggttctggtttgggtaagctttacatttgggccctggttcgcccttgttttgacacgatttggtccaattggtgtcacaaaataaatggaaaccttcttctttgcccttcaaagggaaatttccgaccccttctgggtaccacattggtcccactctcgggggcctcaggggtggcacgtttttgggggttt

SEQ ID NO: 171798 - DNA, 374 bp, Zea mays
  Clone ID: MRT4577_88264C.1
tttgaagagatacctggttcttcctgtgcaagctggccaatttttgcatgcagttgatcatttgttttcttatgcagttatatcctttcttttccttaaaatagcctgtagttttgctgccaacttagtctctttgtctccattgtagatcagggccaaggtagccacatttggatttggaggaccaactgaggttacttctggtggcaacgccttgaagttttatgcatctgttcgcttgaacatcaggcgtattggtttggtaaagaaaggcgaagaggtattgcatatgtttggcatttacctgattagtttagtctcatactataacgtatgaaattcagtaagttcacagcgtgactttgatttaacag

SEQ ID NO: 171799 - DNA, 228 bp, Zea mays
  Clone ID: MRT4577_88265C.1
ggtacctcgagccggcgggaaaaactcacgcctgaagacctagatcttctgctcttgagcgaatgcgccagctcgacgctcttctctctagtatgctccgcggacccgaggaacagagagcggctggcgcagagctccggctcctagcgaagcggaacgcgaacaagcggatctgcatcaacgagagacgctgccgtccccttgacgctgagccacctgtgttccggt

SEQ ID NO: 171800 - DNA, 379 bp, Zea mays
  unsure (1)..(379): unsure at all n locations
  Clone ID: MRT4577_88266C.1
ccgccagtgtgcatgnattcgccctgtagcagtggtaacaacgcagagtttttttttttttttttttttttttttttttttttgggaanaaacgaagaactttgcatggaaaacccggaccccaggttccatgcacagttcttagttgttttcccacagccttattctcccctttttccccaaacaaccctccttcaaaaccgctgctttggggcgttttcccccacccccccgcccgcccctagcaaacctgtgccccccccccccctcgncgnnnncacncncataactgnntccccnnncanccttccttccccccccnncccccccccccctcnntccccccccccccnnnnnccccccccnccccccccctttt

SEQ ID NO: 171801 - DNA, 1130 bp, Zea mays
  Clone ID: MRT4577_88267C.1
ggccaatgaagttctggaaattaccacacggtgtgtcactgacagagtgacattctccacaaaagatgtcatatatccaatttatacctcgagatgcgattgaactaagccatttttctcccctagtataaaagctttacaaaaaggttacatcctgtctatgctacccagtaaccgatgcacatagacctgataaactgatacaaacctacggctaagctacgaagcatatacaggggcatgtactgatgagactggtttacacacaacacaacagctaattgggcatcttcgacggagctcatggaggttagcaacaagacaccctggccatcgaccggaaagaacgcatcatggccgatgcgaaccacccttctttccccgtcaccagaattagcgggattcttctttgactcattggataacgcaaacacatgtcgagatgccgtctccgtcgtcaagcaggtctccgcattcgcttggctcgtactccttaatctctgtcagatctttccccagcaaatccagccactttacattgcctttgtcggcacacctgtcatcgccgcagctggttctcttcaggcaactcttagccggcgccgtcgccttctcgtcatcctcgtgcttctcagcgtcgccgtcctttccggctaccggcacctctatcttctgaaccggaggcggctcctcctcggcgacggcggccgggcgcggcgccggcgcggaggcagcgtcgcggctggcatctttggatgggaggaggcaggggatgaaacggaaggggccggcgcagtggctctcacaatgggagagcctcatcaaagtcgggaatgggggagtacgggaagctgttgacaaaattacagcccctggctccaagagcgccccgcatcaatcgaatctggcgactgcccgaggagcagatcgaggtgctgtttacggaaagcaaccacaatagggcctgccaacaacaggaacaacgaacctctgtgcaggataactgcggaagcaaggagaactgtagcaggttgaatcttgcactgagggctgaggagctgtactactactggtctactagcttgacagggagacaaggagcagaagaggaggctgtgtgcgaatccgcg

SEQ ID NO: 171802 - DNA, 468 bp, Zea mays
  unsure (1)..(468): unsure at all n locations
  Clone ID: MRT4577_88268C.1
tccacgcgtccgactacccgtcaagccaccgcaaatttaccagggcttttacttactctaaaaacagctgttcatgatgcttacctataggagatcccatattatgacacccactcctgtggctgatggatctccctgagaagatccataataagccccataaaacaagtgacaacatatgaaatctaattaaagtgatcatcgttattctgcccgaaggagggcatgcctaatatgatcataacatttatgcgttcaataaggcactgaatgctgaaccgaaagatgattcttattctgaaatgcctgctatattanctgcaatcatactgcgttgcaaatactttcgaacatgctttggacatgctcttgaaagcccatgccttcaagaggatgacgaatgactttctgtaactatctgcccggaaggtgaagcacagtatgatcggaggcttatagaaagaaaat

SEQ ID NO: 171803 - DNA, 417 bp, Zea mays
  Clone ID: MRT4577_88269C.1
gcgaagacttctggattgcccatacgacatgcaacaactgcaaattttcttttatgttttttttaaagttttcttccccaagtatctctcatatatgccactgcttgtatgggcatttatatttgcctgctctgctagtatggttgttctttcatattagtttatggaagatgatgaatcttttaagccggaagcttctcatatgatttcatgacctcaggtccctccggcaaaataatgcttctgcctgaggaggatccaaacgcaacccatatcatgattgccacgggcaccggtgttgcccccttccgtgggtacctgcgtcgcatgttcatggaagatgtcccgaacttacagatttggtggctttggcctggctcttcctcggcgttgctaattcagaccgccttttgtatg

SEQ ID NO: 171804 - DNA, 395 bp, Zea mays
  Clone ID: MRT4577_8826C.1
aaaagggggctgcggccaagagaacctccgcggcgctgacgaggggtttttaaccccacacagatcggatggaccagcgctgcgaggggtaaaccactctaagggaagttggcgatgacggatgggatgaccagcgcggaagctcggcagagtatatggggtcattgggggagaagcatactgagggagagcgtcccgaaatggtcaaagaggaagatgatgatgctaatgcaacgggcgaccatatctgaggtcctgaatctgaaggcgcgcaagataaaggacaccgactgcgatttttttttttaggagccccgccgcgggtacgaaaaggagaaaaaaggggtcagctccgctgctgaggtatgaaatgtcatgaccaacctaggcgcaga

SEQ ID NO: 171805 - DNA, 273 bp, Zea mays
  unsure (1)..(273): unsure at all n locations
  Clone ID: MRT4577_88270C.1
tgcatatctgggcggaccgaccctccaaggcgggggagtttaattagaatagcccttcgcttcacccgcccnggcatcggaaagtgggatgaagccagagaaacggcgggcactgaaagggcttacagtacggctcatctaaggagaaggaggaccttcgacaggacgcaacacctagagttaaagatactgggctacaaaacagctctgcggcaagaatacgaagaagggagcgaaaactcagtgccgaaggaccatacgaaaccagccaaa

SEQ ID NO: 171806 - DNA, 268 bp, Zea mays
  unsure (1)..(268): unsure at all n locations
  Clone ID: MRT4577_88271C.1
accaccnacaacatcatcaatcaatacatatctataacgtatatcctactatatatctcattaccataacaataaccatatccatatcttttacagatactaacaactcttccacttctaactactactttttcaatacataccaagaccctcctaataacataaatatcttcctatacccatattctaccttcaaaaaaccattcattatgtacaacaacatccttttgatcttcgattttatacaccttaaaacattatctcaatt

SEQ ID NO: 171807 - DNA, 105 bp, Zea mays
  Clone ID: MRT4577_88272C.1
ggcaatgtggtgcacactttaaaactttgaactccattttagtcagcctccaagggcagcattgcagtcgcaggcaatgcttagtcgtgccttcatgccattctt

SEQ ID NO: 171808 - DNA, 732 bp, Zea mays
  Clone ID: MRT4577_88273C.1
aggcgagcaagcgcagtgcgtttctccggccagtgatgtacgacgacgacgacgaaccttcgtccatctccatgtccctcgagctattcggctaccacaacggcggcgacgaggccgccgacggtagtggctccgcctctgctctctcgctgcagctcgccttcgacgacgacagcttcgtcaagggcgggtgcgagtgcgacgactccggcggcggcggtgcctcggctgcagactactactactacggcagctgggctggcgcctacggtggctccggcgccacgtccagcggctccaactcgtcggtgctcagcttcgagcaggccggcagcggcggacagcgtcatcacctggtctatggcgaagacgggtgcgcgctctggatggacgacgcgggcgctggcatggtcgtcgagcatccgccgccggcacagcagcagcagcagcacggatctggctgcgacttcggactcatcggcagctcgcctgatgatgccggcttacacatccagctggagccggggactgtccagctgccggccaaggcgccgccgcacaagcgtgctcgccgggacggtgatcaggtgcaagctgctgcagcggcgaagaagcagtgtggtggcgtgggggccaggatgaagagcaagcaggccaagctggctgctcctgctcctaccaaggaccctcaaagcgtagctgcaaaggttcgaagagagaagatcgccgaga

SEQ ID NO: 171809 - DNA, 843 bp, Zea mays
  unsure (1)..(843): unsure at all n locations
  Clone ID: MRT4577_88274C.1
cgtacacctgctcgcagtcgtccttaattgcgcacgcctatgttcttgtgtcggcggtcgtcagatccgagtcgacaaggagatgagatgagggagaagttctacagggcgctcatcaccaacggcatgcgcaatgccatcggggatagcgacatcgccgacagcaatgtctttgtcctggcgctttactgttcgaacatcaagatggagagccctgagcccctgatgcgtcgaaggccatggaggcaggtcgcagtggcggaccctcagctgctgaggtggacaagtacttggagaagtattgcaaggaagttgagatctacgtcaaggttgttaaggaattcgtacttgcatctctttgatggttattctggttctaaattatggatgttcaatgtaatgccagtgaaggaaaggttgacatggatgaaatggtggcaacaccagttcaggatggacaacaaccgaatcttctacataagttgtttctaatgtgctaccaagctccaatgtgttatataatgttggttttagtctgcctccatgaaaagctccacaacgacagtttctacaaatgttcaacaactttaggatcaactggaggatgagatgcaagaaaaagatggacttctggaagaactggaaaccttaaaggctcaagcacaggcatctcaggagaccattgnatagtatgaagaggtcgatggaagaaaataacaacctctttcgtcaactattaagcttcagtagaggccaggtgcatcccatcttaagtgtggttgaccactatatgacatatagccttatgtcgtagctctgggatttaaagntataggattattt

SEQ ID NO: 171810 - DNA, 969 bp, Zea mays
  Clone ID: MRT4577_88275C.1
gccggccggtccgggagttacgtaacctgctcgcggtcgtccttaattgcgcacgcctatgttcttgtgtcgacggtcgtcagatccgagtcgacaaggagatgagatgagggagaagttctacagggcgctcatcaccaacggcatgcgcaatgccatcggggacagcggcatcgccgacagcaatgtctttgtcctggcgctttactgtttgaacatcaagatggagagccctgagcccctgatgcgtcgggtttttgttttgactgcacctacgtgtggatgctgccaagcaagaaggccatggaggcaggtcgcagtggcagagcctcagctgctgaggtggacaagtacttggagaagtattgcaaggaagttgagatctacgtcaaggttgttaaggaattcgtacttgcatctcttttatggttattctggttctaaattatggatgttcaatgtaatgccagtgaaggaaaggttgacatggatgaaatggtggcaacaccagttcaggatggacaacaaccgaaatcttctacataagttgtttctaatgtgctaccaagctccaatgtgttatataatgttggttttagtctgcctccatgaaaagctccacaacgacagtttctacaaacgttcaacaactttaggatcaactggaggctgagatgcaagaaaaagatggacttctagaagaactggaaaccttaaaggctcaagcacaggcatctcaggagaccattgatagtatgaagaggtcgatggaagaaaataacaacctctttcgtcaactattaagcttcagtagaggccaggtgcctccatcttaagtgtggttgaccactatatgacatatagccttatgtcgtagctctggatttaaagttataggattattttcaattacacttaatgttaaatactttgagttgaagttataggatttgctttggatttcaagtt

SEQ ID NO: 171811 - DNA, 1069 bp, Zea mays
  Clone ID: MRT4577_88276C.1
cattgggtacctcgaggccggccgggaatacgtaacctgctcgcagtcgtccttaattgcgcacgcctatgttcttgtgtcggcggtcgtcagatccgagtcgacaaggagatgagatgagggagaagttctacagggcgctcatcaccaacggcatgcgcaatgccatcggggatagcggcatcgccgacagcaatgtctttgtcctggcgctttactgttcgaacatcaagatggagagccctgagcccctgatgcgtcgggttcttgttttgactgcacctacgtgtggatgctgccaagcaagaaggccatggaggcaggtcgcagtggcggaccctcagctgctgaggtggacaagtacttggagaagtattgcaaggaagttgagatctacgtcaaggttctaaattatggatgttcaatgtaatgccagtgaaggaaaggttgacatggatgaaatggtggcaacaccagttcaggatggacaacaaccgaatcttctacataagttgtttctaatgtgctaccaagctccaatgtgttatataatgttggtctttagtctgcctccatgaaaagctccacaacgacagtttctacaaatgttcaacaacttcaggatgaactggaggatgagatgcaagaaaaagatggacttcatgaagaagtggaaaccctgaaggctcaagcacaagcatctcaggagaccattgatagtatgaagaggtcgatgaaaggaaataacaacctccttcgtcatatattaagcttcaatcgaggccaagtgcctccatctttaagtctggttgaccacaataggacctgtagccttctggatgcaatagtggctagttacaatatgcttaatatttagtacttgagttgaagttataggattttctttggaattgaagttaaaggatttgtagatatatgttttgacgttatatgattctctaatggatgaaatattcgtgttcaacatattaatatgatattttggttgtgatgtgtaatattccatgatggtatgaattcatacgatgtgtttcttttgatgccgatt

SEQ ID NO: 171812 - DNA, 910 bp, Zea mays
  Clone ID: MRT4577_88277C.1
cttaattgcgcacgcctatgttcttgtgtcgacggtcgtcagatccgagtcgacaaggagatgagatgagggagaagttctacagggcgctcatcaccaacggcatgcgcaatgccatcggggacagcggcatcgccgacagcaatgtctttgtcctggcgctttactgtttgaacatcaagatggagagccctgagcccctgatgcgtcgggtttttgttttgactgcacctacgtgtggatgctgccaagcaagaaggccatggaggcaggtcgcagtggcagagcctcagctgctgaggtggacaagtacttggagaagtattgcaaggaagttgagatctacgtcaaggttctaaattatggatgttcaatgtaatgccagtgaaggaaaggttgacatggatgaaatggtggcaacaccagttcaggatggacaacaaccgaaatcttctacataagttgtttctaatgtgctaccaagctccaatgtgttatataatgttggttttagtctgcctccatgaaaagctccacaacgacagtttctacaaacgttcaacaactttaggatcaactggaggctgagatgcaagaaaaagatggacttctagaagaactggaaaccttaaaggctcaagcacaggcatctcaggagaccattgatagtatgaagaggtcaatggaagaaaataacagcatccttcatcaactattaagattcaatcgtggccaagtgtctccatcttaagtctgcttgaccactataggacctgcagccatagtagttctagatgtgaagctatactatcattttcaattattcttaatgtttaatactttgagatgaagttataggatttgctttggattttaagttaaaggatttgtatatatatgttttgaagtt

SEQ ID NO: 171813 - DNA, 902 bp, Zea mays
  unsure (1)..(902): unsure at all n locations
  Clone ID: MRT4577_88278C.1
gtggaagccctgaagcatagggcctaccagaatatagatgtcctgcagcctaactacaagatggtgaacaactaccctgtgctctgcagtctccctgctgctcagggtacttccctgtttagcgctcttcatccaaatcggcagtcactcagctatggcgacagctcgactggtgtagggtttggaacaaggccttcaagggagactttcaacacatcccttggatccagtaatgagccacaaacttccaactatatggagttaagacatgagcaaacaataaacagaattctaccatatgatccaagcaatggaaccttgttacccagaccgagaatcacccagttgcagataccaaactctggtagaacattttttggtcctcctgctgttattccaaacaacattctggttggtcacggtgttgcgctctctgaaggaacatacagtggctttcctgtcgacagtttatcgtctacggatgtggtcatgtcactgatgcaatccccattccagcttccgacaaacagtgaccattctgaacagcaatgcaatggtcaaacatcaacgcagttacaacagtttgtcactagatgccagccatcaagaacaaacagtttcgacttgaactcgtgcgacgaactcatacagaacttcatttcccagatttctaacagtggaggggcatctacgccactttcaccccgcaaatgggtcaagatcagagctgcgttgaagctggcatctgtagggaggctctcaaggaggngtccgcattgcaacccaccaaggccaaggcttgtaccgatacatgagcactcttaagaggcatcgatagtttttttttgtaaaatatacaatctaggatcaaagatccatcaagatattgaactctatagtat

SEQ ID NO: 171814 - DNA, 299 bp, Zea mays
  Clone ID: MRT4577_88279C.1
aaataaaaaaaaaaaacctaaacataggtataaccaaacatgatcaacggaacataacggggccaactcacaaacaaggcctatcaaaacataataacccaacccatgttccagaacatgctgagccaccgacgccacagtccatgccagagcgccttctacacctacgactccttaatcgaagccgccagcaagttccccggctttggcaccaccggcgacgagcagacacgcaggcgccagctcgccgccttcttcggccagacgtcccacgaaaccaccggtagatgggcgactgc

SEQ ID NO: 171815 - DNA, 287 bp, Zea mays
  Clone ID: MRT4577_8827C.1
tattcaaaggattaaaattgatagagaagcataatctattacgttcttccgagactgcactgcagctcatttgaaacacacatttccttgtagtaaaacaaacgcatcaacccctttgcctggtcatgccacgaaactcccacctctgggttctcttcgggatcgtgcctggggcagatccgatccgagtcggccggtacgtcctcttctgatccgcatcaagctgtcgctagagatggcaatgggtacccgaaacccgatgggtttttaccctattagggtacggg

SEQ ID NO: 171816 - DNA, 214 bp, Zea mays
  Clone ID: MRT4577_88280C.1
atttcatccaccgttctctcttccactgatcttctctgcctgactgagatacagcgcacctcgcctcatcaccgcgtttcctccgttattccgggagaaaatgtgcgatgccgaggagatccgttccctcggctgcgacaaaggaactggtatggtcaaaggtgggtgtcgtggacatgacgccccgaagggcgtcttccccagcatcgtgggg

SEQ ID NO: 171817 - DNA, 635 bp, Zea mays
  Clone ID: MRT4577_88281C.1
cttgctcgctgcgccgccgcctccgacatcgtcccttcgtacccgcgagcaaccgataatcctccgtggttgagatgttggcttatcaggatctcctatcgtggcgacgcagctcctcgtcggattcattcacctacaacgagctcgaccaacgccatcctgcgagaggtcgagggaaagagggtcacccacaggtcctgttaatgtggacattgctgccaatccatccgccgagggtggtgaggacgaaagagctgatgacacagctgtgaatgtggctgatattgttgacacattccgtctacaggagcaacctccttttgacgagaaatcatttgtgtcttacatcctaaaatacatcaagaatctcactgctgtgttagagccaaagaaagcgaatgagatctaaaagggtgtcgagggtgcaaccaagtatctccttaacaagctgaacgacctccaattctgtgctggtgatgtccatgaaggatgatgcgacatgtgctattcgcctattacaatgatgccgccactaatccgacattcctctatgtctctcatgggcttaatgagatcaagtgctaagcgcgcggcgagattagttacccgtgttgggtactatctatgggctatta

SEQ ID NO: 171818 - DNA, 404 bp, Zea mays
  Clone ID: MRT4577_88282C.1
ggtaggggaactttcagaacaacgggggtggttaatactgggatggcgcctcttcccaaaattgggaagaaaaaggcaaaagcggtgtcatgggtaaaatagattatgggtcaaaagttgacgaaagacaggaacgagaaacaaaaaatgtaacctacggaggaccaaaccaggaaaataaatcaaaataatagcgggccgaacagtggcccgaaaggacgaaggaaaacacacgggccaacggaaataaagaaaccgacaacgacccggaaaagggcgtaagcatagtaggcgcttttccctttgagaaattaataaccccctaagctccgcacatcagacggggggaaagcataaagttcacacaaaggggggtataacggttgtcccaaaaaacggggaaa

SEQ ID NO: 171819 - DNA, 239 bp, Zea mays
  Clone ID: MRT4577_88283C.1
gtcaggacaaccttgtaggcgaacgactgcagagttaggacctgttaccgatgaccatagcggctgtaaccaagaccagacccttaccaatcgactcggactgagttgacacagcgagcgaacgtgatagttaacccgcggattacatgcacgctttggccatatcgaacgcagagggacaagtagaacgccgtggaagacaaggaactggacaggaaccaacaccctccgtttcacag

SEQ ID NO: 171820 - DNA, 413 bp, Zea mays
  Clone ID: MRT4577_88284C.1
tatatacacatcttgccatcttgttcattgcaaaatttgaatgaatcaggatccagcagcacttagaacacaaaagaagtgtacactgcctaatgccgacagggcctaagtttttacatgcctctgctatacacattttctttgctcttctaccggtcagtagtcctcccatattcttgcgcacacaagcactcctcccagctcaaaagaatacccggtccagtaccttgaatccctgtgctatgggatgaaaaaactcatcaattctgtacacggttgccccggaagactggagcatcggtcgtggtagtatgatctaacgaacctgcgctcgatctggccttcatctgtgccctcgtagcccatatacagtgctgcatgtactgccggtggatagacctcgctgcacatgc

SEQ ID NO: 171821 - DNA, 465 bp, Zea mays
  Clone ID: MRT4577_88285C.1
gccggccgggccgcgatctccactcgctagcactagcatagccgtctctttcttttctgcttccagacattgtccacgagctggtgcactggtgtcgctcgcaaccaaattaaggactgagccatggcatccaagggcgtcctcttcttggctctcaacctcctgttcttcacagtggccaacgcctgcggcagctgcccgaccccaacgcccccggtcgagccaccgccgccgcctcctgctaccccacccccttcatcctccagtgggaagtgcccgctgaacgcgctcaagttcggcgtgtgcgtcgtcttcgatgtccctatcaagttcaatgccctctttttttactgcggcaagcgcgcgcccaagggctacatgtgtgcgtaagctccgcgcggttacacgctcgtagacgttcgcgtgcgtaattaagcatgcacctgcatggcacacatgtattgt

SEQ ID NO: 171822 - DNA, 861 bp, Zea mays
  Clone ID: MRT4577_88286C.1
cctcgaggccggccgggccgggatctcatctccactcgctagcactagcatagtcgtctctttcttttctgcttccagacattgtccacgagctagtgcactggtgtcgctcgcaaccaaattaaggactgaggcatggcatccaagggcgtcctcttcttggctctcaacctcctgttcttcacagtggccaacgcctgcggcagctgcccgaccccaacgcccccggtcgagccaccgccgccgcctcctgctgctaccccacccccttcatcatccagtgggaagtgcccgctgaacgcgctcaagttcggcgtgtgcgtcaatgcgctcggcctcgtcaaaggcgaggctggcaaggtacctgctgagccatgctgcaacctcatcaaaggccttgcagacttcgaggccgccgtctgcctctgcacggccatcaagggcaacgtgctcggcgtcgtcttcgatgtccctatcaagttcaatgccctcgtcaactactgtggcaagtgcgtgcccaagggctacatgtgtgcgtaagctccgcgcggttacacgtacgctcgtagccgttcgcgtgcgtaattaagcatgcacctctgcatctggatggcacacatgcattgtgtgtctgctgatctctactgtctcatttgtgcaccttaggttctacagtcctagaaccatattccacgcaaattcttgtcagttaattcacatgtattgtctcttgttgaatttctatttttgttttgttttgaatttgaacatttgtttataagagtttggcatcttcttctccaacaagaaaaagaggagtgctgcttctagtttttatatctacgagtcatgcgtgtaatc

SEQ ID NO: 171823 - DNA, 1030 bp, Zea mays
  Clone ID: MRT4577_88287C.1
ggaaccaacacacctttagtcaaataaacgcacctagtcgggacgtaatggacgaaaagccaatgcgggggtaattatgagcgatgacgaagaggggtagtaaaaaaaaatcccatctccactcgctagcactagcatagccgtctctttcttttctgcttccagacattgtccacgagctggtgcactggtgtcgctcgcaaccaaattaaggactgagccatggcatccaagggcgtcctcttcttggctctcaacctcctgttcttcacagtggccaacgcctgcggcagctgcccgaccccaacgcccccggtcgagccaccgccgccgcctcctgctgctaccccacccccttcatcatccagtgggaagtgcccgctgaacgcgctcaagttcggcgtgtgcgtcaatgtgctcggcctcgtcaaaggcgaggctggcaaggtaccagctgagccatgctgcaacctcatcaaaggccttgcagacttcgaggccgccgtctgcctctgcacggccatcaagggcaacgtcctcggcgtcgtcttcgatgtccctatcaagttcaatgccctcgtcaactactgtggcaagtgcgtgcccaagggctacatgtgtgcgtaagctccgcgcggttacactctcgtagccgttcgcgtgcgtaattaagcatgcacctgcatggcacacatgtattgtgcgcctgctgatctctcctgtctcatttgtgcaccttaggttctacagtcctagaaccatattccaggcaaattcttgtcagttcacatgtattgtctcttgttgaatttctatttttttgttttattttgtatttgaacatttgtttataagagtttgccatcttcttctccaagaaaaagaggagtgctgcttctagtttttatatctacgagtcatgcatgtaatctgttgagagtcatgtgtttgtgtatgtaaaaccaagcacttgaatttaatatatacttattcgatttgtgcttaaaaaaaaaaaaaaaaaaggccccta

SEQ ID NO: 171824 - DNA, 899 bp, Zea mays
  Clone ID: MRT4577_88288C.1
atcccatctctcactcgctagcactagcatagtcgtctctttcttttctgcttccagacattgtccacacgagctagtgcactggtgtcgctcgcaaccaaattaaggacgtactgagccatggcatccaagggcgtcctcttcttggctctcaacctcctgttcttcacagtggccaacgcctgcggcagctgcccgaccccaacgccgccggtcgtgccaccgccgccgcctccttctgctaccccacccccttcatcctccagtgggaagtgcccgctgaacgcgctcaagttcggcgtgtgcgtcaatgtgctcggcctcgtcaaaggcgaggctggcaaggtacctgccgagccatgctgcaacctcatcaaaggccttgcagacttcgaggccgccgtctgcctctgcacggccatcaagggcaacgtcctcggcgtcgtcttcgatgtccctatcaagttcaatgccctcgtcaactactgtggcaagtgcgtgcccaagggctacatgtgtgcgtaagctccgcgcggttacactctcgtagccgttcgcgtgcgtaattaagcatgcacctgcatggcacacatgtattgtgcgcctgctgatctctcctgtctcatttgtgcaccttaggttctacagtcctagaaccatattccaggcaaattcttgtcagttcacatgtattgtctcttgttgaatttctatttttttgttttattttgtatttgaacatttgtttataagagtttgccatcttcttctccaagaaaaagaggagtgctgcttctagtttttatatctacgagtcatgcatgtaatctgttgagagtcatgtgtttgtgtatgtaaaaccaagcacttgaatttaatatacttattcgatttgtgct

SEQ ID NO: 171825 - DNA, 910 bp, Zea mays
  Clone ID: MRT4577_88289C.1
atcccatctccactcgctagcactagcatagtcgtctctttcttttctgcttccagacattgtccacgagctagtgcactggtgtcgctcgcaaccaaattaaggactgaggcatggcatccaagggcgtcctcttcttggctctcaacctcctgttcttcacagtggccaacgcctgcggcagctgcccgaccccaacgcccccggtcgagccaccgccgccgcctcctgctgctaccccacccccttcatcctccagtgggaagtgcccgctgaacgcgctcaagttcggcgtgtgcgtcaatgcgctcggcctcgtcaaaggcgaggctggcaaggtacctgctgagccatgctgcaacctcatcaaaggccttgcagacttcgaggccgccgtctgcctctgcacggccatcaagggcaacgtgctcggcgtcgtcttcgatgtccctatcaagttcaatgccctcgtcaactactgtggcaagtgcgtgcccaagggctacatgtgtgcgtaagctccgggcggttacaccttacacgtacgctcgtagccgttcgcgtgcgtaattaagcatgcacctgcatctggatggcacacatgcattgtgcgccagctgatctctcctgtctcatttgtgcaccttaggttctacagtcctagaaccatattccaggcaaattcttgtcagttcacatgtattgtctcttgttgaatttctattttttgttttgttttgttttgtatttgaacatttgtttataagagtttggcatcttctccaagaaaaagaggagtgctgcttctagtttttatatctacgagtcatgtaatctgttgagagtcatttgtttgtgtatgtaaaaccaagcccttgaatttgtaatatacacttattcgatttgtgtt

SEQ ID NO: 171826 - DNA, 414 bp, Zea mays
  unsure (1)..(414): unsure at all n locations
  Clone ID: MRT4577_8828C.1
ccggggcccctgcgcgcgccgtgccggccgtgggacagcgcccgcgggggccgcgggggatctcggctgttcccggccaaggcggcgtcggcatggtgcacgcgcccaacccgccaacagtacttccgcacgtcggcactgagagttgaggcaccgcaaaagtacacctcgttgaaaccggttccggccctcgggcggggcctatggccgccatcctgggggaccagacatggaaggccgtttgtggcgggtcggtcgtgctaccgncgatcctatgcgtgtgacgcgggctttctttgatcaccaccaacttatagaccacaggagactgtataatgggactggccatggatattaggaatggccgggcgagcgttttgtcatttgataccgagtgtgcctcggtgttgtttt

SEQ ID NO: 171827 - DNA, 181 bp, Zea mays
  Clone ID: MRT4577_88290C.1
aagaatggagggtgctctgcctccggcgtatcggatatgtccgataggagtctgcggggggggtactctgcacccgcgtggattatgtgttgaccttcgatttcactcatcaacctactcatgcgccttcactgatgcacctttaagaagaaggcaccgtatgccattttggatatctatt

SEQ ID NO: 171828 - DNA, 214 bp, Zea mays
  unsure (1)..(214): unsure at all n locations
  Clone ID: MRT4577_88291C.1
gcccctagtctcctctgctaaagtnttggacaangcagggtcatcagtgatgatgatgttgtcaaacagagtgcccgatttaacctgccacagatcattgccaatgtacttcaagctgtcgaaggcgtaaatgcatggtttatccttagagggtgggttgataatcataggtgcctcccattaacaatgctagttacggttcttgacccccctt

SEQ ID NO: 171829 - DNA, 369 bp, Zea mays
  unsure (1)..(369): unsure at all n locations
  Clone ID: MRT4577_88292C.1
agggancaatttttcatttttgggggtgagtacttttgagatatacaattgaggactactggataaccaacaaatcttcagggaaaaaatatttcagaccagtcggagtcactgctgtgtaccaccgggaatctcagggctgatcgctaagttcagtttgagcattcttcagaagcaaataaaacaggggggagagcccttatattttttcggttcccccgcccctccccaacccgaaagcggagaggtttttgttctgccagaatccccaacttcttctgccctttgcttcccctttggggtgccggtggcctgctgcgccctctggctcgttgcccggctcgccgcgctggccggccccgctttgtt

SEQ ID NO: 171830 - DNA, 630 bp, Zea mays
  Clone ID: MRT4577_88293C.1
agcgtggtcgcggccgaggtacacgaggacaagagttgagatatcattggctgactcttccgagaacatgctggctgacacttacgtgtggagtgatgcagaggatctcaatctttatggagaatggaattttgaggagtggaagaaactgcacatgaaggatttccttgcgatgacgaacggtttcatgcacgagctcgagcagcctgaatcgaagacccgggtggagacctaccaggaattcatgcaacaacaggaacagcctgcgccggggacccaggtggagggttgagagctgcaatccgctggctgctgatctgcatctagtcaattcccatggaggaattgcattggcattggactgtaccgtatctaataggtcacctatatcatttgtgaagatcaggatcacctatatcatttgtgaagatcaggattatccggtctataataactaaacatacaaataaaatgtccaccgaggtttctgttgattctttatgtcattgttgaccccatggctgctgctcaactgctgatgcgcggtctctctatgatttgtgaaagaagatagtgatgaacttacataatgcaatagttaagtacatgtatatgaaacagttttccttg

SEQ ID NO: 171831 - DNA, 1019 bp, Zea mays
  Clone ID: MRT4577_88294C.1
gcgattgggtacctcgaggccggccgggggggccgcgccggtggctgtttggacatctgttgacacaccccaccccgttgccaagcggcgccaaaccaacgagagcacccggaccagacgcccaagtcgatcgccatggcgatgaagccggcggcggcggctccccctaccccggccgcggcgcacagcgtgttcgtctacggcagcctgatggcggacgaggtggtccgcaccatcctcaagcgcgtcccgcccgccgccccggccctcctcccaaactaccaccggttcaacatcaagggccgcatttacccggcgatcctgcccgttgagagcaagagagttgctgggagggttatcatgggtgttactgatgaagagctccagcttcttgacgcgtttgaagacgtggagtacacgaggacaagagttgagatatcattggctgactcttccgagaacatgctggctgacacttacgtgtggagtgatgcagaggatctcaatctttatggagaatgggactttgaggagtggaagaaactgcacatgaaggatttccttgcgatgacgaacggtttcatgcacgagctcgagcagcctgaatcgaagacccgggtggagacctaccaggaattcatgcaacaacaggaacagcctgcgccggggacccaggtggagggttgagagctgcaatccgctggctgctgatctacatctagtcaattcccatggaggaattgcattggcattggactgtaccgtatctaataggtcacctatatcatttgtgaagatcaggattatccggtctataataactaaacatacaaataaaatgtccaccgaggtttctgttgattctttatgtcattgttgaccccatggctgctgctcaactgctgatgcgcggtctctataatttgtgaaagaagatagtgattaacttacataatgcaatagttaagtacatgtatatgaaacagttttccttgaaaaaaaaaaaaaataattcggcc

SEQ ID NO: 171832 - DNA, 288 bp, Zea mays
  Clone ID: MRT4577_88295C.1
ggaagcccaaaacattatcccccgcccatttgattcaaaaacatgctggcgatcctttttattacaaaaagaaccacttttttttcaccggcgtcgttcgggaaacacgaacgggctgggaccaccttgcttctcaaaagaagaaacccgaccgggtaagaacgtggcgccccccatttttttttttgtccaggcttttcgggggacagagcataaagaaccttttttaggggccctgtaactgggcgggggggttggtcagggggacctttcccacaaccgggtttt

SEQ ID NO: 171833 - DNA, 286 bp, Zea mays
  Clone ID: MRT4577_88296C.1
tacaatgcgtctgactacgcgtccgggcaggtcgagcactgcactgggcacgcgtgcaactgtacacaatcgattcgtcgtgtgatctcggatttgcatccctccttaaggttagtaagctcgatggccgatctaggctttgatcgtggcaacaacgttcttcccacgctcccgtgttacgtcggcacacacagcaccaaatcctcgtccacggacattattcgccacatcaactcatagattgttcacactcacgaccatatgtgagcgagacccgctcgccata

SEQ ID NO: 171834 - DNA, 380 bp, Zea mays
  Clone ID: MRT4577_88297C.1
gcgtccgaaccgagctttcagtatgctgaaagacagcttgatttaagaggacctaagacgacccatggggggcgagcaggcacgcagtcaaggcgctataccaggcgctcccctgcgggtacatgtgactacaggatgacgctgccagccggtcggggatcatggacgtcttcgcgagactctcgttgctctccgacctgcaatactacgctcacggaggcacggaagctgaacacaagatcacgcatagcattacacacaatgatagcagtccttctacgaccgatgtggtctgcacttacgacgacattaagcatagatgaccgcagagggggagctaattatctggacacattggacaggtaggatttgcagagctg

SEQ ID NO: 171835 - DNA, 404 bp, Zea mays
  Clone ID: MRT4577_88298C.1
tcttcttttttcttgtgggtcttttttatgggtttcaaaagagcggaccccacacagatccacataaaccactcgggctgtggggtggtccgctacctgatggccccgccccaagggttgggggcactaacaaccttccataaaaaggggggcatgaaacctatgcttcacaaaaaaaaaccgccgtgggccctttttaccgctccaattgtgttaaacggttcgccacatagctgggcgcctctggtgggacccatacagacactgcctgccaccctcctttatgtccaaagtataggggaggtccatgtccggactccagggtggcaagcgcaagacctggacccacctccgaatgttctagatggctcagttcgtgtgatgtgagaggatcgctctcggct

SEQ ID NO: 171836 - DNA, 170 bp, Zea mays
  Clone ID: MRT4577_88299C.1
cattgggtccctcgaggccggccacgtgctcgattccgtgatgggagacctctgcatcggccaatctcgaccagtgcaacagtctcgggcgcgttccccgtccactagcccaacatgcacaataacacgctgctgcagttctcggacggatgtatgccgatgagcaccgt

SEQ ID NO: 171837 - DNA, 390 bp, Zea mays
  Clone ID: MRT4577_8829C.1
tttttggtttaattcaaaacgggtatggattatcatcagctgcaataggctccattactgcagtccagttcttgatgtggggtactatgcgccgcaaatacaagagcacattggatctccgcgcgctcaacaggagagaaaatgcttcgctcaagctcaaacgtactataactgtctaccttgtcactctggcagacgggtggggtgggtactgcatgcggccggcagccggagccggagccgggccagcccagtccaaggtagagccctacgacccggggcgctggctgtggcccgtccgcagcggcgtggggcgcggggacgccgaggccgagccatccagcctcgttgccgccctggacgacatggagtcgatctcctcgagcaccg

SEQ ID NO: 171838 - DNA, 624 bp, Zea mays
  Clone ID: MRT4577_882C.1
ccggccgggcccgggagttcagagcggcagcagttatagccaccgcctcccccacctcttccgccgctcgtattatcactctttctcctacctctcctctacttgttcttcaggagcggcagtaagggaaggtcgacacagggagcaagaaacgcacccgggcccccgaaacagcttcccgtgctcggcaacctcctgcagctcgacggccggtcacaccggtacttccagtcgctcacccagaagtacgggccggtggcgcaggtgcagctcggccgcgtgcggatggccgtcgtcgcgacgcctgaggcggtcaaggaggttctccggacgaacgacctgcactgctgcagccggccaaattcaccaggtgcaaggatgctgagctacaacttcctcgacgtggctttcggcccctacagcgactactggcgcgcgatgcgaaagctcctcgtcctggagctgctgagcatgaggcgcgtccagtccttcgcctacgcccgggccgccgaggtcgaccgcctcgtctcctccctcgccggtatccctccgggcacccccgtcgacctcagcgagaagctgtacgcgctctcgaacggcatcatcgggacggaggcccttcgg

SEQ ID NO: 171839 - DNA, 315 bp, Zea mays
  Clone ID: MRT4577_88300C.1
gtacaacaaccgttgagggacccggcttgaaaatcaggctgaccccacattggaccttaaaaggggaacacatgaacccccctggctggccctgaccccattaaagggggggaaaaaggggtccaaaccgacattcccaaaaggggggaaaaagccaatggttcggtaccctaacccgggggggtgcacaaggggggatcctaacccctggaaatggaactaaaactcccgggtttccaaggttcagaaccggaagaacaaggccggggcaaacttgggggttcctcaaaaaaaaggggtttttgggggaaagga

SEQ ID NO: 171840 - DNA, 212 bp, Zea mays
  Clone ID: MRT4577_88301C.1
cagggtaccagtaatagtgggcgcttccgggggactgtgccggtcgggtcatgctgtctactcaacatgcgcctctggatagaaagtgccgtggctgcgccgttggctggtatcatggagtctggctccagatttagtggttgtacggggttcgactactaagacggcgttattactcgctgtgaggtctccttttctatctaagatttgac

SEQ ID NO: 171841 - DNA, 1660 bp, Zea mays
  Clone ID: MRT4577_88303C.1
ccggccgggatcctgtgctgctgcccggaggctggccgggctttcgttcgacaggtgtcgttcgctttgccttgccccggcaaagcaatggcgctccgtctctctgctccgttcctcacctcgcgctttacgccgtcgcaagcgttggccccgcgcaggcgcacccgggcccgctctttctctccgtcagccgatgcgcgagccgcgtgcttcaagagaccctacacgtccgttctaattatccccacgggcgtcggcgcggccgtcgggggcttcgccggcgacgcccttccggttgcgcgagccgtcgccggcgtcgctgactgtgtcatatcccacccaaacgtgctgaacgctgcgatgctatactggccgatgcccaatacactttacgtggaagggtacgcccttgacaggttcgcagaaggatcctgggctctccaacctgttcaccagaacaaggtaggtttggtgctggattctggaatcgaggaagacctccggctgcgccacttgcagattgcagatgccactagggcttctcttggcttgcctgtagtggagtacattgttacagatgctcctctggagatcaagacatggtttgatcccaggtgtgggaagtcaacagggagtgttggtaactctgattctcttctgagagcagttgacgcactagtgaaacattcagatgtgaatgctgtggctgtagttgcacgctttccagatgatgacccagaagattcagattgttaccgggaaggaaagggtgttgatctattggcaggagttgaagcaattatcagtcatttagttgtgaaagaattcaaaatcccttctgcacatgctcctgcagtgttacccccaccactcagcccattagtatgccctagatctgctgctgaagagattggacatacatttctgccttgtgtgcttgctgggttaagcaatgctccacaatatgtcatgaggagcggaaccttggaccatggttgcatagtggctggtgatgttgacagtgttattcttcccaaggactcctgtggaggagatggtacacttgcttttgctcgagctgcaagaaaggacaagcccttaatcattaccgtgcaggaaaatgagacagtgcttgatgatactccagacaagttcggcatagaagtgctgaatgtccgaaactactgggaagcaattggagtcatcgctgctcacaaagcaggtgtcaatccacatgctcttagaagacgagggattgatcatcttaagagccctcaacgatcatattctgcctactctgcaagtcctaaaccatctgcccgtcctccagtgcacgataaagtacagagacagcagctagttaggcaaatttagtactaaaaagagcactagcagcagtagaaattactttagatagtcgtgattaggaacttccaaaattttgaagcccagatacatatttttcagaccgtcctgaagtgtaggaccatagcatcacacgaattttgtcgtgttatccagtctggacttcgctgacatgagtctttctccactgccttacatttctccaatctctagtcggtttgtcaatcatttacatcattattttgccaaggtatacacagcgctggtaatcattttcgtccgacaatattttagt

SEQ ID NO: 171842 - DNA, 403 bp, Zea mays
  Clone ID: MRT4577_88304C.1
ttcacgttgggcacacagctaagttgcgagacaaacccgagtcccccgttcaatgaagccaactctgcttctcggtagtcgctaagaactagaactactagcaaagaagaatgcgatcttgattacacgccgagacagatacaagcaaccatagggggggtagtacgattcttatactcacgttttggaccatgtaatgaaagaggtgaacgagaacaaggtgtagtatgagtacgtacatctacccaatgaactgctcaactcggatcacgtacttctcgtcatgtatatcaagaatctctagatagtggtaatcatcgtacttatcaactttctactcgtacttaactagtagtacttcctccacgtccttatcgtcgtactggtgatacagtatggtgag

SEQ ID NO: 171843 - DNA, 392 bp, Zea mays
  Clone ID: MRT4577_88305C.1
ccggctggtcagggccgactcctgtcaggcaccggtcgtacctgtaaacacttaacttgctgccacctcctgccgtgatggtaggacgcatgtccgaactcaggatggcggggggttaatttgccgccagaatgacggctggtgagattggcggtcgcacgcgaactctggcgtgactaatctgccccacccgtcacaccatccaggatcgcaaacctgacactcgtcacttctcactgcctcagttgttacccccatttgatacgaacttggtatgaaaaaagaaataaaacagccgtatttagtgttaatacttgcctgctcacacaagcgactgtatcctgtgtgcgttggctctgaaacataaaggaagagaaatagttcctgcacct

SEQ ID NO: 171844 - DNA, 188 bp, Zea mays
  Clone ID: MRT4577_88306C.1
ttttataaaaaataaagggtgttgattcgaggcaaagaatggtatataaaaagagaggggaggttgatgaatatgtgagacgtgaggtggaagatggtagatgtgttaatatttgggaacgaacagttctgatgagagaaaaggtgttagaaagtaataaatacaatgggtgatttatttggagtaga

SEQ ID NO: 171845 - DNA, 1824 bp, Zea mays
  Clone ID: MRT4577_88307C.1
atggccgcccttccgtctcctgcccttccatcttccgcccctgtcccttcccctcccggcgccaacctctccaccagcctcacgccggcatccaccccggacccggcggccaccccgtcgtcttccaccccactgactgtagctgtgaagaaggcggcagggcagcagcgagaccaacaagggttgcgtgttccggtgtggcagcggctgtccggaatggatggacctggccatcaggatctccagcgaaaaggatcggtgtggaggcggatcaccccgtcacagtcggcagcagggactgagagttccacacagtcggccctgatggctgcctctagtggtgcaactgccccggagttgcgcagcatgaggaagaggcgacgtgccaagcgccggaggggagttgtggagcaggagcttcttccgctacctcctccttcagatcatgatgccccgttggtaatgcaggaggaagctggaagtgatggatcttctgtggagcctacttgcgttctagaactctctattggaatggcccaagaggaagtggcactccgacgagctctgtacgtcatggtggttggcaccagaccaaaggttcttggcgctgaggttgtggaggaagtggcacgttgtttcggcatagatgctgattctttggcaattcatcaagccatgcccgaggactttctgctattcctccctaacgaagacaccgccacaagggttttcaatgaaggcaaagttttcagagggcctcgtttcaacttgcagttcaagcggtggtcgcggtttacgcatgcaacggcgggggctcttccatttctagtcgacgttcagatttgggggatcccggctcatgcatgggcaagatcaacggcggagcacctcctgcatgattcttgtttggtttcagatatccatcctgccacagccttgaagtcagacctctcctccttcaagctgagggcttggtgttttgacccaaaaaaactccaccgaaacatgaagctctacatcgctgagcctgggatggtgacaagtgagaagcggtgcttgtcatacaatattagtatggcggccattccggttgatgcttcgtcgagggctgaggactctcctccccccccccaccggctgatggcacgcatccagatggagacaatgaacgccatcgaccggattccccgtctcggcatcctcgtaaaggcactgtctagacttgtatcgggttctggggacattactggaggtgacatgttgaagaagatgcacagtcaagttgacatcgttactgattttgctgatggattaagtgggcagcatagtaatggttttgatgggctcgagatgcgctctggtactgggccgctggacctggctattcacgttccaccccaacacaatgccatgtgtgcggggttgctggagctgagtggagcaggttcgccccaggctagactggtttgggggactgtggacactactggaacagcatcgccccaaattcacaatgggtcgctggagctggcccagttctgcccacctttaattcctttaccccaaactgatcgtcctctaaaagtctattacaaaaagaaaaaaggaaacagacaaaggctcatggaggagtctcaggagtctgcaactaggcacaatattcatacaaaatctctacagaaaaatcaggatcagtgtggaggaactggggatacatctgaaatctctatgtgtgttgactttttcaaaaaaattactcgtcacatctccaacttgctgctgactcctagcaatgacaacctttcaatcaagtggctagaatag

SEQ ID NO: 171846 - DNA, 505 bp, Zea mays
  Clone ID: MRT4577_88308C.1
ttttcgcccacgcgtccgagcgagcagtcgcgagtacgctccccaaaaacctgatcgcctgcatgtaaagccctaaaatatgtataagaaaaaatgataaaataaataaataaaatatataaaagtgttttgggatcatggaacccttagagattatctagtttttttttctctatgtgcatatttaactaaatgaaaatctagtaaaactctctacaagctctaaattggagtacccttcaataataattttcttacatttgaaagtatttaaaattttaaaaaaaaataaatcttaaaatcatcaaataaataatatgaatgtaaattatttgtttgagggagttatccatttatgaattatgcatgaaagagaaacaagtaaataaataaataaataactcaaataaaaaaactataattgcatcatgctggatttcatgtgttgttgcatttatgaccaaatttgaggctcagatttgaatttaaattatgaatttaaact

SEQ ID NO: 171847 - DNA, 810 bp, Zea mays
  unsure (1)..(810): unsure at all n locations
  Clone ID: MRT4577_88309C.1
ccggccgggaggcttcacttctaatggctggataaagatgaactcaacagctacgctacgccctcgggaaggagagaaaagacagggaaggaatgtccagctggaggcttccgcggccagtagtgggactgggagcgaagcgcatccgcagaggatcctcggttcggttggagttggaggcccaaaagacctcccgcacccaacaaaactccagcctcacatctctccctctccctctccctcttcctctctgcggtccaaacaatctctccctctctctctctctctctctcttcttcctctctgcgctccaaacaatctcgccctctccttctctactctccaaaacaaacgaaacgaagcaagaaaccgagaaatctccctcccctgtggctgtggcggtggcggtggcggcgaggatcatgtcggcggctgcggcagcggaagtggggaaggagaagggcgccgccacccccggccccggccccggccccggtggcgcgtgcgagctgtgcggcgccgcggccagggtgtactgcggcgccgacgaggccacgctctgctggggctgcgacgcgcaggtgcacggcgccaacttcctggtggcgcgccacgcgcgctcgctgctgtgccggggctgcgcgcgccccacgccgtggngcgccgcgggcccgcgcctcgggcccaccgtctccctctgcgtccgctgcgtccgccgcggccccgngcgggccgtggcccgccgcggccacgaggacatgcgcggagcggccgaccgagacgccgacgatgccccccactaggaccacc

SEQ ID NO: 171848 - DNA, 264 bp, Zea mays
  Clone ID: MRT4577_8830C.1
tcggttctgtgcaagctagagctgtagttcggacgaaagcaccgtctacactgactacaccgatgggtctatcagggtttgtaagatcttcgagtactggtacgcagtctagatgttgaaatcagatagacttactcagcctttctgatgacaacattgaactgtctgacacgttcttgatgatgtgagctatattgtatgtccgctactttgcagccagcccaacaattttaatcttactatacaagagtctaggtttgcact

SEQ ID NO: 171849 - DNA, 515 bp, Zea mays
  Clone ID: MRT4577_88310C.1
agcgagcacaagtaacaaacatgctagcttctattgtacaaacacacatggccaccgtaacaagaactagaatgcccgggtactctcaaactgaccacaaagttccaatacatggcggaccgaacacaaaaaaggcatcactaatggagaatctaacaaggtgtatcaagcccacagaggatggcacatggggcatcgggcacaaccagaaacatttccccctttaagatgacaaccgagctcgctacaaagagctcaaggtcattgctcttttatctcaggagctaccgatacagacatggggccatatatagagcaacaaggaacacaatttccggcagaatctgcttggcagacggaacattgggctcaccccactcaaggaccttcttgtccagcaacagtaaaactgcttttccaaacttgatcaaggcacccatttaaatatgcaaagctcctgtaccctttgctgaccatagcatctatggaaccctactctaccatattggtggggg

SEQ ID NO: 171850 - DNA, 385 bp, Zea mays
  Clone ID: MRT4577_88311C.1
accaattgatctttaaatgataggggatggggaacacccaaaatgtggaccgccgaacgccttctttaatttgaacaaaataaactttgaagaatggggaatgaacatgccaatatactattgcatataatgcgcaccaaaggactagcaacatattgcatccactgacttgtggagggacagaacttaacaagccaggaactagctcccgtcgccgatgggcctggctttgatgaggaccgtgcagatcatcgactctttgggcgtctggggacagccatatatagaacgggtaaaaatgggctctgggtttctagccgaggaggcactccatggcgggcattaatgcggtgccctgaagcatagcacccccaacgggccttaa

SEQ ID NO: 171851 - DNA, 135 bp, Zea mays
  Clone ID: MRT4577_88312C.1
gtacgttaaaaccatttattttcatctcttattttatcattaggctactaagcgtattattctgattatgttccttttccagcaaccccttcaataatggggttttgccttcgccccacacatagaaggaatata

SEQ ID NO: 171852 - DNA, 297 bp, Zea mays
  Clone ID: MRT4577_88313C.1
ttttcacacagagccgcagcgaggcaacacgggggagctttagacgagagttccgagagtgacccaacgacaggagggaggacgaccgacccaggcccggcaacgacagggacgacgaccagtggacggatggccacaaggggaacagcctggaagggtgacgccagctgcgccggagggatatcaccccagcggtgacagccaatgacgacgcaaggggcgcgcaagccgcggagaaccctagaggcctggggctatacgatgtcctgttacaccgactggacgtgcccgacgctg

SEQ ID NO: 171853 - DNA, 440 bp, Zea mays
  Clone ID: MRT4577_88314C.1
aaggggggggggccggccctaatggttttttttggggggggaaaggggccatgctggtttggaaccaccctttggttttttccaaaaaaaaaaaaaggggggccgggaaacgttttgggtttaaaaaatttggccccccgttttttttgcagggcccggggggcttgggggggaaaaaaaaaaaacccccccccctaaaaaaaaggggtttggtttttaaaaaaagaaaggggttttccacctttaggaaaattccggaaaccaaatcttggggtggccaaaggcaaacaccggggggggggccccctaaaaaccccccccaaaaacccaaagagggaccaccgggggggggccctttatccccctgaaacccattgatgaaaagggttgggccccctttgttccagttcaaaaaggacctgtcgggggtttgggggaaa

SEQ ID NO: 171854 - DNA, 324 bp, Zea mays
  Clone ID: MRT4577_88315C.1
aaaagcacatcaaatgtgtgatctcaaatggaaagctcacacccatgttttctcaggagggtacatgataatacgatcaggcaaatccattctggatcaactagcttacatcaaaactactacagggaagaagatctacgacacacttgcaacaaaacttgaaaatacttgttttgcggttccaaaacactgttttccatcctagatgaggttcatgatagttctgtttatgaaatcttccgagcaagattcttcactcccgcaccaacacattttaaagtgaccgtgtttgagtttgggtcgggcttgatgatgaacttgaca

SEQ ID NO: 171855 - DNA, 164 bp, Zea mays
  Clone ID: MRT4577_88316C.1
tctataaaccggcatgcctcagagagggagcaaacggacaccaacggtggcccaaccaatctcacgccggccaaagcagcaggaagtacagagcgccgcacaaccacaagatgaaacacagtatcagacagcccaaagaggccagactgcatagaagcaagaca

SEQ ID NO: 171856 - DNA, 117 bp, Zea mays
  Clone ID: MRT4577_88317C.1
ctgcttgacagttttgactcgaagccatggtgtgcatctcgaccagatagagagcgttgcgtttgctcctggggtggaggtacaagcgtacagctcgcgagggagatcaagattaaa

SEQ ID NO: 171857 - DNA, 293 bp, Zea mays
  unsure (1)..(293): unsure at all n locations
  Clone ID: MRT4577_88318C.1
ccggccgggnaaagctccccannttcctcttccccttctcacccggcactcgaactctgcggccctgcaaaccctagncttcgctccatggccgacggcgatccggagccggcgccagcgccggcaccggcactggctaacgaaagctccatgtccgggcggngnnctacgtggatgagacgcgnccgccgccaccgctggagccctccgggggcccggncgaggagaagcgcccgcccgacgagggacaagcggaggcggagacgcacccgccgcgggaaccaaccggcgag

SEQ ID NO: 171858 - DNA, 651 bp, Zea mays
  Clone ID: MRT4577_88319C.1
agctcacggcctcacctcacccacccgcccgcctcgcctccatccacagcgccacagcggccacgccatctccgtctctctgctcacctccacttcttccgttcttcgccaccgtctccgtccttgacacgggcgcacccgtccccctccgacttccccgtggcctcgtcccgatccgtagtcaactcgaccttgttcaagagggtgagcccgaaccacggcgggcgggagggctctttttattttgacccaccggaggacagccgccccatgggctggtcgcttgagcgcgttatgtatcagctcatcgaccggcggaaaggaatcttgttttttcccgacgtgggggtgcccgcctgattgatatacatggcttgcatgtgaacgaagcaatccccatcttgaagggtgagctccctgccttgaagagcccagcgagggcagcagggaagaggatgcaagtcatggtttgggttggaataggccccccccccaggggttttcgcattgggaggttgcctatcgttgtggagcagttcctcttggatgaaggcctccagtacacgcagcctcaagggggtttgctccgagtgatggtgtactaacattttttaggtaagcccccaaggagagagagaaaaaaggcccccc

SEQ ID NO: 171859 - DNA, 362 bp, Zea mays
  Clone ID: MRT4577_8831C.1
caacggccgcacatcgtacaagctggactataaactgagctggctgcgctgcctaaagccaagagcgcactatatatcatatcactggcgggtgattgagcactgttccgagcgggacgcctctgaggccctatagctgagtcgaatgaacaagggcaatgcgcggcgcgatgcaggtcgcgactaggggatccttgctcgttctcaatctatgagtctttgtgctcatacctgtttcctgagcgagcgtgatatccgcacacaatggcacacatcatactatccacaagcttagcgggtaaagcctggaatgcctactgagtgaactgactcacattagtctggaagcgctcactgcacgc

SEQ ID NO: 171860 - DNA, 759 bp, Zea mays
  unsure (1)..(759): unsure at all n locations
  Clone ID: MRT4577_88320C.1
ccggccggggatcttctaaagataggaactgggagcagcaaaccatgtagacagaagaaaagctaaaggactacatgttgaaatagtaatagttactgcagtactgcacacgctgcatctgatttgacttgttgtatggtaaattgcccgtccacgcaggaagcatagctgatgaactcatggaagaaataaagaaggaagttgaagaataatgctgctccaacactcctcaatctgctctcaaggttatagaaactgaacaacgagaaatgaagatataacaattgtttttgaaacatttgttgaatctacactattgtacaaccaacatttgtccttgactacccagttgagatatcaccattggcaaaaccacatcggagcatcatagtacagctgtcacgtccctgaggatgtagctgtgggagctcgctggccaccggtttcctgcccgtggtggatggtggcaaggtagatagcagggagatgagataacagagaaagggggtgaaaatgggattggctgtaattgcttgtttattgctgaaccagaccttcctgattgatcccaaatacccctccttttgcctaattagcccctgttacgagcgcctatnaatgttcccgaccgtaacaatagttcaaggttacacctggaaactggggagaaaaggaagatgtaattcagtctgagttttataatatgttatttaggtgatcattaagatagatggaaatcacaacttgcttgtcagaccg

SEQ ID NO: 171861 - DNA, 908 bp, Zea mays
  Clone ID: MRT4577_88321C.1
cgagctgtcagagtcggtgaggggcgtgctgcgggggtacccgaggctgcggctgacgcacgggcggatggtgctggaggtgcggcccaccatcaagtgggacaagggcaaggccctggagttcctgctcgagtcgctcggcttcgcggactgcagcagcgtgctgcccgtgtacatcggcgacgaccgcaccgacgaggacgccttcaaggtcctgcggcgccgcggccaggaccagggcgtcggcatcctcgtgtccaagcaccccaaggagacgagcgcctcctactcgctccaagggcccgccgaggtgcgtccgtgacccacacccacccaccaaagcatccgtttcgatcccgtgtctacgtcctcgtctccctctctccgcggccccgcatagtgtggccttacctgacctggaccaccaccactaccggtggccggcggtggggttgcggacgtcatgtgttgcagccgccaattcgcctactccgccgccgcgttgctgacgttgcctagcttgtggatgtgcccaggtgatggagttcttgctgcggctcgtcgagtggaagcgcctctccagggccaggctcaggctgcaatgagatgagacatgacggcgcaactgccgtacgtggacacgtacgacgatgcaacggattaagctaactgccaagtgccagataattatgttaagatcctgcctgctacgtggaatcctgaacggcactgtctctctactgtccccgtagtgatcaacatgcatgtacatcgttgtctcatacagtcctagctagttagtactaagcatgcctgttacatatatatagcttcatgtgaatgtgttgtactgatgtgtgatcttaaaagtatgctgatgaacggcgtgatatttttttacccacact

SEQ ID NO: 171862 - DNA, 269 bp, Zea mays
  Clone ID: MRT4577_88322C.1
tcgcggacgcgtgggtttttttttttcatgaaggaagctagaagctcgcgctttgtgccgtgagcgcgtcgaactagactagatgtttacaagactatgtcacacggtggaacataacgcacggtcgatcgggccgtcaggagacgaggaccactgcatccgacttgatgctcaactagtggaaatagcagatgattacggtgaccagctgttctggacatacttgagctttgtgcaaggtggtattgccgcaagagaacttcctctat

SEQ ID NO: 171863 - DNA, 1377 bp, Zea mays
  Clone ID: MRT4577_88323C.1
gctcgccgccggcggctttttcgttgtcgacgtcgacgaggagcgcgccgccagctggatggcgcggcacccgtcggcgctgggcaggttcgagcggatcgtggcggcggccgagggcaagcggatcgtcatgttcctggactacgacggcacgctgtcgcccatcgtggacgaccccgacgccgccttcatgagcgagacgatgcggatggccgtgcgtagcgtcgccaagcatttcccgacggcgatcgtgagcggccggtgccgcgacaagcatgcaggtgttcgagttcgtgaagctggcagagctctactacgccggcagccacggcatggacatcaagggcccggcggccgccaaggcctcctcttcttctcggcacgccgcaaaggcaaaaggagtagtgttccagccggccagcgagttcctgcccatgatagaggaggtgcacgagcgcctggtacagacgacgcgctgcataccgggggccaaggtggagaacaacaggttctgcgtctccgtccacttcagacgcgtcgacgaaaagatgtggggcgagctgtcagagtcggtgaggggcgtgctgcgggggtacccgaggctgcggctgacgcacgggcggatggtgctggaggtgcggcccaccatcaagtgggacaagggcaaggccctggagttcctgctcgagtcgctcggcttcgcggactgcagcagcgtgctgcccgtgtacatcggcgacgaccgcaccgacgaggacgccttcaaggtcctgcggcgccgcggccaggaccagggcgtcggcatcctcgtgtccaagcaccccaaggagacgagcgcctcctactcgctccaagggcccgccgaggtgatggagttcttgctgcggctcgtcgagtggaagcgcctctccagggcaaggctcaggctgcaatgagatgagatggcgcaactgccgtacgtggacacgtacgacgatgcaacggattaagctaactgccaagtgccagttaatcaagttaagatcctgctacgtggaatcctgaactgcagagaaccgacgacctgacactgtctctctactgtccccgtagtgatcaacatgcgtgtatacatcgttgtctcatacagtactagttagttagtattaagcatgcctgttacatatatatagcttcatgtgaatgtgttgtactgatgtgtgatcttaaaagtatgctgatgaacggtgtgatatttttttatcagggtgtgtgtaacaactaacaagcaagcatgcgtgtacattattgcccactaagctagagcgtgttcaattattaatataccgacctggcaagagcatgggtttggttaaaaaaaaaaaacaaaagggcggc

SEQ ID NO: 171864 - DNA, 814 bp, Zea mays
  unsure (1)..(814): unsure at all n locations
  Clone ID: MRT4577_88324C.1
atacgaaccaaacccagattttccccgggcgccgcagccgcatttcgtcgagcacaggacgcgcatggccatggctgcgccccacgtctcgcactcgcagccacccgtcgggcgcgccgctttattcgctcaccccaccaccgcgcagagctcctcccctctccgcctccccctccaccgcgccgccgtccggcccgtccgcctctacgctgtctccaccgatgccgcccctgcccctgccaccgccgccgctgcgatggacgccgtggccgagtgggggctcaccccgctcgcggaggccgacccggaggtgtacgacctcatcgagcgcgagaagcggcgccagcgcacgggcatcgagctaatcgcgtccgagaacttcacctcgctcgccgtcatggaggcgctcggctccccgctcaccaacaagtactccgagggcatgcccggggcgcgctactacggcgggaacgaggtcatcgacgaggtcgaggagctctgccgcgcccgcgccctcaaggcgttccacctcgaccccgcctcctggggcgtcaacgtgcagccctactccggctcccccgccaacttcgccgcctacactgggctgctccaaccccacgagcgcatcatggggctcgatctgccgtccggaggacacctcactcatgggtactacacggccgggggcaagaagatttctgccacctccatttacttttcgagcttgccctacaaggtgagctccgacaccgggtacgtcgactatgataggctggaggagaaggncatggatttccgccccagctcattatct

SEQ ID NO: 171865 - DNA, 521 bp, Zea mays
  Clone ID: MRT4577_88325C.1
ttttttttttttttttttttttttttttttttttttttttttttttttttttttttttttttttttttttttttttttttttttcgggaccgcggaacagatgctcctatgacggaccccttctggaggggacaagggaaaatgccactgccccaaagggacaaccttacacttcctaccttaccaggggttttttgacctcacttacttacctacgggaccacaagctttttttttggaacaatccctccagccacattgatagtcccaaatttgaggccagccccatagcgccccaagggggggttcaatctaagaacatcttgtttcaaaacaggccccctgaccatactaataatcaagaacccaacagatccggaccgcacaatgcattactcctttttttcttgaaaaattgctgagagcattaaaacctccaccgcaggactctttcaaaattttcagatccacaaaaacagaaacaacctgggctaactcacgaacaagggcattttttacct

SEQ ID NO: 171866 - DNA, 343 bp, Zea mays
  Clone ID: MRT4577_88326C.1
gcgtccatgcttgcgggcgcggctcatgtataggacagcggcatttgatagcggctgcggggatgctgtcactacggcggcctgcatgcactatcaccttctgatgttccagcgtgccactcttataccgttcaccgtttgcatacattccgcagccggcgacgtgtgagccttgaagttcttggtgttccacgactgtgttgttgtgagagactttggtgcgttaatagcgagtgagcatactctcatactcctttcgggatttcggctccttcatggcaatcatgcttgacacactgtcgtctatgaacaataatgactgttgcatgaaaagctatggtgc

SEQ ID NO: 171867 - DNA, 379 bp, Zea mays
  unsure (1)..(379): unsure at all n locations
  Clone ID: MRT4577_88327C.1
atactcctgtctgcgacggaggccgcagagatgatcatcagggtcgatgagatcataagctgtgccccgcgcagaagagaggataggatgtgattagaaaccctgtttctcggtgtagtggggatgcttgttaccctagttttgatggtggttctggggcgtccaagttggtcacatttcaggtgttttttttggctcctaagaacctagtaattgttatttcgttgaaacaaccaaccataggcttttttttctagattctcatgatgtaccactgggtgagtgactgtgcgttgcaacgggaatatataacaatataataatttatatacaaaatgtgtcttatattgtttnaaaaaaaaaaaaataaataataaaa

SEQ ID NO: 171868 - DNA, 309 bp, Zea mays
  Clone ID: MRT4577_88328C.1
tcagaatacaagtaattaaattgatatgtgcgccgatgagattatcagtggttatgttcttgtatgtctgcattctccaaacatgttaaattaatttcttaaacacagggaggagctttcaataagaaattgaggtactcaaaagttgcatttcattagaagttttgcagagctatatcgcattgagaattctacttattttcttattttatagtggcacagatcgaaggattagcaatttaacttattaatttgcatatgatctattggagcataccatttcaacagttgtatttgatattgaatagg

SEQ ID NO: 171869 - DNA, 805 bp, Zea mays
  unsure (1)..(805): unsure at all n locations
  Clone ID: MRT4577_88329C.1
atatcgccgctgtcgtcgccacctccacctgcacccactgtcaacgagaaattccatcatcaaacatcgacttgcattccgtacactgtgctcgtaaccttcaaaagtgcgagcactgtggagaaatggttcccaggaagcttatggaagaacactacaatgaaaatcacgctccggtaaattgctccctgtgcaaagaaaccttgcgaccggagatacttgatcttcataaaagtgagcagtgcacacagaggatggttgcgtgtgcatattgtgagtacgaattgcctgcaattgatattcatgaacatcaggatgtatgtggaaaccgaacggagttttgtcaaacatgcaagaactatattagacttcgtgaatggatagggcacgaaatgcagtgccacgttagctcaaatggttctgaagaatcatcaagtgccagaaccattccagagagagaagtgcggcctcctccaccggtacgaccagtgcgtgctgtgcctgctgcacaacacaggcgacttctctttacgattgctgtaactggaatcgccgtcatggttggatcaatactgttccagaaggaggagagtttctaggtccgacagccatggacttcatatgtcagagttgttttcaacagtagtattgataagataatataatctcttgatgtataatgttatccccatattcagttggcacgtcttgcttgcttaagagtacagttcaagtcatggccttgttggtagaatcgaaataaccatccaagtatttgntgttctcggtgctatgtttaacgtct

SEQ ID NO: 171870 - DNA, 348 bp, Zea mays
  Clone ID: MRT4577_8832C.1
cggaacgcgcgacaaggcgagacggagaccgcacaagctcgtgcagggcccaaggccagaggggcaccgagccagcaggcacgggcacgcagaaatggagaggacaaacagagggagaagaagaaagggagcacaaacgctggaagcgggaacgagcaacaaacgaaacaggtgggacgacggaacgagaggagaaagggaccgacaaagaacatgggcaaacaggccacacaagaaagggagacaggcgaatgacaaaaggaaacaggaaatgaggggagggaacccaaagctgcgaagaccgcgccgtgaaggcagagcccaagacaccaaaacggggagcacaaa

SEQ ID NO: 171871 - DNA, 626 bp, Zea mays
  Clone ID: MRT4577_88330C.1
gaactgaaattaggtcataaaatcctattgacattggcataaatatgtatacaaaatagcataaaatttttgtatctctcagcgcatgaggttgtcataaaacgcatcaacaaattttgtaaattggtgtaagatacaagtgatctgaggtaattgtagcgtaaaatgcaagctaaccatctacaggagaactgtttcagattttgcaataagatataagagataattattcctgtactcaactatgataatgtcgtgtttacattttagctgttggtacatacaaacaaaactttgtttcaccataacaccactgttagcaaaaaaatctgagttcaaaaaggctattccagctttcctaatgtggagaaaaccaccgaggtccatatctgcaaatataacatgaacgaactttatgatctttccttgttaatatgtcttttcaagtttgttatgactaccataacctaaagtctaaactgaatgcaaacttgagttagaagatcagattaccaaaataaaaatatcttgagttagaagatcagattatcccatgtgagtaagcataaaaatgatatcaatgttcataaatatatcccatgccagttatcccatgcaaaccaaaa

SEQ ID NO: 171872 - DNA, 448 bp, Zea mays
  Clone ID: MRT4577_88331C.1
acaataagatataagagataattatttatgtactcaactatgataatgtcgtgtttacattttagttgttggtacatacacacaaaactctgtttcaccataacaccactggtagcaaaaaaactgagttcaaaaggctcttccagcttttctaatgtagagaaaaccaccgaggtccatatctgcaaacgtaacatgaactgctaatatgatctttctttgttaatatgtcttttcaagcttgttatgactaacataacctaaagtctaaattgaatgcaaacttaagttagacgatcatattaccaaaagaaaaatatcttgagttacaagatcagattatcccatgtgagtaagcataaaaacgatatcaatgttcataaatatatcccatgccagttatcccatgcaaaccaaacatacaaaataatagaaggtcaagttctat

SEQ ID NO: 171873 - DNA, 775 bp, Zea mays
  Clone ID: MRT4577_88332C.1
aattcggcacgaggccgatgtaagccactggattcctaaaagaatttcaggagtactggagggtcatcaagttgcgtatgtttcttgtgggacctggcatacagccttggttacgtcgaggggacagctatttacgtttggtgatggtacattcggagttttaggacatggaaaccgcgagagtttttcgtgtccaagggaggtagaatctttatcggggttgaaaacaattgctgtggcttgtggtgtatggcacacggcagctgttgtagaagttatagtcacccaatccagttcaagtatgtcttctggaaagctcttcacatggggagatggtgacaaacatcggcttggtcatggtgacaaggaaccaaaacttaagcctacgtgtgtggcttcacttattgattatgacttctgcaggatagcatgtggtcatagtcttacggtaggactgacaacatctggacaggttctgagcatgggtaatactgtctatggtcagcttgggaatcctcgttcagatggtaaacttccatgcttaattgaagatatcatgggtgaacatgttgtccaagttgcatgtggttcctaccatgttgcagtcttaacaaataagagtgaggtttttacatggggaaagggggccaatggaagactgggtcatggagacgtagaggatagaaaaatacctacactggttgaatcattgagagacggggctgttaggcacatagctttgtggttcaaacttcacttcagctatctgtaacat

SEQ ID NO: 171874 - DNA, 620 bp, Zea mays
  Clone ID: MRT4577_88333C.1
gtatctaagttcacattccattaccatgtgcatatatcatgagcaagaaaaaaaataaggtccagatcgaaccatccaagatttattccatcaccatccatccgaattccgaaaccatagttcaactacggagacaagattaaccaaccaaaaaaagcagtgttcccctcggccacagtccattctcttattagatcgactcacttcgtccaggcaagtgatcgatctatgggtcgacaccaagcagaaaaaacgccagaccagccatcacgttactatactgagatgcaacagaactacgatgacctagtggcactagctaccactggtgatgatactactactactgccaaagggggatcttgaaaacgagttgcactacgacttctgctgctgctacgggctctatccaggcaccggcgatggttggcggccggccgggccggcgccgtgaggctcattcgaggatggtgataacggcgatgacgaagatgacaatcgtggaggagacgacgacgcacccgttgtcggagccagagtgtggtggcgtgggagtcgtgggcgcggcggccggcgccagcgtgggagagttggcggccgaactggtggggatggccttg

SEQ ID NO: 171875 - DNA, 239 bp, Zea mays
  Clone ID: MRT4577_88334C.1
cggggaaaaaaaaaaaaacaagacaagcatgtcagccgccgtcgaggccgtcgttccgccgcaggtgccgccatcaccgcctctataaaaccctaatccgtagccgtcatggcggctgttgcggggggcacctcgcacctagctacgccaccaccgcaacccccaccttctactgctgcgcgcagcgagctcatcctcccgggctatgccacaaaagacgggggggagacagaaaggaa

SEQ ID NO: 171876 - DNA, 2348 bp, Zea mays
  Clone ID: MRT4577_88335C.1
gtgatgattacttcaatgaacaagaggaagaacttaggcataaggtacaacttgaagcagaggaacgaaagctggaagagactctggaatatcaacggcggatagaggaggaagcaaagcagaaacatcttgcagaacaatgtagaagtacttatgcatcttctgtaattggtacagctcgtctttcaagcactgggaatcaggataaccatgaaagtgcaatcaatcactcttcccgtacttatctcgaaggcataaagtttggtgattttcgctacaccgagaacaatttcagccagaaacttaatggattggattcatctgatgcacatgcattaaccagcagtgatatgaatgctcctagatggaccagcacttgtaaaatcgctccctacgcaaaccacagctatcaaactggaaaacaaaatcggctacatgtgttgccttcagatgatctgcaatttgctcatagagatcacgctgcaggaacagagaagccaaattttgagaaagttggcagtggtgcaataccatcagcggatttgtgcatcaaggatgattttgataaaaggtttcaagaagatcttgatgaagcagtgcgccaaagccttggatgcgatgcttatcctgctggtacaataagcacttcaaatgggacagaagtgtatgggactggacttaaaaatgccgctggtgaatacaattgttttttgaatgtgattattcagtcattagtggcatataaggcggtttcgggacgagttccttaaaacatcattactgcacaagcatgttgaagatccttgtgctgtctgcgctttatatggtatcttcattgacctgagcaaagcatccaagggacaaagagaagctgttgcacctacttcgttgaggattgctttgagcaaatcctacccaaacagcaaattctttcaggagggacagatgaatgatgcatctgaggtactgggtgtaatctttgagtgtttgcataagtcatacacttctcgtactgtctaccatggtgtatcccacgagaaaaattctattggatcatgggattgtgcaaatatttcttgcataacacataatctttttgggatggacgtatatgaacggatgaactgtcacaattgtaagatggagtctaggcagctcaagtatacttcatttttccacaatatcaatgctagttcactccgaactgcgaagatgatgtgtccagattcttcatttgatgaacttttgaaggttgttataatgaatgatcaactagcttgtgatcaagacgttggcggctgtggaacaccgaatcatatagaccacatcctttctaattccccacatgtctttactgttgttttgggatggcagaacaacaaagagagggtggatgacatatctgcaactttggctggtatttcaactgagatagacattagcatattctaccgtggcctagatcaaggaagcaaacacaccctggtgtcagtggtttgttactatggccagcattaccattgttttgccttcaaggatggacggtgggtcatgtatgatgaccagacagtcaaggttattggtagttggggtgatgtgctcgtgatgtgtgaaaagggccatttgcaaccccaagtgcttttctttgaggctgcaaattaattattcttcagagtcgcaaaacgcgctacagcggttaacatgccctcaaatataggttttttccctgcggccatgaagattagaaatagggtagcagattcgttttgagcggggatatatagtactagcattcaacggtgcttttcgttgtgagtccgtaataagcagtcatctgagcattctagagcaaaaaagggagctgtttatcccccccttttttgctttaacctttggtgtaggcgctgaacttctgatctcatctgccaataaatcttcactgccgatcaagcgggtggagcattcgacttgaactgccatccaacagttgtagccgaatctgcatgaactcttcgttatacaccaatcatctatagaattttctgcttacattgggccgggcgggcgttctctctctctctgttttttttttggggtgggggtctggtataggagtgacagttttgaggccaccagatatagaatggaaggatatgggaatgggtgatgcggtgtgaactgtattttgctgtggatgatcttttgaaaagagtaaagctatctggaatatggatatggtaagaaatctgtagtacacgagtctatatatacagtgactcgatgagattatgcgagatgattataacgatgaataccaaaatccttatcacaactgttggttaggaata

SEQ ID NO: 171877 - DNA, 260 bp, Zea mays
  Clone ID: MRT4577_88336C.1
ccccacgcagaggggaggctgctccacccctactctcctcccttgctcccagcagcggaacgcctctgacccttggcttgagtcccacgtgggggaggaggaggcaggcagcaccagcaggggtccaccaagagcccagaccagcccctctgccctcctacccgggcctcgaagggtgtggcacaggctacgtgttgagcgtggcctacgtgagccaacaagaagcaggggcctctgagtgccaagcgacgtggcgggct

SEQ ID NO: 171878 - DNA, 319 bp, Zea mays
  Clone ID: MRT4577_88337C.1
acaaaatcatgcaataaggaagctagtacaagtggagataagtccattcttatagttcaacttggataggtagataatgacatctacatgtgctgcccttagaaagggcatcaaataaagtattgtatagtttctcaaatgactaaacataaatattaaggataaagttacatttgtagatgaatatatgtatttagatttacctactgatacttggtggattgattctggtacgactgtgtatgtcaccaattttttttatggagattccatacgaagagggccgttttaagaggagaaagaaatattagagtcgcca

SEQ ID NO: 171879 - DNA, 267 bp, Zea mays
  Clone ID: MRT4577_88338C.1
ctttggctttttttaaatatatttgccgtttccacattcttccctaatgacacactcctgctcgccattttacaacacctgaacccacaaccctcaaaccacacccaacaaaaacaccatgctacacaaactccactatccacttaacctaatacccactaactccaaacccatcgccctctccaacacaggctcaacctaaatatacattccgaccctcctcataaagtctcacaaaaaccggaaggtgttaatggatactcccaa

SEQ ID NO: 171880 - DNA, 606 bp, Zea mays
  Clone ID: MRT4577_88339C.1
caggtcacctacgcccgccgctacggggtcttcttctactccaacgccaccgccttcgtggcctccgtcgtcacgatcaacctcctcctcatgcagtccctcagccgccaccgcgggtggctccgagcgctgcagcctgcaggccgtcatgatcctcaaccagctcggcctcatggccgcctacgccgcgggcagctgcagggagctggccatgtccgcgtacgtcgtcgccctcgtggccatggtcgccttgtacgtctgcgcccacgtcctgctcttcgcgctgtgcgccctgaggaggcgcggcgccgtcgcggcggacgacgcggcggcgccggcgcaggcgccgccggatgaagagcctggggccgtggagcgctcgcgcaagtacctgctcatcttcgcgaccctcgtcgcgacggtgacgtaccaggccgggctgagcacgccgggcgggttcctgtccaacagccaggacgacggcgaccacctcgccgtcgccggggacccagtgctcccgggccgcttcatggggttcttctacttcaacaccacggcgttcgtggcgtctctgggggtcatcatgctgctcatgagccggaccgt

SEQ ID NO: 171881 - DNA, 176 bp, Zea mays
  unsure (1)..(176): unsure at all n locations
  Clone ID: MRT4577_8833C.1
cgaatatcagcatctggcttcgatggagttgctgcctcnctacgagcgagcgcactacgctccagctcaacgatgacgatgtctcccggttcaaagatgcattaaatctcgtcgatgatgaacaccaacgttgaatcacgaccgaagatcatggtactcacaagcgctctcaaggg

SEQ ID NO: 171882 - DNA, 479 bp, Zea mays
  Clone ID: MRT4577_88340C.1
agccttccttttaaatggcaaccaaccgccttttttttttttttttttttttttttttttttttttttttttttttttttacaagccacccccaaccttaaaggggaatttttttttttacagttttttccaaatttaaaaaatccccgaaagccttaaaaaagcttccaacgtattgtgctcaaatccatggccatccttgaataccgcaagcacacccaccctttttttttataacattatcacgccaagccacgcaaggcacccacacacatacatatatgtatgtaaatatatatatatatatctcacggatagactttgaaggcaacacgagctccaaattcctttaagatcttgtattccctgaaccctgctttggagaaaagctcgctccattctttttaatctgtttgccgaccttttgtgatgggcataatgccgatgtccattaggaggggagtttccagcataagccc

SEQ ID NO: 171883 - DNA, 763 bp, Zea mays
  unsure (1)..(763): unsure at all n locations
  Clone ID: MRT4577_88341C.1
gctaccctcccgcgggccctcctctctctcccacccttcctcctcccaccacatcctgcgtgtgtcagcccgtcgttggctccgccttctattgccgtagggaacacgcggcgtcgcccttgcgctcctcgccacatgctgttacaggctgtcgtacccgtgtccgcggttgagggccttgtgccggtcatgttgaagaagaagcccatcgactagatctagctcgtcgtcgtgcgccactctgccgaagagaggcaacgcctcctccgcggtgccatcacgtgctcctctcactactgcttccactcctcccagagtcccagtacacccccgccttgtggcatcgctgctcgccgcggccctgcacctcagccctgcctccatcccgagtcacacacctatcctttgaagaattaatggcgactggaagcagctttttacaggagtgccattctgctagatgccacacgctagctaaagcaaagatacacatagagcaaagaggggaaaagaatatgagctgaaatgcgcaaaaggctaaggaaagcagacaacttattgcaaataagaaatcagtacaaatgatgaatcgacctatgaaaattgagtccgatgggaatttggatccaaagaaaggtggtgctgtcttggattctactaaaactataggacttacaagtgttaagtagtgggatgactggcatatagttggatttcctggggnanagctattaagtantagcggaagtggattttaaatcca

SEQ ID NO: 171884 - DNA, 325 bp, Zea mays
  Clone ID: MRT4577_88342C.1
ctgtgcggcgctcgaggcggcctatttacttaggtaaattgtatgccacgcaatatacctcttataattgaatacgtagcctttttaggtttaatctgctgtttaatcatttacaatacaaacattgtatttttatctattattattgcttttgttgcattagaaattatgatggaatcatttcaagtgcaactaaaacaaaaaattgcccatatttataatgctatatttcttttgagtgctctcataacaaatataattagtaatggcttttatttatctactgtatttccagtattctttatggctgttttattatttgtag

SEQ ID NO: 171885 - DNA, 202 bp, Zea mays
  Clone ID: MRT4577_88343C.1
ttgttattaacagaagcataggaagacaatacaacaatactttgaatctctgagctgtttcagaacagagacgaaaaggggggaaaaagaaagaaagatatcggacgaccaaaccggcaaaagaaaacagatcagaacataaaaaagccggctgctggcaagccaaactatacccaatcactaagccgccattgggttgggt

SEQ ID NO: 171886 - DNA, 232 bp, Zea mays
  Clone ID: MRT4577_88344C.1
agcagtggtaacaacgcagagtacgcgggatgtgcgcggcgagcatgcagggcttgcttaggatctgcacgtatgtgtttgatgatggggtgaagttatcatcacttatctcgatacctctttggatctatcctgtatcagttgcgcatgtggtcttaactcctaaagccctgtttcgaaaaaaaaaaaaaaaaaaaaaaaaaaaaaagtactctgcgttgttaccactgct

SEQ ID NO: 171887 - DNA, 452 bp, Zea mays
  Clone ID: MRT4577_88345C.1
attaacagaatatatcggggatcagtttctcagcgtgcgatacaataaatctgttgcagaacaacgtctggctcctatgctcagattccttgatggatgctggggcaacatggaaaagctcgggactgcggtatggggggggcggacgcgtgtacatgttcaggcctgcatcagtggtggcgagccaatgttttggcatttgccgctgcgttgctcgtacacgggcacgtggattggttccaggatgatttcgaggcgattcttgaaggttatgataaaatgacccaagaaaacccccatcactaacatggataggctgatgatgaacatgtacttaaagaggagcaagggcatgaactccaggcactcggtgaggaccaacagacccatagatgccagcggggtaaaggaacatggagaccatggacgacatgctgacggtgacaacgaac

SEQ ID NO: 171888 - DNA, 339 bp, Zea mays
  Clone ID: MRT4577_88346C.1
ttgttcgctttcggtctctcgcctgtttttagcctaagcacggatttgtaccggccgatttgtgctgcattcccaaccaccctgactcgttgacagcgcctcgagccgcgacagggtccggcccggacgggggtctccccctcccaagcgttggttcgcagagtacttgcgcccgtgcccctggtgacgactcctgtccacactcagattggggccgtgcggggccccgttgttgaagctggccgtgtggactgtcctgcccgggcggtcggccggtccgggcctttttttttttcttcttttttttccctgccttggggccttgtccgctttcccgct

SEQ ID NO: 171889 - DNA, 253 bp, Zea mays
  Clone ID: MRT4577_88347C.1
gaccaagattgtcgtcagacttggtgtgttagcctgctcgccggtggcacgtctctgcgtgggtgatggattggctccgggggtgcgggggagttatctgcgcccgcggtgtgcgttccctgcaagctgcgggtctcggtagctacagattggtggcaattcctcgccagagtcgggcttcgcctcagatccgccttgcctcgtcgtacgaccgcctcatagtctaaaatctcgtgaggatacgtatcatctg

SEQ ID NO: 171890 - DNA, 348 bp, Zea mays
  Clone ID: MRT4577_88349C.1
cccagcgtccgcccagcgtccgtgcatatatatgcatcatccatctacctgtgtggtgcaaaactctgaataaaacctgaataaaacctgattgagcaaaaaaaaaaaaaaaaaaaaaaaaaaaaaaaaaaaaaaaaaaaaaaaaaaaaaaaaaaaaaaaaaaaaaaaaaaaaaggaaaaaagagaaggagagaatctaaactaaaaaaacaaagcaaatgaaacagctatagctgtagtataaattaaaattaaattgactgcaatgtccaatgacttgaaaaggggctggactaaacaaaaccctagcgtaacccaattgattcgctttacatctcatcccccttt

SEQ ID NO: 171891 - DNA, 186 bp, Zea mays
  Clone ID: MRT4577_8834C.1
ccgactagatggcgagatccaacgaacatagtaggccgagaccctccttatgtgattgttggactagatgaacagggagatatgttgcgaggacctgagcaacgtgaatggagaggcgcttacgaaacttgcagacactgggagtggcactgaagctacctgtcttgtattttccatgacagagga

SEQ ID NO: 171892 - DNA, 151 bp, Zea mays
  unsure (1)..(151): unsure at all n locations
  Clone ID: MRT4577_88350C.1
ganaaaaaaaaaaaagacaagcggcgatgatcttaaatgaaagcacgctatatgagacatttttctacacacactaccgtgtaatttgctgaagacatgcacttctctcactctgtggccttaaattaaagggcttgttcctcaaggatcc

SEQ ID NO: 171893 - DNA, 263 bp, Zea mays
  Clone ID: MRT4577_88351C.1
tgtgactacctttgtatttatacgagagacaagctagtatctagtacatttggacagttccttttttgcacactttatgtgccgtgaagtacatgcacgtgtgcgagtggttcacctagcgctaataagagtaacgcctcaggaggtttcccggttgatgttctgtgtcataaagatccacatgacaagaatctgaaacctgatacatccgcccgcactcattctagcagcatcgggaattagttctctcatagtacctttac

SEQ ID NO: 171894 - DNA, 1422 bp, Zea mays
  Clone ID: MRT4577_88352C.1
cgtccgagtcattccaggtcaagtgctgaagatgatttgttttggggcccttctgagcactccaaacaagatacaaagcagtatgtcttgcagcagctcttgcatttgaattgatttaatggtgttgctttcaagatactattacacattttttcaggactccatgcttacaaaggattagtgaattcatcaatattctaaattaacaaaataagatcgaacttcatactagaaatagttgcagaaaggatctcttttgaaatttaatttaaagctttattcccttgtctaatttgtttgagactttaaaaccttttaatagctattttcgttggtgtatttggatcactaaagatggatatacggatctgcaagaatttttatgttttattaccatgatatcgtaaccaggtctgagtttccaagtctgttgagccaaagcagaagttccatgatgaaggatcattctgcactgaatcgtcaaaagtctcaggcaggcagattgccagttccttctgctgctactgcaaaccaatctggcaaagggaaagcagaggctacaaacaagcagactggtatacctaaagttttttactcgtattctttaaagactatcatcatgttcaaatttctaacatctgtcatcatgcagaggcaatggacttcagagattggttggatagtgaatgggccaagcttactggaacaaatggttataactgtgtcttgcttcaagttaggataattcaatcttttgtattacttctgttaattctaatacacttcccctttcagatgtaagcttccttgagttctgcataaagcaatcaactaccgaagcggaaatactcctccatgagaacattggttcccttgaccgcaaccacgagttcatcgacaagttcctcaactacaaggccttcctgtcagcagatgtgatccacatggccttccaagctcccagcagccgtggtgacggtgcagggtgggcaaaccctgctgctgcagctagaggaggcacggtcatagacgcggagctggatggcggcgggaagaaaaaggggaagaaggggaagaaggtgagtgccgcagtgttggggttcaacgtggcgagcaaccgtataatgatgggcgagatccagaacgtggattaggaggatggcggcacaccaacaccaccgtgtatataacatagtttggcctttggttacatgccaccgaagtctcagggctcgagggaagctgggggtgctcggaatggcggtctggtctacctgtttttgccgagggtgggaaactgagcttagatacagggtcatgtgctggtgattttgggttcctgtaacaattggttaggatcctgtaacggacagaaatattttcttcaatagaaactcaccagatggattcagttcagtagtt

SEQ ID NO: 171895 - DNA, 566 bp, Zea mays
  Clone ID: MRT4577_88353C.1
cccttccgggatccgcaaccgttgagtgagaagaaaacagcccggtgacggccatctcccggctatcgcaatcgatctcgaggcgacctactcttgcgtcggcgtgagccagcacgaccgcgtggagatcattgccaacgactcagggcaaaccagccactccctgcgcgtcgtcacgatcgcctgtcaccccactgccgcagccgccctcatccccagatgctcctccagaaccacggcgacatgaaccccatcaacccgtcgttgatgccaagagtctctccgccggcacagttcagagatgcgtctggccccagtgatatcccctggtccgccttcaaggtcatttctcgacctggtgagaagccaatgattgttgtccagcacaagggcgacgcgacgccgattgcagctcaagagatctcctctatggctcttatcaagatgcccgagattgctgaaccttaccttgatagcaccaccaagaatgctgtgtccacagtccctgcctactacaatgacccagagaggccgccccacaaaggatgctggccgtgctcgcctgc

SEQ ID NO: 171896 - DNA, 2981 bp, Zea mays
  Clone ID: MRT4577_88354C.1
gtttcagggggcaccggcagtgcagtcacaggattttgcaataaagctacaccacccatatttctaaaattcataattgactgactaggttgttgacccacctgcataccatggacagaaaatttctgatctacttcaatagcctcttgcattcttctaaaaccaagactggtagaatcatcagataggaacgagggttttaaatctcacgaagtggacactgcagcagaaaaaaataaaatgtctgaaaaggagttgaattctgggtcgactataatcatggggagtgcttctgatgaagctaagaatttgcatgaaccaccactagatccaaagtcagaaaatttatcttctgatatttctggtcaggttcaagagtcaaacctgtctgcagaagatacgcctcctggcatcacagcagccgtggcaactgaagtaaaagttactgatacacaggagaccaaaaaagcagaaaagaaaaggaagcaaaagaaaaaacaggctgctgcagatgctggcaaaggaacatcaaaggcggttgtagcccagcagccaagggcaggaaactgaggtggacaattctgatattggtggtaataagcatgatttaacagatggtacagaggaactattttggggttcacctatcacagtgcaaaatgagattttaccctccaaaagttttccagaggaacatgacgctgacaaagctgaatcgcagtttagttctctatcatctgatcctcatagcatggcaagccagcgtgcatggaaacaacctactcaaggtctcaggcttaagtcactgctagaaatccaagctgaggaacaactgcgtgcacagaaaggattaactactgaaactgctaagccagcagcttcagttccttcaatttcttggaatggcatttcaatatcttccgagcaacattatgggggttcaaatatatcattgggaagtatggaaagtgctgttgagagaaataaaagaagccagttgcatgatttgctggcagaagaagttctggcgaggtcaagcattgcagataatgagaataatgccaatgatgcatttttctctcctctgtcgcctgctgctgttcaggctgatgctcctgcccttgatgataatgacttcattgaggccaaggacaaaaagaacaaaaagaggtcagcaaaaacaaaagcttctactgtgaaggctccatcacctgttgtttcctttgatccaccagctatttcgatgccttctgaaaagggaaagtctgccaagcaagcacaacaggagttagaaatattgccagctccaccaagtggtccatcgtttggagattttgttctttggaagagtgatcagactagctctgtgcctgctccagcatggtctaatgactcagcaaaggtgcagaaacctttgtctttgagagatattcagagagaacaagaaaggagaaccgtatctatccagcaacaagcaccctcaccaactccagcaaaggtggccccgaaccaaagaagtcatgtgaatgcttcttcctggcaagcttctggaccacctccatcacaggcagttgcccctgtccaaatgagttccaatgctcccagtcattccaggtcaagtgctgaagatgatttgttttggggcccttctgagcactccaaacaagatacaaagcagtctgagtttccaagtctgttgagccaaagcagaagttccatgatgaaggatcattctgcactgaatcgtcaaaagtctcaggcaggcagattaccagttccttctgctgctactgcaaaccaatctggcaaagggaaagcagaggctacaaacaagcagactgaggcaatggacttcagagattggttggatagtgaatgggccaagcttactggaacaaatgatgtaagcttccttgagttctgcataaagcaatcaactaccgaagcggaaatactcctccatgagaacattggttcccttgaccgcaaccacgagttcatcgacaagttcctcaactacaaggccttcctgtcagcagatgtgatccacatggccttccaagctcccagcagccgtggtgacggtgcagggcgggcaaaccctgctgctgcagctagaggaggcacggtcatagacgcggatctggatggcggcgggaagaaaaaggggaagaaggggaagaaggtgagtgccgcagtgttggggttcaacgtggccagcaaccgtataatgatgggcgagatccagaacgtggattaggaggatggcggcacaccaccgtgtatataacatagtttggcctttggttacatgccaccgaagtctcagggctcgagggaagctgggggtgctcggaatggcggtctggtctacctgtttttgccgagggtgggaaactgagcttagatgcagggtcttgtgctggtgattttgggttcctgtaacaattggttaggatcctgtaacggacagaaatattttcttctcaatagaaactcaccagatggattcagttcagttgggcaaaccctgctgctgcagctagaggaggcacggtcatagacgcggagctggatggcggcgggaagaaaaaggggaagaaggggaagaaggtgagtgccgcagtgttggggttcaacgtggcgagcaaccgtataatgatgggcgagatccagaacgtggattaggaggatggcggcacaccaacaccaccgtgtatataacatagtttggcctttggttacatgccaccgaagtctcagggctcgagggaagctgggggtgcaatcggaatggcggtctggtctacctgtttttgccgagggtgggaaactgagcttagatgcagggtcatgtgctggtgattttgggttcctgtaacaattggttaggatcctgtaacggacagaaatattttcttcaatagaaactcaccagatggattcagttcaaaaaaaaaaaaaaaaaagcggcccccccc

SEQ ID NO: 171897 - DNA, 1291 bp, Zea mays
  Clone ID: MRT4577_88355C.1
atggtagaattccatttttttccacaatgacaggacacaggagtgcatcagagaataacaatagctgcatactacaatcttttgaaatattcagaaaaaaatggaaggaatggatggagctgatcaaagtcatcgttctgcaaaagtttaaaaaccaacaacgtttgcatcatgtcaggtacagagtagtagcatacagtgatctcctcaaagaacagagtatttgtaaaaatatggaagggacagcaatgctactagcacagtgctcataatccgtacagcaatcttttagctcgagctctgcctttctgaacgtttcaagtgcagaatccgattcactctgattttgccggagaacaagatcggggcagactcttgctcctggcaggactcctgcttgcagacttgtcacgccggggagaaataggaggggatctggatggtgatcttgccttaacaggtgattttgactctgaagcagatctagatcttgggctcctgctcttgctataactgcggcttctgcttcttgagtacgaatggctgtggcttctgcttcttgacttagagcggtttctgcctctggagcgagaacggctgcgcctagcatcatactccctcacccggacatatgtccttgaaaaagcattacggaactcagaatcatctagcttccttatcgcgtgtttcatatcttcatagttagtataatcagctattccaatagttgctccagcctcacgatacacatcagtgaaacagacatcaccagctcgccgcatatggtccttgagatcttgccatgatgctgaagaaggtaatccagtaaccataacacggtaatcagaacgttttgaggcaccgcgttgtccagcactgctatagctgctagatcgatcaaaagaagatgtgcctcgtccaccatgggctaattccacccgcaacctatggccatcaaagttgtatccatcacggccatatattgcatcttcagcatcacgtgcgtcctcaaactcaacaaaagcaaaaccaggaggccttggtggaattttcaagtcaatttccactatacgtccatacttgtagaagagatcatccacttccctctcgcggatgtcgccggggaggttgcccacgtagatcgtacagccgttccgccgggtcatcgttcctgcgacgactcgacggcggcaaggagcaaggaaggcttgagtcgaggtcgagcagcttcgacggatgccggcgtgagggtactgggaattgtggatgttccccggcggggcccgagggt

SEQ ID NO: 171898 - DNA, 272 bp, Zea mays
  unsure (1)..(272): unsure at all n locations
  Clone ID: MRT4577_88356C.1
aacttaatattattattgaaaaagaaagaagatagtttttttttttatttttatcttgacttttttttttttaagttttttttttttttttccaaaaaaaaccacaacctcgacccccctgtttattaggttctcaaataaaaagacccccccaccacaaannnntttgagctagaacatatcctcatataacaagcaccaaacatccaagaaaacccattaattttactctttcccctaccaaaacattcctttttacttcatatcccaaa

SEQ ID NO: 171899 - DNA, 398 bp, Zea mays
  Clone ID: MRT4577_88357C.1
tttttggtcattcctctgttgtttggtgccatcaagttcttcagggacacagtcctatcaacatggagggacattcactgcgaggatggacttggacaggggtcatgcatgtttatatgttctccagctgagcggcactagcagcggacggaaccgggcaaaagaatgaaaaggaggggagatagagtgggttattattgcaccttaaaaggttgcaatgacattaatgatacagaccaattcaactgtatctctcaaaaggatgcttgtctttgatttgatgcagaaaatgaggagttattttttcccgtctttggcaagaatgagacatgactgatgtgtacttgctttagactatctgaagcctttagtgttatttatcataatgcttgcatttt

SEQ ID NO: 171900 - DNA, 603 bp, Zea mays
  Clone ID: MRT4577_88358C.1
gggggtttttgttttttttttttttttttttttttttttttttttttttttttttttttttttttttttttttttttttttttttttttatcgtctgcttcaaaaaccaacaacgtttgcatcatgtcaggtacagagtagtagcatacagggatctcctcaaagaaggggggatttgtaaaaatatggaagggacagcaatgctactagcacagtgctcataatccgtacagcaatcttttagctcgagctctgcctttctgaacgtttcaagtgcagaatccgattcactctgattttgccggagaacaagatcggggcaaactcttgctcctggcaggactcctgcttgcagacttgtcacgccggggagaaacaggaggggatctggagggtgatcaaaaaatcctgtccgtatgtgtggtgccagccctatcttgctcctattgctggtggcagtccacttgtcatacaatgcatcacaatccagctgtgactatccaacgttccaaaccatcatcacgttctcaatattccattatcctaccaatgcaattcccagatcctcacattgccccaatcttgccttaacaggtgattttg

SEQ ID NO: 171901 - DNA, 742 bp, Zea mays
  Clone ID: MRT4577_88359C.1
catatattgcatcttcagcatcacgtgcgtcttcaaactcagcaaaagcaaaaccaggaggccttggtggaattttcaagtcaatttccactatacgtcccaactgcagaagcagaaggtaaaacattaaatttaacatccaggaaagttaatcaaccaaagtagagtcatagagatacaaacaaaaattgaccattcgcaatccacattgccttcccttccagagctccatccatattagattagatggtgttagaaggcaaaacacaattagcagtggtgaagttcacaacgaacagaactttcaatcatcaccaaaatagattgtgacaatacagtgaaaaaaacaagtgcattgtctaacacacacgacgattataaaactcacagtaagagtttattaaactgcaaatatcaatatgagcaaacactacattacatcataggcatctatcaaacaaaattagaaaaacaataaaaaagagaaacaataaacgaccaaaaaataggatataaaaatttaaaaaaaaaaacccataaaaattaatgagggaaattatgtaatcgacccaaccaaccactcaccttgtaaaaaagatcatccacttccctctcgcggatgtcgccggggaggttgcccacgtagatcgtacagccgttccgccgggtcatcgttcctgcaacaaggatactgaatcagccaccaggacgaacagacccaagcaaactgttgcgaataaac

SEQ ID NO: 171902 - DNA, 702 bp, Zea mays
  Clone ID: MRT4577_8835C.1
gcgatcgtcgcacgagccgcaatggcgcagcagaggcttctcgctctcctcctggtggcggccctcctcgtgctctcctgctcgcaagggctggtggaagcgcggaaggtgcaggtgcggcgcgcgcccctcggcggcggccgcctgcttccggaggcgatgatggcgtacacgacgacggactacgggccccccactgccaacaccaacacccacggcggcatggtcccgtcgccggacgacccctcctcgccgccgacgcactgaccggccagtcgatctcaccggcaacaactgtcttgttctttgggattggagctttggaagagaaaattggaggataggatcggaagaagctggtggtcgtgttcttctccctttttgggcgcgcgtgttgtgtgctgctgtgtctgtgtactccagctgtagctgctgctgtgcttagctgattgaagtttgaactgtagtgggtccacagtattatgcatgttttgtttggtgagacgtcagaacccatcattgaatcttgtctgaatctagtcagctctatgtaaagtggaagcgatacatgaatgtacgtagtaaaatggaaaaaaatacgtcgcccaaaaaaaacctttttttttttttttttttttttgcaacctatggcgtttttcaaggaagaagaggtgggtgcgccatcagtggctgcccccccag

SEQ ID NO: 171903 - DNA, 182 bp, Zea mays
  Clone ID: MRT4577_88360C.1
gaatcacccccagaggcgtgcgagcgggaacaggggggtgatttcggaacgccccggggggaacctcccacacctccaacgggcgacctactcgcggggccgcagccccagggccccgccccagcaacgccgtcgccgtcgcgccggcaccggtcagacgtcggaggctatcaagaaggtgg

SEQ ID NO: 171904 - DNA, 360 bp, Zea mays
  Clone ID: MRT4577_88361C.1
tacgcgtacgcccacgcgtacgcctacgctttcagtcatttctctgccatccataagatcctgagaacaggcgtctatagcctttcaggcgagttccaccaagacttcccagcggctgcatacctcgacagtcacgtaaacctaccactcaatgtgctgggaacccgatggctcacatagatgcacagcgctatgcattccatcccctgatcagccgtggagcccgaccgcgtggtgcctgagcaaccgaaagagctcctcccgaggctggtctacgagttcttccgcattaccgcaacttcctcttgctccacgtactccgactcggacagctccatggacctgtgcagctgtccgttc

SEQ ID NO: 171905 - DNA, 321 bp, Zea mays
  Clone ID: MRT4577_88362C.1
ccttccttgttttttcttttttgttttcttggttatgtatacacttttctcttgacagccagaggaagcctgtcaccatttgtgctttagcaagggaacaaaaaagatatgagctgcatcaaaggaaggcccccacaatgaaccaaagatctttctctgaccatgggtaaaacccaaaagggccccggccttccctggcctttaggggcggagggggaacttgccagggccccctccccgggacccaggggggggggggggccctctgggcccaaattcgctggggcttaaaaccaaatcccgggcctaacggcccccgcc

SEQ ID NO: 171906 - DNA, 1122 bp, Zea mays
  Clone ID: MRT4577_88363C.1
gctcttcaaaagaaatcgactagctacatcttttagttaactacaaactagatggtggcgaaagggcctctagcctagctgttaaggctttcgagtccaagtcctgggttcgattactatcgaagacgaattttttcgggcttggttaaaaaaatcccctggctgtgcctcatccgctctccggatgggccgttgcagcgtggacggttgacaccggctcgttagtgatgggaggccagagtttggggattttctgggggaccattgttttggtctattcttaatataataccgggaggacggtcatttcctccctggctgagttttacaaactagatgttgacatgcatattcatgtgaagagtttagttttatgcagccgtatctcatcataatctgtagcttgaactgaaatgtagattgtccaagatatcccaaatcccttgccggaaaatttaccaatggttcttataaagccacctgaagcatgctcaactgctgaagtttacaagcgattcaggttggaacaaacaagtcaagctgatcccatgaccctgctcgaggaaataactcagaatgggatatcacaagatgtttgtgttaatgacctagagcctccagcttttgaggtgttgccctcacttaagaggttgaagaaacgaattattgcagctggccgggatgattatagtgctgtttttatgtcaggaagtggaagcacaattgttggtattggttcaccggatccccctgcattcgtgtatgacgatgaagactacaaggatgtttttgtgtcagaggcttgcttgctcactcgcgacgagaacgagtggtacagggaaccaatctcggccaatgccacgtctgccaaagaaggtttgcaagcctcagttgctgactgatttaagtcaggttctgtatcagttctgtgactattatacagatacaggatttgatcaacgcctcgacatggtaggaaagaacactacggtataggcggggattgttcacaagacaatctggttctggaatggaccattttcagtatagcaactattgatttgagcaacagtcagactaatggttccaggagaaaaaaaaaaaaaaaaggaccctagggcc

SEQ ID NO: 171907 - DNA, 341 bp, Zea mays
  Clone ID: MRT4577_88364C.1
tcctcgcgtccgcccacgcgtgcgcgcacgcgtggagatatggagccagctgaggcttatcaggaccggagcgaccctggaaagagagcgagctctaagcagttcggcgaggatgccctcaaggcgggaatggccggcgacggcgggatgcacgacccctccgacaaaacccactcattctgcggtggcggcagccctcgtggaagtcccaccaatgctggcctaaaggaacacctgacagatgacggggtgaatactctgaacgtatagctgaacgatcactggcatggcacatccaagacgctgtgtgtgagcaacattgaccactgctacgagtgcaa

SEQ ID NO: 171908 - DNA, 669 bp, Zea mays
  Clone ID: MRT4577_88365C.1
cccggtcggcagcagcagcagccatggcttgctccgcgcaccttgtgtcccagagcctctactcgtcccaccgcgccagcccgggcgggcctaggaatctccgttcccagggccgaccgccggcgcgggcgtctccctctgcgaggcctggctcaagggtcagtggctgccggggtgtcagcctgagagtcgccgcgtcgttcgagcagggaaggaggcaaattgacaaggatgctgggatgacacggcttaacctattctcaccttgcaaaattaatgtgttcttgaggataacgggcaagagaccagatgggttccatgacctggcttctctatttcatgtcataagtttgggtgatactatcaaattctcattgtcaccaagtaaaagtagagatcgcctgtcaaccaatgttccaggtgtcccagttgatgaaagcaatttgatcatcaaggcactcaacctttaccgacagaaaactgggactaataacttcttctggatacatcttgataagaaggtcccaactggtgctggtcttggtggtggaagcagtaatgctgcaactgcactatgggccgctaaccagtttgctggctgcatagcttcagagaaggatcttcaagagtggtctggtgagattggatcagatatcccctttttctttt

SEQ ID NO: 171909 - DNA, 2067 bp, Zea mays
  Clone ID: MRT4577_88366C.1
gactagctacatcttttaggtacgggtttatttatggaggcgcaggggtctctaccctagctgttaaggctttcgagtccaagtcctgggttcgattactatcgaagacgaattttttcgggcttggttaaaaaaatcccctggctgtgcctcatccgctctccggatgggccgttgcagcgtggacggttgacaccggctcgttagtgatgggaggccagagtttggggattttctgggggaccattgttttggtctattcttaatataataccgggaggacggtcatttcctccctggctgagttttacaaactagatgttgacatgcatattcatgtgaagagtgtagttttatgcagccgtatctcatcataaactgtagcttgaactgatatagggctgctcactcgcgacgagaacgccgggaatcgtaaccactcaccccataagtttatttcgacacatcaagtctaaagcaagcgcactactcctcggatagccacggcggcagcagcagccatggcttgctccgcgcaccttgtgtcccagagcctctactcgtcccaccgcgccagcccgggcgggcctaggaatctccgctcccagggccgaccgccggcgcgggcgtctccctctgcgaggcctggctcgagggtcagtggctgccggggtgtcagcctgagagtcgccgcgtcgttcgagcagggaaggaggcaagtggaggtctcttatgacccacaagcgaggtttaaccagatagcagaccaaattgacaaggatgctgggatgacacggcttaacctattctcaccttgcaaaattaatgtgttcttgaggataacgggcaagagaccagatgggttccatgacctggcttctctatttcatgtcataagtttgggtgatactatcaaattctcattgtcaccaagtaaaagtagagatcgcctgtcaaccaatgttccaggtgtcccagttgatgaaagcaatttgatcatcaaggcactcaacctttaccgacagaaaactgggactaataacttcttctggatacatcttgataagaaggtcccaactggtgctggtcttggtggtggaagcagtaatgctgcaactgcactatgggccgctaaccagtttgctggctgcatagcttcagagaaggatcttcaagagtggtctggtgagattggatcagatatcccctttttcttttcacgaggagcagcatattgtacaggtagaggagagattgtccaagatatcccaaatcccttgccggaaaatttaccaatggttcttataaagccacctgaagcatgctcaactgctgaagtttacaagcgattcaggttggaacaaacaagtcaagctgatcccatgaccctgctcgaggaaataactcagaatgggatatcacaagatgtttgtgttaatgacctagagcctccagcttttgaggtgttgccctcacttaagaggttgaagaaacgaattattgcagctggccgggatgattatagtgctgtttttatgtcaggaagtggaagcacaattgttggtattggttcaccggatcctcctgcattcgtgtatgacgatgaagactacaaggatgtttttgtgtcagaggcttgcttgctcactcgcgacgagaacgagtggtacagggaaccaatctcggccaatgccacgtctggcaaagaaggtttgcaagcctcggttgctgactgatttaagtcaggttctgtatcagttttgtgactattatacagatacaggatttgatcaacgcctcgacatggtaggaaagaacactacggtataggcggggattgttcacaagacaatctggttctggaatggaccattttcagtatagcaactattgatttgagcaacagtcagactaatggttccaggagaaatttatcccgtagatgtataaggatcaaatgaacaagggaaaatgactttctccgtgaatttttaacaatacaagcacacgtagtttcgaaacaattatacaaataatgatatgcatagcagcattagacgaccaatc

SEQ ID NO: 171910 - DNA, 1506 bp, Zea mays
  Clone ID: MRT4577_88367C.1
atggagttggtggagggcgagctgggaaggttcgcgatgatcaggggagaagagccaacacaaacgtacaacaggctcaagaccctggtcaacaagattaggagctatggaagcataagatggacggaccacgacgtcgtccgacttatgctaaggtcattcacggtaattgacccccatcttgtcaaccttattcgtgagaatcccaggtacaccaagatgatgcccgaggagattcttgggaagttcgtgagcgagcgcatgatgcaaccagtagcagggagacgctgccaagtgccaagcaaggtggcacaagtggaggccgctagcctcaacgaagatgagatggcgctaatcatcaagcgcttcaagaccgctcttaaaggacgcaaggagtaccccaacaagagcaaaacaaggggaaatcgctcctgcttcaaatgcagtaagactggtcactttatagcaaattgtcccgataatgttaatgaccaggaacaagaaaagagcgggaagaaggagaagaaaaagagctataggaaggcaaagggcgaggcgcaccttaggaaagaatgggactcagactgctcttcatccgactccgacgatgaaggactggcagcctcggccttcaacaagtcttcactcttccccaacgaacgccatacgtgtctcatggctaaggagaagaaggtaattgttcgagaaacccctaaatatactacttcaagcgatgatgattctagtgatgatgaagtagattatactgatttatttaagggtttagatagagctaaagtagataaaattaatgagttaattgattctttaaatgaaaaggatagacttttagagaagcaagaggacattctatatgaagaacatgacaaatttgttagtgtacaaaagtctcttgctttagaaactaaaagaaatgaaatgttatcctctgaattgtctgtgtgccatgaatcaatctctagtttaaagattttgaataatgatttaaatgctaagctagaggtagccaataaatctagttcatgtgtagaacatgttgtagtttgcaatagatgcaaggattttgatattgatgcttgtgataaacatcttgcgtctattaccaaattgaatgatgaagtggcaagtcttaatgctcaacttaagacttgcaagattgattttgataagttaaaatttgctagggatgcctacaccgttggtagacacccctcaattaaggatggacttggctttcgaaaggaagccaagaacttaacaagccaaagggctcccattcccaacaaggagaaaggaaaggcccctatggctagtagcattcaaaggaatcatgcttttatttatgatagaaagtgttctaggaatgtgcattataataggagttatgttgattataatgattcacatgctacgtttgcctctagctctacttttgtgcatggtaggcctaggaaaagtaatggtgtgcatcatgtgcctaggaga

SEQ ID NO: 171911 - DNA, 415 bp, Zea mays
  unsure (1)..(415): unsure at all n locations
  Clone ID: MRT4577_88368C.1
gacgcggggancacccagaanagnnggagcatgcagaaacacaccaagcgaagctacctagcaacgacnnaacaacaagggctaccaaganacnagcccgccttgcgctncttgccctttttgtgagcgcaacaaatgcgttcattattggggggggcgcacttgcttttttttctgnanaccacaggcccncccaccagnnacagcaggggggggggaacacccagccgcgcaagccnacaggcnacaacaagcgcnggcggcaagcgccnaacaacaaccagaaaacacaaggcaacaacaanccngggcacagcnaaccagacaaaccaacgcaacgcagcagcaacaacaggggncnaccagcacggagccaacnagacggggggaacccgggcgccgacnggcaacagca

SEQ ID NO: 171912 - DNA, 167 bp, Zea mays
  Clone ID: MRT4577_88369C.1
aagaattctggtggagtggcgcacacagtcttcttactcataccatgagaggactcatacaacgttgccttggttgtaagctgagcgctcaaaactacaattaccccaatggatgaggaatttatttgcagtcagcggcagtaaatgaggcattactactcacgaca

SEQ ID NO: 171913 - DNA, 120 bp, Zea mays
  unsure (1)..(120): unsure at all n locations
  Clone ID: MRT4577_8836C.1
aaccttatttttnntgaataagaacctccatatgtgtgagaaacaatgcacaggcttaggggatatcacattcctgtgtaaaagatcatattaccatgctctctttagtggtatacatgc

SEQ ID NO: 171914 - DNA, 348 bp, Zea mays
  unsure (1)..(348): unsure at all n locations
  Clone ID: MRT4577_88370C.1
gnacgtgttcccaaaaggagggctaccccaggcccagtttccccgatctctctctctctggacgacgacgcctacgccagggccccaggccgctgccgtcctacaccaggtccccttcgccgtcgacgagcaccatgtctgttgttacttctctggtgatggaccgtaattcatatcaaaactgaaagattgcagcaggatataccggcttgagtgtaaacagaggatcttccatatgcctgatgattagttctttgtcctccctacactcaccccatacctcccccccacctcatatcacccccccactgccaccgcccccctcttcccacacctaccgacaaccac

SEQ ID NO: 171915 - DNA, 612 bp, Zea mays
  Clone ID: MRT4577_88371C.1
attccgccctcctgctcccggcgccagcagttccccaaccaacctctcgatcgatcgtagcagcttctccttttcgatggcggtggatctgaccccgaggcagccggccaaggcctacggcggcgacggcggcgcctactacgagtggagcccggccgagctgcccatgctcggcatcgcctccatcggcgccgccaagctcgcgctcgccgccggcggcatgtcgctccccagctactccgactccgccaaggtcgcctacgtcctccaaggcaagggaaccgttggcatcgtcctgcctgaggccaccaaggagaaggtggtcgccgtgaaggaaggcgacgctctggcgctccccttcggcgtggtcacctggtggcacaacacccctgagtctgccacggagctcgtcgtcctcttcctcggcgacacctccaagggccacaggcccggccagttcaccaacttccagctcaccggtgccagcggcatcttcaccggcttctccactgagttcgtcggccgcgcctgggacctcaaggaggacgatgcggccaagctcgtctccagccagcctgcgtctggcattgtgaagctcaccgctgggcagaa

SEQ ID NO: 171916 - DNA, 283 bp, Zea mays
  Clone ID: MRT4577_88372C.1
ggaaccaaggggaaaactgcatattcaattttgggttaaaaccaaagcccacccttccccccaaaaacatagcccaagggaaaacaccccctccaaacttaaaacacatttggaaacggggtttttcaccaaggggggggtaaccaaaccataaccccatggaaagggggggaacccccaaatttttaaaaaaaacggggtaattccgggttttcaaaccagggggttttaaaaccacctctttttccgcgggaaaactgggggaggataaatttgggggcca

SEQ ID NO: 171917 - DNA, 496 bp, Zea mays
  Clone ID: MRT4577_88373C.1
ccggccgggctgataggtcataagcagcgagcgacacagggcaaaaaggagaggccgagaagcgctttaacgataagactggtgcacccgtagcggcacgggatggcggccacggagtacttcgtggcgctactcggaggagcacgactgccggccgacctactccctcggcgcagtagcgcgtgccaccagaaggttaagatccaagacgcgccgagggtctgcctgcaccgcgccagggtcggttgcgaggacacgtctgcctccggcggcgaccagctcatcgaagacctcaaggcaaagtgggacgcctttgatgacaagcccaccgttctgctgtacggaggtggcgccggcgaggagcatatggatgaccaccggcgatggggccgccatcaacgccgagccgctgctgcccaagatccctgagctagacgacctcgactacactgcttggttcgtggaccgctacctcactcttcaagcaaatgatgaa

SEQ ID NO: 171918 - DNA, 560 bp, Zea mays
  Clone ID: MRT4577_88374C.1
ggcaacagatgtaaggattcaatattcgacatatccgtttatacagcagtttgtagtacaagactggcggagtcgcattaacagcgacgatacaggcaaccaaaaccaccatactctgggttaatacactcgtaattggagaagagaccagaatgtgctgattcctgcaatctggctgggtggggtgtgtcgagctcaagcaacggcttggagggccctctcgaaggtcgcttctgatgctgccgcattcttaactagcacatggtcaggatgcgatagcttcagctggctgcggacggaaagagagttaaactttttctctttttttgtggatccaaagtaaagcatatgtattaggcactgaccaagcagaaacacaacaaacaaagcaaggaacgttctaattataacatccagggtgtgccagcaaatggtttcgagtttatccatagtaattagggtcttgatgctgccctcagcttttcacatatcaatctcctatgcttgcatgtcacaatctactaacatccctcagaaattcattggacccttgcagttgt

SEQ ID NO: 171919 - DNA, 309 bp, Zea mays
  unsure (1)..(309): unsure at all n locations
  Clone ID: MRT4577_88375C.1
gacgcccgcatgcactgcgtaccgtgaatgctcggaattcgtttttcgaggtgtatctaacaagccgccgtgcgcccggcggggcccggctatcctttccggcctcttgtgtggtgttacccacgctacccagccatcggacgtcgcccgttcttccgtgcccttcgctttgatcatggaggaggaacggagcggttcgaggtcggaggtgcgcggaggtggagtctgtggtgagggcaccggagccggttctcggctcaaccatagcgcctcctacanccgcgccgctgacgtggtgccttcctcgcg

SEQ ID NO: 171920 - DNA, 231 bp, Zea mays
  Clone ID: MRT4577_88376C.1
cttaataatttctttctttctcattaattacatggggaaatttatcctttttagctggtcttctatcccaaacactccttgagaaacacttaaaggggttattatgtttgtattcacctaaacccacttgagtaaaaagaaaaattaaaagggaaaatatacatatatcacatttttaagggaaaaaagaatacccgaaaatcccacattattatggaaaggggggggggg

SEQ ID NO: 171921 - DNA, 127 bp, Zea mays
  Clone ID: MRT4577_88377C.1
tgctagaagccatgcaaacaccctactgcatgcaaaacaacttatgaatttcatgaattgctagataatggtatggatggttacttgaatgcaagacactttatggcgcgatactgcgatgaattca

SEQ ID NO: 171922 - DNA, 409 bp, Zea mays
  Clone ID: MRT4577_88378C.1
cggacgcgtgggcgaacatgaccttgaagagatggtgtacacactatccgtggcatgcttgtgcatccaccacagctcaacctggaggcctactataaaagcggtaggttgatctttcctgctaatcaaagtgcaaatgacgaaattgacccttgagttttttttgttgttgatgcaactagtcatgcttcttgaagggtaatctgcagtcacttgtgctggtgagaaggcctaaaatcgggaagcccctgacgtttgactcgcgcgatccaaaagattacacgcgctcaagctacctaagagatcttaaccggcacatgcagctctctctggagcaactaacattcaattgagtttgaacagattcactgttattttgtgcattatttacgcttgacccatgcacact

SEQ ID NO: 171923 - DNA, 332 bp, Zea mays
  Clone ID: MRT4577_88379C.1
gggggaaaccttattttccatcctgtaaccatttttttttagtaagcacaatagcattttccattaattaaaggctggaacgaaaacaaattttgtagggtgctcgtagttcaacaatgtcgtaattttgctcaaacatttgatgacaaaaagttttttgaaacaattctgggatcattttgtaaaccattcaagcgtttcaacacctaaacggtcgatgtttttttttggaacattataattctgggatcagcccccacttcctacctttttgttttgtcataaacctcgattttttttttttggaacattataatggtcaacaaggtttt

SEQ ID NO: 171924 - DNA, 287 bp, Zea mays
  Clone ID: MRT4577_8837C.1
cacaagctgcgttcttcctttctggtggtgcttaacatgcttttcttggttggtactctaccagtaccagtgccactccgaccaaccctgtggccgaatacgatgacgttccgccctactactggattatttatttttttgaaaggggctgtatgcatctgtctctttctctatatgtaataatgcagtgtgaggacacacattatcatgtgtggtatgaccaataatatatgcatgggcataataaagttttggttttaatgccctcgggcgggatgttttgcgcc

SEQ ID NO: 171925 - DNA, 338 bp, Zea mays
  Clone ID: MRT4577_88380C.1
acgcccgcaggcaccggaccggaagcccgggacgacccacgcggccggccaccaccacacacaccacaaactaaaggaacggcgcaaaagggaaggcaagaagaacaccgggaggaagaagaaccagaggagaagggaaaggagccagccgagtgggaggactcccaagcccaggccatcctggaggcggagaacgcgaaccagcaaccgaagagccacccaaaggacaggaacaacaacaatgcgaggcagacggaaagcaccgggagcaggaaggccggagtcaccaaacaaccataccggcggcgcaaggccggcaggaagaaccatgcaagacc

SEQ ID NO: 171926 - DNA, 190 bp, Zea mays
  Clone ID: MRT4577_88381C.1
ataggaacctggaaccatataaggctatatagaaggctgaatctcacaccaactatcttgaccatatcgagcgacctttgtgacgagaatggagggacgtcctaatgctgtgaagtctagccttttgaattcgtagtggcacgaacagagagtacttgctgacccaggagcaaggcatattagagactaa

SEQ ID NO: 171927 - DNA, 294 bp, Zea mays
  unsure (1)..(294): unsure at all n locations
  Clone ID: MRT4577_88382C.1
cccactctttctctcactcatacncaagattctttccactcactcactcctatatcacaggtatgtctctatactacgcgacacctacaccatcaatcacatctccacactctctatctacattaacaaccccaactactacaacctaaatccacttctgtctcacctaatctaatctataactcctatccttatcttcaatactaccctcaatatatacaatatactatttccacaccaacctaattacttactctatcatacactttatactctcctcctacccaccaaata

SEQ ID NO: 171928 - DNA, 249 bp, Zea mays
  Clone ID: MRT4577_88383C.1
ggccaacttaaatttgggtttccaaaggggctttttttttggaaaaaaaatggtttgggtttatagatcacgattttcgtttacagggaattttttttttgggtgaaaaaggtttttttggcttaaaatttaaacaagggttatgggccccagaaagggtttggccttcgtgtaacaaaacttttttttggaggggggcaagtttgtaaatttggggcgaacttatttacggccttggggggcttttta

SEQ ID NO: 171929 - DNA, 255 bp, Zea mays
  Clone ID: MRT4577_88384C.1
gagacacatgtcttaagggcattgagagccccccatgctagggagagagtaggatgtgcctgcctcatctccgcccagattcttacaaggttattagagcttttggacaagatccacactcagttggatagagagggtcacgagttggcactatgtgtaactggatattcgggtggacctaaagggtcggtactcagacttctcaatgcagcccagatatgacaacatggaggctaagctcccttgataatccaa

SEQ ID NO: 171930 - DNA, 282 bp, Zea mays
  Clone ID: MRT4577_88385C.1
ttcggttttagcacgcgagcgccggttcttgggggttcctggttctgctcgctaggctcgctgctcctttgctaccctctagcgtcgcgccggtatattcactcaccaggtctaccgacccggagtgctgttgcacgccctcctatggcacgttatttgccttgtggcctctgccgctggcgggggctggaggtggcgcgaggagcacgggccggaccggccgccccaactgccgggcccggtcttggcaccaggtacgcgcactgcgccggcgtcttgacc

SEQ ID NO: 171931 - DNA, 258 bp, Zea mays
  Clone ID: MRT4577_88386C.1
gcgctcgtatagagaaggagaaatatcctcagtccctagctacggatctggatggcgtaccgtggcctcgtcttctacatgaccgtcggcggcgccccggcgggccggatcgcgatggagctgtacgccaacgaggtgcccaagaccgcggagaacttacgggcgctgtgcacgggctagaagggcgtgtgcaaatacgggaagccgctccactacaaggactgcacattacaccgtgtcatcccctagttcatgtgc

SEQ ID NO: 171932 - DNA, 312 bp, Zea mays
  unsure (1)..(312): unsure at all n locations
  Clone ID: MRT4577_88387C.1
gctccttcnngcgcttggggggagcgtgttcctgcngccggttggccacctttctgtggtgccccctgtcgcctacttgccccagcttctgcttgcgttcaacccacttgctctgcctaccgtcactgcctaccaacaacaacaattgcaacagtttctactatcgctcattcaactagccatggtgaaccctgccgcctacctacaacagctccaactgctttcatctagccctgttgctgtggttaatgcacctacatacctgcagcaacagttgctgcaacagattgtacctttgccgggaccccgcta

SEQ ID NO: 171933 - DNA, 414 bp, Zea mays
  Clone ID: MRT4577_88388C.1
gatcaatacaaggcaagtagccactttcagctccacaacaagtagtacgtgagctccacttctagtacgtgtgtgtgtgtgagttcatctgttcgtgagtgagagtgagagcagcttgtgtgcagccgctggctagctaggcttcctctgttagagtacaagtgagagctagctgcttgtagttcgggccaacatatctagcctagtgactagcactatggtctttctatttcgtataactgcaatttcatttatgttgttataagtttgttgctgtcagcatgagttaacttggtatgcagtaggcactgatctcattcttagactgatacacccgcagcgcgcgttcaggcatcatttggttgttagactgtttagctatgcagagtgaaataccagttcagttgtgctagc

SEQ ID NO: 171934 - DNA, 1096 bp, Zea mays
  Clone ID: MRT4577_88389C.1
gtccaaaactccttgagattcttgtgtttcaaacattctttggaatttgagctccccagcggatgccattgtctgattcagttggtgcttagtgtagttttgtagttctgtcctgcttatgctactagctctgaccttagagcggggtttgttccttgtcaatctgattggttcacccattgcttgctttggttcttgtaactttttcatgtcaatacttgattcatccatcatggttccaaagagtttcttgtttttctgctaactctgctgaggaccatataagttctttggaaactcgcccggtaaccctagacttttagaagcaacatgtacataagcttagtcaagttcttggatcacaatattcagatcaatttttttgagcattctgcaagtatctgcgtccatcattggtggatgtctagagaactattctaacatctcagctgtctgaaaaaactgcctagagaactattctaacatcctatgctgctaccaatctgtgactggttcgacccattgtactttgtcatgttagtagtcacctaattctttcatcatcgggttcgaaagagttacatgttttccctccagtaattaattctactgtagaaccatatattaatgttcttagtcaaccctacctccccctaaaaggcctctttctatcgaacaaaaactcgccccatccttcacctgtgcagttactcatgcacattttgataacagataattttggcaccatcaagtgtaaaaagttgcagtgtcataatgtctgttaactaattgtaatagagtttgttgttgtggtttggtaacagttgtggttgctcttagatgtcttctgtaaataatgagcatcgtgttcaaattttgtagctcagtagaatgccatcttttttttccctggactctcttttggttttgggtgtctataactgactgaggcagttattgggaattatgagatgcatatgttacaatagaatcctatgccctgcgtgttttttcttgcatttgtgaatggtataaatctactactgtgcggcatgtgtattgataaaaaatcaagggatgtcctgagatttttttg

SEQ ID NO: 171935 - DNA, 509 bp, Zea mays
  Clone ID: MRT4577_8838C.1
caagcgaagcgtggagcgcacactgaaatcatcacagccatggagctatcactgctgccatactgggctagccgctcagcgagcagtacttcgccagccgaccacggagtggacactcagccgcctgcgcacagaggcacgtcggcatagaagacgctcttagacctgctacggatcccaccgacgcgcgctctacggctcaggtcacatcactatatgagcgatgccaagagacaaacagctctgatcacgtcatggaggcatttaatacaactgacgcctcgatggacaagccaacccctaccactcgtcgaatgatctcatatcacccgctgacatgaatgatgcctttccacagccgacctactgacgagaaaagcactgaaaagccaacgaacgggacctttcctctacaataatgtctatcaccttgatcatgcagacggtaccggcactgccaatggtgaatactatagcaccagacctactcattgaattgtggtatggag

SEQ ID NO: 171936 - DNA, 581 bp, Zea mays
  Clone ID: MRT4577_88390C.1
gccggccggtccgagagttcagagttcgccgatcgcagtccatagctgcccgatcccgatctccaagacgagctgccacctgccaatactactgcatggtcaccgcatccagcttctgctgggagatgaggaggccccgccgcgttcacctgctggcctgccttgtcgtgctcgccgtgatcctaacctcggggcctttcgtggaaacgtcaatggcgcgcatgatgatccgcggcgtagacccgccgcgcgagctgctaccggcgctggccgtggtcgtagctgctgaggctgatgacgggcgccggagcgcggtgaaggcgacggcggagggccgaggcaagagagaagttccaggcggggctgatccgcagcaccactgaaactgaaacacaaacatccgataatttggcccactaagttttcgttccagatagtgtttgatctggctggtttgttccgtcacccaatcatcgaagtattatgattaaaaaacaatactgtatcattttggccacctcacgagaagttgtaacaaccaatcaagccaatcggaaaaaaaaaaaaaaaaaaggccccta

SEQ ID NO: 171937 - DNA, 614 bp, Zea mays
  Clone ID: MRT4577_88391C.1
ggcactgagtacctctgactgaggaagaagttgaagaattggttgttgaattccttgaagtcgagagcaaagcagctcaagcacaagagtcacttgaaaaagagtcactggacaaaattgaaactgaagtaagattggagttatctgagaggcttcaaggggatgagttagaatcagctgtgtcaactgagatggagcaattccagatgcaatgggaaaatgaacttgatgatctagagatccgtagttctattcttctggaacaacttgatgctgctggaattgaacttcccagactctataagacaattgaaagtcaagttccaaatgtttgtcaaactgaagcatggaagagcaggacacattgggctggttctcaagtgcctgaagaagctacccaatccattaaaaaggccgatgaatacctccagtcttgcagacctgtacggagaaaacatgggaggttgctggaggaaggtgctagtggttttcttgctgggaaagttcctgttggggatgatgattctgttaagtgtcatgagaaaagttggagctctttcaatgaacttattaaatctaaggagagtgctgagaatacatttggtagcagtaac

SEQ ID NO: 171938 - DNA, 1533 bp, Zea mays
  Clone ID: MRT4577_88392C.1
cgggtattactcctctggctgcagcattaagattattattcacaaagaatgcaatgaattggtttgctcacccttatttggcgttcctaatgtttgtccctacttcattgattggtctattgctgccaaggcttacatgggggctatcggagcaagcacacttttggggtgcttttgggttgtattctttaataactatggtctacacactagctgggctgagtggaggttttctaacatttttcatttccatgtccatgcttcttggacgatttatctctagaatcattaggaagcagtggagccaacaatcacctaggtcgttggttgcgtatgtgctgcctatgaccccatgtctcctttatggtctttactatggtggattccttatccagttcctgattgaaaagatgggcatgatgggatctcttccaaaaccatatggatattttgtgcctgatgttattgttggagctgtagttggattagtggttggttggtgttttggtcctctatcacctgttgctagtcgttggttgtcgaagacttcaattatccatggcttcctgcaaattacagtggttgctttggctatctcatcccaactgtttccttacagcactggagcaccaaaaagagttgttcttcaacatacttttgttacagatgctaataatatcgtggattcaagctatggtttctctgtggttgattctaactcattggagttccttttcaacaatgcacctgaggccgccaaatggctgaaggataactctgagttgtcctttgaagaaaaatatcggtctgatagaagctcatggttggctttgtatcctgtcccattcttgttctctggaagtttaaaattccaggcacaaactgaagagattaaaaagtactaccagcatttccctcagttagctgttcaggagatctgggataacaatggacagcgaagggtgcatctcaaacttgcacttggttccttatcagaaatttggacctctgtgctcaatattactgggccactatcaaattggtccttcgctgataacatgctcccagctcctcaaactgtaagtggtgggccaccatcatatatttgtcgactcagtggaaagagcgatgtggattggtctttctggttggaggcaaactcttctgaaagtctgagagtcgatgtcgcagtacttgatcagtaccttgttgatagtacaaagaaactcaagagcctcttcccaagttgggcagacttgacagccttcacaacatttttctcaacgtatcatttatgaggaggtcaagtatttgatgcccaacaagtgtaaatcattttctctttgtagccctacgtttcggggctatatgtggttttgtcaccatgatcagctggacctgagccccgaggctggtgtttgtaaaatctttgtaagcgtgccttgatgtattcatgaatcacacaagattgtaagaatctcaagtcagtcataaattttttaccacttaatcattcacgattgacggtatggc

SEQ ID NO: 171939 - DNA, 213 bp, Zea mays
  Clone ID: MRT4577_88393C.1
ggggttcttgagagaacaatggagggggacacttagatccagtccatcaaaaataacggctccacagattttctacacgcactaaccaaacctgtactacatcatacacatttaacgacctggcttagacacaccatgggatccagatacctttgagctgcatcaatgataacgaacaccagctatgcgaggctagtcgctgctcctggatca

SEQ ID NO: 171940 - DNA, 692 bp, Zea mays
  unsure (1)..(692): unsure at all n locations
  Clone ID: MRT4577_88394C.1
gcggcggcggcggcggctcctgctcatggcaggagctcaatgcggcacaggaccgcgcgccgggccgctcctcctcgtcctcgtcctcgtcctgtgcggcttccttgtgctgctcgtgcctgcggctcggcgcggggacgacgacgagacggaggagttccccgtcgcgtcttccgcttcgtcgtcgtcgtggcactggcacgccgctgatgggcgccgccgtgccctgccgcggccggccgccgcgacgtggccgtggcgccccgcccagccccgggcgcgcgggaggtggaactccgcggggcaggacggcaagcacgaggtccccagtggccccaacccggactaatcggtagccgtagccagagggtggtcgtgaactccgatccgccgtctgttttcggcgaactgacgccaagctccttccctgtcccttgctcctgcctcttcgctggtggtcgctcggccgtgtagctaggcgtctcgtgtcagcttcttcgntttgcttgtatcttctgtcttcttaattcttctccgcctctcctctctttctcctttatcagagatgatgaaaatggatgtacaaaaagatgagcatcgaacgcgcgcgcgcattactactacttgataaacttccgctattgctgctgtgctcaaatctcgtcaatataatataatatggtcatcatctc

SEQ ID NO: 171941 - DNA, 401 bp, Zea mays
  unsure (1)..(401): unsure at all n locations
  Clone ID: MRT4577_88395C.1
tttcaccacgcgangcgaagcaccagctcgttaactacatactggacggtatacatggaggggcatgatatctgtactcatggggtgtataaagtccgacatggacgcaaccagtctaaaagaatccgtgactcgagctggggaggggcaaccgctaatacaccagtgtagttcttagcgggtccatcataagatcctcacatcatgagctgatgctgggtacactaagattcttctcctgattaagatccttataccggactgtcataacacatgacacccacaggcctgcgtgcgtaatagatattgctgccattcctgtcaatgttgcattcatgacagatatttatctatatggagacaccctgtctttggccatcactattggatgaccagccaaa

SEQ ID NO: 171942 - DNA, 154 bp, Zea mays
  Clone ID: MRT4577_88396C.1
gttctgtactgctatctgaagaccgcgcttctaagatagcggacattaacgtttggcgcggagtgatttctcaagggcaaacgaccaccaattgttaccaacaagcgttgttcgcttgccttcttgccggggatgtgtaccacttctgtgcttt

SEQ ID NO: 171943 - DNA, 1895 bp, Zea mays
  Clone ID: MRT4577_88397C.1
gcatgctcccctccgtcagcttgtttcctcttatgcggccgccctcctttttttttatttgctctgaatatattttttatatgaactaatcttcacttgcggaaattatagttacataaaaacacgaaagggtgtgttcaccacaaattggacttacaacagagccaagagtccaggaacttcaatgcaatgaacatttggatctaagaacagcttcggcgagtagattaatttccactatgttgacgttcaagcctccagcatacaaaattgtggttcgagaagctgctgcatatcactcagggaaatgtgcactttgttttgtgatcattgtcgtctataggtataagaacaaacttcagactacttctgccatgtatggccatttcatcttggcttaaccaacaggtcatgcattctcaggctgacccaatgccttcagatcatcactggaatcaacagcagttctctggttcatttgttcagatgcttctgtgtcaactgcttctgaacgatggtttaagcttataacatcatcaacatttttgttaattattgcactgttctcgttgtcctttaccacgctatccaaattttctggctcctcagatactacaagatcagatgtctgcccgttctgagtaagagtggtttcaggactgacacccataccttgtgcaagtgctacataccgaagtactagttgcttgtacgaattcaataggctctctacatcagcaatagtcagatcaccagcacgggcaaacagaaacgggtactcctggaattttttgttcaagtcatcctcattgaggagttccgcagttcctttcttctctaaatcagaaatagattgcacctgctcaacttgtttaccactcacagtcacatcactgtcccttctcatatcctgccctgaaccttggacgtggtctttcaaagataagctgacatcagaatttctgttagctccaagactttgtgatctacgatcttggacatcaggattggcttgattatcctggtattctgagtcagctgataaccccaacatgtgttcccttgctgaatccattctcctttgaaaatctaattcattcatcgataatgattccccatcaatgttccatatgaaagactcagcagacaatatgtttgtaaaaaagtattgagcctctgacaccaatcttgtttgccgtctatatctttgtatgtacaacagatttgagtggagctgcggaggattagcctttatggtgacgtagataaggactggaagaaattcgtcagctccagggggggtttcattggacacaattgaagcatttagaagtaagttatttataactttacagcagttcagaatgcaggcaagcttatcccttggagctttatacatgtttattttctgcagctccttctgtgcaagcagccatgatgtttcattctgatattctggttttatgtctaagttttcaggacgtataaactgctggagtagagaaatcttctcaaaaagctcttcgtcgctcttcacatcttccgggactgaagcaaatacccgattatacagcttggtcataacatacttctcgaggccctcaccggcactctctagttcttcttcagaactgccagcccaaggagtgtgggctctgaaagcaccttccatattttcaaggaactcttgaacagctgtgctatctccctctggatcaggtgctctgtttgagaacgtcatgataaagcccttgatggacttgacgaattcggcggcggaaggctggcgcatgcgctcgaggaagtcgtgccaggccagcggcgcggtcgaggacccgaaggcgtcggcgccgccctccatcgtcgccggatcgggaggggggactggactcggc

SEQ ID NO: 171944 - DNA, 637 bp, Zea mays
  Clone ID: MRT4577_88398C.1
ccggccgggacaacctcgccccaccacctcggcccgccctacctttcttgccgcccctgcactgcacgcctccccgtgctcgatctcggtgctccacgccaccacgtcatggctcacgctcgctacagccaccgccgcacgggcctcctcctggccgtggccgtggccgtcgtcgtcgtggcgtcgcttgtcgccgccgcggacgcgtccagcttcgggttcgacctccaccaccggttctccccggtggtccggcggtgggcggaggcccggggcggccctctcgccgcggaccggtggccggctcgaggcacgccggagtactactccgcgctgtcccgccacgaccgcgcccgccgcgccctcgctggcggcgccgacgacgggctcctcaccttcgccgccggcaacgacacctaccaatccggaacgctgtactacgcggaggtggagctgggcacgccgaacgcgacgttcctggtggcgctggacaccggcagcgacctcttctgggtgccgtgcgactgccggcagtgcgcgaccatccccagcgccaacgcgacggggccggacgcgccgccgttgcgcccctacaggccgctggggtcgtctacgagcgagcaggtggggtgcgaca

SEQ ID NO: 171945 - DNA, 376 bp, Zea mays
  Clone ID: MRT4577_88399C.1
tcgagcggccgcccgggcaggtacaagcttttttttttttttttcttttttatacttttttcttttcattaaatcgttcattcaggtcagttgctcacactgacactggcacccatggtgatgcgtgacacattattactcaatcatcgccgctaaatgactgaactagctagctagccagcggttatactacagcacataggttcttcagtgggggacaccgcccggagcagtatacgggcattgagtcggttgctgaaggccgcacatggcacgaaggtgttgtactatctgcgcctccaacaggcccgcaacctggccgctttgcaaggtgctgcttgaggatgggctgggggaccaagccgtagatcgcctg

SEQ ID NO: 171946 - DNA, 365 bp, Zea mays
  Clone ID: MRT4577_8839C.1
ttgttgggttttatatattatttttttattgattcattttttttttcagaaactaagatccccatgtcatttctgcctttgccaaaaattaacttgaaaccgggtccattctggaccataaaagggcccccaggttggccagggccccctttctccctaaggagttccccttgggcagacccctagcaccttacataaagggatgcaggccatttctgcatttcccctataaggtgatcaccgcacacggctggggtttgctcctactttcccgcaggaaagcatcttggttgtttaccacccgagggatttcccatgttccatcggcatggcctgaggtttttccgccttccttggtggcttcc

SEQ ID NO: 171947 - DNA, 821 bp, Zea mays
  Clone ID: MRT4577_883C.1
aaagagacaaaacctcgttttttcttgacccatgcttggctaaaaaaagccgggaagaaacgccatgtctgatccccccggcgagacggaccataaccatcgcgatggaaagcaccggcgatcgcacctccaccacctgaatgtgcaggtccctcccgtcgccagcaacattggctgcttcgccggctgcttccgcccgtccccgacatcatcgtcttcccccgccgcgcacggcaccaactgccacggacacggacacggacacggacaccggcacgcggaccggccggcgtccccgtctctgatccggtcgccgtcggcgtggatcaaagcgaagggccagagcctcgggtctggcaggcacgcgcgccgccggtcccaggacttccagtacgacgcccttagctacgcgcgtaacttcgacgagggcgggagcgggacggacggcgtgggtgaggaggaggctacgagcgacgcgctcaagcaccggtgcttcacgtctaggctccccacgtcgccaccgcccgaatcgccttcggggatggccaccagcggcaacggcaaggcagcggaaacaggccgtcatgagttggagtgaaaccattgcattggagctttcgcttttgtcatcggctcttttttttttcgtgttggattggaaggagttcatcgtggtcggctgctggtgctggccatagcgcgtcccgtagagctgagatccgctaatcagcgtttgcttttgtttcgtttatctgcgttgctgcaatgtaactgtactttgaaacatgttcttcgagtggacactttgttgtaatgttagc

SEQ ID NO: 171948 - DNA, 448 bp, Zea mays
  Clone ID: MRT4577_88400C.1
cctcgaggccggccgggagccggttcacaagcaggtgctccggctggtggttctctgggcaaccgcagcgtatgacacacgctagtggtcgaggactgtggcaattccccccgacgcgccgctctgcgacctcgaccgtatgccctccgcccccatcaggaaactcagcgctcggctttcccaggatccccgcggcgaggactgcccgctcgccatccccgacggcgataccatctgccgccgcataacgctgatgagaagatgatccgacgaccacgatctaatatcattcactcttcatatctgtcatctctgaactgactgcccaatgccggcgcccgctactaatgtatgcatctgctgcgcctttttctagattgacctgtgcgctaggaacgtgagggttgcaggtaacatcccccgagatgtactgcatgagctgtcatgc

SEQ ID NO: 171949 - DNA, 723 bp, Zea mays
  Clone ID: MRT4577_88401C.1
ttgggtacctcgaggccggcctggccgggatactcctccccatcttacctcccggcgatgtcggcttagcaatcacgactgtctatctacatccgaagatagtgaagttcctcaaggccggcaagggcgttatcctcctccagggccgcttcaccggcaggaacggagatatcgtgcgcgggttcaaggagggcacccgagaccgcacctatggcctctgcctcggcccatgcctcaccaagtaccacatgaaggcgatccgcttggactccgccgagatcactgagaacaagtcccgcgtcctgtgcttcatcatgctcgtcatgttcgctctcctcatgaccacccgctacaccctcgacgtcaacttcaaggatgtggccatcggggggtcctacgcactctctatcctcgacaagaacgtcggcgcctgcaagatgctcgaagcgcaccttgaggagagggtcaagaccggcaatcaacagggggatctttaccgagctccgcttctacatgctcctactcccgaatgaagctgctttaggtgtctagttgttgcatcggacacactccatttctgcattcgcattaccatgacgatgtcgtgttgagccctggcgctctcagagataaatttgctaacatagtgccgatggtgtgttaaaataaagaaaaaaaaaaggctcctagggccctccagctcccactttttgttccctctag

SEQ ID NO: 171950 - DNA, 231 bp, Zea mays
  Clone ID: MRT4577_88402C.1
acggctcgagctcgagccgttcatggctctgcttttgtttttccagcgtccaagagttgaaaagatgtggtggcctagggggtgtaaatggtatggatattttccgatgatattggatatcaaatccaattaggcctagtttgttttcgcctgaacagcccgttctgggcctcgttctgggcggaaccaatcagcctggtttggtttagtctgatatagtttgctggagct

SEQ ID NO: 171951 - DNA, 154 bp, Zea mays
  Clone ID: MRT4577_88403C.1
tcgtccggggatacagttcctcaccgacgcgtgcgttgtgctcttgaccaagcagatcccccacatacttagttagcccttggtcatccatgtattggccgtcgtattctcgaacaacggaggctgtggatattgggtcgctgattggatctgc

SEQ ID NO: 171952 - DNA, 192 bp, Zea mays
  Clone ID: MRT4577_88404C.1
ctcatatgcgtacacggactccctcttcctgtcactaaccaagttagacaaaggcggggcgtgggaaacaagggggaatgggactggcaacccaagggatcaatacgctaactgtcgtcatctagagggcagacaacatttccgcgatgctcttatgcaagaacaccctcaagatcatgcccttcaagctcc

SEQ ID NO: 171953 - DNA, 116 bp, Zea mays
  unsure (1)..(116): unsure at all n locations
  Clone ID: MRT4577_88405C.1
gcgtatgacattactacaccctgatgtgagtcgtattaaaacnccgacatcnatcgacagatacatagggttgaagaaagtggcatcatcgtgagccggttcgcttcgcgctatcc

SEQ ID NO: 171954 - DNA, 511 bp, Zea mays
  Clone ID: MRT4577_88406C.1
aaaattaaaaaaaaaaagggaaggtggaggggaggggggaggagggggaggggaggggggggcccgaacgcccccaacccccgaagggggggaaagaaaaaaagcaaggaaaaaggggacagaggggcacaaatgtaaaaaatccaaaaaatccaaaaatgaccctgaaaaacgaaaggacccaagcgccccaatggcccaatacaccgaccccccaggccaacacgggaagacaggaagcccaggaaggcaacccaagccaaagagcccaaaggcacggagggcttgcagcactttaaaaccctaaaagcaacggagccagggggccggaccggccacgcaaggccagaagggcaaaggcggaaaaagggccgaaaggggcagaccgggcggtgaggcggaccggccgacccggcccaagggcccaaggggaacttatgaactgcaaaaacggaaaaatacactattaggccttgggagaccgagtgaccccggaccagaccaccccacc

SEQ ID NO: 171955 - DNA, 257 bp, Zea mays
  Clone ID: MRT4577_88407C.1
gggccccaaaaaaaaactattggtttaacccattggtttcaggaactggtacttcatacaaaaaggggttaaactaattccaagggagaatgttttttggtccaatcaggaaggggtaaaactaaacacacaaattggggaatggttacccaaaatttttgttttgacaaactttgtttttgaacaaatgaatttcacctatgccttataagtgttttatttttcggggcctccacaaaattattaaggtttttttt

SEQ ID NO: 171956 - DNA, 615 bp, Zea mays
  Clone ID: MRT4577_88408C.1
gtaccctcgggccttccggttcatggagatctcgatcctgttgggtggaatgtcaattccgtccgggggtgccagtgccaagacggcacgggaggatttacgaggggtcttgtcgtcacaaaccaagtctgcgttccggttccttgtgcactgcgtgtttctttattattaataaagaattaatcatgtgagattaacttaataaaaaaacccgggtgggtttgggacatcgccctcgcccctgcagcaacgccatgattagggcgagagatctttatgttggctggcgacaggagcaagatttggcgacaggtgctctacgtggtactgtcaactgtgagacgcagcctctgccattttctattgattttattttttcatggtgagaatttattcgtatgatataactcagtttgtggagtgctaatgccacaaacaggaaataggatgatacttcatgtatttttttctttgttgaaaatgaactgtaggatattgtttacaattcataccaagcttctgcagttatcaacattttttctatgttcaacattgttaacatattaagacaagttttcctttcatttttcagaaaaaaaaaaaaaaaaagcggcc

SEQ ID NO: 171957 - DNA, 602 bp, Zea mays
  Clone ID: MRT4577_88409C.1
gggtgaccacaaaaacttcatgctttgattgcggctaaacgctccctgaccaccttattgaatcgtacatgttcgatagctgacacgacgtgaggtcataacagtattcagggttccagaaagcatccacagataatgataacgtctcggaggtacgagacccagcaacccctatgtgcgctatagcgtagtgctctctcatgccaggtgaatggtctcgttggcaaaccattgggtgatacactttttctggcgatttgagttgacatacagctggggtccgtattcaacgccgaggaggatacttggggccaacattcttcaacgcgcagatctgttgctcctccatcgcagactggacagcctcactcagagccttcccgctttcgaacccttacttaatatggaccaccgcagcatgattaaccgggagtataggattatccttagtggtgccatgtgaagcaagaacgctcactaatccttcctgacaaatatccgtcatctgagacttagtacggatcacatgcgaaatgacacagcttggtgatgaaggaacaatatcttcaagcttggtcccatcgaatatggcgatggcgaca

SEQ ID NO: 171958 - DNA, 176 bp, Zea mays
  Clone ID: MRT4577_8840C.1
gtaccggtcctaattctcgggcgacccttcgttctttccacgaaccggtttcctcgctacgcgtgcaattcagaccgctggggccctcaaaaagcaacagactggcctgtcttcaccaccaagctgtcaactacacactacgggctccaaaagataattattcaatgcacatgatt

SEQ ID NO: 171959 - DNA, 370 bp, Zea mays
  Clone ID: MRT4577_88410C.1
cataaaacatgtggttattactagctctgcatcccggaaacaacttggtggttctttcataggcaattggctattactagctgcaagatagtatttggtagtgatctggtagatactgttaatctcctttttttcaggataatatctagtggtactgacgataattttcaggacatcggttcaaccgagctctttcttccctattacagagcattttggtttgatgaagaatgaaaatatattgtgttgggctttgcctggttggtacatcaaagtcttaggatgtttgtggtgtggtacacacttttgggattatgatgaacaattagtggtgcataaggtgtgaaatctgtttagtatcacattcatt

SEQ ID NO: 171960 - DNA, 208 bp, Zea mays
  Clone ID: MRT4577_88411C.1
tagcgagaacgaacatcaacaaagcaggttagtttcccttccatcaattgaaacggattgatcagattagttgagctcggtcgctgctgctgctgctgctgctgacacgcgctgcgatgagctgcctacgcttttgcacgctgcagcttgttcttcttatacctgcatgtgttagcgtttttaatgaataaatatacttcttgctgtc

SEQ ID NO: 171961 - DNA, 295 bp, Zea mays
  unsure (1)..(295): unsure at all n locations
  Clone ID: MRT4577_88412C.1
tcctgtcttctccatccggcgatcaccanagccctanctccggcgtctctagcgatccccaaaaccccctcctccgcatttctgcctgtcttgttcgaattggacttttatctgcatgtatacttcacttatcttancccttgttttttgtttaactgctcttgctggacgatatggagtccaagcttggcaagcttataatacacgtactataattaaaaggatgtgcaacttctatgaaggatcctaaccaaccacaatgaacctaatgtaagctgcattattcctttttgtc

SEQ ID NO: 171962 - DNA, 230 bp, Zea mays
  Clone ID: MRT4577_88413C.1
acaacgtcgtgctgctgccccacgtcggcagcgggcaccaacgagacgcgcaaggccatggccgaccttcgtgttcgggaacttgaaggcgcacgtgctcagcaagcggttgtggattcgggtggccgaacgttccctggttccaataaggaattaccaggggcttcggctgacacagcattggggattaaattcaaaaggtttggttttgatttaatcgcggctggtga

SEQ ID NO: 171963 - DNA, 160 bp, Zea mays
  Clone ID: MRT4577_88414C.1
aattctgcacgaggactcatgccggagcggctgcagcttttacagatgtgaatgcgactgacccaccagacacggcctatgcattagcagaagactccaagtttcgatgactgtctgccttcgtccggattcagtgcttctgagcttaccttctctgcac

SEQ ID NO: 171964 - DNA, 317 bp, Zea mays
  Clone ID: MRT4577_88415C.1
acggtgaggttattggtactgctcaacttcatagtgctcctaagaatggtgacgcgcagcaacgtcctccctttcaatgggtctgttaagttgccagatatccctggtgccaagattaacgtgtgcatgccttctgacgcccagcatgtagaggacaccaacatgatgtcacttgactacatggatgctgtcgctctcaatacaattaacaacgaccggaggcttgcctacaggcttgcatataagtcccgtactttattgggatcagaggccatcatcaagcagttaaccaggtcccttgccactgatgtcaacaa

SEQ ID NO: 171965 - DNA, 277 bp, Zea mays
  Clone ID: MRT4577_88416C.1
cactcatcaagacctctgccaatgagctatcctcccagcccgaacttttgtccggttaaacttgggatcagtgacggtcagaagctgtcttgctacaatttaaactcagatctccgtgatgtcaagatttgactccggttttcactaaacctgacctttacagtgctcaactctgcctacagggtgcttgcttattgatagtgaattatcatttcttgtggtgtctgcatccatgtctataactttcttagaacatcatgaaatggttactttacta

SEQ ID NO: 171966 - DNA, 278 bp, Zea mays
  Clone ID: MRT4577_88417C.1
cccaacaccacctctcctgctatctccgtagcctccggggcgtcgagcatctatcatgtctgcctactgcagaaagtacaacgatgagcccatcaagaatgctgcctacattgacacccctagcatgggtatccttgctgctaatgactccactggcaccattggctagcgcctttccagcatcaatgtcaagaacgttgaagagaaccgacgcaccctacctgagctcctattctgctgccctggtgctctgcagtacatcaaccgtgtgatcctat

SEQ ID NO: 171967 - DNA, 600 bp, Zea mays
  unsure (1)..(600): unsure at all n locations
  Clone ID: MRT4577_88418C.1
gggcgattgcgatttgggatcgatttgggggagaaaggcaagtgaagtgaggaccggtcccacttgtaaggacttaggtccacatggaagagtctttgacgggagaaaatgccgccgtgaggtgatttctgagcatagtgtggaggtgggaggggaaaactgagtagagaatttggacgagggtagatttgagcagagcgtccagactagtgggtgaaatgtaaatttccctttaaaaattggtttggatttgaaatgggctgagttctaccggtttacggggataaattgtgattgatcggtaatcggtggccaccggttttgatttttgaagggttacggtgaaccctgtgactggcatgcagacatctttcaacttgtccatttctggaggcaaagacacggaaatgaatgaaccgttcaaccgcctgacgttttggtctctttccgaagagcttaaagaagagacaacgcttccgctccgttgatggcgccgcggttgccgtcccaactcgcctaactaatgaaaaggatgactactagattatatggtctgtggaagggacggtgntggtctttctttcctggncttctccttcc

SEQ ID NO: 171968 - DNA, 463 bp, Zea mays
  Clone ID: MRT4577_88419C.1
tttttttttttttttttttttttttttttttttttttttaaaacggtttttaatcaaaattttataagatccaaaacgaaactagtagcacaccaaaggggggagtaggtcacaatatcagtttctaccggccatgtacatccttcattaataaaaacacgaaaaggcaccccactgccttttccatcaaaaaaaattaatcgttcaagaaacaatagcatgctaatcatgatctgaagcacagcgcgcgtttttgtctgcagccacctccttcttgagcttctcccagacctccgggccctcctgatgtttcaggaccaaatacttaaaaaaccgcttgtccgaacaggctaacaggggggacagagcgaagttcggagggaccagccctttttctcgcagccagtcgtacataaggaacctggctttggttctctctatggtgaacgacaggaacgggggg

SEQ ID NO: 171969 - DNA, 443 bp, Zea mays
  Clone ID: MRT4577_8841C.1
ggccgaaaaggttggggcgaaaagacaggttaggggggggggaaccggacatactcatttcggggggggcataaaataaggccggaaacaggcccagtcatccgaaaacgattttaaaacggggggaccccaaaaaacggaaaaatgctttacttgtaattccaacaggggcacgggagggcccacctaacactggcgattttcgctaaagcccgctatttaccctggagctttttttaaaacacccccattttttcctgaatgggggccaaaaaggacttgaaaaccttgcaaaacccggccttggggggggaggcaaggcccttgggggaactgaaccttacttggccccccagggtattgatctcaccgaaagaaaacccgggaagggcaaaagggccctggaacttctgggtttcttttttaacaaaccattcaccttt

SEQ ID NO: 171970 - DNA, 399 bp, Zea mays
  Clone ID: MRT4577_88420C.1
ctacgcgtccgcggacgcgtgggcgcaggggggaaaaaaaacatatcttgggcggcccagctccaggctgctagtctgccaccaccagtgcactcaagcaagacaagatggtgaagctcgccttggggcgggcggcgggggggtctattgctctctactccaggcactcgtggcctaacccatggacacactcctcttcgtcttcgccggcgtcggttccgccatcgcctacgggcaactgacgaatggcggcgcgctggacccggcgggccttgtggcgatcgtgaacgcacacgctctggctctgttcgtgggccttgtccttcgcagcgaacatcttgggtcgacacctgaacgctggcgtgacgttcgggcttggccgcgggcggccacattacc

SEQ ID NO: 171971 - DNA, 841 bp, Zea mays
  unsure (1)..(841): unsure at all n locations
  Clone ID: MRT4577_88421C.1
tgggtacctcgaggccggccgggccggggaccaccactgcactgcacagctcgatcgatcactttgcgatacatcctctaccaagctcatcacgaacaaataagaagcagatattaagcagctagctagctagctagcaatggcgtccaacgacaacgtcgccgtggccagcgaggtgagcaacgccgtgaccaagctcaactaccacctggccaccgccctcaccggcagcggcagcggcagtgagaacgccgccaccaccgtcgtcacgctggcggggaagaacagcggcgccaccatggaggcggcggccgcgggcgacgtggaggacctcgtcgtcgtcggcagcgcggacgcggaggagcacgacgaaggccatggccaggacgacgaggaggtggtggtggaggagaacgtggtcatcaccgcctacgccaacagcaactaccaggccgtcaacaactcggtgctcgtcgccggcagctgcgccgtcgacgaccccggcgtgcacgtcgtggtggtggagcacgtcgacgagatacgcgactacgacgaggacatcgacggccaagagttctaagcactgtattgttattactgcattactgcaagctatatggatggattgaagggcatatatatatatatatacctgcatgacaaataatatatatatctatgtactatatatactacatatacattacatctacattttcttggatcggctttgtactggtactactgtaagttgttaattattttgatgcatgctgctacttgaataaaaaaactagctgaatatatangaaaaaaaaaaaaaaaaagggcccctagggcc

SEQ ID NO: 171972 - DNA, 598 bp, Zea mays
  unsure (1)..(598): unsure at all n locations
  Clone ID: MRT4577_88422C.1
atcgagcacgagtgcacatcccgatcatcattttgcgatacacattctaccaaactcgatcgcaagaagaagaaacagctagctagctaccaatcaatggcgtccaacgacaacgtcgccgtggccagcgaggtgagcagcgccgtggccaagctcaacgaccacctcgccaccgcgctcaccggcagcggcagtgagaacgccggcaccgtcatcacgctggccgggaagaacagcggcgccaccatggaggcggcggccgcgggcgacgtggaggacctcgtcgtcgtcagcagcgtggacgcggaggagcacgacgaaggtcatggccaccaggacaacgaggaggaggaggtggangagaacgtggtcatcaccgcctacgccaacagcaactaccaggccgtcaacaactcggtgctcgttgcacgcagctgcgccgtcgacgaccccggcgtgcacgtcgtcgttgtggagcacgtcgacgagatacgcgactacgacgaggacatcgacggccaagagttctaagcactactgcattngtattactgcaagctatanntgatatgattgaagnggctatatatatatatat

SEQ ID NO: 171973 - DNA, 279 bp, Zea mays
  Clone ID: MRT4577_88423C.1
acattatattaaggggggtgttatggcgatcctttttaagctcccgttctaggcgggcactgggctaagattgttatgcacaaactatcatgcttgttgatacaagagaagcttgtaaggtaccacgtttgtaaaggtgcagacgtgagaatagtaaagcctattcgaaactctaatctgatgctatggtcaacgacacggggggaaaaccacggcgtgcatgttaaatggcggatgctttcgctcactgcgctatgccgagccgatccattgcctcac

SEQ ID NO: 171974 - DNA, 253 bp, Zea mays
  Clone ID: MRT4577_88424C.1
gaattaagcactttgttacatttttttatttacttagattacttttatttcaccaggatacctgatgaccatgccatggcgcacacactttctgcattatcgttatagtttagagcagtcctgtccgtgacgccgccgtggtacagtgcactggtcaaaaaaggctgccgagttcacatggtagagcaccgcggatgcaaacggggagcggtacgtacatgaagaacacccacgggtccacggtttgaagggt

SEQ ID NO: 171975 - DNA, 381 bp, Zea mays
  Clone ID: MRT4577_88425C.1
ccgggtcttctatctgatcgaggatcacgccacggtgacggcagacggccgtccacgtcgacgaacgtacgcacgcatgcgtggctcgtagtggcgctcgctcgtaggcatacggcgtactactatgattgtaccaatcaccactacaatcctccccacgccgtgccctgtatgacttctgctagtacgccattgcacatgccatgcatggctagctatcttgcattgcaagactgtactgtactgtaccctccgagtacttctgcaaacgttttaaaacaacgccgaacatgccgcgacccggccttgaatggaaaagaaacaagaggccgcgctgtacaatttctttgaaatgaaaaaaaaaaaaaaaaaagggcccta

SEQ ID NO: 171976 - DNA, 742 bp, Zea mays
  Clone ID: MRT4577_88426C.1
ccgcaaccatcaagccttattcgactggtaccacaacaacttctccccgcatgacgacggttcaaggctgctggaccttctgggcaggacgactactacaaccaagaagccatctacgactgcagctacaacaaccaagagccttctgacttcggtttcaggcttggcagtggtgctgaacctgcttcggagaaccaagagttaccgtccgaggagctgcctgaggacgagaagcagccattattcagcaacccccaagcggatctcgaggagacgccgaagcaggacgtcgtcgaggaaggggctgcacagggaggcgtgctggccgacccgacatcgtcgacaaccgccgacgatcagctccagggtgcatatgcggagaagtacagcttccctcctggctggtgcgacgtttcgagcatcccggcgcaaggctggggcgactgatcgtcagacctgcgatcgccattggtagggggggtcattggcagaataattgaggccgatgaccttgtgaacccagcaccctcatcggtgtgtccctttcgttccgtcaagccttcgttcatttctcactgctggacagtttgttgcagcgagtgaactgtggcgtccatgtgtttaggacaggccatcgtgtgtgactgatgctggcaacacgaaacgtacgtgcaatgtggcgtggttattttgcgggtgctcatggttttaatagatactccctctgttacgtttttagttc

SEQ ID NO: 171977 - DNA, 285 bp, Zea mays
  Clone ID: MRT4577_88427C.1
gacgcacgcgtccgacggcgagtactttcacaagctttccgattagacctttatccacacagactctaagccggcaaacatacaaattggagatgacatgaagcccaaagctacggaatctggattggtccagcatgcaccagcatgatgggaagtgtgtcttcgtatagacaagacatgttggcactattggataccttgaaccatattatacactcactgtaccagttaccacaaaagctgatgtcatcagattatgtgacatcctgattgaactcattacag

SEQ ID NO: 171978 - DNA, 311 bp, Zea mays
  Clone ID: MRT4577_88428C.1
gggaaatgcaaagggtttcctaatttaccacaccccatggttgccccaaaatttaccggcttgtaaaatttccccttttctcctggctggacaaaaacaaacagggtgggaagcaaaccttttttggtctttgcataatgggggccggttgctcccctaacaagggacttttccaaaaaaaaaacaaaaaaaaagggttaaccttggcttaaaaaaaaaggttccccccgtggggcgggggcaaacgaggaacccccggctcgagcattggttgcccccttcctaaaaattgttgccctggttaataaccc

SEQ ID NO: 171979 - DNA, 402 bp, Zea mays
  Clone ID: MRT4577_88429C.1
aacgcccgtgccgtaaaaaagggaatccatagcacagagccagacctggcggacctggacgtgcaaaaacgccgtcaaggatccttctctctctctctctctctctcttcacgtccatcaacctgaccgcaaacacgcgtgctatctcttcccgctctccactgcacagacatgaagatcgaacgaaacttgcatgttcgatatacccagctgctatatgtaacgaaaaactcgtgatcattgtgttgaattgcacactgtcatggagggatctacttgtcagatcccggtattaaagctgatggccttccattgcatggtatctgaagaataaatgggacaagcacactcgaatcaattgtgccattgccagacatatgctagcaagtatgcactactcag

SEQ ID NO: 171980 - DNA, 1119 bp, Zea mays
  Clone ID: MRT4577_8842C.1
atggtgtgccacctgcttggatggagtgcggcggcgctcgccgggaggatccacgctggcgccgtcttccttggtgacctcgtcgtcggggagtttgtcttgttcacctcctacatctcctgcgggttggcattgccgatctcgcccttcttcctgctgttgttggaggagttcggtctccagcttcagcacctcaccccccactccatcctccaggcggccatcttcgcccacctgtgggagaactcgcgcgacgactgggtgatcgctagcgcggaggccaacgaccgcctcgccctaccgagcgatgggccaagactcgaccgaaagcagtggagggccaagccatccctggcgccggagttccagttcgtactggacaggatcaagagtttggaggcgggcggcctgacgtcgatgcacgtggttggagacttcctgaaacgccggatcgcaccgctgcagcagagggcacatctatgttgctggttcaccggctcaaacgacatcgaccggatccagcgcgggctgggaaccgacctgtcctgggttgaggacggtgattttggccacggtgccgaccctcgacgaacgcagcatcacggttcgccagaccggcagccgggacccccatcgtgggatccggatctccgatgcgtcggctggaggcccccggactgctggcgtgtcccccagcgcccccgccagagcttcccacgcttccaccgcggccccccgccccaggcggcgccgggctgtcggaggaggagaggagacgtcggttgtgccgcgccaacggatcgcttgttccggacccccccccccgcccccgctattggggccgaggaggtcggctcccagaagtgtcagaggactgctggcggggccgaggagaccggctcccaggcccagggcgcgcagaggcgcgccaatcctccgccaccacagccatcgggtccaccgccaccacaaccaccaccactgtcaggcccaccgccgccaacaccacctgtggatgatctcccccaggggtaccagcagaagcaacaacaacagcagcagcagaagcagcggtcgccccgcttccagggtcgctggaaggtccagggccccaagtga

SEQ ID NO: 171981 - DNA, 230 bp, Zea mays
  Clone ID: MRT4577_88430C.1
aataataattggtagcctaaaaatacagtgggggtctaccccccccccacacaccaaacacaatattcacccaaaaaaccatttccataccattaccccccaaaactatccaaaacatcacaaccgacaccaaacaaacacatcacaggaccccaccacctaccggcgaccaacttgcccaaaaaatccttcttacacatcaaacttcggaccgctaaaacccacactgt

SEQ ID NO: 171982 - DNA, 307 bp, Zea mays
  Clone ID: MRT4577_88431C.1
tcttttagacgggcttccattagaatatatctatcagcaatgaccttcaatatattttccatccttatgctccttgctctttctgcatgtgttgctaacgcgaccatttttcctcaatactcacaagctcctatagctgccctttttgacccataccttccatcaatgaccgatctagtatgtgaaaaccgcaccctttaaccctacaggatccatcaagcaactctaacatgcaacttacctttatcacacctgttatttcaacaatcgccagtcctatctttggtgcaatcatctgtacaaacca

SEQ ID NO: 171983 - DNA, 301 bp, Zea mays
  Clone ID: MRT4577_88432C.1
aattaatatttcttttgaactttatgcattattgattaatgacggcatgacctacaaacacctctgctaagatactaaatggaatatattcaccaacaagcaacacattagacaaataagtttccgacgatatatttacacggggatgctggccataggtacgcagtgcgcgcgggaatacataactctgctgcacatatgggcgatcaagaactaagacctcggtacatagctgcaatccatatggagttctagtcacctatggtctttaagcgctaacaccccctggggatggaaacta

SEQ ID NO: 171984 - DNA, 640 bp, Zea mays
  unsure (1)..(640): unsure at all n locations
  Clone ID: MRT4577_88433C.1
ctctcggccttcgcttctgtttcttattaggccgccctctacactcctcgaaataacaatcgagggcggtcaagagaaacgagagcggcagacaccatggagagctcgaggatcatcgtcgcctccctcctcctcctcctcctggccttcgcagccaccgccgaggcccgcgtcgtccgcgagctgatcggcgagaacgcatgccagcagacatgcaaccaggtgcacttcaagaagatgtgccagagcttgacgaagctcccgaaggtgacgacgccgcgggagctcctgctggcgtcgatgcgcgtcgcggcggagaaggcgaaggaggccaagagccgtgtggacgagtacgcggcgaggtcccacgagggccggccgatggagtccatcctcagttcctgcagctccgggtacgacaacgtggtgcagacgctggaggagacggagaagatcgtcgccacgcagggaacccaggtggacttgaacaccaagctgtcggacgccgtcacgagcgccggcgactgcgacaacgccttccaggacttcccggagatgaaggaccccttcttggccatgcagcggaacgtctggcgcctcgtggacaacgtnctcaacatcgncgtcgtcgtcaagcagt

SEQ ID NO: 171985 - DNA, 343 bp, Zea mays
  Clone ID: MRT4577_88434C.1
attcgtgggcagcgcccctcatcacacagaagctttattattgagctatccctcatttgaactcttaaggaggcaccaccaatgatcgggtggctggttgaccgctgcaggcttggtcatagcacgttggttggatggctgccattgttgcccttgggagagggtgcccgcgctaggcgcaaggggccggcagctccgccacctctggcgttgtatcacgaggggcctacggctcacaccagctagctgtttcattggtcctagttgctgctgctgtctctgctcctgtttgttcactgctgccagttcgtttcatggaaggtactgctgggggcccgccagc

SEQ ID NO: 171986 - DNA, 430 bp, Zea mays
  Clone ID: MRT4577_88435C.1
aaggaatgacacacagtattcttcttaacatggtttgctcaattctaacaagtctcaactgttggaacatatataattattagccgggacttctagctcccacttgccccctgtctaaacacatacttatcgcttatgactgcctgttttttttcttgacaccggtcttggcatcctggatgctgtggttcacctagcttatcctttcaagaacttgcttggtcatatcaggcctgttgtagttgtcacttacctggtttttttacagccttggccattttgtggaatctcttgcgctttacaaacttttggttgaactttttaagtgcgttctgctttttggtcttggttttttaaaggaccacatcctgagccttttcagctggctggatcgtcacaatttttttgtttcccaaaccccagtgtttaa

SEQ ID NO: 171987 - DNA, 274 bp, Zea mays
  Clone ID: MRT4577_88436C.1
gagtcttaagaccattagctctatctactccaaagcgcagaagaacccgatcgacaccatgagggtgatgctcgttgccctctctctcctgactgtagctgcaagcgccacctctactgatacaatcagtggctgcggctgccagacaccggcggcgactcatttaccgacgtcgatgcatatgacacctacgattcaactgtcagctccggtgcatattccatcgtcggtccacctgccgacagcggtccacctgccaccgccggtccatgtg

SEQ ID NO: 171988 - DNA, 198 bp, Zea mays
  Clone ID: MRT4577_88437C.1
acacagacaaagcctacagcgggaagctcgggagcaccgacggctcgccggccgagcggccgtcgtccgacgcgacccaagacttcttcaggcacggcccggagatccaccagagagccgtgccggagctcccgtccccgcccacggcctcggggctccactggcagggcggaccccgccacggcgcggacaccacca

SEQ ID NO: 171989 - DNA, 407 bp, Zea mays
  Clone ID: MRT4577_88438C.1
ggacagggtaaaatctattcctgggatggcccaaatttccgagggaaatcacatgctttgattacaatttttttcacaacggttttttcaagggtaatcatagtcttttgcacttcagatcgtctgagaagcatcaactttttgcgcgccacctaccgcatgttgatcctcaactttgtgctccttacttaaccaaatttgcgccacaacttcgttttccactctaaaccacctaaaggcaccaaccgcgataaaaactcaagattccttatacctctacacccaacagccccaagagctttctttatctttgttcaacccactgactcacggaccttccctcgccggggtccacccttgaatatcgggacgggtcctagaggcgggccaaattttcctaataggag

SEQ ID NO: 171990 - DNA, 314 bp, Zea mays
  Clone ID: MRT4577_88439C.1
cactcgtccgatctgcatcaggctccctcgacccacgattttaaacccaaccatgcactatattggggggtgtcttcatgaacaggcacgggacatcctgatgcttgagctcgctaggctcaactgtggccaagggagagcgcttcacctcatggagctcaatgacctgtcactaccatcaatggcgctatacaacactgctacacctgctgacacaccataccctgcaagagactgatgcactcaagcaccttgctgttctgcataccagccaaaccaatcacgtccacaatgctgatggtcagaacactggc

SEQ ID NO: 171991 - DNA, 604 bp, Zea mays
  Clone ID: MRT4577_8843C.1
aaggcagggtagctttttttaagtttgttgaagtaactggtggattttggctactatgaccattcaatggctgcaagtgtatcatagtatcagaaagattgccaatttctttagaagctaatggttgccaatggatgggatctctgttgtcatcaacgcaattcaagtcaacaaagattctgcctaatcctacatggctgagcaagtttccttagcttactaaactggcgtgctaacaagtgacacgtgtcaattgatgggactgactgaatcacgggatgacccaaagaagtaactctccatctgtatacccctcaccccaatatgtacagaaggaatctcaactaggaacctagaatttgcacaggaaaaaaaacaggtgtgctagccatttggcaatcagtgccagtttatctgttcctccacagttacatatcccacccatggttgaggtggagctgcaaagtccgttggaattatcttgtagcagtttctcggcaagatgagtcgcttcattcactgtacgtcggtgccggctactctgaaacttacatactataagaatctggtcccttactaaaaaaaaaaaaaaaaaaaccccccc

SEQ ID NO: 171992 - DNA, 679 bp, Zea mays
  Clone ID: MRT4577_88440C.1
gccggccgggctgcggaggtcgataacatcattgcagatacctctctcctagcaaaagcgcacgctcggactgcttacgttcgtcatacatactcctaaacgcaccgctgacaggattgtgcgcgctacgcgcgagggctacaccggcgccacggtgccacgtgatcggatccagcggtgcgtgcgatgcgagcagagtgcagccgccatcttcccgaccttgcacccgtcggctcgccacttcaccatgcgtcatgatatattcggagtagtcataggcatgaggtcacgtagatgcatgtaagtcgccattgaattgctgctcttcgctgatgctgattatgatgtacgtgccgttgcgggttatcaccgaagaagcctattagtgatccaacgaattctctgccacgctggctacttttcgaggacaatacctgtgtacttgctcacgcgacagcgaaggctgacctacaccctatcccgaacaagcgctttgtatcttctcatgacatataggggtcccatttcactcgactccactggagagacattgtgtagtttgggtgcatgttactgtgatcgtgactggatatggcactgaagatcaaatgaacggctgctagagccgcatcctgatcgataaatataggatcctccggaatgaaggaatacatcatct

SEQ ID NO: 171993 - DNA, 127 bp, Zea mays
  Clone ID: MRT4577_88441C.1
gggctcctgcgttctctcgcctccgctcgccgctcttgccgagtatcgcgatcatacgcagctcgtccaggtaagatgtcggccgaggcgtctaaggccgcggtgctggaggcagtgctcctctgct

SEQ ID NO: 171994 - DNA, 175 bp, Zea mays
  Clone ID: MRT4577_88442C.1
gtttgatggttttctatgattatagcaaacagaacgggattaccaagcaacatacaaaaggacatcgagcagtttgctataattgtttgatggttttctatgattatcgatcagcgggatgtgaagtactgtttacattgctcgcgttctaataaagtactgtttggacttgctt

SEQ ID NO: 171995 - DNA, 304 bp, Zea mays
  Clone ID: MRT4577_88443C.1
ctacttacgcttattgccatcactacaaaagcatccattattgcacaacgctcacttgctgctacttccattattccacagtttctaccaccaattacttcaatagccttctaacacccatctacgcaagcctacttgctacaacaagcaattgcggcaaccatgttacaacaaccaattgcccaatagcaacaacaatccttggcacatctaacaatacaaaccatcgcaacgcaacatcaacaacagctcctaccagcactgagccacctcaccatggtgaaccctgtcggctacttgcaac

SEQ ID NO: 171996 - DNA, 280 bp, Zea mays
  Clone ID: MRT4577_88444C.1
gggccaaaacttcacacttttcaattaaaaaagcgggtctccccacccgcgatcaataaaagcaagcacctttttttatttacagggggggaaacgcacactaactcttttttttcccccaatgtttcccgtttctcaaagtacaaaattatccactaaagaatggaccttgagcccctttgacttttattaggcctaaccaaccggcgggcctggcgttttttgccgccttttatttcacaccgccccacgggggacaggctttttttccaaaaagctt

SEQ ID NO: 171997 - DNA, 272 bp, Zea mays
  Clone ID: MRT4577_88445C.1
attttaggatttttggaacgggagggatgatcaaacaagcaagggggggaaagggattatgagaggatcaaattcctaccaggctaaagcactatctcaaagaaaaacggacaaggccaaaatcaattatgttatcaaacttttttaactacacctacaaaaaaaaagctttggggatcttctacaaaaaaaagtgcggatttgccggtcccgctaactatttcatcaacaccgaaaaagcaaaagcagagtctaactctaattgctaaacg

SEQ ID NO: 171998 - DNA, 205 bp, Zea mays
  Clone ID: MRT4577_88446C.1
ggccttgagaacgcacttctcacaggcggcgaggcgagatgaaatctttggcgcataatcttctgaatgagagcagcacatgcctgcatggacgggctattccgacccgtgttctgcggtgcctctacctatcatgccagaactgcctggatctcttactactcctgccccagcaaggcaaccgagagtgatccgctgtgatcct

SEQ ID NO: 171999 - DNA, 179 bp, Zea mays
  Clone ID: MRT4577_88447C.1
tagtggcactcctacctatctggctcaagagacctcttgtgtccgtgcctccgtggtcgcgtcgtccctgagaaccaaccagacggtggacatggtgttcggcggcgaccgcgccatgggagcggcccccggcgccgacgccgcaagcacgatgcggctcgcgttgaacgttgagcgcg

SEQ ID NO: 172000 - DNA, 836 bp, Zea mays
  unsure (1)..(836): unsure at all n locations
  Clone ID: MRT4577_88448C.1
ctcgaggccggccgggatggggcaaaggtggaaaggataagaacactgccattctgtggcatggcaccgtccacgctcgcgagtgggtcaccaccatgaccgtcgagtacctagcctaccagctcatcgccggctacggcaaagactccaacgtcacctccttcgtcgacaactacgacttctacctcatcccggtggtaaaccccgatggcttcgtctactcccaaacccaagaccgcctctggcgcaaaaaccgcgccccgcccctcccaggcgccaacacctcccacccctgctggggcgtcgacctcaaccgcaactggccgcacgagtggcaaggcgtcggctcctccaacaactcctgcacgcagacctaccgcgggcccagccccggctccgagcctgagatgagcggcatgcagcacttcgccgacaagctcgcggactcgcacggtttgaaattgttcatcgactggcacagctattcgcagcttattctgagtccgtacgggtatagctgtgaggttgtgccggagacgaatgcggagcatgtggagcttatgtccgcgacagccgatgcgatcgagtctgtgtacggcacgaaatacacgactgggcctacttgtcagacgatctacgcgaccaacggcggcagctctgattatgtgtacgatgtctcgggcgcggagtggagtctggcgttcgagttgagggatacgggcacttacggcttcatcctgccgccggagcagatcctgccgaattgcgaggaggtgtgggcgggtatgcaggttatgttgtcgatgatttgagatcagnaaggntggggttggata

SEQ ID NO: 172001 - DNA, 520 bp, Zea mays
  Clone ID: MRT4577_88449C.1
gggaaggggggaacattttttggaaccttttaattcaggcaaaacgacaagcccttttttttaacaagcaccttaaaggaacgacggaagcccccccccttccttttttgggggagggaaaggaccccagggttggggggggtaattcttttggaaaataaaaaccccacccgggggggggggcccccggaagggggccaaaaaaaaggcggccccgggggggggggaaacccagggcccccggggggccaaggggaaaaaaaaaaatgtgggggggggccttggcaaaaaaaaaccccctttgggtttttcccgggggggccccaaccatttcgggcaaaaatttttgggccccattgtcccccccgcctggggagccaagggggcccggttgccgggggcaaactgaaggggcaaaaattccctgggccgaaattcccgggccccgggggacccccttttttaagaggggccccccccggggggggcccaccagttttggtcccctttagggggggga

SEQ ID NO: 172002 - DNA, 305 bp, Zea mays
  Clone ID: MRT4577_8844C.1
gcgagccctgtcttaaagcaaccagatttcattgggcccggcgtcaacgtcgggggggcatggccgttcaagggcgggccaacaacaaacaccgccggccgtgaccgtgacgactacgacacaacatggagcagcagcagctactttcaactccgtatctggaacatgcatgtttggacctcacctaagcggcattgcaacttgtcataagagcgcacaccctgactggtcggccgctgagatcaaaaccgggatccttgacaccggctatgtcgtgtatggtaacaacaaaaaccaaggcgatc

SEQ ID NO: 172003 - DNA, 282 bp, Zea mays
  Clone ID: MRT4577_88450C.1
gttgatgctcgcggacgccgtgtgcgttgtggaggtggtgaatggcgacggggcccagggggcgctggtctggaccgagctgctggagccggacgtgaagccccccgtgctgagctgatgaggtggcgtggaagccgtgatctggacgcgactctttaggaacttcgattttgtcgtcgcctgctatatatcattgccgagatcgtagtgtgtaaattatgcactcgctccgtggctatatccaacacagcgagccagtcaggaacgaacactattttgccg

SEQ ID NO: 172004 - DNA, 558 bp, Zea mays
  Clone ID: MRT4577_88451C.1
ttttttttttttttttttttttaagtatatctgcgggggcataagaatcgaatggttggtagtggtacccacaaatacagtgagactcggtcggaactaccctatcgtgccaaattcaggcacttgtggagccagcagggaggctgcggcaggccgcctgcttcgtggtccagacgctgcccagccctgctggtagtagttagtggtaggctggcccggcggcaccgacccgatgatcatcagagacgacggggggaggcagtcgtcgtcggaccccgcgctcggggctgccggcggacccggactccgtcgacgacgacgacacgctcgtcctcgagtccacgctagtagacgacgcctccttcttcccgggcgccgcgccgccgaagcaccctagagccagcgtcagctccagctcgctctctcggagaaggagcggaggggcctcgctgttgccactccgcccatgctgctgcggcggcgagtgggcgtcgtcgtcccacgacctgctgctcgagccggcgccggtccccacggtgcgtctctcgtcgtcgtcgt

SEQ ID NO: 172005 - DNA, 362 bp, Zea mays
  Clone ID: MRT4577_88452C.1
gccttcataggaaccccaccccttttgacattacaaaccaattcggggtggaaggggctagggaaatttgaaacccccagttttacaaaccaattcggggcccagtttctagggccaacaaaaaaacatgccttattggggcaactaaagcccttttgacattacataaattacatacggggggggccccatttacatgattgcaacccccaaaaaatcacccatttggaaacccacccctgcaaaaattttggaattggccccttttccatgaccataagcgaagggggaaccccccttcaaacattcaaaaagtcatgaaagggcaacaatgcaggggaacaaaaattgggcggcacccc

SEQ ID NO: 172006 - DNA, 235 bp, Zea mays
  Clone ID: MRT4577_88453C.1
gtggaatgccatgctttagaacaaaccctttttgatcttaatgcttctgaaaactaggtctgactctggggatttttttccagccgaaggaaaatcacttccgttatgtccccctctaatttagccgctcgacattttacacaacccggatatgttgtatattttgacccaaagttacaggtaggtttaagagaatttttagccatgacttttggagcactattccattgtcagt

SEQ ID NO: 172007 - DNA, 2417 bp, Zea mays
  Clone ID: MRT4577_88454C.1
gcacgaggcgcctctcaccatttgggcccccgcgcactccgccccgcgacgagcgcgccacgacccccgcctctatttctttagcatcgccgcccccaagccctttctctcccgcctcgccgccccccctctccgcctcaaggctctcctctcggaggtctgataggcaacccaataatggcagaagtcctatcaggatctcatgaacaccgtctaagctctgccttagatggacactacgacgagaagaggaaatccaatgtggaatacacagaggacgagaagaaagccgtgatcgcggctctgaaaaagaaggctttgagcgcctcacagaagtttaggcattccatgaagagggggaggaagagcagcaaggtgatgtccatctcgattctggatgagcgtgaacctgaggaggtgcaggctgtggatgccttccgccagcttcttgtacttgaagagctgctaccatcgcagcatgatgactaccacatgatgctaagatttctcaaggcaagaaagtttgatatcgagaaggcaaagcaaatgtggtctgatatgctgaagtggagaaaggagttcggtgcagataccattctcgaggaattcgaattcgaagaagctgataaggtggcagaatgctaccctcaaggttaccatggggttgataaggaaggcaggcctgtctactttgaacggcttggacagatcgatgtgaataggctaatgcaggtcactacaatggatcgctttgtcaagaaccatgtcaaggagttcgagaagaactttgctgttaagttcccagcttgctcaatcgccgcgaagcaccatattgaccagagcacaacaattcttgacgtgcaaggagtggggatgaagcaattcagtaaagctgcaagggagctcattggcatgcttcagaagattgatggtgacaattatccagagaccctgtgccgcatgttcatcatcaatgcaggccagggattccggcttctatggggcaccgtcaagagctttcttgacccaaagaccactgcaaagattcatgttctgggtaacaagtatcagagcaagcttctcgaggtgattgatgctagtgagttgccagaaatttttggtggaacctgccgatgtgaaggtggttgcatgaaggctgacaaaggcccttggaaggaccccgaaatcatgaagatggttcaaagtggtgatgggaggtgtggatcactcggtacggcctctttcgaggctccggagaaaatgatttgtgaagacgacacgtatcctaagaaacaagctttgtttgatggggaaacacaattagctggagacgagcattctcagtcacagaaaatttcccgtggccggattgaacatcctcacgtgtcacctcttcacgaggaacttatccccacttcaattcatacccctggatcaccctattcttgtgatgtcccgatggttgaagaggccatagacgccatctgcaagagccacggaacaccaccagatgagaagattgccatcaccaaagctattataaatgtatcgaatggatccaagcccccactctttgctggcatcatagcacttgtgatgagcatcgcaacgatggtccgtctgacccgcagcatgatgcctgggaaggttctcggtgctgccataggtggagctaccctctcagaaggtaaatcaaaagtacaagagcgccagcggtccaagctatcagaagaggctgtggaggaagctgaagacgccgtctctgcaaagcgcctctcggagcttgaggagaaggtcattgcactcctgacaaaacccgcatcaatgcctgctgataaggaggaggttctgcaggctgctgtctcccgcgttagtgcactggaagaggagcttgcagctacaaagaagaccttgcaggagactcttgagcgtcagttggagatcgttgcatacattgagaagaagaagaaaagcaagcgtttctttcgttggtagaagcaaacagcagtgaattgttcacgcccacgagaaaaaaggttttgcgtgtgatggaagcgagctggtgcttgcgtatgccagcaagctgcgattctgagtgtaacacataaggatgttctttcattcttcttttttgttcccttgttgcatcaaattgtgccttaaccacgtcgatgtgctgccaaattgtcaatccctgatacggtcaatcatggatggaccgactgcaatataaatatattataccacaaaatagcgcgacctttgctacgaacgtgttctgtatgtctctcttttttaaattcctactttctacatcttagattcaattccatcaaacttttcaaggttcgacaagtacgaattgcaaagctatatatgggctgagacgatgcagcggctcatcacatcttatcaat

SEQ ID NO: 172008 - DNA, 1993 bp, Zea mays
  Clone ID: MRT4577_88455C.1
gggaccatcaagagtttccctaaattgtcctataagttttaggcgcataaaaactcctatcaaaggccgtctttgcaaacactatcagtgttttgattatgataattacatggagatgaactcaagaaaaccaaactggcgctgtccatattgtaacacctcctcaagcttcactgacctacgtattgaccaaaagatgatgaagatactagaagagactggagatgatgtcactgatgtccttgtatttgctgatggatcttggaaagttgttccagctcaggatgaaaaatctgatagacatagaggtgacacaattcagcaggctggagatgctgtagaaactggttcaccttctcgagatgtcatagatctgataaatggcaatgatgatggtgatatgcaaatggattgggcatcggctccagaagattcaaagcctgtgttgaatagtcaagatttgtctgtatcagactatcttacagatttccctatgacagctcagacagaagatctgaatcgaggggatggaaataatgggggaagcaacatggcttccacttcacgtcaaaatttgttactacctcctactagtgggctgggctcaagttcattagggaccttggaatctattctacctcaaaatgttctgcaccctgttatcacagatgcagtctctccttctcttgaaacctcttcagcatctggcatgcaacatgtttcacaggaaacacattgtggaactgtacagctgcagccacaaataggtccagtacatgggtccgaagtgagaaggcttcctatacctagaaatcccaggagagagccaataggagtacaggggttgacggttccaccacagaatcctgggtcatcaacaaggttgcagccaaatattctcaattgtccacctcctatcccgctatctagtccatcctcttcaacttaccaagcacatcaagtgaagaatccagacagtgtcattgcttcaaggaacagtggtagtgggccattaccaaggactcctagcgtcgctgctgcatcattgcacctacagtcgacagcacgggatattcgcaacacatcgagccatctacccagtcgagttgttggtctgcctgcgccacacctcatgggtgcacgaccaccaccaggaatttcagtgcaggctggaggagcgaacgcctacagaactatgcaacagactccaactatggatccactgaggcacacacggatgagcatgaaccaaacagcactggctgctgccggccaaaccaccgctgccgcgtatgtccgaccaacccaagcagacatccaaaaccatctctttcctgtgcagcaaagccaggcaccacgatcgcaacaagtgccacgaacaacaaccccgcctctacagcgggcgccaccgcacctgcaacctcccagtgtaccaccgactgttccaagcacacctcaggctggaccttcgcatggtcttccaccggagctccctgtggatgatagctggcgccccacgggacagatgagagggagtctgacaggcaatgcttacagttctgcaattaggcactatcggggccattctgagcagcagcagggcgagcctcggcctcccaacacttcaggtgcgcgaaggcctcagtaactgccagacattgcggcgttgccctgattatcaagcagggcttgggcagctaatttaccaagagattttaatttattatcatagctaatttggcgctatgatgatctatgttagtgtaggtaggggagcctagtgagtagtgatagtgctctgcttgtctacaacgcactctgatgttaaattagtagtatcaggtgaaccatttgtgtacccaatatggaacgtggattttttatgctaatgttttgcctgtgtaattggaccgattttcatgtgaaattcctgaacgattcccatgaaaatgaacaggtaacttgcatatgaacaatgtagtgtagtccagtt

SEQ ID NO: 172009 - DNA, 191 bp, Zea mays
  Clone ID: MRT4577_88456C.1
tatatgtctcgagctcatttcttttaaactgaccggcatcgactccaccaccacattggctctacgcatcgccgatgcccgctctacacaaacccttatcctagcccgtccgcgcttcttctccaaccgcgattcgctcctcgttgctgcaccaagtgagatgcaagatcgactaccgagagacctggttc

SEQ ID NO: 172010 - DNA, 334 bp, Zea mays
  unsure (1)..(334): unsure at all n locations
  Clone ID: MRT4577_88457C.1
attatttttttttttttttttgttttttttttttgggccaaaacaactaatttattatttgcaacagggggcccaccaaaccgaaacagaaccttgccttaatggcctggaaaaataaaaagtagcagggtcctccttacaaggtgttttnttttaaactagaccccccccataaaaataaagcacccggggggggagggcggggtttgttaagcttgcaaaggggtacccccccctggccccgtttatccaaaacccccctacttctgccttttggaaatcttggccaagaaggatttcagccctttttgaaccccaagggtggggggggctt

SEQ ID NO: 172011 - DNA, 268 bp, Zea mays
  Clone ID: MRT4577_88458C.1
gtgagctacaacctaaccggaaaatggaaaatcggtttgcaaaaataagagagctcgattccaaaggcaagaaaagaaacccgctggtgcttgaagagtttcaatgggaaaatgaatgtgttgatgaagcattgggtgcaacggagggtctccagggccgaaatgtactagggctggtggtggtctggttagggagacctcttcttctcagcctcatccaaggacctatgttcatactaggaagcgtccaaggaatgctcaagatgtt

SEQ ID NO: 172012 - DNA, 335 bp, Zea mays
  Clone ID: MRT4577_88459C.1
ccttcttttttttttttggataaaagttattccatatatatatccacagtttcacctaaaagctgctaaaggcaggtccagaggtgcttttagttcagcactacaaaaaaggcggcttttagaaaaagatgttttccatatgcagcccttgggtttgacaattggcttttagggggcaaaagcctaaggcaaaagccaagccaaacacacccttattatcatcaccataatggaacaactaccggccgagtgcctgtgaggtgcattttgacaccccatttgaaggaagagtcatagagccatgcaattgctgaagtttaacttttgagtctggt

SEQ ID NO: 172013 - DNA, 177 bp, Zea mays
  Clone ID: MRT4577_8845C.1
agcatattgtgctttgtgagataaaaggtttcttctgctattctgctcttggctttactgtaggcaaaagtattccttaagtagctattgcacattgctagactgatttgcacattcattaagttgatttagcagacatgtcagtcagaaggttcacatatccgtcgtatcacacat

SEQ ID NO: 172014 - DNA, 425 bp, Zea mays
  Clone ID: MRT4577_88460C.1
ggagaaagagcagatgcataatatatatgtcctcaagaaagaagataagaacaacgccaacaaacaagaaactggcactatagatgcgcggcagattcgcggacaacaacatcagtggacacaccagtaataatgaggttgaagataacatgcagccagcctgatttgacgcctgagaacgccgtccaagcaatccggcaacgaaacacgaggtgtgctggcttgatttggcggagacggagtagatcagctcaagcttttccggccggccggcgacgaggataccaagctgctaactagccgctcggctgcagcctctggagcaacgcggcgcggaggcagcgctcgtcccgcagcccggcgggaacgtcgaccatggcgtcctgcacggtcacgccggccaccctgcatacgcacgcgtgctg

SEQ ID NO: 172015 - DNA, 745 bp, Zea mays
  Clone ID: MRT4577_88461C.1
tcctcctcccacccaccctcgcaccagagagggaggaagaacgaggccgcgagctaggaggtagaactccatggtcgagcacaggagctgacatcccccgccggaagcactcaacttatgctttgccctctcacggacctgctcctctccaatccaaggcagccgatccaaaggtgtttgtgcttgacagcctcgagcttggccagctgaacaaaccacgcggaatctacccaaggatagcgctttttgagcacgagtcgatgaagaagatgattgatatcacatccgtaaacatgggtggaaatatcatttcacggggcatcggtcaaggctgaacaaaacgtcagcaaaggtattgtatgtgcatcaaccgagctcgcaaatgaaaacattccgaggcagtctaatacgacgaaacgagtccagatgccatcggtgcctattttaagagctacttacaataaaattggtccacaagatttttcaaaccacatacgtacaaactatccaacaatatctggtgagaagctcgggatacttctccctgagcacaatgctcgaggactggcaaacatttcagagatgaggcagtctttccagtcatcaatgttcacatttgcagacaagctcatcaactgcatcgctgagaattgttcttgttgcaaggccaacggacataaacaatgcatcctgaagagtgaaaatcaaaacaattgcaccaacttggccaacatccctatgcaag

SEQ ID NO: 172016 - DNA, 194 bp, Zea mays
  Clone ID: MRT4577_88462C.1
taggtttcaactcctatattaaaaactgcttctgctgccatccaacgtggcgtgcggcaccttcactaccaacaccatacgactcagtatagcccgttatcacagcagtactacgaccttttttacatgttcaaacgtaccattaaagattaatgttactcttacttgtagacgggtaacactcctaatgctat

SEQ ID NO: 172017 - DNA, 176 bp, Zea mays
  Clone ID: MRT4577_88463C.1
tcgctacgcgtccggatctgacgaggcggaaacctatctgactcgccctgccgccgaccctccccgcccgcgcgtactacgccgtcgtcccccgaaaggttttagccacagggcatgtggatcagtgagttcactgtggtgcaagccaagtgatagaaaagaggagctgaccagtg

SEQ ID NO: 172018 - DNA, 107 bp, Zea mays
  Clone ID: MRT4577_88464C.1
ttccacaccggatgtttatcacaaggttgttcctcagatccctgtgaagagtggtggtccccatggagcaggcgtcctcgggctgcacctggagggccccttcatca

SEQ ID NO: 172019 - DNA, 390 bp, Zea mays
  unsure (1)..(390): unsure at all n locations
  Clone ID: MRT4577_88465C.1
gacatcacagagacactcactgngcgatcgtccattttgatgcccatttgatatctacccatgctcgatttactcgcgtgctagcagcnctgtcaccttcatggccaagatcaatatcggcatacaatgggttcggctggatcggaaggctggtggacagggtggacctgcagagcgacgacctccatctcggcggcgggaacgacctcttcataaataccgattacatgacctacatgttcaagtatgacactgtgcacggacagtggaagcaccatgaggtcaaggtgaaagactccaagacccttctctttggtgagaaggaggctcgctgtgtttggctgcaagaaccctgaggagatcccatggggttccgttagagctgaatat

SEQ ID NO: 172020 - DNA, 282 bp, Zea mays
  unsure (1)..(282): unsure at all n locations
  Clone ID: MRT4577_88466C.1
tacgaagctcggaatcggctcttgagttcgaaaaccgttacttaccgtgtgcacanggcgcctcctggggggttatttgaagaagatgcgcgttgccttaccaagtgggcactcaaaacctgaataagagggaggagtacatacgtaaggaacttaggaccggatctggaacctgatggccccacggatcaggagcaaaggcgccagattcaactaagtacatggttgaggacggcgacctggcgaacgataagactggactgacaagggacatccacaggg

SEQ ID NO: 172021 - DNA, 445 bp, Zea mays
  Clone ID: MRT4577_88467C.1
gccggggggcaattaaaactgcacaaaaaaaatagaacaattccattttatgaaaggaaacataacttaaatatgcactaaaaaaaaagcatatgattatcaaaaaaagcaaatgaaaaacatggatggagcccaaaaatttccatttttatttttcgaaaaaaaacttgattaaaaaaaaaatgatttgaaactgtgaaaattttgcccccgtttgaaaaaattttgttaaatgggcctccttgccaaaattgaaaaaaaactcaaacccttgagggggaggggggttttttggaaaataaaggccccctggggcccatggaaaaatgtagggatcggggtgctggaaaattcctgtactgaacctccgaattgtcaaaaaacctataaaccacgtccaagttatccacgtgtcggttggccttcaaacttgtcccggaaaaac

SEQ ID NO: 172022 - DNA, 243 bp, Zea mays
  Clone ID: MRT4577_88468C.1
atttgtccgttcattgaacggacaaatcgactgcttggcatgtagtgatttccttatgttctcttgatagccacttggaaattaaaatacggtctttatatagccacgctggagatcacaaccggtcattgcacgacgatgctcggcaacataacggttcatcgcaggtcgatccgctggcaattgatgattagtcgcaattccgtcagctacagcctccatcaacatcgtagtcactgctgt

SEQ ID NO: 172023 - DNA, 292 bp, Zea mays
  Clone ID: MRT4577_88469C.1
aaccctaagaaaaacaactcaaatttgaattgatgaccattttccaatcctggggagttcaactgtacaacttgaattttcacccgcctgaaacacacctttccctttaccactccaggtcttctccattaccttgctgacgaggaccaaaagaaaaagaagcagcaaaactggggatgatttattacatgcccttcagcctccagttagtgagcaaataccgcctgcctgtcctgagttggaatatcgggagccggcttctcttcagttaggagatgttgatggacttgcc

SEQ ID NO: 172024 - DNA, 626 bp, Zea mays
  Clone ID: MRT4577_8846C.1
cctcgaggccggccgggatatttcgtactgatacgggtggatccggctctcatctttttcataccgagaggctctatctctttccgcgaggtccttgaaagcctaggaccgtgcttgaccggcggcgccgcacgagatggtgatggaccctgacggaggggcgaatgcctactagtaccattactacggacggctcgacaccaaccgcgaggcgctggatgggatgaaccatcatagctccttgctcaccttggagggccagaagttccagtgccagtcgatctttgcgggcgacatcggatctctccctttacaggtctgcaagaatactatcgtcaccgaggcactgccaggcatctgatcccaaaagagggaggctcatcttcgtcgccggatcatactcaccgtccaaagacaccccccagatccccagcattccatatgtgtggcgtgaatcttcttcgcgcagccgcatgttccgcctgaactattgctaaagacggccgatgctcttgagattaaggaattgattaatgcattcatgctgaaacaatgaatagtaaatgttgccgctactctgagctcgtttagcatgccctttgaagcctgcttcactgtattaccag

SEQ ID NO: 172025 - DNA, 423 bp, Zea mays
  Clone ID: MRT4577_88470C.1
atccagtatctgctacaccagtggtactactttcacaccacagggagctgtacttgctcatggtaacttaattgcatatgtaccacggccacgtttacgcattaagttttaccactctgatctgcacatctcacatctacctttggctcacatctatcatagagctaaccaccttacatcgcttgactatggagctgccattggattctaccaccgggataactcgaatctgaatcactatctctctgttataagaccaacaacatacgcacgtgtatcacgcattatattacaaccttcatgctgcagttgcaaatgctgttcagcaatctgctcgattgagataaacgctgtatcatcctgaatacaatgccacgcgacatgccatgataaatcatagaatccacatacctatatgggaca

SEQ ID NO: 172026 - DNA, 219 bp, Zea mays
  Clone ID: MRT4577_88471C.1
attccgggtcgaccagcgtccgagaagttgaaagttggatttggttcatgtcccaattaaagaagctgttggggaacatggagtactcgctatttgttcagacgcttaaaaaggattaatgcatgcagtgacacattgtttcccttatgctgagaagagggagtgcttccgacatctcatgggcaactatgtcaaaagctactcaggttccgaacacat

SEQ ID NO: 172027 - DNA, 2342 bp, Zea mays
  Clone ID: MRT4577_88472C.1
gcaatatggggacgtacagacattcgacacatcctgcaagagccatggaattgttacagtgtcttactatgacattagagctgcacaggacgcagtgagagcagtccataacaaacctctggggctgatgaaacttgatgttcaattttcccttcctaaggaaaatgttccaaacaaagatcccaacaatggaacactggtggtatctcttattgactcttccatctccagccatgatcttctccaaaaatttagtgtttatggcgatgtcaaggagatttacaagtctcctacaagctgcaataagaaatttgtagaattctatgatatcagagcagcacaagaagcactgaatgacctcaacaagggtgaaatatcatgctcacaaatcaaagttgagcatagcttttctggaggagcaggatcttgcttcgcagagcaatattcaggagaacagaagcaaaatgccgtagctcaccaacttaagaactctccacctgggaccattgggaagttagatactaagagttgggacagcagcactgttcataatttatattctccagttagaccgcaacacgataaatcacaacatggcttctctgtgaatcctcctcagaagttgtcatcgcctatcagaattgaatctacacagcagcatagtaatcaaactgcttttggtgaacatagtggatctcttggtcatggcaactttggaggtgggctgcaagccttccacccgcactcactgccagagtgtcacaatggtatttgcaatggctataactccatgacattaaatgcaaggaattctaacttcagatttactgaaggaatagactacaataatcacaaagttgaccacagtgaccttcatggtcattcctctgatcaaaatgaagcaattagagttgctggaattggaagttgcccccttcatggacatcactatacctggagtaactcaaatggttttcctcaaagcccctctgctccaatgatgtggcctaactttcagcaaccagtgcatatgcattgctaccctgctatgcctcctcacatccggcgcagtgctgcccatcctatggaccaacatcacttgggttcagctccaaacagtgttggtggttttgcaaatgcacactcttttcatccaggatcccttgaaagcgtagggtttcctggcagccctcagctgtatccatcagatctctctgtatttgcatctgccagaggaaattacagggagaccatgttctctgccataagtgccgggtttccatcaattcagcaaattcttcatgcgaccaacggaaggaatcctatgatgcacgtctccacctcatatgacgccactaatgatcgcataaggagccgcaggcatgatggaaatgctgcccagtctgaaaacaagaagcagtttgagctggaccttgaccgcatagctaagggtgaagactcgcgcaccacactgatgataaaaaacattcctaacaagtacaccagtaagctgcttttggctgtcattgatgagaatcaccgaggaacttatgatttcatctaccttccaattgattttaagaataaatgtaacgtgggatatgcattcatcaatatgacggatccacagcagatagttccattttacaagacattcaacggcaagaaatgggagaagttcaatagtgagaaagtggcatcacttgcgtacgccagaatccagggaaggaacgctttgattgctcatttccagaattctagcctgatgaatgaagagaaatggtgccgtcctatgcttttccacaaagatggcccgaacgcaggagaccaggaaccattccctgtgggtaacaatgttcgttctcggtccgggaggaacagaccacttagcagtggttcggagactaccaaagaggcaagtccatcaacctctcctaactgaagagaagccggctcccgatattccaactcaggacaggcaggcggtatttgctcactaactggaggctgaagggcatgtaataaatcatccccagttttgctgcttctttttcttttggtcctcgtcagcaaggtgacctgacttgctgagtgtgactagctaacgagaattctgcactgcatgagcctgctgaagattcaccttaaagtaactatgccttggttttgccataccattgacgtcaacggctacaggtaatggagaagacctggagtggtagagggagggtgtgtttcaggcgggtgaaaattcaagttgtacagttgaactcaccaggattggaaaatggtcatcaattcaaatttgagttgtttttcttaaaaaaaaaaaaaaaaaaact

SEQ ID NO: 172028 - DNA, 284 bp, Zea mays
  Clone ID: MRT4577_88473C.1
gcagtggtaacaacgcagagtacttttttttttttttttttttttttttttttagttttttttttttttttttttttttttttttttttttcccgctcccaaaattttaaaggccaaccttgactcaagggcctgctacaatatgggcccactttggagtttagggttttcgggggagccatggaaaattttcacatgaatcaagggtcagggctccaagaaccctccgggcgggccttttcccatcaccgcgggcccaccggtggctctttgaaaccgtgctg

SEQ ID NO: 172029 - DNA, 446 bp, Zea mays
  unsure (1)..(446): unsure at all n locations
  Clone ID: MRT4577_88474C.1
gttggtggggggcactcatttttttttggaatgaggcggccgatgtttggactcttttggtgataatagtttaggagccgtgttgctttgctttgctcccaggagaactcaacatggacacaacggagaaaactataacatgcataacaaatatagggatctaaagagaagctgaagaaaaattacacttctttgcttggatgaatgaagcctgaaagagagagggagatgacggggcaaaaaacgaaaatttgatccaacaaaacaaggccctgaaaagaccaaaaaaaaagaggcgaaactaaaaaaaaataaacaaagaagaaacagaacaccagtgtccatcgacatgcaagcaccaggaacctatgcaattgaatcaggccaaggaacatttaccccgatagctgggacgncacgggggcggggcggcgggaggcgtgccc

SEQ ID NO: 172030 - DNA, 246 bp, Zea mays
  Clone ID: MRT4577_88475C.1
gcatacaaaacttgcacctagcttataatttagaacagaggatgtatctttgaacaatttcaatgatgtcattgtagatttgcagcatgccagcatccatatgcccatatctctgttgctgattgtacgaagatctgccagaccagtagtctagcaattattttgtgattttttatgtatccaaaagattgtaagtttggtcatgttgatatttttatacactgcagtatattgtattgttctcgt

SEQ ID NO: 172031 - DNA, 403 bp, Zea mays
  Clone ID: MRT4577_88476C.1
gacctttggtctgctttatgtgcttgggagcttcgaatttaattgaacttctccacccatcacttattatacgactcacttcacaatggcggtagcctcatactaagcacctatagtccacggacccgcggagaagaccgctataccctaaaagctagtcggcccctaagtctccacctagccctatctgtgttaagaagtcgcggaagtacccggcctcccgtacggaacgaatacacacgacggccgtcgttagtcagacacctaacacctaaactctagcgaatcgtaagcttaccataataatgattgactcagagaccctataaacttactaccattcatagaataatgtttcagggttctctagtaagtccacttcgacttagtcaactctcacgtt

SEQ ID NO: 172032 - DNA, 531 bp, Zea mays
  Clone ID: MRT4577_88477C.1
atttttcaggcgacgaacccaatgccgatccgaagctgcgccttgaaccattggataaaatggacgccgacgtccaagctgtccacgggcatcatagcgcgctatcgcggtatcacgcgtaccattatgacgtggggctgaggaccgtgaacgccaagaacggggtggtgtagccgaaggacgacaaggacgcgctccgcacgtaaccgaagtggttcgtgccgacatcgaggtctccgcgccgccaccaacgcatgatagagatgccaactcaggaaagcatccctgtgtgaacgtgcacagcctcatggcactgcactgcatgaactagaaagggacgccgatcgaggagttcatggacaacgtgcgccttatcgttggcaacatcaagatgattatgttaccccagctctgcgagctcgacaacgatgtctacaacaactgaatgacctccaacctggcaggcagtcgtaacccgagcctggactacaagttcaagggcaccgagatcaacatggcgtgctactgatc

SEQ ID NO: 172033 - DNA, 310 bp, Zea mays
  unsure (1)..(310): unsure at all n locations
  Clone ID: MRT4577_88478C.1
agtgagatagagattctgctgtaattggtcttgataattggcgtaacgaagaaattctgcagggcgaacaagaggccggagtccggacatgcanccgtcnagtatacgtgttgccattctggatgcaacacgatccctagttcaggctcacgtgtggtacataataatcagatgaatatcggaaacacaaaaatgaattatttttttattactaatataaataaaaaaataataaacccataccaatggtctattttgattaaaataaaaaaaaataaaaaactttattttatgggggggcccctttaaa

SEQ ID NO: 172034 - DNA, 270 bp, Zea mays
  Clone ID: MRT4577_88479C.1
tttttgggtttttttacatatggggtgcatcattcacacatccatttacttccgcaatgcaaataatatcagcgatgaatatacgacaacactgcatctggtttcgaaaacccctcctgcgaaaattgacccactgatatttgtgaaatcccaggtacagcttttcctcgtacaatctgtgaaaaagaaaacaaaggtcaaagtgggcaagcctgatacaaccacacccaagcagccccactgttgtaaaaaaggactattaccaaactg

SEQ ID NO: 172035 - DNA, 618 bp, Zea mays
  Clone ID: MRT4577_8847C.1
gggtacctcgaggccggccgggccgtcaactcaggagtagccgccaccacttcattgcgcgaatcggagcccgtggccgtcgcctccgccttcgcgattcgccgccgttgcccacgagcgaggcttcctcctcttcgtcgccgccgtcgcaggaggggaaagaggataaactgccatggcgggcaggcttctcgcgaatctaatcgtcatgggcggaaccgtggttggcagggccatgctccaggcctaccgccaggccatcgtcagtgagtgctccctcctgctgcctcgtcaaaagaaaaaaacataggattcccagggtactttgactgtgcggtggcttgaatcgtgaaaccacgacgtgtttctgtctgaggtattagtgatttgtggagcagtggttaaaaaaacgctctgatgtgtcatgtgaggcgcaactgagtaatcagtctttgttctaagatttagggatatcatttggagcatctctgtttatcaaaacacaaattagagatactaaattgtgtttttgttcctagtgatatctacatcctaaagcatataatcgataaaaatatatattttgaggcgttaaaaaaaaaaaaaaaaaaagcggcc

SEQ ID NO: 172036 - DNA, 495 bp, Zea mays
  Clone ID: MRT4577_88480C.1
aaaaaaaacatcccccgactcgattttacgggggacaaaaaaagaacaaggggggaaagggaaagcccccccgaaaggaaacaacaacggaaaccgccataatttttctcaaaaccccgggagcaaggggggggaaaaaacgacccttacaacatcgggggggggaaaccccccaattcttcttaacagacccccataacccgatagcgggggcaacccccgggaaaacacgggaaaagggcaacacactggcctgaggctgggtaataaaaaaacttttttagaactcggaacccttggggccatcctcgcccttataaaactcagggccgacctccttgaaatccttttggagcgccgccagggcctcaggggcctaaaaaaacccacctttctccatacccttaccgaggtaccagggcacaaaggcccccttggggtacatgagggcaaacttgggggcgatgggggaaaacacccccacaacactggggg

SEQ ID NO: 172037 - DNA, 199 bp, Zea mays
  Clone ID: MRT4577_88481C.1
gttatttacgatagaagactcaggaaatgatgaacggatcttatggctgtcgcacgtattttatagcgccacacacgggtaggtcaaaaaaagttgagaaaagactgatttgttacaaaatccaacttgacggcatgatcaaacgccgaaacactaactcggctataaggaattggctgagcaaggcatagactataca

SEQ ID NO: 172038 - DNA, 583 bp, Zea mays
  Clone ID: MRT4577_88482C.1
aattcggcacgagggactcgcgctcggcacgcaggcgacgacggcggcgctcaggctcgggctctcagcgacggcggggcagtcccaatttcggcggcggcgtcagcggctccccctcccgcctcttgccaatcgcctcgcgccctcgcttccggtcctccgcacaccggccggcgaccctgcgtgcgcgcctcccgctcccctcccgcctccggtggaccgttgacagcgcccagccccggcggctgcactgcgcgccgcgtacggccggcgggcagcgggagccagcagccgctgctctaccaaggcgggcgcaccgctttggtagcgcttatgccccaacgaagcgttacccgtccgcttagcgctgaagcgtgcgcttagtgccgcctgttggaaccctgatctatagttggtcttcttataacttctcatcgtacactttcagcaacacattggactacaatggagaatatgcgttatgctgaggagctcgtgagggagtttctagttttcaggggttggacaagtacgctgagagcgtgtgacacagaggtggctactgagattggggggaactttg

SEQ ID NO: 172039 - DNA, 376 bp, Zea mays
  unsure (1)..(376): unsure at all n locations
  Clone ID: MRT4577_88483C.1
cccacgcgtccgcggacgcgtggggtgtttttttgcatgagaagaagaattcgcaggtgtggcaggtcatttattccagtgcgcattggcttcnaacatgggctattttacagaaggcggagttgcgacctatggttgtggaggctacgcagtacttggtgcaggtggccatggactatttttcccgggctcatgggtggcggtctagtctgcggattgattaccattagagtgtgtggattatcatctttattttgtctttaagctgtgtgcttcttaagcagaggctggaagaaatttcaagaattgtatcccctcgatgtaatgtgcttgaaattattaataaaatctttctttatcataaaataaatttatt

SEQ ID NO: 172040 - DNA, 840 bp, Zea mays
  Clone ID: MRT4577_88484C.1
ccggccgggagcagcgacgaactcgaagcttgcgttcttgtagtagaggtcggcagcaagcggtagagcgagaggtcgagaagatgaagagcagcactctgttggcgatcctagttctccaggcccttctggtctctgcggccgtggccaaaggacctgcagggccgacgacgaagaagcagtgctggtgcggcgagtgcaccagctggtcgggcgtgtggacctgcgacgacctcctcaccaagtgcgccgccacctgcaagaactgcgtccccgtgtccacggacaagggcgccaccaagtacagatgccgcgacttcctccccgaaaactgcggctgcaagatccactagactcatccacagcggcacagccgatggatccttccatgctcctccgtccgtccgccttgctacaagcaggcagccaccaataagctagctcttgttgttgttttgcatgtttgattgggtgtcccttcccagtcgagatggaataatgtcaggcgcacgtacagacgtgttattacgatatttctcccctacaaataaaaactcgatctgtggggttaacactgtcccctagtattacaattaaaaaaagatgttatcacgcatgttaagaaaacatctgaatccctatcttagaatgtatttggtttggctttgtcttttgctccataaaaactaaaatctagaccaaatggctggatccgggaagcagctttttataaaagctaattttgtacctgctgtgtcgctagcaggtatggtggtgatccaggccttctcctttctgcttgtatgcacacgtgcatttctatagaactcgttttcgctt

SEQ ID NO: 172041 - DNA, 694 bp, Zea mays
  Clone ID: MRT4577_88485C.1
tcgaggccggccgggccgggagcagtcagcagtgaccaactcgaagcttgcgttcttgtagtagaggtcggcagcaagcggtagagcgagaggtcgagaagatgaagagcagcactctgttggcgatcctagttctccaggcccttctggtctctacggccgtggccaaaggacctgcagggccgaagaagcagtgctggtgcggcgagtgcaccagctggtcgggcgtgtggacctgcgacgacctcctcaccaagtgcgccgccacctgcaagaactgcgtccccgtctccacggacaagggcgccaccaagtacagatgccgcgacttcctccccgaaaactgcggctgcaagatccactagactcatccacagcggcacagccgatggatccttccatgctcctccgtccgtccgccttgctacaagcaggcagccaccaataagctagctcttgttgttgttttgcatgtttgattgggtgtcccttcccagtcgagatggaataatgtcaggcgcacgtacagacgtgttattacgatatttctcccctacaaataaaaactcgatctgtggggttaacactgtcccctagtattacaattaaaaaaaaaagttatcccgcccgttaaaaaaaaaaaaaaaaaaaaaaaaaaaaaaaaaaaaaaaaaaaaaaaaaaaaaaaaactcga

SEQ ID NO: 172042 - DNA, 1515 bp, Zea mays
  Clone ID: MRT4577_88486C.1
gcaatcaaacaagtgtaacttgcattgccgaaaccacggtttagctatccaggcttagggcttgttcggttagctctcaatccatgtggattgagtgggattggatgggtttgaaacccaaacaagtcaaacctcttctcatttttttccaatcccatccaatccatgtgttttgggaataaccgaacaagcccttagacggctatgaaaaaaacacccatagagacaaaatgaccacagtggctagtagttggggaagaaccatccacggcgcgcccacccggccgattctcgccggccgtcgtcaggtttgatggtcaagatctccaggtggcgcccccgctgtctttccatgcccaacaccctgacgaccccgtccgggtggccacggtcgacgaggtagatgcgattgacgcgagcgcggtaccaggggaactccgcccgcgagagcgcgaacgcgcgattccgccccaggaacagactgttccatccgaggtccaccacgcgcaccagccgcaccgtcctatccccgagccaatccaccctgtgcacctccaccgcacgcgcgaacccgctgccgatcttgatgcccccgtcgtccacgcccgccatgtcgtcgtccgagttgtacatgacgtcgtcgtgcaccgagacgaggagcagctggcggtcacactccaccaggtgcgtctcgacgacgcgcctcccttcgccagggagcttgtcgttgtccgagacgacggcgtcgccgttcgcgtcgacgtgctcgagtgggatgaccgcgggcgcgtccccgtcgacctcgcagatgcagatcgaggacttgaaggccacatagaaccgccccctgtagtgctcgacagcggcgtagccggtcacgctgaaatcgagccgcgtccacgccccagtgacggagctgtagtacgcgaggcaggtcgtcgggaacccgacggccaccgcggcccactcggtggccgtggcggggtcgcccgacagcacgatggtggtcaagtcgagccacttcttgaagaagccgatgggcgggaggcggacgcgcctgcctgtcaaggggttgaggaggaggatgaccttggggctgatcctcgggtccgagagcgcgaggtagccgtgggacgaggagaggtactccagccccgatggcacgttcgcggcgaagggcaggagggcgacgctgggggcgagccagaatgacgaaatttcgctggcgccctggccggagcggtcggtgcgggagccgacgagccaagggcgcgggcgccacgcggcggcggcggcgccccagtccgcgcagacggcgcggaaacggacgcggtgagcgtcggcagggaggagggcgaatatgctgagcagcaggtccgccggcagagaggaccaccccgtgccgcccttgccgccgcacgccatgcccggctgaggcgccgaggagagggagaggttatgtccaactccaacctgtctgcgctcggtgtctttcacgcggctggcttgcctgcc

SEQ ID NO: 172043 - DNA, 740 bp, Zea mays
  Clone ID: MRT4577_88487C.1
ttccgccgccgggcaatatgcggaatctagggtcgtcctccacgcaaactttgctgatctgctaccggcgggcaaaggaacctccaactctcgccggccactctcctggaatctctcgaatccagagctccgatgcagatccccatttggggagcaaagcaagcccgcagttcaatttccatccactataagtggagcgactggacgaaattccgggttgagcctgcggaggacgatatctcgaactcctcagaccagatccccatttggggggcgaagcgagcacgcaattcaacttccatccaaaccgattggagggactgggcgaatctcggggatgggcctgctgggctaatcgccgagcgccttctcgccaacgatgtcgcggactacatctgcttccgtgcagtttgccgtccgtggcggctctgttgcaccgatccgcgcactcattgcatcctggagcgccgcttccacccacttcactggattatgctcagggaaacggggggctctccacgctgccgcttcatgaatatgtccaccggatgctcaaggtatgtacatctgccggagctctgtggccatgacgttttcggccctaccacggagggcctgctcgtcctcctcgacagggccacctgggtggttcgcctactgaacccgctcacccgccaggcagttgatctcccacctgccaccgctctgatgtccaagagtgatctgaaggaagcgtcttg

SEQ ID NO: 172044 - DNA, 611 bp, Zea mays
  Clone ID: MRT4577_88488C.1
atgtgttgctggaaatgcgtggcagcgggacggcggaaatcgagcgggcgctgagtgcgattcatcagcgtcggcgagtggcgatcagcttgccgcattggggtgtggcgccgcagttgattgccggtacggacctgattttgaccgtggcttcgcgcaacttgcgtaatatcgatcatgagcggctggtggtggtaccgccgcctttcgaaatcccctcgttcgactttatttttgtctggcaccagcgccgggatggggatcaggcattggggtggttgcgcgagtgcatgcgcgcggtggtgactgtgggcacgctggattgaggtgcaatggggggctgtttttcggctattggaggacgtttctctttcccttgactgaagtttcctagaaaatccagatcgcttgcgccaggaaaatcacgggactaggctctggtccgtcactgctatttcagtgatcgggtttagcagcccgattgacttccaggcgcacagaaagcgcccatatccatttggctggcgcttttttcatgcccgcttcatgcgttatggcagctgtgcgtggggcgccttcgggcgcgctgggttcctggagtcccggtctgc

SEQ ID NO: 172045 - DNA, 2082 bp, Zea mays
  unsure (1)..(2082): unsure at all n locations
  Clone ID: MRT4577_88489C.1
gcaaagcaagaactgatcaaaagttagtagcactgaacaagatcacgttttttttgtggttgatgttcttggggccaggctgttcctccagtcccccttgccgtatttcttcaggcctaagaggaacagcctggccccaagaaatacggcaagggggactggaggaacatatcgcgcaactacgtccagacgcggacgcccacgcaggtggccagccacgcgcagaagtacttcatcaggctcaactccggcggcaaggacaagaggaggtccagcatccacgacatcaccacggtgaacctgacggacgacgagcgggcgccctcgccgtcgcggtcctctctgatcaccaccaccagccagccaaacgcgccggctccggccgcagcggtgataggcgggcccttctcgtcggcggcggcggccgaggccaagcagcaccagcacggcgctgggaacctgccaccgaaccggacctccgtggtgccggctgtttacaggatggacgattcgcaggaccacggcctgcagtgtggccctctgcgtcatcaactggtcgccagccaccacagcgttcttgtagtagaggtcggcagcaagcggtggtagagcgagaggtcgagaagatgaagagcagcactctgttggcgatcctagttctccaggcccttctggtctctgcggccgtggccaaaggacctgcagggccgacgacgaagaagcagtgctggtgcggcgagtgcaccagctggtcgggcgtgtggacctgcgacgacctcctcaccaagtgcgccgccacctgcaagaactgcgtccccgtgtccacggacaagggggccatcaagtacaggtgccgcgacttcctccccgaaaactgcggctgcaagatccactagagactcatccaattccaccatggccgcgcgccacagcggcacagccgatggatccttccatgttcctccgtccgtccgccttgctacaagcaggcagccacaccaataagctagctcttgttgttgttttgtatgtttgattgggtgtcccttcccagtcgagatggaataaaataaatcatcaggcgccaataggtaccctncgcgggctctggccgggnnaaccccggtgcccccggaccgtaccagatgccagtgctcctgccaccgaaccgctgctctttaccaaccactcccacccccccctgaccgttgtccgttacatatccagcggccacccgttcctcttcctcgtccgcctccaacgaccaccatccatcgccatggctggccccaccaccacgctcctcctcctgctgctgtgctccgccgcgctcgcgtccggcgccacggcggccgacgacagcggattcacgaccttcaaggtgttcttccacgacatcgtggcggggacgagcccgacggccatccgcatcgcgcagggggcggcgtccaacacctcgtccaccagcttcggcgcgatggtggccatcgacgacccgctgacgacaggccccacgcgcgccgcgggcaccgaggtgggccgcgcccagggcacctacacgtttgcggaccagcagacgttcggcctcctcatggtgatggacttcgtgttcacggccggggagcacaagggcagcacgctctccatcctcggccgcaacgaggtactcagcgacgtccgcgagatgagcatcgtcggcggcagcggaaagttccgcatggcgcgcgggtacgtccaggcgcacaccatcgactccggcttcaaatccggcgagaccgtcgtccagtacaccgtcaacgtcagggcctagctacccgctcgatctaccttgcttgctcctccggcccatggccgactgcccgcccggcttcttgtgtgtccatccatctctggatgctttgtacacaccttgtcgttcttcgatgttactacatgacatgtatgtgtagactggcgatttcagatatctagtctatcttcatttgctatcgaaaaaaaaaaaaaaagctattgagcgggatctggatctgcagacccgaatctagttctaaaagaaaaaaaaaaaaaccagagtcgcctgtg

SEQ ID NO: 172046 - DNA, 2531 bp, Zea mays
  Clone ID: MRT4577_8848C.1
ctcagggctgatgacacacttcgggaccgtgcacgcgacgaccctgccgtcggcacggacccactgcgcacccaccgcccagcgggacccacgcggtccttgtcccctcactgcctgcgcagaatgtccccggcccccacccgctgaccccgcctccgcctccgccctccggcgaccccgatccccgccggcgaaatggcggcgtggtgctctgccgagtccaccaagccggtcttcgtcgggatctacggggccgtcctcggcggcttcgcggtctccgccctcttcttcctgctctcctccttctcctcgctctccgcgcccacgctccccctccccgccgcggccatcgctggggccaacctctccgcgcccactttcgcccaggctgaaaccatgtacaaccgccccatctggaagcccccgccccggcgggcgcggatgccctctccgcgcgcgttccgcctcacccgcgatatggtcgccgcccgcgcccgcgacggtgtgatcgtcgtcaccttcggcaactacgcctttctcgacttcatcctcacctgggttcgccacctcaccgacctcggcgtagacaacctcctcgtcggtgccatggacaccaagctgctccgggagctctacttccggggcgtgcccgtcttcgacatgggcagcaggatggtcaccgaggacgccgggtggggctcccccaccttccacaagatgggcagggagaaggtgctgctcatcaacgcgctcctgcctttcgggtacgagctgctcatgtgcgacactgacatggtatggctcaagaacccattgccctacctcgcccgataccccgacgcagatctcctcacgtccagcgatcaggtcatacccaccgtcaccgacgacagcctggagaactggagggaagttactggtgcgttcaacattggtatttttcattggcgacccactgaacctgctaaaaggctggcaaaagattggaaagatttagtcatatctgatgataagttgtgggaccagaatgcttttaatgatcttgtacgcaaaaaatttggacagccagttcaaggagatgatcttgtatattcttatgatgggaaactgaagctgggagtgctaccggcaagtatattttgcagcggccatacatattttgtgcagggcatgtataagcagcttcatttggaaccatatgctgttcatactacttttcagtatgcgggtactgaaggaaagcgccatagattgcgagaggcaatgcttttctttgatcaaccatcttattatgattctccaggaggtttcctgtcatttaaacctaacattccaaaaagtttgctattagatggtgctcatactgttgaatctcattttgagttggttaactaccagctgaagcaaataagaactgcacttgcggttgcgtccttgttaaagcggacactggtaatgcctccattatggtgcaggcttgatagaatgtggtttggacatcctggaattttagagggaacaatgaccagacaaccttttctctgcccactggatcatgtgtttgaggttcatgttatgctgaaggacttgcccaaggaagaatttggtcaacatattgatttcagagaatactcctttcttgagaatccatcattacctaaagaggtgaaagattcgttactcgaggttgaactttgtgacgagcatagctccagatgctctgcaattgatgaaatcgataagcatggaccctttcttttaccaagaaatagtactgaagaaaagctgttggatttgttgtcatcatataaggatgtcaaaatcatacaattctcatctatggttgatgccttcggtggttttgctgatgcagctgtggagaagaagttccgaaatcgtgtgaacaggtatgtgggcctatggtgctgtgtggagttccgtgaaattggtcacatatattatgacatgtactgggacgagaaaccagggtggaagccacaccctccagagactagggaacaggaccatccaccttggtcatgactactgacaagaagatgctagaaagatcgtaatgatgaagatctgagatcttctagagcaccctgctccaatcgattcttcaggccaattttgtgctgttctagttctgttctaacatgggtcgctgttgttcacttgtggccccttgttcgcagctcatcggtcgaagcatggggctcaatgatttagttggggcaacatttagatcacgacttagttccattttccatagtttttgcatcatgttcatagttgatacaggcatcagctccaaaggagaaaaggccattattgttaaatgttgtggaaaacttggctgccagctgctgcaataggaagctgtcgtaactgttgtgcaaaactttgcccccgctgctctgttaggaaatatttggagcagctatctttttgacacattgttctcaagtcttaaccatgaagcattgtctttatatataagaaggcatttggtcaaaaaacgaaaaaaa

SEQ ID NO: 172047 - DNA, 249 bp, Zea mays
  Clone ID: MRT4577_88490C.1
ttttttttttttttttttttttttttcttttttttttttttttttttttttttgggggaaatcagaaacggttcatttggaaccaaactggccgggggacaggggaaaaattaccgaaacctttgcgtttgtttacttttcgccaaaggccttccaaaacaaaacaaacttaagactccggtggagttggaaaaccgggtcatctcatgtaggggctggccacatattttggatgcttttacttaactc

SEQ ID NO: 172048 - DNA, 278 bp, Zea mays
  Clone ID: MRT4577_88491C.1
ctcgaagccggccgggatcagttccagaatcagcagcagcagaagtagcacgcgagatgttcaagagaagcaacagcggggttaacctgaagttcgagagcgccagtggcactgctgggacgatgtcgtcggcgaggtccttcttgtcgtctctgagcatggacggtagcgtggctagcctggacgccaagtcatcgtcgttccatttgatcggtggacctgcgatgagcgatccgctgaacgcgcagcacccctcgaggaggcgttgtacgagccgt

SEQ ID NO: 172049 - DNA, 582 bp, Zea mays
  Clone ID: MRT4577_88492C.1
ggggtacccccgaggtcggccgggacttacacgtagcgcgcagccgcagagtcaccgtctcgcttcgcagtcctactcgcactgtcgcacacacccgtccccatcctcttccggtctcgccctcccctcacgccgctcgccgcgtccggccgcggcaacccgacctgcgtcaatcgccatgactacctcaaggcgtcttgccgataggaagatagcacgatttgagaagaatatcacaaagaggggctctgttcctgagacagtcaagaaggcaaatgattatcctgttggacctattcttcttgggttctttgtctttgttgttgttggatcatctctctttcagatcatcaagacagcatcaaacgctggtttattctgaggacaattgccaattggtcacttacttttagtcactctaaaaaactatacaagtgtatggcgtagctggtactctacaatgtcgcctttctaatgctgtaccatggagagttttaagttataatgtatagtccatataaaaaaaaaaaaaaaaagcggcctatgtatgtatgtatgtatgtatgtatgtatgtatgtatg

SEQ ID NO: 172050 - DNA, 218 bp, Zea mays
  Clone ID: MRT4577_88493C.1
aaaaggaccaaaatgtcgtctgagtatcctggggaccaccagataattagtggaggggatagggagaaggaactagcagctggagggcctccaggtgcaagtgcacatgtggttgaaggatcaagtgcggggaagcagcctaaccagtatgcaagtagccaaagtagctcagcagattccaaggacaccataggttcgcatggtacatttggcataga

SEQ ID NO: 172051 - DNA, 373 bp, Zea mays
  Clone ID: MRT4577_88494C.1
acgtaagctcggaattcggctcgaggcagccggttggcctcattgttatcacccgcacttttgctgctggggagaggatttgtgtcgaaggcaggccatgaacacgcaaccaaagattgatgacttcacggatgtgggatgacgacccgaaacgtggaaagactctcctagactattttgaaggttactggataaggcttaaagtatccggaactgaacgaggctgtactctggactagactgcaataaatattggaaccgcgaacaacgatttgtagccattggcggcttgtacggatgaaaagatattggaggcgcctgggaacaaggatctgaagaaggtgattattaccacctatgcgtttctggatac

SEQ ID NO: 172052 - DNA, 1051 bp, Zea mays
  unsure (1)..(1051): unsure at all n locations
  Clone ID: MRT4577_88495C.1
atgtagcctgatcattttttaccctagtgttagaaaaatgcttatgagctatttgaatttgcggtctgagttatttactctctccttcatacactcctgcgattgggatcctcgaggccggccgggacttcacacgtagcgcgcagccgcagagtcaccgtctcgcttcgcagtcctactcgcactgtcgcacacacccgtccccatcctcttccggtctcgccctcccctcacgccgctcgccgcgtccggccgcggcaacccgacctgcgtcaatcgccatgactacctcaaggcgtcttgccgataggaagatagcacgatttgagaagaatatcacaaagaggggctctgttcctgagacagtcaagaaggcaaatgattatcctgttggacctattcttcttgggttctttgtcttcgttgttgttggatcatctctctttcagatcatcaagacagcatcaaacgctggtttattctgaggacaattggtcacttacttttagtcactctaaagtcgaggaacagggttgacatatgcagtttgtcacttaaaaactatacaagtgtatggcgtagctggtactctacaatgtcgcctttctaatgctgtaccatggagagttttaagttataatgtatagtccatatatatatatatatgcaatggaagtgctaatttaagtcacttagctgacaaaaaatatgttcaatccataatacattacatatcgagtaaggtctagtttgagtattctagtattaacctcaattcacatgtattgaggtagtttgatgtgtaatttaaactaatttacacttcaacacatgtggaacatgtggattgaagtctaaagtactcaaacaaagactaaagttatttttatgctcgaaaaaaaaaaaaaaaaatgcgcgcaaaaaaaaaaaaaaaaaaaaaaaaaaaannacaaaaaaaaaaaaaaaaaaaaaaataaaaaacacaccccaaaaaaaaaaaaaaangggccccaagggccctccggcccccgttttttgcccctttaagggg

SEQ ID NO: 172053 - DNA, 773 bp, Zea mays
  Clone ID: MRT4577_88496C.1
cccacgcgtccgcccacgcgtccgcccacgcgtccgcccacgcgtccgcccacgcgtccggaaactcggttctcaacctgatctcatcttgatccacaaccctttcgtgcctcccaagggcaagctcgtcgaattctggaagatcctcgaagagatgaaagattctggagaacttacggcgtctctcggagtatcgaacttccgccctcaagatttcaaagagttgttatcggccgacatcaagtataaacccgtttgtaaccaactcgaataccacccttacgtactagaagctctcgaacccgttttcaaaatccaacaagaacatggtatcctcacggaagcttacggacctctttcccctctgttacgacacaagactggaggacctatcaagccgatcctcgagcgtatcgctcaacgactctccaaggaaaccggcaaagacgtcgacgcggctgccgctttactcctctggactcgagcgaaaggagtcgtcgccgtcactgcgagtggaaacgaaggtaggatcgcaaagttggctcaaactcaagaattaccggatttgtcgaaggaggaagttgaagagattgaacaagctggacgaaaggtttacttccgtgcttacgacgaacacatgtgtgtcgactacgaaaacaaccccaagggtcttcccgaggacctctagatagataggtagctcttccatcgagtcctctacgcctgtagatatcctctcttcgattgcaaatagatctgaaaagtacattatt

SEQ ID NO: 172054 - DNA, 269 bp, Zea mays
  Clone ID: MRT4577_88497C.1
tcggccacgcgtacgcgatcactacaagatggtatgcacaaacaatgcgatgggagcctcggggtgctggggggttctgcatggggcatggtgagaaggaagagtcaaagggcatcgatgcgaaagcgttcgggcctggtgggtgcttcgacatcaccaagatgggcgcctccggcaatggcaagacagacagcacgaaagctgtgcaggatgcatggtcattctgtgtgcggctgcactgggtagcaaacaaatcttatacctaaggg

SEQ ID NO: 172055 - DNA, 1253 bp, Zea mays
  Clone ID: MRT4577_88498C.1
gccggccgggccgggatagctagctactagctgaggacctcggtcgaggtagtatagttacttagtagccattagcagctggaacttgttggaggagatctagagcttagctttgagagagataaaaatgggcgtgggaaaagttctgaacgacgtgaagccgtacctggccatggtcctgctgcaggtaggcttcgccgggatgtacatcgtggccgtggcctcgctcaagcgcgggatgagccacttcgtcctcgtcgtgtaccgtaacctctgcgccaccgccgtcatggcgccattcgcgctctggttcgagaggaacgcgaggccaaggatgaccatcaccatcttcctcaagataatggggctcgccatgctcgaaccggtgctggaccagaacctctactacatgggggcgaacctgacctcggccggcttcgcgtcggcgctcataaacatcctcccggccgtcacgttcgtcatggccctggtcctgcgcatggagaaggtgcggctgcggagcgtgcacagccaggccaagatcgcgggcacggtcctcacggtcgccggcgcggtgctcatggtcctgtaccacggccccgtggtgcagttcccgtggtccaaggggcagcaccaccacgacagcgccggcggccagggagccaacagtgccgccggcggcggcggcttcctcacgggaatcatcaccatcgtaatcgcctgcgtctgctggtccgccttcttcgtgctccaggccaacacgctcaagagctaccccgcggagctgtcgctgacggcgctcatctgcctcatggggtcgctcatgagcggctccgtcgcgctcgtcgccgagcgccgcaacacccaggcctgggtcatcggcttcgacacgcgcctcttcaccgccgtctacgccggcatagtgtgctccggcgtggcatactacgtgcaaggcatcgtgtccaggcaacgaggcccggtgttcgtcacggccttcaaccctctctgcatgatcatcaccgccgtcatgggctccatcatactcaaagaagagatcactctcggaagcgtgattggcgctgcgatcatcgtgttaggcctgtacgcgctcatctggggcaagagcaaggacagcgtggccgatgtctcagcatcaggcggctccaagggcgcagcagcggctgccgccatcgagctgcccatcaccttggcgcagcccaacggcaacggcaactgcaagcacgaggtcggca

SEQ ID NO: 172056 - DNA, 206 bp, Zea mays
  Clone ID: MRT4577_88499C.1
cgtgtatagactatgcaatgagatccttgatcctttaagtgctcttctgtgtcgtgcatagtgagaaggcaaagtctttggacaacgatgcaaaatctaccgggtccggtgtgaccatcgacatcaccatgttgggcgcatttggcattggcaatacggatagcacgtatgctgtgcagtatgcgctggcatcagcgtgcggcggc

SEQ ID NO: 172057 - DNA, 357 bp, Zea mays
  unsure (1)..(357): unsure at all n locations
  Clone ID: MRT4577_8849C.1
acccactcatccgcgggcaccttgacggactccttggactttttgtaccttaacctcctaaacacgtanacgtacactttatatcagaagtggcacaccctcaattcaactattctgcacttcctgttctctattcaagctttggtttttaattcaaagccttatttcaataagcctttctactctatgcatgctaacacatcccaccttgataacaaatccctgacatataatcaagacacattcctgcactcctacacgactattctctatactcttccaaatccaccaaataatctccatgatctttttactagccatttcctctaatattatctcaacatactcatctctttc

SEQ ID NO: 172058 - DNA, 886 bp, Zea mays
  unsure (1)..(886): unsure at all n locations
  Clone ID: MRT4577_884C.1
cagcccaccacgatacaaaccctaatccccaccgccgcccgaccccgcagcctcattccaggcgcatcgacagcgacggcacgcgctggtccatccacggtccaccagtcgacctcgctcacccgcgagccgcgggccttgtcctcgtcgtcgttcgtaggcagtgcagcctcattcaccggtcgtcctcgtccaccagcgaattgaagttcctcgcccatcagccaacgacgtcgacgcggcctcgttctcgtccagcccacatcccagcgtgctgcacgtcgccttgctgttgctgtgctgctgctgcctattcccgccgccattcaccaaatcagccgccagggctccgtcctctagctgctccgtccggtggtccagccagctgcctagctccctccgacggtccggccagcaccgcctcctgctcgtggccttgcccagctcctccgccctccggtgagatgtagatcttggtgcggcaggcgctacggaangggggngtgggtgctgttgtgcgtgtgctggtggcctggtgctagcaaccaaggtacacgctcccagctccccatggccccacttgattttgcctgtttacgcgctccgttgttattttgcaatttcatagcactgtcagctattgggctaggggcaaagtcataaatgccgctacngcacttcgaagtgcacttacatcttctgatagtcccattcatctaataatatttttgtttctttctttatagntttatggtttaattagcttacatcatcagnngttttgtctgtctgtaataaatttcaactgtttctaagctcacatttcatcatcacaaggctattatgaaatctgntgctagntaactgctgaaagggacagtactat

SEQ ID NO: 172059 - DNA, 318 bp, Zea mays
  Clone ID: MRT4577_88500C.1
gaaggcgaggcagagcaccaccaccatacgccgccaccgcaagcagacgtccccatggccatggcttccaccgccaccgctgctgcttcattacgccttaaattacctgtcgtctatctcagtaataactccgagcaccatcttaaggctccatgatcaagtcatatattaattaattaatcctttcaaaccgatcagaatatagtagagatcagtttctataataattagagtataaccttgcttaacacaaatgcaaaccactaaaattgaagataacaaatgcactagtctatattgtaaacactacctactatg

SEQ ID NO: 172060 - DNA, 693 bp, Zea mays
  unsure (1)..(693): unsure at all n locations
  Clone ID: MRT4577_88501C.1
aacaagctggagtagctagcaactcgagggatgaagactagatgatgataggctttctccttctgtgccactcataaaactgctagctagctagcaccttgttgccaagcaatgcaagatctctctgctgagatcgatctgaatacctaaaatatctatccgaccggtcatcatctcgatctaaagcagatttctgatcccaagcttgttggctaacatggcgaatgatgatgaccctgtggacggcgaaaaccctagatcttttaccgcatcaatgataacaagatggcaaaaacttcgacgtggtttcagcgcacggccatcagctcaaaatggcgaccttcctcttctacgcaaacaaaactatcatcaaagcttcgcacacaagcttgcaggggtcacagtatcatcctagcctatgaaccggtgttatcctaattgagcttttcttttcgtcaaaacatccttgacccctcttccttaggaggttggctctaccttncgttttttctgggttctcgtgccaaattttaacgttcttgaccttgtaaggccctcctttctatgtctacatcctcctcgaccctgatggtttctttcttttcttggtacatgcccgggaatcagtctcatcattgcccatgtttgccagactccccgcgtctacctactttctgctccattctatccctc

SEQ ID NO: 172061 - DNA, 905 bp, Zea mays
  Clone ID: MRT4577_88502C.1
gctaaagaaggacctccagccgataaaagagacggtgcaggcctcatctattctggaaatgaaggataacaagatcaggaagcatgatgactgggtgaaatgggtgatccctcgtgagagcaatcctgatgtcccgtcaagctcagcatctgtaccaaggcctgatgtcaataatctgacggcacatcttggaggcatggatctgcaggattctgctagctctgctggcgctgtggagccgaagcataatgatgtggtccagaacggatcgccttctggtaatgaagaggctgcagtagctgaggacagctctgatcagcagtagttacaacaaggcagtggtttggattcacaccatgactgcaggggttttgtcggtgcgcgaatgacagggcacaagtggtaacttttttttggcaacttttggaggggaggcgagaggcgtattagactgacaagcgaacgtgtttactggcgttcaggtaagattttggtttaccttgttatattcaggggtagcgatgaagatttggggcagttggtggaatggagatgaagcagaatagtgggaaaacgaaggtggtgatatctggaggcgcctaggaccgaggacaaagattatgtgtgataagttagtagcccccctgtggttgtttactggggggggttgcgtttgcacacgggcgcttggatgctatcatgctgttgttacgatgaactagttggttttcgtctgcgttaggatgggggatgttgtaggacctccgattttttttatggaggagctgaacttggagagccagggagttttttttttttttggacttgttgttttgtggcatgatggtgttaaattgaagtaagaagatgctcattctgctgtaaaaaaaaaaaaaaaaaaaaaa

SEQ ID NO: 172062 - DNA, 282 bp, Zea mays
  Clone ID: MRT4577_88503C.1
ctcgcaaggcggcttcaaacacttggccatgccagccttgaagacaagtgtttgaagccgtcttgcgaggaagctcttagcgagtagggcaaaaacacttctgttcaaggctggcatggccaaaatcattcaccatgctcgtgtcttgatcaagcacaggtatatgatggttggtagtcaattagttcacatcccatcattcatgttgaggatccagatcaggaagtacattgactatttactgtcaatttcattcaaaaagatggtcctctttaaaggttt

SEQ ID NO: 172063 - DNA, 231 bp, Zea mays
  Clone ID: MRT4577_88504C.1
aacaccccaaatatcaccttccagaaccaccatattatactaccgatcctgcaacattctactcttgatcaatacatcaaagtctcactctctcaacctattgattctttattattgacaaaagaaatgacacatcaacataaaatttatatttccacctcctctcactctaaataaaactaatataatattatacctaaatcatacacaacaacccccctcaacttccca

SEQ ID NO: 172064 - DNA, 777 bp, Zea mays
  unsure (1)..(777): unsure at all n locations
  Clone ID: MRT4577_88505C.1
ggtaccctcggcttcggccgggaaaacggccgtccctatctatcggattgcttccagttccagctcgagcactggggcttcgcaggcgagatgaagaggctgcttgctcatggccagtccggttgcccttcccggactttggttggcagaatccctgccctgcctgtactttgcaacaacgttcttcccgaccataggtactattcagccgagaaacacgatgacgacaccacgctaggtgagatcggggataaggcaaggtcgacagccgaggagttcctgagggtggccaaggagaagaccgacgacgtcgcggagggcgcgaaggagacgctgcacgagacgaaggaagcggtggtcggggagtcggacgacgagaaggagaagttcaaaaggagggtggaggaggggaagtaccatcatcagaagaaataagtggcttgtgttctcttggctgcgtatgcaagtcatggcttggattactatacatactcgataggccttgtagtttgtacaagtttactctttgcatccagacgtgtcgatgtcctgtagaataaataagaagttgccttttgtgcttcaatacttacatgccatctctcactgaataaaaagttttgccttgtgaagaagtgnttcctgttgtcactttgggatcggttaagcgacctgggtatatgagtatgaagcgattctgttggggagtcgtcctgtgtgccgtgtaacggatgacaaaatagtgtaatcagatgggaatggtcatattcatgtcgg

SEQ ID NO: 172065 - DNA, 324 bp, Zea mays
  Clone ID: MRT4577_88506C.1
ttaaaaaaaaaaaaatccttccatttattgatccaattatacgggggggtcctcaaagggtacgtctctataaatcacctaaatcaatccattatcattctataacacttttactcctaaaatcttaatccccacttaattccccccaaacatcccccttttccccttcttttaataatatccctaccaccttcttccaacatttttcatcttaattccaatttaacactccctttactctcattaatccccatctttttcttaccctcacttttccatactctttcaccccctatctcccttcctttcatttcttccttcttt

SEQ ID NO: 172066 - DNA, 328 bp, Zea mays
  Clone ID: MRT4577_88507C.1
aagcagctcaaagctctagccatagctagctagcaatttcttgagaaatggctccgttctcctgctgcctgaacacctgcgccctcctggccttagagccatcagtaggaaccccaacaatgaggagtttctcagcggcaaccaaccctgccggtcttttcttcttccacaagaggcaagcaagccgaaagaatgtaacccctgaagccttttacctccaccgaatctggcaagacagtaggccaggccaaatatgggaggtcccaaaaggtttgaagcccccctcgggaaaatccccaccaaaaggggacctggggttccccccttc

SEQ ID NO: 172067 - DNA, 307 bp, Zea mays
  Clone ID: MRT4577_88508C.1
tcgatcgactacagactactcacagctgactggattacttgtagctataacagcatggccatgggccgaccagaagaggtcatagacctagcgctgtacgcgcatacagatagaccttgccaaatcgatctcaggtcccacctcttgctaatcctcaaggaacacacctaccgctactttgtgtacatctctgttagagtatgatactgcttatactggcctacaaccagtgcacacaagtatggtgccagatgtaccacacgaccgtaggacacaatgcctgacctgggtgataatgtaaaatatg

SEQ ID NO: 172068 - DNA, 267 bp, Zea mays
  Clone ID: MRT4577_88509C.1
cacgcgtccctcctcgcgcctaaacccagcgaacacgtagccggtgtctcgctcttctttctcgcaggattctctcgaccggtccgtgtctcgcggctccgtgacgggcaattcaagatgctcaccttcgacgatccgtcttcctccgtcactctgctgatgagttatgcacttcagcgcatcaaccgctcgcataaatactctcttcattgcacggtcagagattttcgatgaggccacaccgaaggttgctgtcatttcccacgt

SEQ ID NO: 172069 - DNA, 459 bp, Zea mays
  Clone ID: MRT4577_8850C.1
ttttttttttttttttttttttttttttttttttttttttttttttttttttttttttttttttgatttccaagagagaaagcttaaaaacccaagaaaccaaccggaaaaaaaaaagagcaaaaacaaaaaaaggcacggaaaaaaggaaaagataatgggtggagcgcagaaaaaaacaaccgggaaaacggcccagaggcctgtggggaggaaagcaacaagactggggcccagaactaaacaacaccccagagggacagaaaactccggggcaacgcggaaaaaaactttgggccagggcccgacggaggaaaaaaaagccccccacgaccccccaaaagatgccaccccctccttgccccccccattaaagaacaaaacaaaattgccatctaacacaacaggggagaccaccccccccctttttgcacaaaaaaaatctgcaaacaatggggg

SEQ ID NO: 172070 - DNA, 402 bp, Zea mays
  Clone ID: MRT4577_88510C.1
ttcagaaagcacacaacttattctttacattacctagacgcatggcctttgatgttcgagaatcgtaatgtatacaactactcaatgccttcagtttgttggtaaaatcaactctccaaatccatattgctatcgcagcacaactcaaaacactcctgtgcacatacatagttcaccacaggcatattacaccttgtctatttccaactcataaacatcgataaggaagcagggagccatgtctggatcaaaaagtggaaaccctttactcacttagggtctagagctgctaaccaagtgcatcttataacaacacgctaagtcatgtcactgcgtgcataacatgatcagtcttattaaaggacattgacaaatagtccacaatatatcgtggccttaacc

SEQ ID NO: 172071 - DNA, 376 bp, Zea mays
  unsure (1)..(376): unsure at all n locations
  Clone ID: MRT4577_88511C.1
gtggggggggggccttttttaggggcgtttttctgccctctggcggccgttttttgtggttccgggttcggtcccctccttggcgttttcttggtcttggttttttcctgtgggaatttgttttccgttcccntttccccccctttttcgtccccggggctttgggtttttggcctggggtgccttttgtgtgggctccctccctttttttgggttgtgttctctgcccgctttccggttgggttccctgtcttgccgcgtgttttttgtgtttcgcccacccccggggagaggccgtttgttttttgggttcttttccgtttccttgtttcttgtttcgttgtcctcggtcttttgtgtggtttgatgggtttaa

SEQ ID NO: 172072 - DNA, 2091 bp, Zea mays
  unsure (1)..(2091): unsure at all n locations
  Clone ID: MRT4577_88512C.1
gggccgcacatgggttctgcaagacgctcacggcctccgacaccagcacgcacggcggcttctccgtgccacgccgcgccgccgaggactgcttcccgcctctggactacagccagcagcgaccgtcgcaggagcttgtggccaaggatttgcacggaaccgagtggaggttccgccacatttatcgagggcagccccgcagacaccttttaaccactggatggagtgcctttgtcaacaagaagaagcttgtctcaggggacgccgtactatttttgaggggtgataatggggagctaagacttggagtgcgccgtgcagctcagcttaaaaatggatctgcttttccagctctttataaccagtgcttaaatcttggttcactacctaatgttgcacatgctgtggccaccaaaagtgtgttccacatctactacaaccccagattaagccaatctgaattcattataccattttcgaagtttatcaagagcttcagtcaaccattttctgctggttcgaggttcaaagtgaaatatgagagtgatgatgcttctgaaagaagatgcacagggatcatagcaggaattggtgatgctgaccccatgtggcgtggttcgaaatggaaatgtttgatggttcgatgggatgacgatgtagattttcgtcaaccaaacaggatttctccttgggagattgagctgactagttcagtttcaggatctcacatgtctgcaccaaatgcaaagagactgaaaccatgtcttccccatgttaatccagactacctagttccaaatggaagcggtcgtcctgattttgcggaatctgcccaattccacaaggtcttgcaaggtcaagaattactgggttatagaactcatgacaatgctgctgttgcaacttctcagccatgcgaagcaacgaacatgcagtacattgatgaacgaagttgctccaacgatgcgagtaacattatcccgggggttccaagaattggtgtcagaacaccactcggaagccctaggttttcctaccgttgctcaggctttggggagtctccaagattccaaaaggtcttgcaaggtcaagaagtatttcatccctacagaggaactctggtcgatgcaagcttgagtaatagtggcttccatcagcaagatggttctcatgtgcctactcaggccagcaagtggcacgcacagctacatggatgtgcttttcgtggccaacaagcaccagctgttccatctcaatcctcatccccaccatctgtcctgatgtttcaacgaggtgatccaaagatgtccccatttgaatttgggcatttccacgtgaataagaaagaggatagacgcgcaatgtttgtccatgctggaggcatcggaggaactgagcaaacgacgatgctccaggctcatcatgtttctggaggaacgggaaacagagatgtgaccgttgagaaatctcatcccgctgttgccgctgcttcagacaacagggaagttagcaaaaacagttgcaaaatatttggcatatctttgaccgagaaggttccagcaatgaaagaaaagggctgtggtgacatcaacaccaactatccatcccccttcctgtctttgaagcaacaagtgccgaaatcgctgggcaacagctgtgccaccgttcatgagcagaggcctgttgttgctagggtgattgacgtttcaacagtggatatgatgatctgatgtattggaaaactgtcctggaggctgtgttgcgtagtgtggacagtgtcggtttgatggttcggtatcgtgaagacgggatttgattgaggatctggccagatttgtatcctagttgtagctgttagagcactttgtatgacaaccgtgagtgctccgtgttatcagcactagttgctgctcacaacttgcctctatgttcataatctgtatgccatgtcagacccatttatagagggtttgtttgcttggcatagttctagacttaaagcattattatgagaacaaatttgctctgcaccgtaaaaaaaaaaaaaactcgaggggggggccgaaaaaannnnnnnnnnnnnnnnnnnnn

SEQ ID NO: 172073 - DNA, 361 bp, Zea mays
  Clone ID: MRT4577_88513C.1
aaaccagaatccaggaagaacattaactaaaactggatcacgttagggaacatgcacgtgaacatgtaacatgataggatgttatatgctaaaatatactcatggatacttaaacaataaaatcagcaagccgctaaaaacattttcacaggactggagcagcataaaaaacttgcatccagcccagtgtaaaaggctcaacaggagcacggaatttggcacctgaataaacatgattaacttaaagctattgttaaatcctaaaaatgtgggtgtaatttgcaagaacgctgtgatctacaaagcgcttcaggcctaatatggcccgaggacaaacctactgatagatcacaatgaaaga

SEQ ID NO: 172074 - DNA, 299 bp, Zea mays
  Clone ID: MRT4577_88514C.1
ctcttgaatcttgatgcttccctgctatgctagccgagcatgtcgaaccgctatgaatcagacaatacagtatcaatgttaccactcagtcttgttattaaaaaaaaaaaaaaaaaaaaaaaaaaaaaaaaaaaaaaaaaaaaaaaaaatagggggggggaaaaaaaaaatttttttttaaaaagaaccaaaaccaataaaacaataataaagctggactggtggggccttcaatcggcctattttgggttatttccatcaattggggggccctttgggcttccttttaaggggccaaa

SEQ ID NO: 172075 - DNA, 613 bp, Zea mays
  Clone ID: MRT4577_88515C.1
cctcgatttttcttttttttttttttttttttttttttttttttttttttttttttttttttttttttttttttttttttttttacaaaacagttttgcccttggggaaggtaaaaaacccaaaaacaaaaatacaacggggggttcccctccgatccaaatttcccggacccaacccacaaataaaaaatcaagccggctttggggggcaaaaaaacaaaaattacaacccttttttgtttttttttaccccccatgagcccgggctttttacaaaaaatgcaggccgccggccccaaaaaaaaaaaaaatggggggcacaggaaacaaccctgaccttgggggaggcgtttacaacccacccatgaaatatatagcgctatcgccctggggaagggaaatttggggggccaaaaaacctcggggaacttgacttggttcccaagcggggcgatttaatcccaaaggacggccccttcaaaggaaaattccaacagagggggcccccttattttttttttggggccctttggaccttgacaacttttgggttcgactgggcaccgccaccacccccggtgcccaaaaaaaagttcccaccctgaaactttaa

SEQ ID NO: 172076 - DNA, 538 bp, Zea mays
  Clone ID: MRT4577_88516C.1
gaaaacaaaaagaaccttttttttgggggaacggaataaacccttttaaaaccggccctaacgaagcgatttccgaagggggtccttggttttttgcccaaacccgcccaggggaaaaccccccttcagggaagggaaggggaaaacccaaacaattggggggacacccgtccttccttttttaaaaaaaaactaaaagggaaatccttttggaaatccccttggggggaatcccgggggggtccccctttgggtggggggggtgggggaaaaacaccgtgaagggaaacccgcccggccctttttggtttttggggggagggcccccgttaatgggaacaaccctttttttaatttgggaaagcccccccccaaaccgtttaaacccctcctgccccttggggtccaacgtccattttttggggcccccctgcccaaggaacccctggggggggggggggggggacaggatctccaccaaaaaaatcccaacaagggcctgaaactggttgggaagggggccaacaaacaccttttc

SEQ ID NO: 172077 - DNA, 510 bp, Zea mays
  Clone ID: MRT4577_88517C.1
agagggtggttatgagctctttagggaccaaggtgtggaaggacaaagatgagcaagccagtacgattacaagtatcacagttgcacatagactgtccacagtcataaatgctgatacgatagttgtgatggagaaaggaaaggttgttgaacttggtaatcaccaagagttgatctctgctgaagatggcgtttactcaagattgttccacttgcaaagcaacatgaaagaatgaccatctattcaagttccattatggccaaagaccaaagacacttagcaagaatagctttaggagattaagcattgctcaaatgcacttgctgtcacaagttgtaataacatagctatatcatcatatatcgatgatgcatagtccaccagttagggtaaaaaaataactatatattacttgaatggtatctgtttggaagatagagtaacagatggaagatagagtaacagaacttaagacaggaaagggattcagtaatatgctggtttccgat

SEQ ID NO: 172078 - DNA, 119 bp, Zea mays
  Clone ID: MRT4577_88518C.1
gcttcagcttacttgtatcagttgccacgatttggtctccaagacattatctccaacgatacagttggctactgcactggcctcttgatggctccacttgtgcttaatacccgtggttc

SEQ ID NO: 172079 - DNA, 299 bp, Zea mays
  Clone ID: MRT4577_88519C.1
cccttcaacaaatcattggcgtgcagctggagtggttcaggaggtgaagcgcaaatcttttctgcgaccccggcgcgtgccgcgccctgttcggagggccctgttctgttcggcgagttcggcggcaacgactacagcttctcgtggaaggcggactgtgctggagaaggtgaagacgatggtgccggcggtggggcgtcgctggtgggcggcgggagcggctgtggcgagggcgcccgcacgtctggtgccggcaacctcccgccgatgcatcccatcagctcacatgtcccgtcgag

SEQ ID NO: 172080 - DNA, 426 bp, Zea mays
  unsure (1)..(426): unsure at all n locations
  Clone ID: MRT4577_8851C.1
ggtaccctccggnctcggccggggctttctccttgctgccaaatgactcctgtacatgactacaggcgtacaagacctgccagtttttaacactcacagcccccgacctgctcagatcaggcaaaccagtcactctactactacaatggaccaagctagagtgagccgcgttcctcgggattgtactttgcgcagagctcttctacaggacctttcttgcacgcggacggcgccgggccaacaaccccccgccacggcccaagccatgcaccgtcatacgtaacctaaaccgtctgggagagctcccccaccgctccatgaacgaactctccaagcgggacggacagctcatgcagcttcgtgtcgagtcgttcactgttgtcaccggcacggcagctgatatggcaaatctcttccataagacca

SEQ ID NO: 172081 - DNA, 286 bp, Zea mays
  Clone ID: MRT4577_88520C.1
gttagatgaagtgttggaatgcacaacatcagtgtcttctggtatgacaagcagcttagtggaaccaagccaagttgatggtggttcttcatcttcagttacaaaagaagatgtttctactggacagcttggtgatgtgtcaggctggtaatcaaaaacaattgctgatgcaatctcctctaagttggctgccatacaccacgtatctcaagctatcaaatcccttagatggaatcgacagctgcagaataatactcagcatggttgcggggacagtgcagatacc

SEQ ID NO: 172082 - DNA, 694 bp, Zea mays
  unsure (1)..(694): unsure at all n locations
  Clone ID: MRT4577_88521C.1
ccggccgggtcgcccgccgtcaagatctatatcctgatccacaagatggatctcgtggtgcccaccgcccgcgaatccgtgtacgacgagcgcatccgcgtcgtgaggcaaaagacgttcgagtacggaaattcagtgggcattgctgcgagttcgatcgagcttacgccgtttgccacgtcgatttgggatcagagcttgtataaagcgtgggcgtcgattatccacgatctggtacccaatctgtccgttatcgaacgaaatctcgcaaacttgggcctcgccatcgaagcggaggaactattgctattcgagcggacgtccttcctcgccgtgtcatcgtggacatcatctgaaggccagcgcaaccctaccgaggatcggttagagcgcatgtccaatattatgaagcacttcaagcagagcatttcgcgattcacaggaacgccgcgcaatgcggagcaattcattcgcatggagcacaaggctgggcccaggttcagtctgtttattctcaagttcacgacaaacacatattnctcatggttgtgcttccaccgggagaggctcgatttaacgctgctatgctgaattgtcagattgcgattggaacatttcagggtcttggacggggccccgtgatccaacctgccaacgcgacaaccccangctgctggcctaagtgtgattatcg

SEQ ID NO: 172083 - DNA, 344 bp, Zea mays
  Clone ID: MRT4577_88522C.1
agcagtggtaacaacgcagagtactttttttttttttttttttttttttttggttttttttttttttttttttttttttttttttttttttttttttttttttttggcatcagaaaaaggaagcgaccaaattcaaagcccaaaattgggggcctacaatggggacccaacagacccatggggcaacgacattttaatacaaggccccaggggaaaaggggaagccggggcaacaacaaaataaggggggacccacaggcccgaccatggggaccgacaacatggggcaaaaaaaaaacagggcacggcccggggaccctgggggggtaccaccggtaaggggg

SEQ ID NO: 172084 - DNA, 285 bp, Zea mays
  Clone ID: MRT4577_88523C.1
caacgagtttggggtacccccctcacctgccaatttcatccagccagggaagcagccgctctcgtccatgtgccagacgatcatggtgggccaggacggccaggtccggatggtggtgggagctgatgggggcacacagatcaccacggccactgcactggccatcatctacaacctctggttcggctcacacgtgaagcgggccgtggaggagccccggctgcacaaccagcttctgcccaacgtcacgacagtgcagagaaacattgaccaggcagtgactgg

SEQ ID NO: 172085 - DNA, 1246 bp, Zea mays
  Clone ID: MRT4577_88524C.1
gaaagcaacgactccgcgtcggcctgacctgaggtccgcctgatgaccgattatcttccttctccgtccgagtaaaggaaagcaacgactccgcgtcccgcttccctttccccgcacggcggagttcacaatccccaccggccggcgtagcggatattgcgagttacgacggggaaggagaggaagatccgtcgatccgcgcagattcgtttcgatcgtggtttggtgacttggtaagaggggaggggagaagcggcgatgtcgggcgtgttcggcagggtgttcgggaagtccaaggagcagagccaggcgaccgcgctggcctcgctcgacaagctcaacgagacacttgaaatgttggaaaagaaggaaaacttgctagtgaaaaaggccaatcttgaggtcgagaaggctaagaattttaccaaagccaagaataaaagagctgcaatacagtgcttgaagaggaaaagactatacgagcaacagattgagcagcttggaaatttccagcttaggatacatgatcagatgattatgctggaagcagcaaaagctacaacagagaccgtggatgcattgagaactggagcatcagcaatgaaagctatgcataagtcaacaaatattgatgatgttgataaaaccatggatgaaattaatgacaatatggagaacatgagacaaattcaggatctgttgtcagcgcctatgggagcagcagctgattttgatgaggatgaactagaagctgaacttgcggatcttgagggggaggagttggaggcagagctgcttgcacctaccacaacagctccgtccacagctccagtgcgtgtgcgtgtacctactgctcagcagtccactaggccatctggtcagagtagcaaagctgaagacgacgagctggcagcactacaggcagaaatggctatgtaaatataggcattggcatggtcatcttggatttcagattctgcggttatctcgcaactctggtatactcatgaggatcttcctaggaagacaagctttttcagaatcacaaacacaagctgcataccagcctaactgcttatgtatcatagcatgctatgttattgttttgtaatgaaatattttataggctaataaacatatttctattaataaattggttcgtgtcagtattatgttcaaaaaaaaaaaaaaaaaactcgagactagtctctctctctctctctcgtgccgctcgtgccgctcgtgc

SEQ ID NO: 172086 - DNA, 319 bp, Zea mays
  Clone ID: MRT4577_88525C.1
gggttgcacggtttccagtcctaccccaagcgccaccggacgacgccggcctctctcctcacgcgctcgggagaccggggcccggcggtcggagggggacgtggtccctagtaaatacgaagaatgtatcactatacataaccaatatataacccatggggaagaggagaggtcctgcgtaccctgaagacgaggaaaaaggcggctgctgcggatgcctgggctggggctgctggttcccggtggtcatcaagagggcgctggaccgcaccgacggctacttcgtcttcgaggaaaagcccgaggcgccggcccactc

SEQ ID NO: 172087 - DNA, 573 bp, Zea mays
  Clone ID: MRT4577_88526C.1
ggtttctagtgcctgttttcactgatgactcacccatccatccattaccaaagagggatcgaatcgtaccagcgtcaagcgctgaaggatctgatctttcttaacatgtgtgccattccatttctcgtcattgatccgcgaacggactcgaggagaattgtgttcaggttgtgcaagcgaacaggttcacgttgtatgtgaaggcgatatactcttccagttcatttattaccgtgtctgtgtctcctactttgctggaggctggattaacccctgctttttttactccggctgggtcagcttttttttaatgtggtctggtggttgatctttgtcttatctgaatcatactattagtttgacctctggaggaagatgcgggcaaaaggttgttcctacaccctctgatttttttagagatgaaattggttatggttaaactactccggtgattgggttgtcaggttgctcttgtacaatcaaatgctaattgtctaccaaacctgtccaccttgttcttgttgtcatggataggatgggaatgaaatttcccacataatatctgctacagta

SEQ ID NO: 172088 - DNA, 819 bp, Zea mays
  Clone ID: MRT4577_88527C.1
cgaaaacatttctgctacatgaccatgcagaattcaaaagtactggtaatcaaattatgccaatgctcctggcaccatttgcagaatcagcttctcgaatacaaggttagcttacaaggactaaccaaggttgaaaaacaacatcaaatgatgcaaagctagcatcgatgcatcataaacgatgattgaatgagccatgcatgtgtgcttttacaagcagagacatagcaaaatgtagaagatcccacacagtgttgcctgatcagggttgagagcttgcatctgaagcgacagcaggaggcggcgaagatttgcttctttggcggctgaacaagttgtgtcaagcggcaatgacgattaacaagccactgaacctaagccatctagttccctctttaggttgagagacctcattggagtcttgtgccttggttgccatgatttcgctcctattgctcagttgtcgcgtcgtcgctaaagctcggcgagccgggcatcagcgggggcgcagtggtcccctcctccaactccttgggctacagcgccaccttgcaccctcgcctctgcctactgtccctgcccttcctgctgttgctgcggagccagcagacccgaggtggatgcctcgctgtgcctcggtgcccccgcccatgcccacccctgagttggtgccgggttacggagcgagacaggaagtgagggaggtcccaagtggagcgggtggcgagtggacggtcgagagaagaagaggaaggcagcagcggcggcgcgccgcaggggagagcggtggcgacaagcaaggagcaggcgatggggatt

SEQ ID NO: 172089 - DNA, 213 bp, Zea mays
  Clone ID: MRT4577_88528C.1
ccttattcccgggtcgacccactcgttctctgactcgtggtctgactcgtgggataaaaaaaaaaaataaataaataataaaataaagaagagatttctaactatctaaaaaatccaaaacttacatacacatacatacaacatcataaactcttctataatatcacctaaattcaattaactaaaccatatatttacaacataataacttaa

SEQ ID NO: 172090 - DNA, 756 bp, Zea mays
  Clone ID: MRT4577_88529C.1
cgggagttcaaactccacagataagaatcccttggctgctcacctgttgagttttccccgtttcaaattgtcctggtcgcatcttccccgattcatctcacaatagtggattatttcagatacgatatccctaattgtctaagattgcactaaatttggaaaccattttttcagtgcctgtaagcaagtttgaatcaggtattcaggttcccgttgagttaatatttttgtacttatcatttgacattaacttcatcatttgattagtgattgatgtattgtctattccatgaatagaagatgaactgatagttgttggagatggtcattcaggaaccatatctgttcatgcagctgaaaatacctatgggatcaatctctttcagttaggaatcgacaaatccaagggagcttagaattgcatgcacagttgttcaaatggaacgtgaaggggcgtcggtcctcgagtgtcccctttagggcaattttcaaggtccacgatgcagaaaaccttttgacaagggcaggcttcacccctccaggagttgatgttgatcattataccgttagatacaataatggtttgtagaaaaagaaagcttcagtttcttactcgtaggacactgactatttcctgtgatgcgaaagtgatgtggggttcaagcatcaagcaacaatctgtattatgggaggaaactgatccttttgtattcattttgttcaccttcaaagaaaaaaccacctgattttcttccc

SEQ ID NO: 172091 - DNA, 225 bp, Zea mays
  Clone ID: MRT4577_8852C.1
ggagattaaggagttccaaaagttcaatggaccggttattccctttgggcctttggttcgggttgtgaaggaggtaaccaatttcgttacaaacgggaaagtatagcgctataccgcaaaagcccttcttgcgcttcaagaagcaacagaattccacttgatagaactggttgaaatggcgaatctgggtgccattcatgccagcgtgtcacaattatgcaaaag

SEQ ID NO: 172092 - DNA, 807 bp, Zea mays
  Clone ID: MRT4577_88530C.1
cattgggaccctcgaggccggccgggttagttgtaccttttccttgtagtgtaggttggcgttgcaacctgatggccttttctagcaacaattcttggtggagaaccacttttctcatacaaaccttttctggcaacctgatggtcttttctggcaacaattatatacaagacttttttttcatttttgccatttttgtttccttatctgacttgtcctgcctctatttattttatcagggagcttagaattgcatgcacagttgttcaaatggaacgtgaaggggcgtcggtcctcgagtgtcccctttagggcaagtatggctactttgtgttctaaattttgctaaaagggtatttgtatgtactccctttatatatttattgtaccacttcatggtaaagttactgcttgagtttttcttacaaaatagactgtgcacacttttacgatagtcagattgaatcttacattcacataactaatttatcttgtcctgttatgatctatttggtttaattgtggccttgtattgcagttttcaaggtccacgatgcagaaaaccttttgacaagggcaggcttcacccctccaggagttgatgttgatcattataccgttagatacaataatggtttgtagaaaaagaaagcttcagtttcttactcgtaggacactgactatttcctgtgatgcgaaagtgatgtggggttcaagcatcaagcaacaatctgtattatgggaggaaactgatccttttgtattcattttgttcaccttcacacctgattttcttctctttgttct

SEQ ID NO: 172093 - DNA, 267 bp, Zea mays
  Clone ID: MRT4577_88531C.1
agcggaccgaccgcttaaacggctgctcgtgccgattcttgtacctgagaaatgctgagcgaccaacttttcgttcagtgggacttgcttcacgtcccctgcctcaagattctcctcagcaaaggcctggggctgggcattgtggctggctcacttctagtaaagctgccccaggtgtttaaaatcctgggagccaagagtgctgaagggttgattctccagtctgtaatgctggagctagtggcattgactgggaccatggtctac

SEQ ID NO: 172094 - DNA, 385 bp, Zea mays
  Clone ID: MRT4577_88532C.1
gtctgatcgacacaaggaatggaatcgataccttgcagagtgccatggtctgaatgtccagcttcaatctggacaacacgttgcattgcatcttggttgtgggatagggccatacgagcaaagttaggttctggatgttgactgccagaagaacccatgacccatcttcaagcttcaattgctggggggtcgatcggtgctgggattacgctttgcgccttctctttctcttccttctggaaataagagaagtggatgtcatgattggtgtctatcaaaccattttgtaccatattagatgtgagttctttcttttcccgttcatgatatatctggtgtaatcaccaggttgctttttatttaaaatggttggttcattatgttc

SEQ ID NO: 172095 - DNA, 197 bp, Zea mays
  Clone ID: MRT4577_88533C.1
accctcgttctggaagtccacactccaagcctactaccatgagctatgatccaaggtaccattattttattcctacttgtacaactttctctatttaacaaattcgccaaactgaacacatctgcttatttccagcaggaaatactactaccatttggccaggtagctacaacaagccctgatatattattgacaca

SEQ ID NO: 172096 - DNA, 152 bp, Zea mays
  Clone ID: MRT4577_88534C.1
gaaacaaccacaatcttcttcatcgcgtggtcgctcgacatcgagcgcgtcacgagtacgacgctctacgccatctccaaggcaaggttcaccctggagctggtccgcattcaggtcaatctccacgggattaactccgttgaggttggcct

SEQ ID NO: 172097 - DNA, 227 bp, Zea mays
  Clone ID: MRT4577_88535C.1
taaggagcaaaaatgctcatatttggatttgtaataattgattaattattaagccaatccgccaaacccaaaggccttggatcggaattcctcggggaattccaaatcccattttcaagaaataatgaagcaaaaatgtgcatatgtgaattggaaatatgtgttttcttattaagcctatcccgaaaccaaaagagatgagatcgtgatatctcggggaatttcaa

SEQ ID NO: 172098 - DNA, 153 bp, Zea mays
  Clone ID: MRT4577_88536C.1
gggtacctcgaggccggccgggagcacgtttctcagggacgctgggaatcccccgtatcccgaaagaccgggacgcgagccaatgcgcgcgcgcgcgccacctaaaaaacgtggattaggtccgcgagccttggtaaccatggcgcgttccgg

SEQ ID NO: 172099 - DNA, 263 bp, Zea mays
  Clone ID: MRT4577_88537C.1
aatagaaagggcatttattcaagggtcatcaacatgggggagcaccaaactctgggttaaaacccgcccaagatgtccaggaggccttttgaaaaaccacttaccacacaaaccttacaatttctttggcagacccccccctccatggggggggggggaccctttggacaacccagggcggcaaaaaaaaaaaacctctcccgggttaagttccaggggcacaaacgggtcaccggtaagagggcgctctccttctggatatt

SEQ ID NO: 172100 - DNA, 279 bp, Zea mays
  Clone ID: MRT4577_88538C.1
tcgacccgaccaaagccactctgatccatctcacactctcgctcctcgcagcgggtgctcgcttcaccttcgccgccgctgatcgatcgacgacgccgaccccagatccctttccttccgcggtcctcgtccgaccgccgccgacccacatgttcccagccttcaagacgagaagacctcacgagctgttggctgatgctatctccatcctggcgctactacaatggccaatccagctagctcaagtctggacatgactaacatagatgagtagcacgc

SEQ ID NO: 172101 - DNA, 147 bp, Zea mays
  Clone ID: MRT4577_88539C.1
cggtaccggaaactcccgggggaattcagcacgccgcccgttgggtaaggagcttcgaggcggaccaccgcgacgcgtacggtcgaacgggctaagccaatgaaacggaccctgggggcgcagaacccctaacaggagacggggcaa

SEQ ID NO: 172102 - DNA, 225 bp, Zea mays
  Clone ID: MRT4577_8853C.1
ctcgagccggttactcctgtcaggattaacagcatccatcgatacacagtacctgctgactgatgcatgggtctgctggagccgaggatgaacacagctctaacaactgacacagagcgaccttgcaatcaaccagcatggactgtggatcgatggatgctgttactcctgtcaggatttgttctaagttaatcctaaggaaaaaatggtgcttcttggtgctgc

SEQ ID NO: 172103 - DNA, 570 bp, Zea mays
  Clone ID: MRT4577_88540C.1
acggcccgggggagggagaggggtttcggggctctcctttcgtcgtaaaaagggccactccgtcaaaactaaaaaggcggggggggacacaaaggacccaaacagagaaactaaactccgaaggcccactcgccagccctaagggagttccgtggcacccgtcactcctcccactcgggcgggtcacacggaaagcacccctcctgggcaacgtccgggatctggacccccgtgtcgaaaacctcgccggcgcccccccgccggggaagcacctcggggtcggcccacacccatttgccgtggaacccgcccgtaaccaccaccctgagctggagcggccccgggggcccctgccttgtgctccaccccggcccgtggtcgcgcgtaatgaacctccagtgggacaaccccacctgcgcgacgtttacggggacaatgtgggtctgccccccctggaaaaggaacctgatggcaaggcccccgggggcatggctcctgccctccaccctccccgacgggttcctgggcttgtcccccccccggcacctttttgtcctccacttccacggc

SEQ ID NO: 172104 - DNA, 417 bp, Zea mays
  Clone ID: MRT4577_88541C.1
agatcagccggcagcccggcacactgactttggtcacggctgccttcatggcgtaggtttttgcgtgtgttccgcagggaatccgcatgaaaatccgtctgaaattgcgagcggagcggttccagaatccaaacttgcaagttccgcctccgcctccgccggctggggcgaagattccgccgagtgggcctgggggtcgcttgggtagtttggatttaagcgactgctccgcactaggccaaaaggctcaactttccttctcggcccatgcccattctaaaccgtactacctactccgctcctaggagattcaggtagggatgtaatatggttcggaaaatatccgtccggatccggattcgaaaatggtgaacactggttcggatggaattttcggatatccggactttttttcgg

SEQ ID NO: 172105 - DNA, 376 bp, Zea mays
  Clone ID: MRT4577_88542C.1
aaaggaaggagatttggatttccatagacgtaaaggaggatatacctccgttatgggttgtgtggggggggttaaaaaactttggggggagtatttttttaaggtgggggtgaattttggacagaatttaaagatgggggaaagtacaattacaagggggtacagggggattgttttgttaggcagaattattgaaaccaaaatttggttttgggggttttgggaggctgacaaagggagggacaggcttggtttttagcttgggaaacccttcaatggggttggcagggaaacgagatgcataaaaaggcgccccaagggtagggggggtactacttggcggggttggcgcctttttttttttgggccggtggtt

SEQ ID NO: 172106 - DNA, 604 bp, Zea mays
  unsure (1)..(604): unsure at all n locations
  Clone ID: MRT4577_88543C.1
aattcggcacgagggccgacctctcccgagagctctgcgcagccgtcgtcaaatccaccttccgcccccacctctccctcctcgccgcctcgccatcccttctcaccgccgtcctccaccgcctctccccgctcccctccgctgcgctcgccttcttccgcgcgctgcctccgccgcacccgctggacgcctcgctcgccgtcctccgcctcctggcgccgcacccgcgccaccacaccgccgcgcgggccctcctccgggacctctcccttcgccacccgctctcctccccgctcctcctcccctccctcctcgccggcccccacgtccccagctggctcgtcctcgtcctcgcccagtcagcgcgcccccacgacgccgtacggggtgttcgaccacatgcgcgcgcgcggnctcgcccccgacgcccacgcctgcaccgcgctcctcacagcgctcgccaggngcccggatgacggccaccgcgcgcaggggtgttcgacgaaatggccagggcgggngctcgccgccaccacgcacgtntacaacgccatgctgcacgtgtgcctcaaggccggngacgccgcgcaagccgagcgatcgt

SEQ ID NO: 172107 - DNA, 352 bp, Zea mays
  Clone ID: MRT4577_88544C.1
ccaccaccgatgctcccctcctcgaccctctcatctttctccccccgtaccaggatgagatccccatgaccggtccctcccccccgcacgtccagcggctcttggtgactcgcttaagtgcaccatcgttcatgagcggtgccacgtccccctggcgactgaacaccgtctacgacatccgattacttgcctacccccggctctgtaatcttcgctctccgtgacaagtccaaccaacattttccggttaccacacggcactacgatgggctaacgcccatgtcgtatgccccgctctccttgccctccgactggtggcttccttggtctccacctttttctttctaatccc

SEQ ID NO: 172108 - DNA, 276 bp, Zea mays
  Clone ID: MRT4577_88545C.1
caaaactgattgacggtggatacctctcttccccaacggtgcgaccagcacgaggagcagagctcacccggcggcgtacccgccggagaggaaccgtgccgtaccccccgcaccccagatgccccccaattctacccaaggtgaccatatgcaagcaggcgaccgaggcgagtgcggaggatgacccctaaccttgcgttgcgaggataggaccccagttgcggaggcaccagggccgaggcatcgagctcccagagcgtcggtcgcatctccaat

SEQ ID NO: 172109 - DNA, 408 bp, Zea mays
  Clone ID: MRT4577_88546C.1
gaatgtcaatttgagaatcggaagaagtagaaggaaaaaactgttctgaatacagctctttgccgagtgccgtgcaaaagctgctatgaaatcatggagattcccccaaaacaagacaaggggaggggaaaatgcaaagcatatgcaaccatcactgaggcaaggccaaaataaagcaacggaatccctgccccccttctctacgtgtgtgcaatcatgctgtacgtggaaaacaaaatctacgtacagcggcggtgaaagcagaaactagagagagccagtacgattagaataccacaggtacttctcgccgaaacagccaaatatgcatcgtttgagggctccttggaacacagtattttcaaaatgcaggaatagaagaaaaaaaacacaggattagaataccca

SEQ ID NO: 172110 - DNA, 714 bp, Zea mays
  Clone ID: MRT4577_88547C.1
atacaagtaagattcattgacctacgacacgagtagtcatttcaatccccccgaaaccctgaatcgccgccgccgccgccgcagccaagccgagcagccatggagggatccgccgtcccggcgccgctccgcacgcgcgtgtgcatcatcggcagcggcccggccgcgcacacggcggccatatacgcggcccgcgcggagctcaagcccgtgctcttcgagggctggatggccaacgacatcgccgcggggggccagctcaccaccaccaccgacgtcgagaacttcccgggcctccccaccggcatcatgggcatcgacctcatggacaactgccgcgcccagtccgcccgcttcggcaccaacatcctctccgagaccgtcaccgaggtcgacttctccgcccgccccttccgcgtcacctccgactccaccaccgtcctcgccgacaccgtcgtcgtcgccacgggcgccgtcgcgcgccgcctccacttccccgggtccgacacctactggaaccgcggcatctctgcctgcgccgtctgcgacggtgccgcgcccatcttccggaacaagcccatcgccgtcatcggtggcggagattccgccatggaggagggcaacttcctcaccaagaacggatcccaggtgtacatcatccatcggcgcgacaccttccgcgcctccaagaatatgcaggccagggcgctttcc

SEQ ID NO: 172111 - DNA, 455 bp, Zea mays
  Clone ID: MRT4577_88548C.1
aaaaaaaaaaagaggagttttgttttggaaaaaacagggtgttaacacagggcaccccccccggggggcgcccggggggggaatttaggcagaaagaaaaagacgggcacccccacaaaaaaaacgggggcccacgggaggaagaattataaaattgtggattggaggggcgcacacccaaaaaaacgggggggcccggggggggccccttttttttttttttagggcacccgggggccccggggcacggggggggcctttttccccagggggttggggaaacaaagaaacacccgccgtggttttggggggaaccatattccccccacgggggggaccgtggtaaagggcccccccccccgggggtaggggggagacataccgcccaaccgggggtgccatttttttaggaaacggggcctctttgagggaggtgtggcaaacccccttttggg

SEQ ID NO: 172112 - DNA, 478 bp, Zea mays
  Clone ID: MRT4577_88549C.1
ttttttttttttttttatcagctgaacacaattcatgaacttgtatttacaagcaccaccagaatccatgaacctttatttacaagcatcactggcatccatgaaccaacacacaaaacacagcatatgtggacaagcccagaaatccttgagggaacgcagtggagtcgcagaggatggccgtcgcagttgattatcgttgtcagttggagagccgtcgcaggcctaaacaccatagtaatcctagccaactgtcacggcgacggtgcgcggcggtcggcgtgggcggagcttggcggcgtgagcagcagtcagctgggcggaggtcggcgtgggcgccagtcggctgggtcgtccgcgtgggcggcggtcggaggagcgatggtcgtcggaggggcggcggtcggcgggggcgccggtcggcggtcggccgtggcggatcggcggtggccccagcttttgggatggctcgaccgct

SEQ ID NO: 172113 - DNA, 829 bp, Zea mays
  Clone ID: MRT4577_8854C.1
ctcgaggccggccggccacaagaaagataattttcttatcttctttgcttcctcttctgtccgaatatgatgatctccagccttcagttcttgatgctcagtcaattgttagtaatttaaaggttttgtttaaacatttgcaggaacgacttattgttactgaggacagattaagggagtctcgataccagattactccatggcatactgaattgtcgaataataccagcaatcctgtgtctactaatcctcctgctggaaaagcattggtgactacaagcaaaagcagccttgatattgtctcccagacggtgtatcctcacgtacaatccccaatgtcttcccctgttcaagctagaggtgattggggtgcatttggtaacaaaaaccatcaagatatttcaaatgaggttcctataagaaatgctggacatgatgacaagggagggacctctctttcaagcagaagccaatataggactgatgttcctcctcaagtatctcaagatagtgctgaagcccaaaacacacaagaaccttctactcgatggggtctaggggactcatctaatttggcatctggccttgaggatgcaaacccttcatatccttatcttcctacagttcttgaggaacctggttcttctttctccgaagctgcagaggatgatccattgccaggcatagaagggcttcgaatcacaggtgaaccttttcctggacaagaacttcaagcaggtggatactccatcaatggtaccacaacttgtaattttgagtgggtgcgccatttagaagacggctcagtaaatttcatagaaggagcaag

SEQ ID NO: 172114 - DNA, 307 bp, Zea mays
  unsure (1)..(307): unsure at all n locations
  Clone ID: MRT4577_88550C.1
ttgaattcgcacaggagagagggggggactcccccgtcgcccctcgcccgccctcgttctttcggccgctgggtgacgggcgcctcgagggcggcttgctgcctcttggactcgcttggtgctgcttgcgttgctttcccgaggatgggtgctcgggggttcccgtcttttgcggttctgtgggatgtttgctgtgcgacggcgcgccggatttgggggtgctggcctgtgggtggtgcggctggtggtgcttctccttgggcnctgcttgtgcgggctccgtctggggcgcgttccgccgcctgcg

SEQ ID NO: 172115 - DNA, 359 bp, Zea mays
  Clone ID: MRT4577_88551C.1
atcagtcgagcgcaggccctttaataatgctcggggggcgttaacaccaaaatgtgctctgggacattcatcgccagcgtgcatatctctattggacccgaaaggactcgcatcactctgataccaagcatttagatgcaacacaactcacgggactctgattacctgcactccaacagcagcatatggtatactgtacagattcccgtcctgaggagacttactggacattactatcctcctaaaatagcttttcccacagcacaatggatgtggggcgtctctcctcttgggctacaccggctgtacagagctgaatccatgtctgtttcgctaacaatacggagcgaaatagctga

SEQ ID NO: 172116 - DNA, 242 bp, Zea mays
  Clone ID: MRT4577_88552C.1
cgtgtcccagatccaatcgatatgaatttctacaaaacaaaccgtgtaggattcggtcttggtcttggttcatatggcaggcggatataatccctggggacggaggctctccaattggaaaagctactttattaggctaaacgtggaagcagatcagcactactactacggctaactgacaatggcatacttgttaactggacggttgagtgatgcgagccaactttaaaagctgctggcta

SEQ ID NO: 172117 - DNA, 433 bp, Zea mays
  Clone ID: MRT4577_88553C.1
aattatcccataaaaaccctttccaaacacccgattcacattcaaacaaataccgtggacatgagctccaacgacgtggggcggccccgtcgacaacgagtacaagtctcgcaccggccaatcagagatccccgtccagagcgacgaggccagcattgagcgtactgagtatgatgctggtggtgactccgacaagcagttagagaaggatgagaacgacgccattgacaggagcaacattatggatgagcgcactcgtggtgcggccaagaagcctggagcctacaccgagcccggggatgaggaggatgttgataagttgactgctggcggtcaggatggtacctctttgggccgtcagtaggagtcggatactatatcctttttgacaccacagcgaataagaattttttctatcaaccataaaaaaata

SEQ ID NO: 172118 - DNA, 409 bp, Zea mays
  unsure (1)..(409): unsure at all n locations
  Clone ID: MRT4577_88554C.1
cccacgcgttcggtccgtggcgtcggcggcgtgggcgtcaaggggcgccggcgcgcaggggcagcaggcgcgaggcgggaccgggacagcggcggcgtccgcgtcgacgctggggcggacgctggaggccatcggcgagcccgagagccccagccagagccaggtgtcgtcctctgcctccttcgggcggaaggtggcgcggtcgcgctccgtgggctgcggcagccgcagcttctccggggacttcctagagcgcctctacaacggcttcggcgactgcacgctccggcgcgtcgagtcccaccgcgagcccaagccccacaggatgcgcggcggctgctgctgcggaagcctgggcaacctncacggagctggcgcagacgacgctgacgacgaggacgaggacgac

SEQ ID NO: 172119 - DNA, 820 bp, Zea mays
  unsure (1)..(820): unsure at all n locations
  Clone ID: MRT4577_88555C.1
ccggccgggagctgtgccaccgtcacttcgattcgctactactcgccgcgccgttccgccgtcaatgccaccgacgcgcttcactccagtctcgctctgcgtccaccttctccagtcctagtcgcccgccgatggtgcggccggcggcgaagcacttggtggcgctcgccgtcgtcgccattctcggcatcggcctcgtcgctgactacctctgggcttcgtccttctccgcatcgtacgccagctccgccgctctgacgccgcccgtcgcgaagaagggcttgtgttgctgcaaatgataaacttcttgttatcggtggtcaagaaggtgatttcatggcgaagcctgggtctcctatatttaaatgtgtcagaagaagtgaggtatgctggaaagggttgcggtgcttgcgttctgacgtgagatgctgggcctggtgccgttgatgaccacagcatccattcccacgagtacctgcactgaccatgctcgcaatcaccatacccagaagacagcgaaagccagaagctgattcccgagcaactgtccttctggtttcgctgctcttgggactcgtttttttccttctcgaaatccatatattgcttctgatttctgcagcatttcaagttttccacgtttcgacgcatctaactaccagctgttcagctctagcattatttcttcgtggagtactgtagtctgcagccaaaaaccagctcagagatgggcttgctgaggtaaggggaaagcattggntgatttaatcagtactggcttctactggtgatataatattttattatatggattatacct

SEQ ID NO: 172120 - DNA, 1055 bp, Zea mays
  unsure (1)..(1055): unsure at all n locations
  Clone ID: MRT4577_88556C.1
tcggccgggatgcacgcccggcctcgccttcccttccccgatatctcttcgtctcgccgccgccgcgcgcgcactctcgtgtgacgtgtcccagcagtccgtccagtccctggcttctctcccccttgttgtagcatcattgctgagcaggaacatcaagtcaaggttgctcctaagagatccagaaaaggcgtcgtccctgtttggcaagcaggatgagagtgtactacaggtttacaaagcggacacaagaaaccctaatgatttggatccacagatgtttgagggagttacgcatgtgatatgttgtactggaactacagcatttccgtctaagcgctgggatggagataacactccagaacgtgtagattgggatggcatcagaaatcttgtcagtgccttgccacagacagtcaagagactggttcttgtgtcatccattggtgttacaaaatacaatgagataccatggagcatcatgaatctctttggtgtgcttaagtacaagaagatgggagaagactttgttcgcaattcagggataccattcacgattatcaggcctggaagattgacagacgggccctacacttcgtatgatcttaatacacttcttaaagctacagctggggagcgacgagcagtagtcataggcaaaggcgacaagcttgtgggggaagttagcagacttgtggtggcagaagcttgtatccaagctttagacattgaatctactgaaggacagatatatgagattaattcagtgaagggtgaaggacctgggactgacccagagaaatgggaggagctattcagatctgttcaatcagactagtggcattcttcaaagggtacatcatagtgtaatgtaatctgtagaaacagcacaatttaacagtcatagtcattgaacagtaatcatgtgcagtaatttaggtaccacttgcgaaaaanatgtttagtttgtgtacataatatgtgaatattgagatatgactattacctcctaaaagtgatatttttgttggaaaataaaatgttcgttatccttt

SEQ ID NO: 172121 - DNA, 403 bp, Zea mays
  unsure (1)..(403): unsure at all n locations
  Clone ID: MRT4577_88557C.1
accgccctttgtttttttttttttatatcaaancaagcggtggtgtaatcccccccttcccaaacttcctccacatcctctaccccctacatcattttctaccacacttccccactccttcccctgcgctcactctgtccctccacatttcctttcggtgctcctgccccattctttcttatgcccattccatcccttcgaaaaaataacatattctatcctctccaccccatgcccatcccaatacattccctcccttttctttccttaccactaatttttatgctctagctctttcttgccctttcgcctcccctttcttattcatacccacaattacttttacatttccttactcgctctctttctttctttttcaccaaattttctactcccactaaca

SEQ ID NO: 172122 - DNA, 1371 bp, Zea mays
  Clone ID: MRT4577_88558C.1
gcgtccccgtgcacgcccggcctcgccttcccttccccgatatctcttcgtctcgccgccgccgcgcgcgcactctcgtgtgacgtgtcccagcagtccgtccagtccctggcttctctcccccttgttgctcttggctccgcgatggcggtgggttgcttcaaccacgtgctctcgccgcttgttccttcgccgccgggtaggcgcgtccgagcggcgctgcggtgccggtggcatcgtcacccgctgaccgcggtctccctccggcggctcccgtgcggcgcggcagctggtcgtggcacgcggcggctcgcggcggcggcagagtcgcaggccgtgcaggagcagccggcgcgggccgaagaggccggcggggcgggtgccgctgaggcgtcctccaagctggttctggtcgttggcggaaccggcggcgtcgggcagttggttgtagcatcattgctgagcaggaacatcaagtcaaggttgctcctaagagatccagaaaaggcgttgtccctgtttggcaagcaggatgagaatctactgcaggtttacaaagcggacacaagaaaccctaatgatttggatccacagatgtttgagggagttacgcatgtgatatgttgtactggaactacagcatttccgtctaagcgctgggatggagataacactccagaacgtgtagattgggatggcatcagaaatcttgtcagtgccttgccacagacagtcaagagactggttcttgtgtcatccattggtgttacaaaatacaatgagataccatggagcatcatgaatctctttggtgtgcttaagtacaagaagatgggagaagactttgtctgcaattcagggataccattcacgattattagggctggaagattgacagacgggccctacacttcgtatgatcttaatacacttcttaaagctacagctggagagcgacgagcagtagtcataggcaaaggtgacaagcttgtgggggaagttagcagacttgtggtagcagaagcttgtatccaagctttagatattgaatccactgaaggacaaatatatgagattaactcagttaagggtgaagggcccggaactgacccagagaaatgggaggagctattcagatctgctcggtcagactagtggcattctgcaaagcgtagtaacgtaatgtaggaatatgcatcgtaatacaatgtaatccatagagtgcagccctaattcaatagtcactgaacagtagcgatcatgtagagaatatttggtttgtgtacatagtatgagcattcatatatgacgattatacctcctaaaagtgatagtttttgttggaaaataaaatgttcagtgttatcctta

SEQ ID NO: 172123 - DNA, 281 bp, Zea mays
  Clone ID: MRT4577_88559C.1
ggagaagcaagtgatgaggaagaggagtacgaggccaaagaagttgaagttgaggaagtcttggacttctccgaagaagtcctttttgaagagtgagttgattgggacaagatttttcagtatgtaggagtggagtagatgatatttcggctatttttattttagaattttgatcatcgcgttaacactttgcgtgtatttataaatgattgtgtgaggcaatgcaaaaattagtccctgcatattttttcaatacaaaaaacatgtatttttttttgtgg

SEQ ID NO: 172124 - DNA, 438 bp, Zea mays
  Clone ID: MRT4577_8855C.1
aaaacccgggccgacgagcccactctccgacggccgcccctatacaacattaataaagggggggatattttaaacaaccatatcggccccgtatacaaacaccccagcaacccccgtgctcaccacccccggggggaaaaaggcaaacaaaagcgacaacccccaaaaagggcccccccccaacaaagagaaaaacccgaaccatgggcccccaccaaaaaacccaccaacaaaaaaaaagccgcccacaagggacaaaccccccaaaggccccaaaaggcccaaaaaaattgcccccaaccacaagggtaacccccgggaccaacccaacaaaggccccccaacagccgggagccccccccgggggggcccaccccagaggaaaaccccaacaaatgaaacccaaacgaaggccgggcggccccccaaaacccgaaa

SEQ ID NO: 172125 - DNA, 429 bp, Zea mays
  Clone ID: MRT4577_88560C.1
cggatactgaacagccgccgccctttattctttcggggtgttttttttttataaaaaacaatccaagccaccaaaaaagagaccggctggtttctgactcaaaaagcaccgctacatattaacccccctcaggaattcctcatgaaacatggagaaaacgacaaaagatacaacacccaaactatactccaccatgcttttgaaacttgcatgtaacactttcccttctttgtaacacaccacacggtttaacaaaaagaaggcaacctagatgcaaggcgcccactctacatgctaacatgaaaggtccttcacgattcctactaaccaaacttgttccaccagaggtaatacgggatggtccggactaggtgacccgcgcgtagccccatctccagggatagctttccggccaggaccccgccatta

SEQ ID NO: 172126 - DNA, 1020 bp, Zea mays
  Clone ID: MRT4577_88561C.1
cctcgaggccggccgggatgcttcttctcccctccctccctttcttcctgaagccgccgccgccgcaagctctatatttccaggcctgctacagtgcaccccatcggcagcatgaagaaggcggtgtcagtgagaggaggtgggaagggaggcacagcccctacggacctcctggtctgcttcgccgctcggcagcacctggcgctgatgcccaagcccatctgcagtccgtctcgggccaccatggacaaggcagccgccgcgcgccggcgccagctccagctccagctgccgggcgccagcgctgctgcaggtggtgcgagagtgcgcggcgggagtagcccgatgttccgggggtccaaggcgaagcagagggcggaggaagaagaggagccgcagtcgcccaaggtcacgtgcgctggccagatcaaggtcagccggcccaagaaggtgaagccggcctcgacggcagcggcgaagcacagtagcgacggcgccggcggcgccaggagctggctcaccgtgatggaggagatcgagcggcttcacggccgcaggaagaaggcgggctggctcgagaacctcgggatcaggcgggacgcgctgccgttcgtaggcggcgcgctccggagcctacggtccaaggcacgctgctttggttccctccatgccgcggccgtggactcctccgccgactccgatggcaacggcaacgacgcggcggggcgtggaagtgagcgcggaccggagggagcgccgcggccagcgtattctacaagtggctcatggtgctcgaaggcgaccaggagcccctggagcaagacgaaaccaggtacgacgaggaattcggtcagggagaagacgtcgagcggcaggtgggaaaggagacggacgagggcacgaacgggccgacgtccgctccgccgccgaacgcgctgctgctcatgcgctgccgctcggcgccggcgactgggctgtccatgtccagaaggaggacgtgtgagcagttggctggcgtgg

SEQ ID NO: 172127 - DNA, 580 bp, Zea mays
  Clone ID: MRT4577_88562C.1
atataaggttacatatagtaaagaaagccattggtttggctgtgtgaagtgtcgaacagtccgcagtaggtcactggactgttcgtggtaggtcactggaccgtctgcgacgatgcaaagagccctcgagtgaacctagatctcaccccggggatcctcgtcaaggtaagattctagggtcgtcttagtcagcaaatcacccaagacacccgcaaataattttatatcaagatagcagtgagctcctccagaacctagatctttcccctggagggaccccgccagggaggaaagatctagggttgtcttgagatcggcatgccatccaagacgcatcgagacgacgcagagtcaaagcgaggtgaagattgagtttgggaaaccacaactagggctacactacacctactactaaagcatgaatgataaagaaaggtaacagattggttcgatcggaatgtgtacatgggtactcaatcggctgtacccctttatattatatggggaggtctagactcgttactaggcgagatccaactgatttccatggatatgttaggataatcatgtgtgggataaa

SEQ ID NO: 172128 - DNA, 786 bp, Zea mays
  Clone ID: MRT4577_88563C.1
cggacgcgtccgcccacgcgtccgacgggacctgcatggagataatggtaacccagcagcgccaagatctgaaaatgaacatccccgcgctgcgcaagctcgacgcgatgctcctcgaatacctcgacagcttcgagggcgagcaggagttctggtacgcgtcgaaagatgcggacgaacaggggaagggcaacgtgccgaggcaggacgacagatggtggctcccgaccgtcagagtccctcccagtggcctgtcatacgcgtacaggaaatggcttcaaaaccacaaggacctcgttgcgcaggtgctcaaggcagcgatggcgatcaacgcgtacgttcttatggagatggaggtccctgaatcgtacatggagtccctcccaaagaatggcaagtcaacgcttggagattcagcgtacaagcttataaccgacgactgtttcgacgccgaagaacttctgcgctccgtggacttgtcggacgagcacagcatcgtcgatctgaagaaccgggtcgaagcctcggtggtcatctggcagaagaagatgacccacaaggacagcaagctgtcgtgggggcacaacgccaggcacgagaagaggggcatgttcgaagggcgggcggaaaacgtgcttctcctcatcaagcacaggttccccggcatcgcccagtcggctctggacatcagcaagatccaatgcaacaaggatgttggccttgccattctggagagctacttcagggctctggagagcttggccttcacggtcatggttcggatcg

SEQ ID NO: 172129 - DNA, 199 bp, Zea mays
  Clone ID: MRT4577_88564C.1
accacacgtacgtactaagtttattagtattattatcactagctccctgcaatcaaagcatcgcaaatggcttctacagacaagcctggcggcgaccctgaatacagaacatatggaacgccagctcctgctggtgttgatttcctcaaacttgttgtcattcaaaggtttttattgtttgcagcatcactggaagctg

SEQ ID NO: 172130 - DNA, 588 bp, Zea mays
  Clone ID: MRT4577_88565C.1
aaccctagaaccttctccattccgctccctcgcggagcctggccaccatgagcgctcccatggagatctccttcgacccccacccttctcatcccgccctgcccgccttcccctccagcccacccctggagcctgcagccgccgccacccctcccgcggtctcgtcctcgccgcagccgtcggcggaggccgtagtcgcgcccaccccgccagacgacaaggtcctcgtctcagttgaggtgctgctgcacgccacgagtacgtctcgcgccgaggacgtccgagcagcggtcgagaggatgttagaatctcgaagtttaagctatgttgatggtcctgttcagatacctccagacaattcttttcttcttgaacatgtcaaaaggatccaaatatgtgacactgatgagttgattgagaaccacaaaatccttttgttttggcaagtcaaacctgtcgttcatgtattccagttgaatgaggatggtccaggtgaagaaccaagtgaagatgacacactctctagcttcaatgagtgggctctacctgccaaagaatttgatggattatgggaaagcttactatatg

SEQ ID NO: 172131 - DNA, 360 bp, Zea mays
  Clone ID: MRT4577_88566C.1
ttggcagacttttttctgtatttttgttgtataggttgttctttctcttcagctgacagttatataacattgcttacagaaaacacaaagcgatttggttctcggaataaataaagtgaaagttagcatgtacagtatcgcaagatgtgctgtgccattcttctatttcaaactcaacttttatgaacagtttagtttgcaatgcataaatattgtgttttaactaatctgctgagcacaaccttacacaaaagacctttcgtagtttgttgtccacgcgttagattaatgcacaatcaacattaacctttatgcttaggcaccggttactttggggtgactaaagtttagttactttta

SEQ ID NO: 172132 - DNA, 390 bp, Zea mays
  Clone ID: MRT4577_88567C.1
tcgtgccctgcggtctgatcgcctgtagcctgttctacgtctcctactcgttctggctcaacaagacggcgggccaggtgaacaagaagaacatcgcctgggacagcgtcaagatcaagacgtttggctaaggtgtgcacccccgccacttccagataggggggcttataactggcgctgaactggacgaaaaaataccactgagtgcgcaggaggtcctgatcgtgtggatgcggaccgccgcgctcccgacatgcaggttgctgcaccgccggatcgaggggggctccatggagagcgacgagatcacggtggtgatccagaacaacttctacacgttcagcttcgggggctcccatgcgctggtgctgtgcaccacgctgtggatcg

SEQ ID NO: 172133 - DNA, 741 bp, Zea mays
  Clone ID: MRT4577_88568C.1
cgggcctcttcactgtgcttggagcactactcggactccatctgcggtcgacgtcgctccagaccacgcagcgcgctcacctcgtctccctcatcaccgtcgtgcgcacagcccagctcctgctcccacttgctcatcccatggccgctacccttctctagtgcttgcttcctagccgtcgtgggctctgttccgcagtcacgcccgggattttggcacatcactagtttcgcacctcgccgtccatgcagccgatcgtctttagctcgacgcgctcccggagttcatggttatggcatggctgcgagttcccttcgcttcgcgccctcgcctgctgctgtgtcatcgactcaccggcatcgcccagctcgctttgcgcatggagcttgcgcgcgcatcgtcgatggtgccttggccttctctctgcttgctgcgagcctgctaacgccgcccctcgccacgccgtactgctcagtttcctacagcacctgttcagcccatcaatgtatctacttgttcgctggtcgcactcgtctcgtctagcgcctctgccgtccatttgtttgcgtcgttcgccgtcaacctgcttggacctcgcctcggtcaagcctttctgttcctgccgtcgtgggttgtcgtcggtcgtcttcgcgtcgtgtgtgcagcaacgtcgctgattcctccatagtgcttatcgacgaactttgcttcattgattccctgtcttcggttcgctcacgc

SEQ ID NO: 172134 - DNA, 556 bp, Zea mays
  Clone ID: MRT4577_88569C.1
atacggcccaccctttgttaacaacgaattccctcatatcctccgccgccgccgccgtctgctctcatctcgccgagaggtgacggaaccgacgaactcgccgcgttctaagatagagaattgcttttacagcctgcggctctgctgcgtacggtgttgtcgaaaggaagaagtccaagatcatggctcacacttcacgcgtgctcgctggcgactcgtggggttccacacataggtccgtcggttcaaatttgactgaacataatgtgagtctaaggttggctcaaagtgctaacgcagtgctgtacttatggatgaagctgctcttgcctacagagttggagacgccaaacctgtcttacgcccataatataccacattctgctgcttactgccactgagcacacaagccatcctgatattccttttgccttcctcggtctagacaagcatgattccttttctgacgctcggattcttaccaatcctaatggcctggtgcttttctggcaatcgaccagctacccaatcttgttgcctgaacacctcactgctg

SEQ ID NO: 172135 - DNA, 450 bp, Zea mays
  Clone ID: MRT4577_8856C.1
acgaagctcggaattctctcgaggataattgcccacctttaataacccccccgcgcaacggggccggggggatttgataccaactgcatggggtccaccgccactggccgaagcaaccttgcctgaaagcattgcccgcctatctatcggaacctgaccctgaccaaaatatgccaaatagcatgatctgaactgggaataaacaaaagacactgcggcatccatgcaggaacagagaaacaaaacgaggacaggcaaaactgaagatgataggtcaactacagagcacaccagggatcgaaacggcccgccgaccaaagaaagagattcagaaaggacagacaggttagagtttcgagaaccaagaagagattatgaaagggaacgcgatagccgccacgaaagggaccgttcccaagatcgtgacccggaaagggattattacccccc

SEQ ID NO: 172136 - DNA, 304 bp, Zea mays
  Clone ID: MRT4577_88570C.1
aaaacttacattgttggtgacacgaaggttgctgtcgttcatggtatgccccatggggatcactacgatgtttatgactgtccttaagtatatatttgacgacaccgaatcttttcactaaggatcagaaggctcctgctaacttgatgttccttcacacagatcatatcttgtatactcatactgaaaataccctctgtgttacttacatgagaatccatgatggtgtacaagttagacattatcattttacacatatctagttgtacaatgcactacctctctgttctcacaaaggttctaa

SEQ ID NO: 172137 - DNA, 831 bp, Zea mays
  unsure (1)..(831): unsure at all n locations
  Clone ID: MRT4577_88571C.1
cattgggtacctcgaggccggccgggagtccccggcgcggcaggtgaaattcgagtactcctgactgttcagttcactataatatcccttggtgccgttgcccttgcccttgcctcaaatctatacgtaagtggaaacgttggaggagatcgatcgatcgggatgggtgggtgcttctccgtgcacggtgacgtgcgcggcggcatggagggcgtcggcggcggcgcgaggacccagggcggcgcggcgtcgtcgtctgcgcagcagggcgggccgaacgatgcggtcgactatttcttccagacgcgcgggctccgcggcctctacacgcccatcgagttgtcattttcagcatcgaagttgcggaatacagattccttttcaaagagtgatcctatgttagtggtctacactaacatcaaaggaaagctagaggagattggccgtactgaagtgattttaaattcactggagccctcatggattacaaaggttacaatgtcttaccaatttgagattgtgcaacaactcatattcaggatatatgatgttgacacaaagtaccacaacactccagtgaagacattgaatttgacacagcaggattttctgggggtagcatgctgcaacttatcagagattgtaacaaaatttaaccgtagcctgacattgaatcttcagagtgattgtggacatggtcttcatggaaacatgacagtacatgctgaagaaagtgactcctctagaatggcagttgagatgactctgcgttgcgtgaacttgnnaaataagatgtgttctccaaagtgatcccttcttagatatctaaac

SEQ ID NO: 172138 - DNA, 803 bp, Zea mays
  Clone ID: MRT4577_88572C.1
ggtacccgcggccccccctcgagttttttttttttttttttgcttttttttttttttttttttttttttttttttttttttttgaaaacctagcacctgtttcttttcatatacagaacgggtttggccatgcagacgtgaaatcgtcgtctgtgctgcacggcaaacatgcacatcaaaattacacgcaccacaggacgcaggccatccgtgcagaccatccacaccacaagcactctttacacattataaatacccgcagaaaagaaaaagaaaacgaaatcgaaaaagaggaaaaacactactggcctgaagcttctttgcatggaatattacgataactcgtggctgcttcgaggaatggtacaccgccaatccgtgaatagtgacgatgccttgtgcactaagaacatcccaaacatttacttagtgggcctaagaattccaggaagcccgatgactgcggcagactctgttcctcagcttttgatggcaggtgtctaaggaatgccctaacagcacctgtcaccccgtcttcagattccatggctttcgccagctccacagccttatctttcacctctggtttcatcatgaatgttatagcgtcgaccaacttctgcaaaccaaactgatcaactggaataggcggaggccctagccctcttgcatgcacccggtcaccaatagtcgtatggtcatccaaatcgtatactacagtcaaattgagtactagaaacctccgagaataacaggtaccaaggtattcttgatgtatgcctgtttccatcaaatcgcaaaca

SEQ ID NO: 172139 - DNA, 842 bp, Zea mays
  Clone ID: MRT4577_88573C.1
atattttttattattttagtttttttttattttttttgttttttttttttttttttattttttttttttttttttttttttttttttgttagccctaaaataaggaaaaccaagaaaacctaggcacctgtttcttttcatatacagaacgggttggccatgcagacgtgaaatcgtcgtctgtgctgcacggcaaacatgcacatcaaaattacacgcaccacaggatgcaggccatccgtgcagaccatccacaccacaagcactctttacacattataaatacccgcagaaaagaagaggagaaacactactggcctgaagcttctttgcatggaatattacgataactcgtggctgcttcgaggaaatggtacaccgccaatccgtgaatagtaacgatgccttgtgcactaagaacatcccaaacatttacttagtgggcctaagaattccaggaagcccgatgactgcggcagactctgttcctcagcttttgatggcaggtgtctaaggaatgccctaacagcacctgtcaccccgtcttcagattccatggctttcgccagctccacagccttatctttcacctctggtttcatcatgaatgttatagcgtcgaccaacttctgcaaaccaaactgatcaactggaataggcggaggccctagccctcttgcatgcacccggtcgccccagaaaggttggtcaccaaagaaaggtacaatagtcgtaggacactgcaaatcgtagactacaactaaattgagtacaagaaacctccgagaataacagcaaggaaggtattttagacttatgcctgatcccatcaaaatgcaaac

SEQ ID NO: 172140 - DNA, 2402 bp, Zea mays
  Clone ID: MRT4577_88574C.1
ccggccggggaggcaacggcgcatcgcagcggccactttgctttgctcgctcgtctcttcgctttccgccgtggtgcatggccagtgaattccaattcgttctccctctccggctctccccaccaaaaacgtgaggcccgccggaacgagcaagcatattcacggaggcgtagatccagaggctcccccgcagcgcttgtccagaagcagccgacgcggcgtctgtccgcgggccgacggtcggtcgggcggtctgtcgtgtataaatggcggacgaggaggggggcagcggcgttgcgggagggagaggaggagaagcgctggcggcatctgctcccaacggggaccgctcagggaatagccccctcgccgtgccgtcgtcctctgcagatgacagaggcttccatagatcaagcaccatgccgttgccggtggtgattaagaatgatgaaattgccaatgaaactgctggaccatcaagttcggaaaggtccagaactgagcgtcgtcggcaaaataatccagctgatgatcctgctaaacagttacttgatgaaaggattccaataaaaaagaagctcaaaatgctagatcggattgctacagtaaaagatgatggaaccgtggttgttgatgtgccaagtctggaaccaactatagttggtggaagtggaactgaggatatttatactgaagttgctgttgaagacacattagatggaacagagataccatacaggccccctatgcaaatagttatacttattgtgggtacacgaggagatgtgcagccatttgttgctatagggaaacgcttacaggactatgggcaccgtgtgagattggctactcatgccaactttaaggagtttgtactaacagctggcctagagttttttccgcttggtggagatcccaaaattcttgctgaattcatggtgaagaataaaggattcctaccttcgggaccatcagaaattcctattcaaaggaaacagatgaaagaaattattttttctttgctgcctgcatgcaaggaacctgatcctgacactggcattccttttaatgttgatgcaattattgcgaacccacccgcgtatggacatacacatgtggcagaagcactaaaagtaccaattcatatattctttaccatgccatggacgcctactaatgaatttcctcatcctctttctcgcgtgaagcagcctgctggatatcgactttcttatcaaattgtggactcgatgatttggcttggaataagggatatgataaatgagttcagaaagaaaaagctgaagctgcgtccagtaacatatctaagtggttctcagggttctggcaatgacattcctcatggatacatttggagtcctcatctagtcccgaaaccaaaagattggggtccaaagatcgatgttgttggattttgcttccttgatcttgcttccaattacgtgcctcctgaaccacttgtgaaatggcttcaagctggtgacaagcccatatatgttggttttggtagccttccagttcaagacccacaaaagatgactgaaattattgtcaaagcgctggaaattactggacagagaggtatcattaacaaaggctggggtggccttggaaccttggcagaaccaaaaaagatttgtatatctactagacaactgccctcatgactggctttttctgcaatgcaaagcagtggtgcatcatggtggtgctggaacaacagccgcaggtctcaaagcagcgtgtcctacgactattgtacctttctttggtgaccaacctttctggggcgaccgggtgcatgcaagagggctagggcctccgcctattccagttgatcagtttggtttgcagaagttggtggatgctataaagttcatgacgaaaccagtggtgaaagacaaggctgtagaggtggcgaaagccatggaatctgaagacggggtgacaggtgccgtcagggcattcctcagacacctgccttcgaaaaccgaggaaccgagcccaccgcaaccgtcaggctttcttgaattcttcttaggcccactaagtaaatgtttgggatgctcttagtgcagaacgcaatctgtcacggattggcgccttggcggcataccacaagagtttgtcgtgatatcccatgcaaagaagctctggctctttgtttccttttcctttcctgcgggtatttgtagtgtgcaaagagtggttgcttgtggtgtgcatggtctgcagcggatggcccgcctgcgccctgtgcctgtggtacgtgtcattttgatgtttgccgtggagcaaggcgacgatttcacgtccaacccgtacgttctgtatatttatgaaagaaagaaacagaggctaggttttccttgttctcggcc

SEQ ID NO: 172141 - DNA, 341 bp, Zea mays
  Clone ID: MRT4577_88575C.1
gggccgccctaaaaacaaaaatttacccggttcaggggcctcccggatcagggtttaggaaaacaaacaagggggcccacaattaaagcctagggggtcaacattggcaaattttttacgggaaaaacaatcccccaattgggtgggtcacattggcccccgaggcaaaaaaccccatgccggaaaagggttccccccggggggggggttttttaagcattagcaaaccccatttcggagagctgggggggggcccctttggagacaaaaaaaaaagccttttcatccgcagcatatttttcaacaagggggcggaaaacagggccactcaacaggggttt

SEQ ID NO: 172142 - DNA, 193 bp, Zea mays
  Clone ID: MRT4577_88576C.1
gccacgcgttcgttctgctgatggttcgaccatgacacgaacagaacctcatctggtcgtccaatttagctggaatagaactcttcctcattacaggaaaagatcatctttatgcactactcaaaggcatcgtatgcacgcctagacatcatggtggatcattcatagatgattcgggctctatcttggcata

SEQ ID NO: 172143 - DNA, 618 bp, Zea mays
  Clone ID: MRT4577_88577C.1
gtacgtactcggtctcagtcttggacggcgacggcaggtaccttagaacacagtacgttctgaattgaccccagctcgttacagaaaacgccagaggggacagacgctacgccggggtgaacgcgtcccctgagcgacgcctacgctcccgttgcactcctccacgaccgagactgccacgaggaccacaactactctacaccgaccccagcaaaccacgggacagatgaagaggttagtattctaagttacctaggtggttgtcaacatcgtgaacgggtatactacatagatcaccgagaaggtataggtatttgttcacatggtgtttaccgagactatactgcctgaagtggtgtacgactactactagaactagattctcacggtgtccaccacccagggggtccaggtggtttccttgctgtaagttgaggaggtgattctaacgcgaaccgtggtttacgaccttgtacgaaaggtccaggcataagtcatatttctgatcgcaaaggtttaagtataactaggttaggccttacaggtgctattgacctcgttttaagaggtccagtaggtcaaagaggaggacatcgaggagtatgactactattacaa

SEQ ID NO: 172144 - DNA, 446 bp, Zea mays
  Clone ID: MRT4577_88578C.1
gagcacatagtcggcggcgcccttatttttgggtgtgtttttttttaaaaaattttgacgacctcaagcaaaatctggtttaaacgtttttaaagacaggggaatgagtgatttctaactgttcttcgaacgtataaatggtacacacggacgacttggagaataccatggataagatgcctcctctgacaggaacataagtttacgtggggacacataatgtaggtaccaaggggacaaagagagacttcactgcaattcctaagagctttaacaggcaaattcattgggtcggccagcaccagcaaaaagcctcagctggatatctgtttggcagaaagggtgccggatccaaactcctggggtgaggaacatttgcaagggggcagacattgcccttgggagccgtctgggagtgggttgtcccggaccagcgagacttgggc

SEQ ID NO: 172145 - DNA, 261 bp, Zea mays
  Clone ID: MRT4577_88579C.1
tctgtatcatcgtgagcagcgcttgcccttttttttttttgttaattaatttggctcccactggatttcctgcttttaaacactcaggtggggctgtttctgactttatggtcaaggccgagtcaacaccaattgccacaggaacgatgaaccaccaaaccgattaccttgtcttaaaaacatgttgtacaggacgcaatccctggggatgcagatttcaaaacaaacaaccagccttgcatttaacctaaccatgaccca

SEQ ID NO: 172146 - DNA, 1957 bp, Zea mays
  Clone ID: MRT4577_8857C.1
ttgggtacctcgaggccggccgggaataagaaacatcttgctgattactctgtgaaggaagctcaaatactcgatgataaatacaagttagaaaaacggattgcttatatgcgtatggcatttgaccagcagcagcatgatttaattgatgcagcttcaaaagctttgtcatacaggcaagatattattgaggaaaacattcgtctcacgtatgcgttgcaggcagcccaacaagaaagatcaattttcttatcttctttgcttcctcttctgtccgaatatgatgatctccagccttcggttcttgatgctcagtcaattgttagtaatttaaaggttttgtttaaacatttgcaggaacgacttattgttactgaggacagactaagggagtctcgataccagattactccatggcatactgaattgtcgaataataccagcaatcctgtgtctactgatcctcctgctggaaaagcattggtgactacaagcaaaagcagccttgatattgtctcccagacggtgtatcctcacgtacaatccccaatgtcttcccctgttcaagctagaggtgattggggtgcatttggtaacaaaaaccatcaagatatttcaaatgaggttcctataagaaatgctggacatgattacaagggtgggacctctctttcaagcagaagccaatataggactgatgttcctcctcaagtatctcaaggtgattccacggctgtgaattttgactttgaccctcacggtcaaaacccaccattcaagggtcttagcagaaatgatgtactggatggttcagatagtgctgaagcccaaaacacacaagaaccttctactcgatggggtctaggggactcatctaatttggcatctggccttgaggatgcaaacccttcatatccttatcttcctacagttcttgaggaacctggttcttctttctccgaagctgcagaggatgatccattgccaggcatagaagggcttcgaatcacaggtgaaccttttcctggacaagaacttcaagcaggtggatactccatcaatggtaccacaacttgtaattttgagtgggtgcgccatttagaagacggctcagtaaatttcatagaaggagcaaagcagcctagctatgttgttactgccgatgatgtggacactttactcgccattgaagtccagcccctagatgataggaaaaggaagggagactttatcaaggtttatgctaacgggcagaggaaaatttcatgtgatcctgaaacaaaggagcttattaagagaacccttgacattgggcatgtgacctatgaagtccaagtccaactgcctcaggtcagatttttagacatatgggaaccagctgttctagcaataaagagggaaggttacagcattaaatgtaatgggcagcgtggtgttctaatcacagagaagtttcagcaaggaactgctattcatattccatatgggcgtccaacagagttctcgattacatctgctgcgtctgctgatggtgtcagttataatctgaagccagtagaaaatacactattgcgggataccattgttctagtactaaggttgttcaaaaatatggctcttgagagaagaggaagaagaaagaagggtcttttcttcaagtagtttcagctatattacacttgtttctacgctgcttctaatgtatgtatgtagcattttggttgatcggcgtggtgcacaagtgttctgtttctgtaaaatactagacgattgtgttgtaaaactaaccaaaatgccaagtacacatgttaatattttctgccccactcagaagagctagagttttgccataaaaaaaaaaatataaaaaaaaatttagaaaaaaaaaaaaaaagtcttcgacgacgagggaatccgtactattgctcgggaagatgtaccacaaacgtgagcacgg

SEQ ID NO: 172147 - DNA, 357 bp, Zea mays
  Clone ID: MRT4577_88580C.1
acgcatactatctatactcaactgcaacatttatgctcattattgcacccacaataacatccgaatattgtgccttcttattctcctagctccttctacaagtactatttctccgaccattttcccacaatgcttacaagctcctataacttcccttcttcccccatacctctcaccatcattgtcttacgcatgttaaaacccaattcttcaaccctataggatccaacaggcaatctcagctggcatattacctatatcacccttgttcctccaacaatcatcaaccctattacagcagttacctttggtacatttattggcacaaaacaatatggcacaacaactactacaact

SEQ ID NO: 172148 - DNA, 402 bp, Zea mays
  unsure (1)..(402): unsure at all n locations
  Clone ID: MRT4577_88581C.1
tgcgccgctcgagccggccgacttgctacccgcatagatctttcccccgataacaatagacgtcgccttcgccggcaggagatttccacctccaccgccgaacctttccgcccctcctcccctctcgcgctatggcccagactgttgtgctcaaggttggcatgtcctgtgagggctgtgttggagctgtcaagcgggtcctcggcaagatggaaggngtcgagtcctacgacgtagacatcatggaacagaaggtcaccgtgaagggnaatgtgacacctgacgacgtnctgcaaactgtttccaatttatgttataagacttcgatctgggaggatgaggccgtgacaattgtatccgccacaaatgacggtgacaccgcctgacaggttagatgatctg

SEQ ID NO: 172149 - DNA, 461 bp, Zea mays
  Clone ID: MRT4577_88582C.1
gacggtatcgataagcttactttgtttattttccattagaaacacaaaaatttatatactttttcatacccaattctacttaaattcatgcaaattcggttaaattcttgtcaaaaaaataattaaatattataaaataattaaattatgttaaaaatatgaacattatgaattttaattaattttatagttattttttattaaatttggttatttttgacagaattacacaatttgagaaaaaggacccgatgaacactgcgagaagaacaaaatcgagagtaatttgaagtatcgaggccaattaatttccagcccaagacggtccagaaatgtgtattaattcataattaaattaattttaatttatttcctatttaatttaggttaaatgaattaattttaattaattatgaagaaatggcctagtgaaccgcattggttgaaccgaatgaagtgag

SEQ ID NO: 172150 - DNA, 367 bp, Zea mays
  Clone ID: MRT4577_88583C.1
cgcacgcgtccgaccacgcgtccgcaaataatctaccactgcgtgagctcatgcgtgcgcgcctgcaatggagtcctccgaccatgcgctcatcggcctaatagacgccgcagactccctcgccgtcgagctctcagatggcggcgggatggcagtgcctgagtactgatacgctgaagagagccacaacgagccgtagaactgggagaagctgaaccccgactacaagctgtgcactgaagggaagcaacagtccatgatcgacatcgttaccaaacaagccgttcacgccgtcagcctccacaccctcaatcgtacctacagcgccaccatacgacacgctcatcaacgatggccacgacatcac

SEQ ID NO: 172151 - DNA, 340 bp, Zea mays
  Clone ID: MRT4577_88584C.1
ttaggaatcaagagtgaggagttccttaaattttcttgcgacatggagtacataagggggggggatgggctagtggttttttcagtacttatcaaatactttgctgctcatgcacatggaaagggtcatgttacacacgatgtcggaggtcctactctagctaaagaaggaattttgcaaggaaacggagcgcgatgtgcaaaagggtgtcctccatgcaaagattacaagagctactgctgcataaggcggcgaactcatgctcgctactctactcttgctgagtggagtcatgcctgcttctaacaaaaaatacggacactgtaatatatacattgca

SEQ ID NO: 172152 - DNA, 614 bp, Zea mays
  unsure (1)..(614): unsure at all n locations
  Clone ID: MRT4577_88585C.1
aaagtttgcctcacccaggagatggagctctcgaaggccttctctggccagcggacactcctatctgccatcctcagcatgctatcactcagcttctccacaacatccctgctcagcaactactggtttgtgggcacacagaaggtgcccaagcccctgtgcgagaaaggtctggcagccaagtgctttgacatgccagtgtccctggatggagataccaacacatccacccaggaggtggtacaatacaactgggagactggggatgaccggttctccttccggagcttccggagtggcatgtggctatcctgtgaggaaactgtggaagaaccagcactgctccatccccagtcctggaaacaatttagagcccttcggtccagtggtacagcggcagcaaaaggggagaggtgccgaagtttcattgaacttacaccaccagccaagagaggtgagaaaggactactggaatttgccacgttgcaaggcccatgtcaccccactctccgatttggagggaagcggttgatggagaaggcttccctcccctcccctcccttggggctntgtggcaaaaatcctatggttatccctgggaacgcagatcacct

SEQ ID NO: 172153 - DNA, 120 bp, Zea mays
  unsure (1)..(120): unsure at all n locations
  Clone ID: MRT4577_88586C.1
aaatagtggcgatctcactgggaagtatcttggcnctttctctgacatctcaagtagcaagctaaaacgctacgctggatacatggcacgctacaaagactcttaggctaaagaagcgac

SEQ ID NO: 172154 - DNA, 297 bp, Zea mays
  Clone ID: MRT4577_88587C.1
cccacgcgtccggatcgatgcaatggacttgcttatatttgttatatatgtgctcttggtgtcactatttttgtggtattttcccagcgcaagtttacaaactcattttataaattatgttacagcacaggtaggctggcaggtgcgaattcggtttcagacaaaatttgcagcagacacaaacttgcaaaactgattccacgcagtttttgttcctcaaatcaattatgttattttgatgccgtttttttctaacagtcatcaccatcagggtggcatcatatgcttttcatttca

SEQ ID NO: 172155 - DNA, 276 bp, Zea mays
  Clone ID: MRT4577_88588C.1
gggccacgtcgtcccccgtggctggcgctgtcctcgccgccccttcctccgccgccgccgtagtcgtaaagcctctgcctcgtggcgcacgaatttgcggcagcacgggcaggcgcgaagtgcttgccggtaccgggctgggcgctgcgctgctgctagcgcttgtgcccgtgtgcggctcggcgcttgcggctgacgaggaatacgtgagcgagacgaaggatgtgatcgggaatgtgcggtcgacgatcaacctggacaattctgacccgagcg

SEQ ID NO: 172156 - DNA, 592 bp, Zea mays
  Clone ID: MRT4577_88589C.1
ggttggttaaaattaaaacaaggtgggggtcctaaaatttccaaaccatttcacaattgtctacaaaaaacatctattttagtaaaaatttaaaggggtacatttcctgttccagttttatgaaaacattaggggggttcttttttaaatgacccacataaggaacttttcattggttttttctattactttgaaacttaaatttacttcacaaccttaattgaaggttatttttttgagtaatcggaacttttttcaagcttcttaacaatttataatggggcattcatgtttttaaattcaacatttttcagttgaataccattttattatattttaaaaacattgcctttttgcccttgtgggtctctttttagttccttattccaaaaaatatttttaagtggttgtgcccacctttatccctcttaggattaaacctttttcttgtcattgtatctttaaaaaaaaaaaaaacccctttcttttttttttttttttttaagaaagttttcccaaatatctaacaagttttttttttttttattttgaaactcaggcccatttcttactgtgttttttaaaaattttt

SEQ ID NO: 172157 - DNA, 508 bp, Zea mays
  Clone ID: MRT4577_8858C.1
tacctcgaggccggccgggccggactcgtacaacatactagagctcaagcagtcgacgcctggctcaccgatgtagctcctctactgacgccagatctgactgcggagcgccaccagtgatatggaggttccgaatccacctaccggcgtgccataagaatgtggagcatccatgacgatcggaatctatgtgcctatcatcaccgaaggatctcctaggacgtcagtgtgagatgcatcagggcgatgactctcacgtccatgacttcaacatcatgcgggcatgtgatagaacaatgctatcccaatgaagcaaggagctctgacttctggtcgagtccgcattatgatacgcagaggatctccctggttccctagctatgggaggaataatggtgaccgcaggaccaatctgtccgcgtctgttattggaaccaagacctatctgttattaacttgagacttgaaaagaagtgggcgaacgatttgccagggatacctgacactg

SEQ ID NO: 172158 - DNA, 663 bp, Zea mays
  Clone ID: MRT4577_88590C.1
cactcctaagggcgattgggttcctcgaggccggccggggtaaatcaccactgatcatctcaccatcatcttcaacatctcatattaaacaacttcacttcctgccaacatgcagttcaccaggcttactctcctcgctgtcactgcgctgttctccatgggagaggcgtgcaagtgttacggaaccaagggaaacctcaacaacggcgcaactcacaagtgctgcaatgactacaagggcgtctactctggaaacgactgcaaagccggctctatttccgagcacctgagcggattcgaccgctgctgcaagggacagggctcagactgcgactttccccgccttgcctcaactgaagccaagatggtcaaggccgttaagcacgtcgaaatcaagactgcctattctggttaagaaaccacggtttgatgattcgactacactgtcaacttggatgatgataagcaagtagtaggattggggcggatatactaagtacaataaacaacatagatgtatagtactattatagtgacaatgccgactatcgtccttgaccaatctcagttggttcaccaattattgatctaattaaacttgggatgaatatagatacaaggtgataaagctcaagcaaaaaaaaaaaaaaaaaacccgcggcc

SEQ ID NO: 172159 - DNA, 293 bp, Zea mays
  Clone ID: MRT4577_88591C.1
cagacgtgcaatacagtgacctgaccaccatgcgtatccaccacaactactccacatgatggagaacctaagatcctgcagaggagaggaagaggagcatgaagaggagatggtcggcaccgttggcaagaggccagtagcgctagcaacggactgatcggagggtagccgagcggtcctgtatacctctgctgccaacctgctacgagacatcgaccaccagctgctgctgcacgtcatcaatgagcccgactacgagcagaacgaggccattctatgggaatccaccggat

SEQ ID NO: 172160 - DNA, 742 bp, Zea mays
  Clone ID: MRT4577_88592C.1
actccttcctgcactcgccaatctttcccctcgcgctcacgccctcttcttcccctaacaccgtgtcgccatgggtgccggtagatagcttcatggccacgccttctccatcctcgtccgcgtgaaccttgaccaccgttgccttcctcaaacttcctgaatgacgtgcgtgcttccccaaggctcgagcatgccgggacactatcatcgatgtcgttgtgccttcgtccgtgacggcgtgtgtggcaggcatttctccgtctatctcccgccgccctgagatcatcaccgaagtcgccttcacccactgtcgctcgtcgtagcctcgcccagccatctccaccaccggaggaagtgtcagtggggattgtcgaggagctgccaggaattctcatggaagagggtgaaccagaagctgaagctcagaagtgtcctgatcaccgccctagttccttcgagaaagatgtccagatgttctacggatattgcgagcaatgtttatacccggctacgggagatgactaggccaagggcatgacttctccgctctcctctcatgcttttggtgggttgacataacccaaatgttggcacagtatttcaaaaaccccgcacgtgttgtgggtgctagttgaataaatgcttccgctaaaaataatcaccttggtgattgctactttgagttatttgggcctgcgtgccatctaagttgtaataactctatgcactttgatttatttta

SEQ ID NO: 172161 - DNA, 364 bp, Zea mays
  Clone ID: MRT4577_88593C.1
gctccagctatgtggactctggaatgcatttctgggcttccagatacattgagagctgacttacataagaacatctttccatcatggcatccagtcaataaaagtgctacccaacaattcaagctcctcaagatctgtgtagtcaatacccatcagcttcaagaaaagccaaatgccatactctggtatccttcctctatgccttaaatctaatcaccaaaaccttaaccagaaaccagttcagaacccttcccgtccttttaaaccttattaaaccctgttgaatttgtccaaaaggataaaccgtccttcgaaagctgttaatataacctgttaacaatcatgtaatgattatcctgaccaa

SEQ ID NO: 172162 - DNA, 259 bp, Zea mays
  Clone ID: MRT4577_88594C.1
gggaacaaacaacagattttgggaaggccttcacgggtttgtttcaaccgtgcgacgaggtttacactttttcttttttgcactccccattttgggttgggcgtttacctggatccattacggggaccggtgaagggtaaaaccttcttcaacagtcaacgtgccatgacccaagcttccgtcctgccgtcttgagctaggggctttcttccacctgcaagcaacattttctgttttcccagctttttacgaggccggg

SEQ ID NO: 172163 - DNA, 832 bp, Zea mays
  unsure (1)..(832): unsure at all n locations
  Clone ID: MRT4577_88595C.1
gagatcataaaatatataataattactgcataatcttacacatgactcatccatacttttttttttttttttttatgtcaaaaataagtttcataacatatcacacacatgtccatacatagtttcaaacaaacataggtccttacatagatccatacaaattgtgaaatgtattattagattaccataaagcctaaaacttctcattaacgaagtcggtaatcatagagaccttgtaaagcaatggcacatccatgaaagcatgtgcaatgtcaggattagaaaccaaatgagaataatacttggacttgtgcgcaatctcaaatcctggaatattgtctacagcttcaaacaaaccagctggcaaaggtttgtttgctgcctccttgatggcactggctagtgtttgagtggcatgctgaaatgcttcaactaagaattcagtaccattgtcttccctcttggccttcttggatggtttagttgcagatgttgctgcagggtcattctcatggacagcactagatgttgcaatacacccttccttttgcacatcttcaccatcatcaacagcaagagggtcatttgatgtctttgcaaatcgtcctgatgcaacactattgccaaaaattgtagcaaggttgccatagtagggaagaggcttgtttataaattcatcatcacccttgtttctttcatccttaagctctgaagtcttttttgttctctgaatacttgcaatccttgcaccttccctgggagaggaatggagacgcgatgtcctcccgagcggaggagttcgggtgttttttttggagcccagagnnccggc

SEQ ID NO: 172164 - DNA, 166 bp, Zea mays
  Clone ID: MRT4577_88596C.1
tgaaaaaaaaaattaaaaaaaaaaaaactcaaaaaaaaaacaataaatggggcggtcgctctctgtgaggctggtgcctttcagccccaaccatgaggacacctcgttgctgtgtcatataaattcaatagtgtgaccgaaatttaacaaactggccactgttaaa

SEQ ID NO: 172165 - DNA, 910 bp, Zea mays
  Clone ID: MRT4577_88597C.1
cctgtaggtgtatagtcatggtgacacgtatatactgcagacttcttaacagatcgccaaaaggtgaacctccagctgatttttgatcaattcttgctgctgggtgggccaccatcctgcgagccactatggtgtgagtcacgacgacgtcggggagcgaggagagggccgacttggcagccggcggcgtgccatagcggttggggtcgttctcggcgagctgctcgatgagttgttccaagcctgggccgacgaagtaatccccgaagcttgccccgccgaggcgccctaggccgggtccggagccgaggctcgcgctggcatcgtcgaagaggacctggatgttggcgcctccctccacgaggctttggatgtaattctggaagaacattaccgggtcgaagggctcgggctcgttcctgtgggtggccgtgccaggggcgaaacgtatgctggagccgctgatcctgttgggttgttcgccgggtccgacgaaggagttgaggatggaggagatgtagcggggctcggaccgagaggtcgcagcggaggatgacgagaaggaagggggcctgccggtgccggctgctggggcggggcgcggggcggtactggcggtagggatcgtggtggaagcaaaagggaaagggagctggatgaaggttggggcagggatggtgacctcctcgaggaagttgccgtggcactcggggcacgagagctccccggcggcgacggcggaggccgcgatgaggacggtgcggttgcattggtagcaaaagtattgcttcgcagcggcggctggagtcgacatgggagcgaccggcgatctcgcggcgagggtggattaggatttttttttttctccctcgttctcggtgaataccccggccgccctcgaggatcccaa

SEQ ID NO: 172166 - DNA, 699 bp, Zea mays
  Clone ID: MRT4577_88598C.1
ccgggaacaccaaccacacaacaaaggccgcgcggctgttggataaccaggcgtcggaggatttgcctgccgtgtagttcttcctcgttggcacccggctccgcactgtgccaaaatggccatgtagcgtgcttttcctgctggtctaggctcaccaacaaatgccacatttgttctagtgatgctaactttgtaagaaacattgcactggagaaagttgttgagtcagttaagtcatcctgctcatatgccaaatggggctgtaacaagttggtcagctatgcatgcagaaacgctcatgaagaatcctgcctttttgctccatcgatgtgtcctattcctggttgtgggtacagaggatttactggatggtggtcaggacatttccttacaaaccataatagtgatgggctgcgcttctcatatggtcagtgttttgatgtgagtttggaaatgtcagttccttttctggttcttctagcagaggatgatcacctattcattttcatcaacaagaacgtgattccctttggccatgcgctttcagtgtgttgccttaggactggcaatctgaattggaatttcttatacgaaatgagagcaactagtaaaggaaacactaaaaacagtctgcaattgaaggcttctgtcacaaatacaagggagtggcgaggtctcaatcctacagaagttttcctt

SEQ ID NO: 172167 - DNA, 1398 bp, Zea mays
  Clone ID: MRT4577_88599C.1
ccggccgggaaaccaaacccacacaacaaaggccgcgcggctgttggataaccaaggcgtcggaggatttgcctgccgtgtagttcttcctcgttggcacccggctccgcactggtaagaaatccatggccaaattctcctttaacgacgccgatgaagaccctccaaccttctcttccgagggtgaaaagagaaagcgcgatgacggcccaggcgaagcggcggcaagcggaggaccctctaaggcccgaattctgacggtcgagggcgaagagcaggatggaggtgcggtggtaggggcggggagggctgaagggaacggcagcaagggggtggagacggtagttggcggagaggctgacgggattagtgtgcgcatcgacccggatgtgctcgattgctccatctgcttcgatcccctccaaccgcccctctaccagtgccaaaatggccatgtagcgtgcttttcctgctggtctaggctcaccaacaaatgccacatttgttctagtgatgctaactttgtaagaaacattgcactggagaaagttgttgagtcagttaagtcatcctgctcatatgccaaatggggctgtaacaagttggtcagctatgcatgcagaaacgctcatgaagaatcctgcctttttgctccatcgatgtgtcctattcctggttgtgggtacagaggatttactggatggtggtcaggacatttccttacaaaccataatagtgatgggctgcgcttctcatatggtcagtgttttgatgtgagtttggaaatgtcagttccttttctggttcttctagcagaggatgatcacctattcattttcatcaacaagaacgtgattccctttggccatgcgctttcagtgtgttgccttaggactggcaatctgaattggaatttcttatacgaaatgagagcaactagtaaaggaaacactaaaaacagtctgcaattgaaggcttctgtcacaaatacaagggagtggcgaggtctcaatcctacagaagttttccttttggttccatatgccttcagcaaatctagcaaacttacactgaatgtctctattgagagggttgctgatgtgaagtgaatatctgcagtttgtaatgtgttgtaaaatgtaaaaaaggtggcagtgtaagtttgtctttagaaactggttttccactgaggcatctctgacccatttggtttgctaaacccttgactctattcttgtgattcagatgatgccatcaaggtttgtaactgtatgtgtatactcccatgtactaaaatctgtaactgagatgcttgacgtaggaactatatgaaatattcaatttgcattcttgaataaaccaagaattcttgatatacatgcaacaattggttccttc

SEQ ID NO: 172168 - DNA, 500 bp, Zea mays
  Clone ID: MRT4577_8859C.1
aaaaaggcgaggcaaaaattttggagcaacaggtaaaaaggaagccaatgcaaggccatgcctgcaacaagggaaacaaaacgaggcgggggaaaaaactgggaaagcaaaggaaccatggccgggggaaaaaaaaaaaaaaaaaggaaaaaggaaaaaaaaaaccaagcaagcaaaggggccggggaccccaaagcaaaaccgaacgacagaaaccacccaggggacaagctagctactagcccacccaggagctaaaactagccgggggggggcggccggggggccccgacaaatccctgcccgggggcctggaggccaaaaaactaacccactgggtctgcttgaagttggcaaaaccaataacccgggggaaggcgccccggaaggaattaagggccccctgaaactccctgaacacctggggggggttgttgaaaccaaacaagggcaagttccaaaagggccaaaagcggcccgtaaaaaaacacggggagggg

SEQ ID NO: 172169 - DNA, 681 bp, Zea mays
  Clone ID: MRT4577_885C.1
cccacgcgtccgcccacgcgtccgcgcacctcccagtgcccgtggcgacgacgggcgatggcgagccaccgccctcgcgaagcacctcggacacggcgactgccgactgacccggtcagcttgattaggcaatatggttatccctccaccagctagggctcctgcaatcaccaagttcctcaagccgtatattttgaagatgcatttcacaaacagttttgtgagcgctcaggtcatccacacaccgacagccacggtcgcatgctctgcaagctctcaggagaaactcctgaggccaagcatggagtcgacacgggatgttgctgcggctgcaaagattgggaagttgcttggagagcgcttgctgttcaagggtatccctgcagtatctgtctccatgtcaagagaccagaagtaccatggcaaggtgaaggccgtgatagattctctaagaggtgttggtgtgaaattgctgtagggaaaactgactgttttatgagaggttatgttcgggcctcatgtttacctccgaagctgcttggcggtccattagtttcgtgactgaatttttttatgggtgctgctgaacaatatcttgaaccatgtaagtccttgttcagttgttcctatgcaccatggattggaaaagaaaatatgaaagattttgacttggtatggatt

SEQ ID NO: 172170 - DNA, 178 bp, Zea mays
  Clone ID: MRT4577_88600C.1
cagacgcgtgggcatttgtgtttttgttttaaaaacttgtggttaaaccactgtgctcgtaaatatatgaggtacttttgtcccttaatcatttcaccccaatataccatggccagaatgttctttgaacataacttgtttcttgggtggcatgggtttacaaaatttccatagcaaa

SEQ ID NO: 172171 - DNA, 409 bp, Zea mays
  Clone ID: MRT4577_88601C.1
ccttctttttttttttttttcctcccctcccctttttttggggtttgggtgttttttttttggggaactaaaaaattacccccacatataccggaacaacatgcttcaccccaaggggaatgcgtaagtgcagcccatgcccattataagttcccaccaatcaccaaccccaaacaaggggtttgaattccctcccagggccaacaaccttatatctaacaaaacccaaaatgtcccgccaaccacaacaaagaaaatgcccttggacaaaaattttttaatgcaacaaccctgatgcccaactttggggggaaaccaagaaccgttcaaaaaaaaacaaccaatatactcggaataaatttggacccagccctgagccgggtcgtgagccccacccaacccgcttggt

SEQ ID NO: 172172 - DNA, 296 bp, Zea mays
  Clone ID: MRT4577_88602C.1
ccggagtgagtgggcagagaaagtgcagccagcagcacgtacgtacaccacgggttttcgatcgcgaggctgcgtgctcgcatgcgatggcgcccgccgtgcaggaccgcctcccgttcctagcctcgcccccgcccgcgcgggagaggggccggaacccgtccctcgccgagatgctccgcctcgtcggcgccgccaccgtcgacccggcggacgatgacggctccgcgtccgcgttctcgctgccgctgccgctgccgcacgccaccaccaccacgcccgaccgtgacgcggtc

SEQ ID NO: 172173 - DNA, 147 bp, Zea mays
  Clone ID: MRT4577_88603C.1
ccggccggcgatgatacaagtcatgacgacactacacagcagtgctggcagtaaagctctcagactactccaacaacatgtcaccagacgtgcgtgcaagtgatcgccctatgcctcagacagtacgagatgcgacgtcctgatctt

SEQ ID NO: 172174 - DNA, 446 bp, Zea mays
  Clone ID: MRT4577_88604C.1
gcaggggaacaaaaagctcaattggtggaacctgtggcacgtacacaaaacaaatacatgggcgggggggggggaacattttcaggatagttttacaggacaggcccagtttacaaccaccaggtgggcttgaaaaaaaaactttgcctttttttttaataaagggaggggctcctttggaccaccctttgactatgcccttatttttaaaaaaaaaaccttttttttttttttacgggttattaaaatacctgggataaagacccaaaaccgacacttggaggcttggacaccccaaaaaaggcctcgcataccaaaaaaaaccacttgaacttgttgcccattaaaaggaagaaactaacctggaaactgggggggccacccccaacggaggaagggggataccaagcttcccctggccctggttgcccccggggaaatgggcg

SEQ ID NO: 172175 - DNA, 256 bp, Zea mays
  unsure (1)..(256): unsure at all n locations
  Clone ID: MRT4577_88605C.1
ggccgacgcacgcgtgcggnagaagcagccgccgntgctgttgttcctttcacaaaaagggggganacggggagacccggaagatcaatgcggatttcaaacctttccaagtgaaattcaagataaggctggctgtcaagacagactacagggccagcataaggctgattaaccaagacaaaaacaagtacaacacacccaaatacacatttgttgtgcgatttaccaacaaggacattactgtacaaattatatt

SEQ ID NO: 172176 - DNA, 341 bp, Zea mays
  Clone ID: MRT4577_88606C.1
ccagacccaaaaaaatggcgggaaaaaacaacattcattggcaaagtttaaaagccaagggggggaaaaaaaaacggggggcaaaattaaggggccggggcagaaaaacaaacagaatacggggcagaaaaggtccttaaaagagggggggctaagtggctaagtcccaaaacattaattggaaaaaaggggagcagtcaacactaaaaacatttggaaagaaaggtttaggcagttccttttacctaacaaaggagaccaaatcaaagggggcccccccccgggggcctcccgggggggcccccccaggcccccaaccggggaaaaccgcaagggaaaac

SEQ ID NO: 172177 - DNA, 1478 bp, Zea mays
  Clone ID: MRT4577_88607C.1
cctcgaggccggccggggaaataatgggccggatacagacagtcggcgcctccaaacccgccgacgttgcccccgcgcggctagacgcctagactagccccacgacctccacctcgaccagtctcgatcccgtggactcccgattgcctcctcagcaacttccatacccccagcgcggcggtgccggagcgagcagagcagccggagggcctgtcggatccgccgccgtcaagatgaatgacgccgatgtatccaagcagatccagcagatggtgcggttcatccgccaggaggccgacgagaaggccaacgagatctccgtctccgccgaggaggaattcaacattgagaagttgcagcttgttgaagctgagaaaaagaagatcaggcaagagtatgaacgcaaagagaagcaggttgaagtacgcaagaaaattgagtactctatgcagttgaatgcttctcgcatcaaagttcttcaagctcaggatgatctagttaacaaaatgaaagacgatgccatgaaggaacttctccttgtcagccacaaccaccatgaatacaagaaccttttgaaagacctaatcattcagggtttgctccgtttgaaagagccagcagtattgctccgttgccgcaaggatgatcaccatcatgtggaatcagtgctgcattcagcaaagcatgagtatgcatcaaaagcagatgtccatgaaccagagatatttgttgatcatgatgtatacctgccacctgccccaagccatcatgatgctcatggccagttttgctctggaggtattgtattggcttctcgagatggaaagattgtgtttgagagtacacttgacgcaagactagaagttgttttccgcaagaaattgccagagatccggaagcttctttttggccagactgcagcctaatcgactcatctgccgatggtacggctgcttctatgtaatggttgccggctgcacgcctgcactgcagccataaggaactccgcctgtttttgtcaaattgattgtttaaggtattcatcccctatgtacaaactacctattggttcattattgtcgccgagagcaccgactgtttgtactctgtttgctccgaggaataagaataaagcaccgccagactttccatcgcgaagctgaataaacgttgtaaatgcatttgttgcgctgaacattccgtttatggtttctccatgtgtatatttagttaatgtcggatgtggttcttatggaaaatagtttgtttgggctgtcgtttacggtattcatccccaatgggcaaactaccttatttgttcattactgtcgccgagcaccggctgtttggacttcgttcgctccgaggaataagaataaagccctgctagacttcccattgcgaagctgaataaatattgtaaagccctttgtcgtgctgggaaaaaaagtggaaaagtataaaaaaaaaaagaaaaa

SEQ ID NO: 172178 - DNA, 393 bp, Zea mays
  Clone ID: MRT4577_88608C.1
ggacgaaaacaaatgggcatgtttatcccccgtttggaatgtttcgaaacgaaacgttttattcaaaagatcagtctccagtaacaggggactggggacatgcacattccgaggacccagcgctttgggcagttcacctggacgggtagaccgatcctctcacttgatgacgcttttttccccttcctccagccctgccatggggtcgtacaggggcttgttcatggtctccggcaggtaaaaaaagagcaggccgcctacaatgcccgaggcccccaacaccgcgaatggtaacctttccccgagcaccaccaccaggggggccaaaatggcccccatttgggcctgctgggccgggcaccccaaggccggttttccccaccaccgtgggga

SEQ ID NO: 172179 - DNA, 632 bp, Zea mays
  Clone ID: MRT4577_88609C.1
aatctcactaaaaagtgatctgaaagtggtagccagcaacacgagggagagagccgtgacaaagcctcgcagcgggggcgaaggcggcctcctggatcttagaggggcactacgacttttacggggactacgataggaaccccgataacgtggatatccacgacgtcttcgtgtggcccatcttcctcaccgcgctcatgctcctccacctcaccgacccctccacacacgccggcggtatcagagacgcgccctacgaggtctactacttcctcctcgaccgccgtgaggacgcgctcggcgacatcctctgttacctctgctgggtcgacagcgtcgacctctctgcccgcctcgtctactctgttggatggaaggttgaagtggtgctccagatgttctcgcgtactatgcaagtcattggtcatggacgtgtccagaagcgagggcctgctcatcttgacaagcatgtccaggatttcctgatggcaccattcattgtgatgctagaggtaaaattcagaattgccgcggaatttttatgccacactactgactcgatagatgaatcatggataccaagaccacccatgccaatctttgaaagctacatagtcatgacacatttgacg

SEQ ID NO: 172180 - DNA, 359 bp, Zea mays
  Clone ID: MRT4577_8860C.1
aaaaaaaaaaaaaaaaaaaaaaaaaaaaaaaaaaaaaaaaaaaaaaaaaaaaaaaaaaaaaaaaaaaaaaaggggggggggcccttttaaaggacccaattttacgacccggggctgggaaggtaaatattttttttatggggcccccaaaataaattccccggcccggggtttaaaaaggtgggaacgggaaaaccccgggggtcccccaattaaaggccctgggggcacatccccttttccccggggggggaaaaagaaaaagggccccaccggttcccctttccaaaaagtgggccaccctaaggggaaatgggaccccccctttgacggggcaataaagcggggggggggggggg

SEQ ID NO: 172181 - DNA, 747 bp, Zea mays
  unsure (1)..(747): unsure at all n locations
  Clone ID: MRT4577_88610C.1
cccgggtcttcgttccttttcccccttccttcanaanacgaggccgcggtcgcggaggaggctttacgaacaaacgagccattagtccccaaaagccaacacacacaaacccaggcgatagcgagcgcgcccgcgaaggctacgacgcgagagcgcgcgaggtgtggagcccccaatcccggaagcttccttggccgcgcgcagggcgcgggagtgggagctcgccgccggttaccgagccctctccgccgcggatctcccgatctgagacgccactcgtcaattccccgcagggttttgcggtgccagcgacggacatgagcgtggagagcccaggggagctagggttctgaagcgcaccgtggggcacagcgtggcgaacgacggcccccgacatcctgctaggttttccatgggagatgggggagtcgcgtgcgccgtccgctcagtcgagagcttccgtgccggcgccctcgtgaggagaggaggagcgggagaagcgatgccggacaagggggagagggcccatggccaccgccaccagcaccagcactggaagaaccagcagtcggcgacagctgctgacctggaggagggggagctgcttaatggggaggccgggaccaatgggttgcccgagaggagcatgccacctaagaagtggaggaaggtgctggcagcctccacagctgctgtggaggtggagcctggggagattgtgagtacaaagcaagcagtgccttgaag

SEQ ID NO: 172182 - DNA, 382 bp, Zea mays
  Clone ID: MRT4577_88611C.1
gacaaattgaacgagagcgccactcccctctgctaataccagtcaaatcgaagcaagcatggccatggcggccgtgggcgtgggcaggtgcaacgtcgcttctactcccgcagcgccgtcagggcgccgctccctggagcggcgaacggaggggggcgccctgtaacggtgcacgcgtcatactaggacaacttagacgtacatgtccaccaatgtggttgagttagctctacttagaatcggaaacaggaagctgaaggatatccacacggaatgaggtaatggacatgcattgtcgctagcgcaaagggaatagcacattctttaggcttcgtatcaagcgctagcaaatggagagggtcaattcgaatacgtatacttt

SEQ ID NO: 172183 - DNA, 239 bp, Zea mays
  Clone ID: MRT4577_88612C.1
ggtggtcatatcttttcggaattgacatacacaaccattatattggtgtaaaatacatgcaactcccggccgtatagactgggcagtggcgccaagcacatccctctaatggtggatacatatgctttccctgtctatcgtggccatggactttgcaataccatagagtccatacgaaaacacgaaacgggagaagcaaggaaacgttacaaattgtacatgtggatacaacactaaaa

SEQ ID NO: 172184 - DNA, 279 bp, Zea mays
  Clone ID: MRT4577_88613C.1
agccgcccgacccaatccgtgcgtgtgttggtcgagatgggtacaacagcttgcgctcccatggcgagccaggtggtgaagagcagcacggtgcagtcgaggccgaggggcgtgtcaggcgctgcgctcacgcggccccggccccggttcagcgtcgtcaaggccgccatgcagcccgagaaggcaacgtaccaggtggtgcagcccatcaacggcgacccgttcatcggcagcctggagacgcccgtcacgtgcagcccggtcatcgcgtggtgcgtg

SEQ ID NO: 172185 - DNA, 439 bp, Zea mays
  Clone ID: MRT4577_88614C.1
aaattcattaggctaagacatttaaggtttaaaacagggacgggggccgggcaacattttaaacccccagggggggggacttggcataacccgccccctaattaaaagggttaatggcaaagctttaatttttttaagcaaactaaatgggggggggaacatggggggaacttactggctggccagaaaaaatattaaacccatcgggttttttattaattcgccccctcttggggtacaaaaaaccggttaaatttttttggcctaaccaaaacttagttttgggggacgaagacttaaaaatgggggacaaaattatcccgctacatggagccccgttttccaacaggcctaaaaaaaaagggggcacaagggggaaaattggggggacaaaaaaacctataactccatccataaaaacaaaaatggggggggggga

SEQ ID NO: 172186 - DNA, 672 bp, Zea mays
  Clone ID: MRT4577_88615C.1
cctcgaggccggccgggccgggtttctgaatccggcagcaccatgcagaaccccgtcgcgaaccctttcactgcggccgccgccgctgcggcagggaacggcgtccaagcatcgggggctggaggggagcggccggaggacgcgtcgaagcagaacctggcgcaggtgacgagctcgatccagaagacgctgggcctgctccaccagctcaacctcaccgtctcctccttcaactctgcctcccagctccccctcctccagcgcctggcctacggaagcatcttcttgaggagcttgaacaagctttccctgaggacgtagaagcatacagggagatacgtgctacttctgctgctgaggcaaagcggttggctcagtcccagggtactttgcctaatggagatgtcaaaatgaaagctgagcattgagcgaatggtacgactacagagggcaagtttgttatctctgcttagttttggggatggctttgttaaccagaaacatgcatatctttctattgcacgtcccctgatcagtgaatgtgtacatactatcgtagcatgtgtggcccaatgtattcaacttaactaataacttcaaaaagatatccggagcatatcgaactacggatagctgagactaaaaaaaaaaaaaaaaaaggcccctagggcc

SEQ ID NO: 172187 - DNA, 861 bp, Zea mays
  Clone ID: MRT4577_88616C.1
gcacgaggtttcctccctccgccggccgtgcccgcggcccaggcttctgaggtccggcatcaccatgcagaacaccgtcgcgaacccttccgctgcggccgccgccgcagggaacggcggcgtccaagcatcgggggctggaggggagcggccggaggacgcgtcgaagcagaacctggcgcaggtgacgagctccatccagaagacgctgggcctgctccaccagctcaacctcaccgtctcctccttcaactctgcctcccagctccccctcctccagcgcctgaatgcgcttgtggcggagctcgacacgatgcagaaactcgccgaggggtgcaacatccagaccagatgcgtttgatcgacgatgggaagaaccccgacgagttcactagggacgtgctcaacagctgcatcgccaaaaaccagatcaccaagggcaagactgacgctttcaagggcctacggaagcatcttcttgaggagcttgaacaagctttccctgaggacgtagaagcatacagggagatacgtgctacttctgctgctgaggcaaagcggttggctcagtcccagggtactttgcctaatggagatgtcaaagtgaaagctgagcattgagcgaagggtacgactacagagggcaagtttattatctctgcttagtttggggatggctttgttaacgtgaaacatgcatatctttctattgcactttcccttcatgtgattgatccgtgaatctgtacatattaatatattatcataacatgtgtggcaattttaattcaacttaaccaataacttcaaaaaaaaaggcccctaaaaaacgataaaaaaaaaaaaacctaaaaaaaaaaa

SEQ ID NO: 172188 - DNA, 832 bp, Zea mays
  Clone ID: MRT4577_88617C.1
cgtttcatcaaaaggaaaaagcttcctctctgtccgactcctttccttcattttcctcttctgacctccggcagcaccatggagaacgtcgccgcgaatccttccgctgcggccgccgccgcagggaatggcgtccaagcatcgggggccggaggggagcgcccggaggacgcgtcgaagcagaacctggcgcaggtgacgagctcgatccagaagacgctgggcctgctccaccagctcaacctcaccgtctcctccttcaactctgcctcccagcttcccctcctccagcgcctgaacgcgctcgtggcggagctcgacacgatgcagaaactagccgagggttgtaacatccaggtgccaatggaggtcgtcaatttgatcgacgatgggaagaaccccgacgagtttactagggatgtgctcaacagctgcattgccaagaaccagatcaccaagggcaagactgacgctttcaagagcctacggaagcatcttcttgaggagcttgaacaagctttccctgaggacgtagaagcatacagggagatccgtgctacttctgctgctgaggcaaagcggttggctcagtcccatggcaatttgcctaatggagatgtcaaagtgaaagctgagcattgactgaagggtacgactacagagggcaagtttactatctctgtttagtttggggatggctttgttaacgtgaaacgtgcatatctttctagcgcactttcccttcatgtgattgatccgtgaatctgtacatattaatatattatcataacatgtgtggcaattttaattcaacttaaccaataacttctag

SEQ ID NO: 172189 - DNA, 429 bp, Zea mays
  Clone ID: MRT4577_88618C.1
gggccccggggaccgttttcattcccgggcgttcacacgccggctgtgacccagtaggagagatatacagggaacttttagatatatctatatttgtgtttgcatcacgacattggtgggtggtggaaccggaccagcacatggaaccttgtgccacaacttgcactccagcaccatctcaattgaaattaatgctgcagtccactgatcaattgccaattaacatgggattcacaggcaagggaaatacttcaaaacctgaaggattggctgaaatcattaaagctggagcaatgggtttgaagctgcatgaagattggggaactaccccatccgcgatagataattgtttatctgttgcagaagattttgatattcaggtcaatatacacacagataccttaaatgaatcaggctgcgtggagcatg

SEQ ID NO: 172190 - DNA, 976 bp, Zea mays
  Clone ID: MRT4577_88619C.1
cgccgtcgctgcggcagggaacggcggcgtcgaggcatcgggggctggtggggagcggccggaggacgcgtcgaagcagaacctggcgcaggtgacgagctccatccagaagacgctgggcctgctccaccagctcaacctcaccgtcttcttcttcaactctgcctgccagctccccctcctccagcgcctgaatgcgcttgtggcggagctcgacacgatgcagaaactcgccgaggggtgcaacatccaggtgcctatggaggtcgtcaatttgatcgacgatgggaagaaccccgacgagttcactagggacgtgctcaacagctgcatcgccaaaaaccagatcaccaagggcaagactgacgctttcaagggcctacggaagcatcttcttgaggagcttgaacaagctttccctgaggacgtagaagcatacagggagatacgtgctacttctgctgctgaggcaaagcggttggctcagtcccagggtactttgcctaatggagatgtcaaaatgaaagctgagcattgagcgaatggtacgactacagagggcaagtttgttatctctgcttagttttggggatggctttgttaaccagaaacatgcatatctttctattgcacgtcccctgatcagtgaatgtgtacatactatcgtagcatgtgtggcccaatgtattcaacttaactaataacttcaaaaagatatccggagcatatcgaactacggatagctgagaccatttccttatttcttttcgttctttacaagaccattctgatactctgaaattgattgctccgaaacgcgagggtcctggagctttcaattggtgaacaattcctgaagcaggtaatgcattgctaaacaagtagaaggtgtaactgtctccacttatgaacgagaagatttttgtagtagcagttatctgatgccttgctaaattgtcgggtgattagtattgat

SEQ ID NO: 172191 - DNA, 202 bp, Zea mays
  Clone ID: MRT4577_8861C.1
tccggggccaaccggccacccttgccggggaagccttggtgcttgtaaacttttacccaacctttgggaaaactttaaaaaagccaaggcggccgtttgaaaaggaccgcctaaatcctgacctaaagctggttgggaagtttggcctgcggtgcaagcccaagctttggcccgtgcagattgccctgaccccgttcaggaa

SEQ ID NO: 172192 - DNA, 411 bp, Zea mays
  Clone ID: MRT4577_88620C.1
cggaaagctgccccttgctaagcccgatctgatacggccgccagcgtcgacaaccactcacacctacacatggtcaattatctcttgctctgccttttgagccacaatgctctattccatgctactgctcagtcatatccacattctgcacagtactcaatggcttcgacaccagctgtgcagcctatggctacacaaggatagagggagcgtctacacaaccattgcccattgcacaacgatccttgcacatctaacaatacataccatcgcatcggcacacgcaacaccagttcctaccagcactgagccacctacccatggtgaaccctgtcgcctacttgcaacagcagctgcttgcatccaacccacttgttctagcaaacgtagttgcaaaccagcaacaacaac

SEQ ID NO: 172193 - DNA, 376 bp, Zea mays
  Clone ID: MRT4577_88621C.1
ggggagtagtggtaaagaaacatgcgctgcatacgtgcacagagagtgtgctaaactgtcaacttctgacttatggacaatgccaatggcaatgtcatgctacatgttgggttttcgccggattctgttttggagctcgcttctgttacatgtgaaggtaatgcttctgcaagccatgatgttatgttgcatgaaaacccaaccgatgctggcgcattgaatgatggtgatccatctgctttatctacttctgactatgaaaaagaacatgcttcatcattgatgaacttggagcagcatgctagaagtactttgcacgaggacaccagaaaggaagagggtgtgccatctcatggcatagtagaaaatgatattg

SEQ ID NO: 172194 - DNA, 590 bp, Zea mays
  Clone ID: MRT4577_88622C.1
cgtcgcctcggaccggttacccacaggaaaacaccaggaccaccagaaatctacagtgatacacagttcccatccctgcagtccactgccaactgtagaagccggaaatactgagccttcgtaagggctgactacctcaggtttgctgcactcgttgcggacttcatgtggatcacaacttctggacacgaaggttacagctagtaagtgtcggtgtgaagcttgaaaccagctctactggattcctatcagaaatcctgcagaaagtcagccatctgggttctgatctgctgtaaaagatgaagatttaagtgaccttaattaacctgtcctgtgccccacccttaaggaatactctgtagtgggctgtgttagacttcctggaacatgccgctctcaaaagaactcatgtgttcagatgatctgtgtatggttgtgattttataatttaaactttgagttgtattctgaggtaaccacagattaaattcaactgaacttgggtccaccaagtgggaaagggggtgggggaaggggagtaatcttacttcttttagtgatttttttatttgggtagtgctttattctgt

SEQ ID NO: 172195 - DNA, 446 bp, Zea mays
  Clone ID: MRT4577_88623C.1
gtgcggcgctcgaggcggcgggtcggagacctagatatttcacatccacttggccgccaggaaactagctgccgttaacagccagccgccaggaacctggacgacggcacatctccctcctctgcggcaagcatgagggccgacctggtggcagttcggccaacttcgcattcctgtttccctctctttgtattctgttttctctctgtcagccgcgcagaacttcagccgccagggaactggttcctggccgaccgagtccttcatctgggctgtgcgccagagcgcgcgcgagctgacctgcttctttctcttgtttctaaatctgttcgtgtgctttcttgtacttctgttatttatttatttatttcttctcattgttccggccggcttctgtgggactgagcgccgcttaaatgcccatggatgaaagtgcgcctttctca

SEQ ID NO: 172196 - DNA, 343 bp, Zea mays
  Clone ID: MRT4577_88624C.1
attggactgtttgcgatgccaattgtacagatcaagacgcgtattggactaagtttgccgaggtcatgggtatagattcatgaggcgtgttgacgccgctggctgtgctggaccacatccatgcacacaaccatgcgagtagtctggtgaccgacctcattgcaccctcccattcacttctctgcagcagcgacgttcatgcatggtgatcaacgaagaggtttcttctttcctgattttcctcttacacaaaactatttgttcaatggattttcctatacgatctgtgtaccttctttatgctttcaagtcgtaagaattattgtgtcaacatttttaggct

SEQ ID NO: 172197 - DNA, 403 bp, Zea mays
  Clone ID: MRT4577_88625C.1
gcccctagcccttcagtctctctacgtacacgcagtaaaaaaacagccgcagtggcgagcagcaccatggccctgtgctccacggccttctccggcaaggccgtgaacgtgccgtcgtcctccgccttctgcgaggccagcctgacgatgcgcaagacggcggggaaggccaagccagcaggggcgtccgggagcccttggtacagccccgaccgcgtcctgtacctgcgcccactgtccggcgagccaccgagctacctgactggcgagttcccgggctactacctttggaacacccccgggctgtcggagaacccacacacgttcgtcatgaacctggagctggatgtaatccactcacgatgggccatgctggacgcgctcagctgcgtctatcccgagc

SEQ ID NO: 172198 - DNA, 447 bp, Zea mays
  Clone ID: MRT4577_88626C.1
tgcttggaaccttgggctgatttagtgcttgagctagaggagagttcaggggccagtaattaaaatacgtttagtagggtgtcgatgcctaggtagtcgagtgttgtaatggatgggcctagcctgtagaattcgtctggagaaggtggtcccggatgggcgcataaagggtcttctgaggatattggagaggccactgttgcgaagtagtcgaatagggatgggtcttagggtaatggtgagccttctgctgaggcgtcgacgtctagttcgtcgtattatttgaattctgctaagtcgtcgggtcatagtattgatcttaattagtggacttcggctcatgagcatacgtttaggggtctgtcggaggattactcttcggatccgtttttgagtcggaagttttcgttgcggtatatgtggacgtggactgtggcgggtgtggtg

SEQ ID NO: 172199 - DNA, 167 bp, Zea mays
  unsure (1)..(167): unsure at all n locations
  Clone ID: MRT4577_88627C.1
gggcattccgacgacagtgatgttccgagtagtcgtcgtcgccgttttcaccctatcgaccgctgcagccgcaggcaatgcgacagcgagtccgagctccgtgaccaattcaacggcgagctcgaccaagancaccacggcgccactgttgccgccgtttggcacga

SEQ ID NO: 172200 - DNA, 327 bp, Zea mays
  Clone ID: MRT4577_88628C.1
ccggccgccacgtgactttctttattttcgttcttcttcttcttcgtaacacacgtctctgccgccaaaggagaaattgattcatttcaacgtacgtacgtctgctgccgacagagaattggattattaaaattgtttgaggcaggtccttccattttctcgtccttaattcctctggcatgcatgcaggatcagtgaccgacgacttgtagtttgcttgagcatgttgtttacgctgctagcttcttgttgtacgatacacatacatcaatatgacacgatgaataaaaaaagtgctgctaatcaaaaaaaaaaaaaaaagcggcc

SEQ ID NO: 172201 - DNA, 690 bp, Zea mays
  unsure (1)..(690): unsure at all n locations
  Clone ID: MRT4577_88629C.1
aatattttacatgccatagcccccgtataggcctgcctctcgtctgcgccctactccccaccacttcccttccccgcctacaagcaagccgccccagccattcatggccatccggacccgtgggtgtcgccgccactccacctccacctcccacccactcctctcaccgcaccactaaacccgcctccctcgctcctcacccgctccctgtccatccacccatcgcctcgccgccgctctgctgccgtttgctccagctgcggccgaccggggccatggctggcatcgacctcaacaccgtggaggaggaggacgaggaggaggcggaggcgctgcctttgcccggacccggtggccgtggcgccgtgtgcctggagctgtggcacgcgtgcgcgggccccgtcccgccgctgccgcggaagggcagcgccgtcgtgtacctgccgcagggccacctcgagcacatcggcggcgacgcggcgcgaggagcagcagctgcggcggtgccgccgcacgtgctctgccgcgtcgtcgacgtcaccctccacgcggacggcgcgacagacgaggtgtacgcgcgggtgtcgctgctgcccgaggacgaggacgcggagaagcgggcgcaggcgcaggcgcgggtcccggaggacgaggaccgccgcgacggcgaggacggnggcgccatgaggc

SEQ ID NO: 172202 - DNA, 205 bp, Zea mays
  Clone ID: MRT4577_8862C.1
ctttgcgaacatttttttgttttttccccattaagaaacggttctgggagagtacgttgggaataccaaagtgataacacgcctaacaaacaaccattagagttcaggcactttacacctcaccaaaccaaacctggaagactaaccaggttaatccacctgcttgatcctgggatcacaaggagtttacaccaaacaagggggg

SEQ ID NO: 172203 - DNA, 295 bp, Zea mays
  unsure (1)..(295): unsure at all n locations
  Clone ID: MRT4577_88630C.1
cggcgccgcgcggcgtgcggggcgttggccagcatgttgagcacgacgggcgcgccgcagaggtggtcgaccccgcgccgcgcgatggcgtcgtacacctcggcggcgtccacgcggcgcaggcacacgttggtgccacctaccgccgccatcccccacgggaagcaccaccctnnggtgngtttacatgggcagcgtccacaggtacgtcggccgcggcggcaccgcccactccacgagcgcntcnacngngaccaggaagatgccncngtggcagtgcaccacgccctttggc

SEQ ID NO: 172204 - DNA, 144 bp, Zea mays
  Clone ID: MRT4577_88631C.1
caagatgccacgaatgttggtgacgaaggtggttttgctccgaacatccaggagaacaaggaaggacttgagctcttgaaaactgcaattgtgaacccagtcatcctggtcaaaaggatcttcaatactagttctagatcgcga

SEQ ID NO: 172205 - DNA, 444 bp, Zea mays
  Clone ID: MRT4577_88632C.1
acgcgtacgcgtgctgtccattttaacatgggattttagttttatttatggttttaacatcctcctatgaggaaacaaagcctctagagaggggaggttgccttcccgaagttagtgccaccaaacttgctgcatggaacatgaagaagcaatgtttataacaaaaaaaaaaaaaaaataaaaaaaaaaaaaaaaaaaaaaaaaaaaaaaaaaaaaaaaaaaaaaaaaaaaaaaaaaaaaaaaaaataaaaaaaaaaaaaaaaaaaaaaaaaataaaggggggcccgttttaaagaatcaaagtttacttccccgtccttgcaacgtaatagtttttttatatggtccccaaaattaaattccctgcccgcggtttaacaactcttaaattggaaaaaccctggctgtccccaattaaattcctttgagaaaaatccccttttc

SEQ ID NO: 172206 - DNA, 377 bp, Zea mays
  Clone ID: MRT4577_88633C.1
caaccgcgccatcgttaccgactcaccgtcgactcttgctcactcactcgcactctccggccagatcagagcgctcgcttccaatagcggcgtcttgtacgagaaagcctgcgcagtaagccatggcacactaatgacaccctgagaagatgcaagaggcctccaagcttagcgcctacgatccaaccaagattaacaaagctaataacgttgtcatacaatagccttttgatgaagtagacaagcttgcagagaagacacaatcactagacatgcactgaaccagctgaacataactatactggacaggacaagaatcatatgaagcaggtgcatcctgagcaaagtatagatgaccgtgaatataaggatgacac

SEQ ID NO: 172207 - DNA, 238 bp, Zea mays
  Clone ID: MRT4577_88634C.1
gagctcactagtcggtggccgcccttacttttattaggatttcttttgtttttatttaggtttatggaataacttccttcactaggttataagaccgacactttttctatagataatcctggccaaccagctaccaaactggaactcgagaacaaacctatagctggaccaaggccccatagaaaatcagcaactgaaccactaaaggctgacgacccatccatttaaacattaaaac

SEQ ID NO: 172208 - DNA, 176 bp, Zea mays
  Clone ID: MRT4577_88635C.1
gctctgaatttattttgaaaaagaactaaacttcacttgcggggattttagttacctcaaatcacaaaagggtttgtttaccacaaattggactgacaacagggccattagtccaagaccttcaatgcaataaacattttgatctaaaaacaacttgggaacgtagactaattttc

SEQ ID NO: 172209 - DNA, 1380 bp, Zea mays
  Clone ID: MRT4577_88636C.1
cattgggaccctcgaggccggccgggccaggttcatacggatgtaataaacacagctcgccgccgccgagtagctgctcttcgtttctttccagttccagctgaaagccttctcgccgtacccagttctgttcttgtatctgttgtttctggtctctgtttcgatgccagttttggttcggttctaggctgctagctgttgattctgctttctgtttcgcttctgtttacgacacctgaaccagtttttggtaccggtgggggagcactgtcccaatggctggccgccgttcgccgtcggcggatcccggtctcggtcactgcgaagctcccgaaatgagatccggtggcgctttagagccctcgtccgttccaatacgcagtcggatgctgggttacgctcgcctctaaatctaagcttattatttatgcctttgcttcgtattcgtcagatctgatttcgtatttctgtctcgaccgaaattttgcgcggtgcagtgattataaaaacattcctcgtactgatgggtcatcctcgtgaacgactcctatacacccatagaatctgagcaccagggttttagcccggtaccccgaatcccgctcctccgccgcctcgcgtccaccctttctcttggcgcgctccgatccaagagatggcggtgccgctgctgacaaagaagatcgtgaagaagcgggtcaagcagttcaagaggccccatcttgaccgctataagtgccttaagccaagctggcgcaggccaaagggtattgactcccgtgtcaggaggaagttcaagggatgcaccttgatgcccaacattggttacggctctgacaaatcaaccaggcactacctccccaacaagttcaagaagtttgtggtgcacaatgtctctgagctggagttgctcatgatgcacaacagaacctactgtgccgagatcgcccacaacgtttcaaccaagaagcgcaaggagattgttgaacgcgccgcgcagctcgacattgtggtcaccaacaagctcgccaggctccgcagccaggaggatgagtagtctggtttcttgtcataacggccaactagatcctgccattcccggctgtaggaaactactctgctttgtgcgttgttagtacttagtataccagacattttctacatttttggtaccagtagcgaattcaatgtggcatattctactgttatcttgcgtcttaattacctgcccctcatgttttcattggtgtcgtatgtcatccttgcgcgtatggtggttttgcttattttaaccagtctatgggtagcaaagggcttgttgtatggttgcatgtgaagtttggtaaggtttgctaaaatgatggatttgtttgccctctc

SEQ ID NO: 172210 - DNA, 627 bp, Zea mays
  Clone ID: MRT4577_88637C.1
tcggccgggggtaccccgaatcccgctcctccgccgcctcgcgtccacccttcctcttggcgcgctccgatccaagagatggcggtgccgctgctgacaaagaagatcgtgaagaagcgggtcaagcagttcaagaggccccatctcgaccgctataagtgccttaagccaagctggcgcaggccaaagggtattgactcccgtgtcaggaggaagttcaagggatgcaccttgatgcccaacattggttacggctctgacaaatcaaccaggcactacctccccaacagaacctactgtgccgagatcgcccacaacgtttcaaccaagaagcgcaaggagattgttgaacgtgccgcgcagctcgacattgtggtcaccaacaagctcgccaggctccgcagccaggaggatgagtagtctggtttcttgtcacaacggccaaatagatcctgccattcccggctgtaggaaactactctgctttgtgccttgttagtacttagaataccagacatttctacatttttggtaccagtagcgacttctatgtggcatattctactgttatcttgcgtcttaattacctgcacctcatggttgaaaaaaaaaaaaaaaaaagcggcc

SEQ ID NO: 172211 - DNA, 139 bp, Zea mays
  unsure (1)..(139): unsure at all n locations
  Clone ID: MRT4577_88638C.1
tctgtttactnaattgttccatcctgactctcattgccataaccatagtatccactacaggcccagggcatgtagtggatactatggttatggcaatgagagtcaggatggaacaattgagttaaacagaggtcctaga

SEQ ID NO: 172212 - DNA, 1112 bp, Zea mays
  Clone ID: MRT4577_88639C.1
ccggccgggatccgactcggttacaacagtccacatcccagcagttcgtccgctagggttttagcccggtaccccgaatcccgctcctccgccgcctcgcgtccacccttcctcttggcgcgctccgatccaaggttcctgccgcctcctcgtcggcgaaagtctccctctattttcctcgttccttcgctccttgttccccgtctcacgtctccgcgtttgctgttgcctgtttgtgatcggtgacggagcagagatggcggtgccgctgctgacaaagaagatcgtgaagaagcgggtcaagcagttcaagaggccccatctcgaccgctataagtgccttaagccaagctggcgcaggccaaagggtattgactcccgtgtcaggaggaagttcaagggatgcaccttgatgcccaacattggttacggctctgacaaatcaaccaggcactacctccccaacaagttcaagaagtttgtggtgcacaatgtctctgagctggagttgctcatgatgcacaacagaacctactgtgccgagatcgcccacaacgtttcaaccaagaagcgcaaggagattgttgaacgtgccgcgcagctcgacattgtggtcaccaacaagctcgccaggctccgcagccaggaggatgagtagtctggtttcttgtcataacggccaactagatcctgccattcccggctgtaggaaactactctgctttgtgccttgttagtacttagaataccagacatttctacatttttggtaccagtagcgacttctatgtggcatattctactgttatcttgcgtcttaattacctgcacctcatggtttcattggtgtcgtatgtcatccttgcattggtgggcaattcatggccgcgctgggtgcacgtacggtggttttgcttattttaaccagtctatgggtagcaaagggcttgttgtatggttgcatgacaagtttggtcaggtttgctaaaatgatggatttgtttgccctctaccatttgggctgttgctggctagcgcacaacactactggataggttaatgcaagtatgcaatgtactctctattccacgtacagtttttttaatgcaaaa

SEQ ID NO: 172213 - DNA, 358 bp, Zea mays
  Clone ID: MRT4577_8863C.1
ctcttttttccctggctccctgcgatgcgatctgggggagagcgatttgtaaggcccctgcgagaggctgcctcgtcgggcctagggacatgaccaaccccagttctatggtggagaggagtatgtgctggaatcgatccaatcaggcagcactgacaatctacagggtgtacgtcagagagaggctaccgcagctgtacagagtgatgaaaaggacctgaatgttgggctccgatcttgctcgcaaattgagaccctgaagaagcaccgcgttgggattaacatagcggaacctagtggcccatcagtaattaccgctcgcctcccggatgacacagagcagctttgctatgaacga

SEQ ID NO: 172214 - DNA, 847 bp, Zea mays
  unsure (1)..(847): unsure at all n locations
  Clone ID: MRT4577_88640C.1
gtgtcattctgccgctctccatagtccatccggtcgcggcgaagctcggccagacggccaccccaatgccgtcacggtcgggctcccggggcaggcggccgcggccggccccagaggtggctgctcccacggctgtacaagtgagctcgtccggctcgagtgaggaagggagcgatgaggaggaggagaggagcccgggcggctctgccagcaagtataaggcggcggagagtgaagccgaggcggaggacccatgccttcccagctgccccatttgtatggtcgtgtggaccgctgatggtgcgcatcgcgtgagttgcatcccttgtggacatgtctacggcagacattgcttagagatgtggttactgcagtacggcaagaaaaaggcaccgtgtcctcaatgtggcaagagatatacacagaacaacatcatcaacctctatgtaccagagattgttgttcccaataatgatcttgaaaatcaagtattgtccttgagagagagaaatgaatatcttgagaagcaacaagcaaaattacttgaggagataaaagagcataaggtaccacacagatgaaatattgtctcagtaaccgaattgaccaatttctctgaggaaacatgggtgactccttctgataggcagattatgttgcaacaaaatgtaatatatgaatcaaacaaaaagagacagagagtggcagagcagtcatcagatggaatactangggctgagctaattgcctcacatacaaaggacattgacccacagcatctgtcaagttttgctcttcagaatgagtttttggtcgatggagctcgggtcatgggtatagatgcatc

SEQ ID NO: 172215 - DNA, 907 bp, Zea mays
  Clone ID: MRT4577_88641C.1
tagcgagcggccgtggtcgtttttttaggtggctgctcccacggctgtacaagtgagctcgtccggctcgagtgaggaagggagcgatgaggaggaggaggacgggaacaagggatccggtgacggtgcgaggagcccgggcggctctgccagcaagtataaggcggcggagagtgaagccgaggcggaggacccatgccttcccagctgccccatttgtatggtcgcgtggaccgctgatggttcgcatcgcgtgagttgcatcccttgtggacacgtctacggcagacattgcttagagatgtggttactgcagtacggcaagaaaaaggcaccgtgtcctcaatgtggcaagagatatacacagaacaacatcatcaacctctatgtaccagagattgttgttcccaataatgatcttgaaaagcaagtattgtccttgagagagagaaatgaatatcttgagaagcaacaagcaaaattacttgaggagataaaagagcataaggtaccacacaaatgaaatattgtctcagtaaccgaattgaccaatttctctgaggaaacatgggtgactccttctgatgtactctattacaaattaaattgagcaatactttctgtgcataaacccttacacgctcagtagagggtcatgttcagtcctttatgtttcctaatatcacctgcaaaggcagattatgttgcaacaaaatataatatatgaatcaaacaaaaagagacaggtaagcactagtatcacttgattttaacgattgatcgttgtaatagatgctttattgttaacatttttacaatcaactgtgaagagagtgacagagcagtcatcagatggaatactaggggcagagctaattgcctcgcatacaaaggacattgaccacaa

SEQ ID NO: 172216 - DNA, 303 bp, Zea mays
  Clone ID: MRT4577_88642C.1
cccacgcgtccggtgggcctcagcgacgacagctatgcgagggggccgtatgcagcggcgcatccactgcagttgagagggtgcgcgaagaaggcgatctctccccaagacgcggctgacgacatagtgcatctcggcggccagccgtggaggcggggtgctcgtcagactgtgttccatcttatgataaaccctgacgatgtcgaggaatgtggaggcctcgttgctgatcgaggagccgccgtcgcccgaggtcggagagggagtggatggtgatgaaggggacgtcgtgctggtgagcga

SEQ ID NO: 172217 - DNA, 333 bp, Zea mays
  unsure (1)..(333): unsure at all n locations
  Clone ID: MRT4577_88643C.1
aaaagcgcttcccgcgtccggnatcttttccgcagctagagcggagctccgagtcgcaggagacccttgttcctgctctgctctgccgttgttgcgtgagcatgacggcagctgcggtctcagccctacctgtactgggtcagactcgggttgttccgcttaggggtccacgtccatgggctggcgaatggggtggggggtgtggcatacgctgctagtgtggcgttccaaggggtacccaattggggcccggggattatttttaggcgctgtgtgttggtggtggtgacttttgttgtccggtctcatgtgcgcacttccgtacaggtgctc

SEQ ID NO: 172218 - DNA, 457 bp, Zea mays
  Clone ID: MRT4577_88644C.1
ttatttttttttttttttttttttttttttaatttttttttcccttcttttttttttttttcttgtttttttatccaacctttttctttcaaccttccatccccaaaatacttttgctaacagttctgcccccggaaacaaacccccggggggggggggatcctgaacaaaaaataacaaaaatccccatgaccgacccatcaaaaaaaaactggccctccccacccgaaagaattggaccctgcctccagataaaaccaggaaaaggcccacaaggccaacttgcccaattaatccaagcctggcctggccacaagtctcgcaccccggaacaacaaccagccatccaccggaaaccaccctggcaatagacccgcccgcgccggccgcccaaaaggccaatcccccgctcacggggggccgctcctagggctcccgagctcggtccccacctggc

SEQ ID NO: 172219 - DNA, 1855 bp, Zea mays
  Clone ID: MRT4577_88645C.1
ttgggtacctcgaggccggccgggtcaaacgaagaaaggcttatggtggatacctaggcacccagagacgaggaagggcgtagtaagcgacgaaatgcttcggggagttggagaccagctctcctgcttcgcggctgtctctttcatcggccacccacggcggcggagcatagcactgatagcagtaagcaagcagcggagacgccggagagcggtgaagaagcatggagatggagcagctctgctcgctgctccgcgacctcgacgcgctcaagcagcatcccgacgacctcacttccaccatcgatcggatgcgggagcggctagtggcgatgatgaatccggcagccggtgccgcttctcgatccaagattaaggacatgagtgcagaagtggtggacaacaatccctacagcagacttatggcgttgcaacggatgggcgtagtggagaattatgagcgcatcagggactactccgttgccatcgttggcataggtggcgttggtagtgttgctgcggagatgctcactagatgtggaattggacgactgttgttgtatggcacgagcacggtggagttggctaacatgaataggttgttctttcgcccagaacaggttggaatgaccaaaacagatgccgcgtgacagacactttctggaataaatcctgatgttgtgttggagagctactcattgaatattactacagtcaaaggtttcgaaacatttttggcaagtttaaaagcacaaagttctcatgagcgtagcactggagttaatcttgtcttgagttgcgtcgataactatgaagctcgtatggttgtaaatcaggcatgcaatgagcttggtcagacgtggatggagtctggtgtctcagaagatgctgtttctggtcatatacaactgctggttcctggtgaaactgcatgttttgcatgtgctcctccattggttgtagcatctggagtggatgagcgtacacttaagagagaaggtgtttgtgctgcctctttgccaactacaatgggtgttgttgcgggtctcctggtccagaatgctctgaaatatttgttgaactttggacaagtttcccgttacttgggatataactcacttaaggattatttccctgcaatggaaatgaggccaaatccacaatgctcgaatccagcatgtgttctcagacagaaagaatatatggaatccaaacctgctagagatgcagcagcgaagactaagatggaagctgaagcatccacagaaaatgaatgtcctgtccacctagacaatgagtggaatattagtgttgttgatgatgaagaaactgagacatcaagcattcgaaacactccagatatcctaccagaaggtcttgtccgtgagcttccagacgctgattcatacgcaggaccagctgctccagtgagttccagcgctattgatgatgatgatgatctcgaggagctccagcgtcaacttgatgccctaaacgcatcttagccttaataagtaggctagttcatctgcgccttaattggcttctccccaatcccaacttggatggggaagatgatttacatactgtttttcggagttggtaaattcatagcaccgtggtaaaagaaaaaggagaaaatgatagctatactggttttgggagttttgacttacagttttggttgagatctgagaacatgtgcatgtctgagccagacagctcgtcggtaatggtactaatgtctgaatttttgttgctgttgatattcaaaggttttatctggaataaaaaaaaaaaaaaaaaaaaagaaaaaaaaaaaaaaaaaaagcggccctcgagctccggttattcc

SEQ ID NO: 172220 - DNA, 596 bp, Zea mays
  Clone ID: MRT4577_88646C.1
gccgggggggcccaaaagtttcaaaggcctttaaaaactttcatgacctgcctccctcatggtcttaaggccggcctttttaaaaaaaaaaaaaatgaacctaaattggtcaacaggcctttggggccccccaaacaaaaaaaaccgggcccctcacttggtaaaggaaacctttttttcaaaagggccaattaaaattgccgaccccggaaaacctttaacaggacagcccttggattccgaagaagctttttttatccaaaagggtggtaaaaatcaagggggtgccccaaaaacccccccctttgcttccccctggtcctgattgaaaaatcaagccccttttgcccgaattcaaacactaatccccccatggggccggaggcaatcttttggtcaaccaaaaaaattttggtttccccaagggtatcccgcaagggttccctggggtctttccccccccccctggggggggaaaaaacgggcctgaccacaacctttatttcccccttatggtccctaagcaaaacaacaaatctctccccaagggggtcaatatatttcaacccgcccttggccgccaagacagccaaaaa

SEQ ID NO: 172221 - DNA, 311 bp, Zea mays
  Clone ID: MRT4577_88647C.1
aaaaacaccgccatgaaattttatatcacagcttcggctataacctgaacaaaacgtttagtacacattatatgatcagggaaacaactatgatcatatggtcagatggaaacggggcaaccaatacaataccccaacacgaaggctgaacttaattctagcactcagcaaactcggcctgtttacctaggcattagtctacccccacgctcacgaatggatgtggatgggatcattcacaggctgaaaaaacccccttcgccgcccgccggcagattgatctcccgaggtgagcttacctccctttccgc

SEQ ID NO: 172222 - DNA, 472 bp, Zea mays
  Clone ID: MRT4577_88648C.1
gccggccgggttccgacttcttcggcccacccacctctcctccgcgccttactcctccttcaactccgcccccctctgtcgtgcttcttcagcgccacgcaccaacaaaacaagcaacaggacaactagatttatatactctccatagtagctccttttgacaagaaagaaagcaacagaagtgtcgttcatacatgtaaaaagattaatttgcagcagcaaattataattccacaggtctgaattgtgtgtatatacatacatgtgaaaaaaattaatttgcaaggacagcacctttttgggttgaaacgcgtggaataatagcactgatccttagagacttcatccaacgaggtaattggcacttaccaaagcctgttctccatacgtgtaagactctattggtccgttgcatgatttatgaagactaacattttattgtctctaaaaaaaaaaaaaaaaaaggccccta

SEQ ID NO: 172223 - DNA, 634 bp, Zea mays
  Clone ID: MRT4577_88649C.1
gaacacacaaaagtaatgggttaaagtatttaaaaggctaaataacatattatcaccgcatatcatgcaacggatcggggatgccttacatgtaaggaaaacaggataatgcaactgctacctataaagggttctatcaacgtgtaaccaaagcaagttgagggaagggttacctactacctataaaaggttctctcaacgaagttaatccaaggggcgatatcaatgctttttacatagaaataaacataacacatgcaagacacaaactaagggggacaataaaatgttagtcttcataaatcatgcaacggaccaatagagtcttacacgtatggaaaacaggctttggtaagggccaattacctcgttggatgaagtctctaaggatcagtgctattattccacgcgtttcaacccaaaaaggggctgtcagatacaccagattagttaaaaacaaaaaaggggatagcaggacgtgtaatttaccaagtcggacatgtggaatttttacctgtccttgcaaattaattttttcacatgtatgtatatacacacaattcagacctgtggaattataatttgctgctgcaaattaatctttttacatgtatgaacgacacttctgttgctt

SEQ ID NO: 172224 - DNA, 200 bp, Zea mays
  Clone ID: MRT4577_8864C.1
gaaaggaggccccagcgcttgatatgaaaaggacactgataagcaggtacatcggcgagacccaaacactttaaagctaaacaaccggaggagcaccttcgagagaacggagagagacgttaccaagacggctaacaattattttagtgggcaggccctccaggagggggcaacaacaccaagacgtcttacggcagcta

SEQ ID NO: 172225 - DNA, 766 bp, Zea mays
  Clone ID: MRT4577_88650C.1
tgggtacctcgaggccggccgggccgggctctgtctgactgtctccctccgtccctcgaagcttctctggtttcagacgcaaccccgcgggtcgcgggatcaaggagccagagagcgggacgcagcgagcgttccgccggagatcgagaccgtagctagggtttgaggcgccgggctgcggtggacgagatgtcgacgccggcgaggaagcggctgatgcgggacttcaggcgcctgcagcaggacccgcccgccgggatcagcggcgcgccgcacgacaacaacatcatgctctggaacgccgtcatattcgggccggatgatacgccgtgggacggtggtgagattcccagctctcagctctgagcctctgaccccttctcttatctgttgctcatttggtgcttgctgtgtggtcgttacttgcttgaaggtagtttgattcggaattgtgcaggtggaaccgtagaaattcatggggcgttaagatatttgggtgccacaggaaccgagactcgtctggtacctcgtggctgttttagcttgttcctgtcggttaatctttcatgtccaatcttgggggagcattctgttatgcaattctttagctatccgttggaagttgtcttttggagcatgtcttcagagctgtaggttcgagctgaaattctgtaatggctttagtctcagttaaatcagaaatcgacaaatttagcatggcggtaagaataacgcccactaggctgcagctgtaaatccagtactg

SEQ ID NO: 172226 - DNA, 1878 bp, Zea mays
  Clone ID: MRT4577_88651C.1
gtgctgacgggcctgtatacgctatccttcgtgagcgctgccgtagtataacccggtggtaacccactggcgtaagcattccaccgtgccgtgctacgcgacggacgcggcgcgcggcccacaacccaaccgcagcggcaacaaccgctctataaagcaatccccaccgacctaccggctccggggccaaaaaaaaaaacggctcggtcgcttcgctttcccccaaatccattgcagactcgagctcgcagtagacgagacgacccaagacctcctcaccctccctttgcttcctgcgcaattcctgcggcagcgcctttgtttgtttcaatggacagcgactacattgccagcctgctcatgggctcatccgcccctgcgctcagcttcgccgcggtggacgccgggttcctcgacacgctacgcggcggcggcggcggcgggggcctcttcggggtgcccgcggaggcagggtgtggcggcgggtctccggaggggtcgtcggtgtccgacccagcgtgggcgcgcgctagggactacggcaatgccaggaaacgcaaggcgccgcccacggggtccgccggtggcaaggaggcctgcttgagcaaggttgcggaggccaacggtccggacgggaagaggtgcagagtgggtgccagcgacagtccggtgaagccgaaggaagaggaggctgcggcggcggcggcggcgagcggcgccttggttgaagtcaaagcgcagaagaagggcaagggaaagagctcgaagccggcagtcgaaccgcccaaagactacgtccatgtccgggcgcggcgggggcaggcgactgacagccacagccttgcagagagggttagaagagagaagattagccagaggatgaaatttctgcaggacctagtgccaggatgcaacaaggtggtcggcaaggcactcatgctcgatgagatcataaactacgtccagtcgctgcagcagcaagttgagttcctgtccatgaagctcgccactgtgaacccagagcttgatttcagcaacctatcgacactcctgcacaaagacatgtaccaacagccatgtggtggcccttcggcaagttcggtctttccactggaaagcgccggcgcagcttttccattctgcgagcaggcggatcttttccacagctttggctcgggtggtagcggtagcggtagtggtatggaggatcagtgctctctaagcctgctgctagacacggctctgccccacgcggccagcccacagtttgcttttcaaaagcagcaaagggacttgtgggaggatggcctacagcatgctttgcctacccctactaccggtagcgagcaaaggcaggaggaggatgggcttttagtacccgacccttgatggccagttgcaagctgatcaggcgaaggctgagttctagcccgtccctggtgatctgcaagggctggtatttttgtacataggtggtggtggtaccaagacctgtgtgtgggctgtgtgtttcaagcagagctctcctctgctaagctgaccatcattagagtttaggcctgcgactgcgactgcgagctggaattcattccgtgatactgctgcacgtatgtcacatggcgactcgattcttgccccccatagagatcgtgcgacccatctcgtgaaaaattggagtaggtcgtgtgctaggtagatatggcgcaaatattacatgcgccatcttctgaagctgtactgattattactcctatgtaagaccgctggtggctggtactggagcgatactgtgtcctgtttgttgctttttttttgatcttacgattatgacgaaagtgcaagtatatgaggtttctctcctttagcttgctttgctgc

SEQ ID NO: 172227 - DNA, 250 bp, Zea mays
  Clone ID: MRT4577_88652C.1
ctgttggggagcaaacagcactagtacctttgcccttaggtctcctagcttcaagggcaaattaagaggatcttgtgttgccctctaaatagaggcatagcaaccatgcatagttccatagacctgcatttctaagcgcggagataaatattcaaatccctgctaaagctggtttctacaaaagcacttcacttctgttaggtgggggtgttacttataaacctgacccactatttctggcctcaaaaga

SEQ ID NO: 172228 - DNA, 1948 bp, Zea mays
  Clone ID: MRT4577_88653C.1
gccgagaaaaaatcctcgcccgcaacaccatttccgaacgggtcgcgcccgagcccgatatgcccgcgaagcccaggcccagccagacccaaagcgatgcgacggagatcgtgagatcgcgcgccgcagcctcctcccccgcccccgccgccggcgatgacctccgcagtcctcgccggccggaatgaggtccaccaggcgcatcagcaccaccgccaatgggctggcgcccgcgtcccgctcatgcccaagccgtcctccaaccctaaccctaggcgccaccgcgcgggcccaaaccctatccccagtggctcgccgccggagccgcgggccgctccggccgtcgcggccgagccctcgccgtcgccttcggggcacctgaacttcaggccgtcggaaatgacccccgccgaggcccggcacctccgcgcgcggctcaccagcgagctctgccgcgtccgcgctttcctctcccgcatcgactcgtggcaggacgggcagcgccggcgccggggccccgagccccccgcgcgcggcccgtccccgccgccggcgctggtggaggcgatgcggaagcggtgcgcggacatcctgatgcggctgcggaggtcgaagaagagcgtgtggttcaactcccccgtcgacgtggagggcctcaagctgcacgactaccgcgccatcatccggagccccatggatctcggcaccgtcaagcagaacctcaccgccggccggtacccctcgcacgaggcgttcgctggcgacgtccggctcaccttcaacaacgcgctgcggtacaacccgcccgaccaccacgtgcacaggtacgccggcaacctcctcgcctcgttcgaggggatgtacaaggaggccgtctcgtggttcgagcagcagcgccagcagctcgagccaccaatgcagcccgatttgccgccgccgccacagctcccggtcgtctctgtgccagtgcaagcgcccccgaggatgggtgggggcgggaggaggcccaagcccaaggcccgggagccaaacaagagggagatggacgaggaggagaagcagaagctgagggtagagatcgagaacttacccgaggagaagatgctgaatgtgctgcagattgtgcagaagaggaacagcgatccagcgttcactggggaggttgtcgagctcgatttcgacgagctggatatggagaccctctgggagctcgatcggttcgtggtcaattggaggaaggctctgaagaagagccagcggaactctatggtgaatggcgatgctgccgcggcggtgaatggagacgccatcgatgtgacagttgttccggacgacgacgacatggtcgaggttgctgtcaatccgtccgtggcggtcgagatcggagagtcggctgacgttccagagaaagaaatggaggccgagatggtcgacgattacgtggatataggcgacgagatgccgacagtgaattaccagtcagtggagatcgagagggattccccggcggctgccagcagctcaagcggatcaggaagtggctcgtcttcatccagcgattccgactcggactccgattctgacggggacgatgccagcgccccgcactaggtgtggctgttgttgctgttttatctgactgtactgtaggattagcgatgagtaggtgactgaaaaggttccatttgatgaggcgttttgaagaacggtatagagaagcctgtagggaactcttgttcatgcaatgcaagtggttgtgttcgtctgtgtatgtgtgggtgcagcatttaggttgtcggtacttgggtgatgggtaggtggtagatgcttgggtagattgggaggcttctgtaaagaggggaatataagctggaacaaagaggaaaagtagcaatgccggccggggcatttcttcatgaaaaaaaaaaaaaaaaatcattatgtttct

SEQ ID NO: 172229 - DNA, 399 bp, Zea mays
  unsure (1)..(399): unsure at all n locations
  Clone ID: MRT4577_88654C.1
cgggtcaagcgctacggggcaggggagaaataataggagccctagggcgtggggagagtctnnggacgcggagacttatatcgtgccattgtgaggagaacctanctgcgcatgtgcgccttcctgagatacagaaaaaaaatgtgccanagtgtgtctngtaggtttcgtatgggtngncgatnaatgagtaggctggtctggtttcataggaagggcgagganccttaggtggggctggtacccanggacccctttgtgtgaacgaggaggcaatggtattaggccgggccctttggctactggtccttctgggccaaaaaaaaaaaaagggggggggaaaaagaaaaaaaaaaaaaaaaaaaaaaaaaaaaaaaaaaaaaaaaaaaaanaaanaaa

SEQ ID NO: 172230 - DNA, 187 bp, Zea mays
  Clone ID: MRT4577_88655C.1
cctaacccccacatttgattttcaaaaggacagtctcattcttcattcatacaaggcttcctcaaaaacgccaagggcatattttttattaaaaccccctgatacttgtggaggtccaaaacatggttaatatggaaggttgggtggggacccaaaaaataacctgcccttccatttttatgaaaaa

SEQ ID NO: 172231 - DNA, 415 bp, Zea mays
  Clone ID: MRT4577_88656C.1
acctacggatgcaggcgcacgtaaacttaaaattcgattctagcatgctttcattttttattaacagtttatactggggagggggaagaatcactggggggggagcctactaaacaatcaaaaagttaatagtctactgaaggtgaaaagcaaaaaaagaagaactccataactgaaaagtactgccactgggaattccttaatgaaacaaagcccatatggatgattaatccaaagcaagttaacaaaactaattacaatcaattctacaagaatacatttaatgagttcatagatacgcttgcttacactcacttcaccactcttggagaggtctaatttctgagtgttctttatgtcccatagatctcgcctcttattaatcagcagataatgaatccatacaccaaaaaca

SEQ ID NO: 172232 - DNA, 373 bp, Zea mays
  Clone ID: MRT4577_88657C.1
tatgataaacttcggattctatctctctcttccattcttacgtttccatattacactggaggctttctactcaaatctactaatactactctaatatgcccattggtgttccaaaagtaccttaccgcattccggagatgaataatcaacttcgattgacttatacaatgttatctatctagaaatgacactttttttaggtcaagagattcccttctagatcactactcatattacacgtctgatactatatctcaatacacaagatggacatacccacatgaatttgtacattaactcccctaacgggttgctaatctcaagtatcacacttatagatacgattcatacgtctacacttgatatatattca

SEQ ID NO: 172233 - DNA, 519 bp, Zea mays
  Clone ID: MRT4577_88658C.1
gagataaatctcaatcaatatattgattatttctaggaaacacacgtgggtgtgagggcaccattctcgagtacatcccatatgtaatctgaaaagatggcacctccaacgatgggttgctgcctagacaagacaggcattatcaaagagaactgtttgtatggcaacaattgttgctgctgtaggaaggcggcgaacaatgggttagccactaccaatggattaagtaactgttggcgctgttggaggtacgcaccaaagctcgacacgatcagttggttgaatggaagcagctgttgcaagcaggcaacagggtttggcacatctagttgagtcagagctggtacaatctgttgcaacaattgttgttgcaggaatgtaggggcattgcccacagcgagcgggctaaatgaaagcagttgctgatgctgaacgtaagcggtaaagttcaccatggctagttgactgagcaggggcacaaactgatttagcatgttgctgttgctggtttgcaactac

SEQ ID NO: 172234 - DNA, 602 bp, Zea mays
  Clone ID: MRT4577_88659C.1
gccggccggtcccgaaaagcgaggaataccgcgagtacccttacgcagctagactagcttctattcgccgcaccccagtacctccaggcagggactcgctctttctgctagctacactgcacgccatggccaccacggcgaccgaggcggcgccggcgctcgagcagcaggtcaacgaccacggcaagcacaacacccgtcactccgaggtcggcccgatagcctgctcaagagcgactacctctaccagaacatcctgccacactagcgtgtaccctggtgaggcggagagcatgaaggagctccgtgaggccaccgacaagcacccatggaacctgatgacgacctccgccgacgaggcgtagatcctgaacatgctcatcaagctcatctgtgccaagaagaccatggagatcggcgtgtacaccctctactccctcctcgccacgtggttcgccctcgcggagggctgacgatcttggccatggacatccaccgtgagaactacaagacgtagctgggcctgcacctgcatcaagaagggcggcgtcacccacaagatcgacttccgcgagggacccgcgctccccgtcctcgacgac

SEQ ID NO: 172235 - DNA, 330 bp, Zea mays
  Clone ID: MRT4577_8865C.1
cttcagcccttgttcgtttgcgtcggattgcacgcggaatcgttccagctaatcaaagtctatataaattagagaagcaattcggctagtaatcgttccgactcatcaatccggcacaaacgaacaaggtctcaaggtacttcttgtcttgtataaactgtaaggttgattcttttgtttcaattgaaatggaacttcattggatttgtgcaaggctttttggctgaatttctgaaactgtaattgagatcagggaaagggaatggtgttgggtctgtaatattattgatattaagttgaccatatgcaaatttaacccaaatttggaac

SEQ ID NO: 172236 - DNA, 287 bp, Zea mays
  Clone ID: MRT4577_88660C.1
cttttgcaaaccataattttgctcggagggtattgtaccaatctgaaaaacactcgcaaccagctaatggggtcctcaacctcaaatccacccataaaagttgacactctttctaatcaactatattatcctaaaaggcctcttttcaaaacagttatagccgactgtcttgccaggtcaaactgcactacttttggaagaaaagatgacttcacaagaccagaatatttcaatggacaaaatgcaattgtagcagtcaatgttcatcaggggtttaatcaaaagga

SEQ ID NO: 172237 - DNA, 404 bp, Zea mays
  Clone ID: MRT4577_88661C.1
gatgatcaacatattcttctcttattagacccatcgcatttaacaaacaagagatacgtgttctcatagtaaaacacaacttcacccaaaaaaaaggcctcctcatagtgctttatatgctggggctccagcctgaaacaggcattgatttctaagcctaacgggggtttcaaaccatggtggcatgctgggcgaattgtatgctgaacaggcagggcttcaccttggcggcaaagtatgaccataccgaaccgcgtgatctacatggaagttttggaccagacggcacctttgagatgccggagatagaccttgcgaagatggccctagagcaaattctgacggcgtacctaaaggtacgaaatgtaagttggggccctgtacctaccgggcttctccccctc

SEQ ID NO: 172238 - DNA, 883 bp, Zea mays
  unsure (1)..(883): unsure at all n locations
  Clone ID: MRT4577_88662C.1
gttcaaacgatgctatcccttcccctacgccgccgccgccgcctccttcgcttctgcgctcgccggaaccctaccttcctgcgcctctccatcgctgcctccgcggctgccctctccaccgcccctaccgtcgcttccgccgtcgtcactcccatttccgaccgcctacgcgtcctccgctccctccacgctgtcgcccctgaccaccctctctcccacccgctcccctcatccgcccatatctgcctcgccgcccacctcgctgcccgcgctcgcctcttcgcgcactcccgccgcctcctctcccgcctgcttggtgctggccaccggccccacctcgccgcctccctcgtcgacattcttcaccgcgcggccctcgcgctggggcctcatcgcagcgcgctaccttccgtctttgacaccctcctctccctgctcgccgatcacggcctcctcgacgacgccgtccgcgcccttgcccgcgtgcggcagctgcgggtgccccccaacacccgtacctgcaaccacattctgctacgcctcgcccgcaaccgccaaggcgggctcgtcaggcggctcttcgaacatctgcccgcgcccaacgtgttcacgttcaatatcgtgattgattttctgtgcaagcagggagagcttgtggaagcgagggcattgttcgtgaggatggaggcgatgggctgctcgccggacgttgtcacttacaattctttgattgatgggtacggtaagtgcggngagctgganaaggtgngagttgttggtgtcagagatgaggaagtctggatgtgcagctgatggtgtgacgtacaatgcattgatcaattgcttttccaaaaattgggtggatcgagaagggctacagcta

SEQ ID NO: 172239 - DNA, 437 bp, Zea mays
  Clone ID: MRT4577_88663C.1
gtgctcactagtcggcggccgccctcggtctgtgggtgttttttggttgaaggcgaagacaacggttctcacccaacactgtcgatggagaggcatacccaagttcaccaagaactagacacatgtcatatgccgactgcgttagctgagaccggatctttcgcatgacactgaactgtagagcaggtgtttggtgccactttattcgcctctatgagaaaagcacaagagcggcttcagctcagctaagtgcggatgggataccacaggtttgcgccaattggcataagccaacccccttgaacagatggatggattattaacgctgcttctctggcctgaatgcatggtgtacagctgcgtcgagctcgctcctggaccaggtgaggagctaggtacctatgtagccagctaacacaaaaaaccgttcatgcatg

SEQ ID NO: 172240 - DNA, 700 bp, Zea mays
  unsure (1)..(700): unsure at all n locations
  Clone ID: MRT4577_88664C.1
cgtgggcatctatcccccataagtgnaatctacgtggnagtggnagcgcagcagnananagggagagccgcagtggttgtaatgggttctggagcagactcggagtaatgttcggctgtagctgtgggaataagcgaaatcgggagcggaataataattaacaacaatccgccatgtttagctgtcgatctcgtcgccgtggtgtattctgtcaccgtgtcggttccatgtgaatctgcgcgcccttgtggaaactgctagcgctagctgctggtttcacaatccagccggcgaccgggcggtgcaacgtctcacgctcacggcgtgcggcgcttctactcccctcttcccggcgtgggcccgccgccatggcaacctacgcgccgccggccacgccctggacggagattccgctgtgcctggggctggatgttgtgacctggtccagacagagacagcaatcccatgtcatgtcaccaaccatgcgtggacaagtgccaaggggcacagtggcattggcatccctgacggcgttcacctcgatacagagctggaggtcaacccgggaaggcgtcgtcaattccctgatggcatggttttcgttttctgaatctgacgcaacgtgcctgtgcctctaccaaaacgccataaggaaagctttcacggatgggtggccatggcctgcaagcaaaggacaaaa

SEQ ID NO: 172241 - DNA, 386 bp, Zea mays
  Clone ID: MRT4577_88665C.1
tggctgctcacgacacagcaaccaggacgtgtcgccggcgggttttttttgatttatctgtatgaaaactttcagatataacgctatcggttatttcgatatttgaatactagtcggtatgaaaccgttaaaactattcaaacatcgatatagacctactatcatataccggcgtaggggcgtcctcctaacgtcggtaacggcgagtgcagtcagtgtcgctgtgtgactgtgtgtcggcaagtgagcggcgagcagtaaaaaaaagtacgagagccgagccgaggagggacgacacgagcgcggtgaatgtcgtttgtaggtgtagcgccagcactcgtcgttccactccaccagaagcagtagcttgacttgaccaaggaaag

SEQ ID NO: 172242 - DNA, 261 bp, Zea mays
  Clone ID: MRT4577_88666C.1
cgagtacaagctttttttttttttttttttttttatttttttttttttttttttctttttttctccgaaccaacccacagactgcgggaagtcacaagcacaaccgactaaggcccgacgggcgcccccacggcaaacaccaagtccacccacaggggcccggggccacaggacccgaacgggggaccaggcacgccgggacctggccacgcctcggccccgcgggcaaacgctacccgggcgcaagcccgcacaacagcg

SEQ ID NO: 172243 - DNA, 395 bp, Zea mays
  Clone ID: MRT4577_88667C.1
tcgccggtgtctattcctgctgcttcagctcgtaagcagctgtccgccgttgatgagaatcccaaccggccgcttgtcatggaggaagtccgcatctcgaatctcgacgaggaaccttccgctccagctcccgcaccagcccctacgcccgtgatagcagctcccttcgctgcgcatgccgcggcggttgaccatctcgccctctgctccactggtcggatcgggccgcatgcgcccgtcgatattcctactaataagatactgtcgctacccgatgcatctccagccaacgcgcccgtgttcgctcgccgggtgttttctgccgctgtgcccgccatggtgcctactaagaagactgctactgtcccctgcccatctttagccaaagcccccgt

SEQ ID NO: 172244 - DNA, 480 bp, Zea mays
  Clone ID: MRT4577_88668C.1
aaaagccccctggattcaaaaaaaatggccaaggctggaacaaagacccccaaaacgggggggaaggtaaacggaatttaaaaaacgggccaaaagggtacccggaccataccaagatgttgcgggggaacacaaaaattctatacccgggcaaaacctttccgggtaagggccaggaatttccaggcttaacgggaccatccaggccgaggcctaaacaggttcgggaaaggcacaccatggtttaaacattctccttcaaggccggcccacccctcaaagggcttcgggccccgaagagcgccatggaaccccccttttggagcccaaaaaaaaaagcctcctttgcacccctgagacaccgccctttcaaaaaccatggaggttaaatacttgggaacagcctgtcaccaaaaaagcacaagggccttacgttcggggggtggcggaaaccccccaccttgcttcgggccacagggg

SEQ ID NO: 172245 - DNA, 374 bp, Zea mays
  Clone ID: MRT4577_88669C.1
aaaaaattctactgaaaggcaaaagtgataggctggatataagagacattgcttcacagtgtggtaaccaagagaagggtggaaacttttggattaagttgaacattaatcaaacaggattttatagagtccaatatgacgataaacttgcagctgcacttcaaaatgcattgcaggccaagaagctgtctgtaatggataaaattggcattgtggaagattcactggccttatctatggcctgcaaacaaaccttaacatcgttgctacgtttactgtatgcttaccgcgaggaggctgattacagtgttctttcacacataaatactgcgagtttaagtattgctaaaatatcggttgatgctactcctgga

SEQ ID NO: 172246 - DNA, 684 bp, Zea mays
  Clone ID: MRT4577_8866C.1
cattggtacctcgagccggcctcgaccttatcagcaagggcctacccattgtcttgctagcccatctcaggcatctagttacggttcacatccttatgatgtgcacgtatgttgaggcactcgagaattccaaagattcttgctcgcactatatctcaagtgaagcagcaccaccagaattccccacaccatgatcagatactgaacaaaaatgcgccgatgactatgttgatggcaattcgcctatctttgtgcacaccgaacaagctccatctgctgaaaatgttatcacccagctgaaataaaactataatgaccacaccagactcatgcacagctatgatgacgaaacatacgctgcttatgaggagctattctcaaatgcttgcccctgggtcatcactccgacgcctgctaatatggacgatgctgtaccaaactataaccagaatgcataccggcctcacactgaagctgtatctctatgaaaaatctcactaacagtggctctgtgttattccaagttatccgcatctatatccaactgtaaccattaaacaacttgaccaatatatgaaattggatgaatccacactaaagtgtatcctgatgacatactatgaccaaatgcatgcagatgacagagcaccaaaaatacgatctgagagcatactttgacttata

SEQ ID NO: 172247 - DNA, 390 bp, Zea mays
  Clone ID: MRT4577_88670C.1
agcacacagaagcacggagagaatagtgtgccgactagagctctcaaaatgctcgaacagaatgtcagaagccacggttagagtgatctgactatggacgagcccattcatgatatgcgtcatgatctccatgtaaactgataaggcgtcccagttcacaatgcgatgccgaagtggttcgcacgaagacccacctgcagcttatgtcaaatcaggtgcagaacaatatgcctgtccatcaccaacaaggtaaacggatctatcagtctcagatgattgtatattagattgacgaagtctgatcctccggctcgcagggctgacttccccttgacgcacacgcacactcagtagatcagtgctgatcccaatgcctccagtaaagtcatc

SEQ ID NO: 172248 - DNA, 381 bp, Zea mays
  Clone ID: MRT4577_88671C.1
gctgacaagaccattgggggaggttctgatgcttccaacaccttattgagggagactggcgctgggaaggacgtcccccgtgctactcttgttgaccttgaccccactgacatagatgaggtaaggactggcacctaccgccagctctgccatcctgagcagctcatcatgggcaaggaggatgcaggcaacaacttcgctcgtgttcactacacacattggcaaggacattgttgatctgcgccttgacacgcatcaggaagctttgcacataattgcactgatttgcagggcttcctcggctttaacgctgcaggtggaggaacggtctcaggactaggctctctcctactggagcgcctggctattgactatagcaag

SEQ ID NO: 172249 - DNA, 204 bp, Zea mays
  Clone ID: MRT4577_88672C.1
ccggccgggattgctcgctgcgtcgccgcctccgtcatcgtccttttcctacccacgagcaagcgataatccggccgaagataacatgttgaagttatcacagatcatcctatactaggcgacgagctcctggctaattcattctcctacaaagatctcgaaaacgaaatcctgtggaatgtcgaggcaaagtgaatcacccga

SEQ ID NO: 172250 - DNA, 115 bp, Zea mays
  Clone ID: MRT4577_88673C.1
aattcggcacgaggccccgaggggctgacagtcgagaggcttatcttcagcatgcccgggcgcgtctctatctcctttgcgtaagtctcaacacgccgaattggatatcactctc

SEQ ID NO: 172251 - DNA, 115 bp, Zea mays
  Clone ID: MRT4577_88674C.1
ggcactgctgtgatggggtgggtggagtcgaacgggggggcttggcagccgtctcccagccgggaggtccaccctggtccgactgcgaaactcctacttcaccggagcaggctac

SEQ ID NO: 172252 - DNA, 1746 bp, Zea mays
  unsure (1)..(1746): unsure at all n locations
  Clone ID: MRT4577_88675C.1
cccctttcgctttacgctcttcccctnccancccacaagactccgcggcgccgccggccggcgcccgcttatccgaaccgctcgctgctggctcctccgcgcgcgtgttcgcggcatggccacgcttccaatggcgctctcccccgccgccatttcccccttcaccaccctccccctctactattcttcgcgtcctcaccgccgcctcctcgcccgcttcttctccgtcgcttcggcaccgggcggagcgaaagggcaccgaccggcggcctccgccgttgaggtgggcggcgtcaagatcgcgcgcgaggatgttgtgaaggaggatgacccgacaaacaacgtgcccgacaatatcttttcgaagatcggcctgcagctgcacaggagggataaccatccccttgggattttgaagaacacaatttatgattactttgacaagaacttcactgggcagtttgacaagtttgatgacctttgccctcttgtttctgtcaagcagaattttgatgatgtcttggtcccttctgaccatgtaagccggagttacaacgacacatattatgttgatggtcaaacagtcttaaggtgtcataccagtgctcatcaagctgagctgctaaggcatggacatacacactttcttgtaactggagatgtttaccgtagggattccattgattcaactcactatcctgtcttccatcagatggaagggttccgtgtcttctctcctgatgaatggtcagggtctcgcttgggtgggacagcatatgcagctgcagaactcaagaaaacactggaaggcttggcaagacatctatttggtgctgtagagatgcgatgggttgacacttacttcccatttaccaacccatcctttgagctcgaaatatactttcaggatgattggttggaggttttggggtgtggagtcaccgagcaggaaattttgaaaagaaatggcaggagagaccatgtggcatgggcctttggattgggattggagcgccttgcaatggtccttttcgacattccagatattcgactattctggtcgaatgataaacggttcacgtcccagttctcagaaggcaagcttggtgtcaagttcaagccattttcaaagtttcctccttgttacaaggatatgagtttctggatcaatgatgcatttacagagaacaacttatgtgaggttgtcagaggaattgctggtgatcttgttgaggaggtaaaacttattgataatttcacgaacaagaaaggcatgacgagccattgctatagaatagcctataggtcgatggaacgctcgctcacagacgaggagattaacaatcttcagttgaatgtcagggaagctgtgaaagataaattggaagtagagttgagatagaagcagctagctatgcagttataccatgaactaaattttgcctctctttatatgtaaatccatttaaaatgatttttttgtatctatcaagaaaatgcaccatttgtttctgtaaaaaaaaaatattccgttatgtttaggggagagaaaatagttcccaatccaattggcactcatcaaatcgtgtaactcataaagatgacgtgctgtacgctgctcgctaggtttttttttgtgctgttagtgtaggataagatgactctatgtttgcagtagtcagagttgtgccattgtcctcacttcccatatacatatttcatcgaattaaaaaaaaaaaaaaaaaa

SEQ ID NO: 172253 - DNA, 661 bp, Zea mays
  Clone ID: MRT4577_88676C.1
aatggcctgcagtctgcacaggagggagaaccatccccttggggattctgaagaacacaatttatgattactttgacaagaacttcactggacagtttgacaagtttgatgacctttgcccccttgtttctgtcaagcagaattttgatgatgtcttggtcccttctgaccatgtaagccggagttacaatgacacatattatgttgatgatcaaacagtcttaaggtgtcataccagtgctcatcaagctgagctgctaagggatggacgtacacactttcttgtaactggagatgtttaccgtagggattccattgattcaactcactatcctgtcttccatcaggtacttttgttttgtcgtactcacttaaattttcttaatgaggtttgttttggtaatctttaacacatgtagatggaagggttccgtgtgttctctcctgatgaatggtcaggttctggcttggatgggacagcatatgcagctgcagaactcaagaaaacactggaaggattggcaagacatctatttggtaaatcatttgtagcttgttccttatcatttgaggggatgacgaaattgatccttgtttcagataaactatagaaaaatgtcatctgcaggtgctgtagagatgcgatgggttgacacatact

SEQ ID NO: 172254 - DNA, 1113 bp, Zea mays
  Clone ID: MRT4577_88677C.1
gggtcggcccacgcgtccgcccacgcgtccgcccacgcgtccgtccgcggcgccgcagacatgcgcccgcttatccgaaccgctcgctgctggctcctccgcgcgcgtgttcgcgccatggccacgcttcctatggcgtcccccgccgccgccatcccctcctccgccacccgccccgtcgcctccccttcttcgcgttctcaccgccccctcaaccgcttcttctccgtcgcgccggcgccggtcggggcgaaagggctccgagcggcggcctccgccgttgaagttggcggcgtaaagatggcgcatgtgggacctgagtggtcacatgacatgacatatgatgacactggacacacagacgtggccaagagatcggccctgcagctgcacaggagggataaccatccccttgggattattaagaacacaatttatgattactttgacaagaacttcactgggcagtttgacaagtttgatgacctttgccctcttgtttctgtcaagcagaattttgatgatgtcttggtcccttctgaccatgtaagccggagttacaacgacacatattatgttgatggtcaaacagtcttaaggtgtcataccagtgctcatcaagctgagctgctaaggcatggacatacacactttcttgtaactggagatgtttaccgtagggattccattgattcaactcactatcctgtcttccatcagatggaagggttccgtgtcttctctcctgatgaatggtcagggtctcgcatgggtgggacagcatatgcagctgcagaactcaagaaaacactggaaggcttggcaagacatctatttggtgctgtagagatgcgatgggttgacacttacttcccatttaccaacccatcctttgagctcgaaatatactttcaggatgattggttggaggttttggggtgtggagtcaccgagcaggaaattttgaaaagaaatggcaggagggaccatgtggcttgggcctttggattgggcttggagcgccttgcaatggtcctttttgacattccagatattcgactcttctggtcgaatgataaacggttcacgtcccaggaatcatttgttccctga

SEQ ID NO: 172255 - DNA, 529 bp, Zea mays
  unsure (1)..(529): unsure at all n locations
  Clone ID: MRT4577_88678C.1
cacccgccgggcgcgcgcggagnccaggggggcagagagccgggagcgcgaggacgggccccnncgngggnngggncnncccgccagcncgcgagnncgccacgggncgacacngacaggagcacnccggggggccnggacggaccgcgggggcggnncgcccgggggaagggggggnncggnnccacggaacccccangacccaagcgaagnccgcnccgggaaggaaggagangggccgngggcggncgccggaaccgcncgannncnncananggacgggcgaggaggnnggangagggcgggaagaaangaaccnnggnggcnacagacanagccnggaagaaaaggggggcaacggagaananccagaaagcngggccacgcnnaccaccgagcaganncngcgngnnannaggcggggccagangaaagggggagacnnnagcacacggggcaaagagnngaggcgcacgaaagncgcccgccgcaaaggggagcaagaagnccgcaggccacggggggcgcc

SEQ ID NO: 172256 - DNA, 467 bp, Zea mays
  Clone ID: MRT4577_88679C.1
ttttatttttttttttttttccacattaaaatctggaaatgtaactggaaatttcgggttggccacatacttcatccaaaaaactttgttattgaataacatctaataggcactctaaaagagggctccaccaatgatgcgttgttggtaggaggccgttggttctgtcaaagcatgttgaacaaaggtcaacacttgttgtagttctaagagggttgcggggttatccccaaactgttgctagaaaggcaacaactgttcgctgtgtcaaaaaggaagcacggtttgctgcaactagctggctaaatggtagcagtatttgctgctgaaaataaccaggggggttcagtgcgcccaattggttaaatggaagaaattgctgttgctgacagtaggcagaacctacctgcctaaatggtaataggtgttgctgccaataaccagcagggttaactgtaaaccgttgg

SEQ ID NO: 172257 - DNA, 284 bp, Zea mays
  Clone ID: MRT4577_8867C.1
ggggaccataacactaccattttttttttgccctgaactgaacgagtgaacagcttttaggaacagcatactgttttacagcattaaaaaaacgcatttttcttaacaccccctactaccatgcatgaactgatgcacctcttttaatttaatccagccaaaaccacttggccctgcacctaattaccgttgttacttgatctccactactggcacctacagtacaaaaagctactaggcctagctttttagctgttttttttgggcccggggcaggccaccct

SEQ ID NO: 172258 - DNA, 558 bp, Zea mays
  Clone ID: MRT4577_88680C.1
accaaaactttttattatttatattttttcctcttatacaaacagaaacagaagaagaacaattccaaatacgtacagaaaacgtatatgtgagtctaaatctaattagaaaaaaaactggggggctgtcaaaatataaaatgggtgttttgcacacgtacgtacactacgtacgggtgtgaacaccacgggttgttgtgatggtggcagtagtaaccgtaataacaagggcagtaatacggcagcgggtcgacgaccttgggtccctcgggcgggttcttgtccttcacttcctccaccttgaggatgtcggcgtagccgagcttcttgcgcaggcacatgaccaggcagacggtgtcgacgtccacgccgaccaccaccagctggtccttgccgtcgccggcgatctccatcgagctgacgccgtccgttctggcgaccagcaccatggccttggaccggctcttctcagatggcatgctgagcttgatcactatcttttgcttcgtcatgccgggctgctgaatgcgtacaggtcaggtatacgcgcgcgctgct

SEQ ID NO: 172259 - DNA, 336 bp, Zea mays
  Clone ID: MRT4577_88681C.1
cagagggaaaaatttggggccttggggcctttaacaccacctttttctatttgtttcacaacttacaacgtcccaaaataatttaaaaactgtgcccttctctagaccctttcctgatctttaaaagagaactattaccccttccagtgcttctattcacttcaaaaaaccataccatgttccgtcaagtacaaggtcggtcctcattttttccttccaaggaactaccctattttatggtggggctcccctcctcaattaattttatttataagaaatttgtggacattaccaaggaagatttggatttacgtgataacaatgaggaaagagaga

SEQ ID NO: 172260 - DNA, 842 bp, Zea mays
  Clone ID: MRT4577_88682C.1
attgggtacctcgaggccggccgggaactgcaatcgcaaacaacagcgatcagaccaggtagctgtttcctcacgagccggacgcgaacacgcagctgtttcctctcttcctcttcgccctctgctcctccgcagcagcgcgcgcgtatacctgacctgtacgcattcagcagcacggcatgacgaaggtaactaacggactatagcgaactggcaaaccctacccttccagtgtctctctgctccttcgttctgcatgccctgctcgatatcgctctctgtgtccccgtgctcatcgctctgctcgccgtctcgttgttattcgcagcaaaagatagtgatcaagctcagcatgccatctgagaagagccggtccaaggccatggtgctggtcgccagaacggacggtaagcatatacgcaaaagcatatgttccacacgctttaataacgcggttttgttggctggaattctaacgatccctcccatgtaatctgcaggcgtcagctcgatggagatcgccggcgacggcaaggaccagctggtggtggtcggcgtggacgtcgacaccgtctgcctggtcatgtgcctgcgcaagaagctcggctacgccgacatcctcaaggtggaggaagtgaaggacaagaagccgccggagggacccaaggtcgtcgacccgctgccgtattactgcccttgttattacggttactactgccaccatcacaacaacccgtggtgctgacaaccgtacgtagtgtacgtacgtgtgcaaaacagccattttatattttgacaggttgccagttttttttttccaattagatttagactcactcact

SEQ ID NO: 172261 - DNA, 111 bp, Zea mays
  Clone ID: MRT4577_88683C.1
cccacgcgtacgctgtgtcggatggtgtcactcctgtagcccccggtgctccgggcgtgcgtgatgtcgaggtcttgggacctaaagacactctcagggccagggatgtgt

SEQ ID NO: 172262 - DNA, 681 bp, Zea mays
  Clone ID: MRT4577_88684C.1
gccggccgttccgggcttttttcttcttctcttcattctttcctttgtatttatcaaaatgactgaaaaattcaaaaaaaatcaacacgtatcaatcaaaaaatcaagaattggttctctcttgcttggtttattcaccacatttatcgtattgggtgccatcatacttgaagccgatagtcgaagtaaaggtatcaaatcgcctgagcagtggtatggaataatgaaaagtcatccatatgaacgcaagctatctgatctccgttcgccttgtcccatggtcaatactttagccaatcacggttttcttcctcgagatggtcgtgatgtcaaaccgagtgatatctataatgttctctcgcttcttcgtattcctcctatctttagtgtcggtatcatagcttttgcgtattccaaatataatgaagcagttccagacaagcattcactttcacaatttggctttactgataaaatcaatctaaaccaattgagtgtttatgatgtacttgaacatgatgtgtctcttactcgctatgacaccgctttacccccacacaataccacgtacctggggctgaactcattgaacggatgattcgtttaatagaggtggattataccaagaccggaaaccaagaatactttacttttgaaaatggacaccacgccagaaagctg

SEQ ID NO: 172263 - DNA, 1043 bp, Zea mays
  Clone ID: MRT4577_88685C.1
cgagcgtgcaagcgctgctgggctggtgtcagtcacctgagcaaggaagagagatggccacgctgcctcgcgagggcgccgcggcggcggactccgaccagcttttggtagaagcacatggctctacacgaacgctgattttgaataggccaaagcagctcaatgcactctcctctgaaatgattaaaggtctcctatggtatttcacagcttttgagaaagatgatggagtcagattgttgattatgaaggggaatagaagagtattttgctctggaggtgatattgctcaatgtgcccggtgtttatataatggaaactggaaatgggtcgatgatttcttccaaaatgaatatttgctaaattacatcattgcgacttacataaaaccatcaacaaatgcttctccaaaaggacagttgaagaaatcatagatgctcttgaacaagaaatctcaaatgtttcagacaaatgggttgctgcaacaatcaagtccctgaaaaaggcttcccccaccagcctaaaaatttctctgagatcgataagagaagggagaacacaaactcttggggagtgcctgcgtcgggaatatagagtggtttgccatgtcctgcgtggcaccttcagccgagacttgtctgagggatttagggctgtgctactagaaaaagacaacaagccagagtggattcctccaaggttggaacaagttcctgacgaggcagttgagcaatatttcttgagaattgatgatccccagtgggaagatctgaacctgcctgcgagacttccccaccgaagaaatattgagtccaagatttgattgaggtcttggacgaagagtgagcctcggtcaggataactcgtcaactcatgtttgaagttgtgtgcggaatgttgacgacgattgataaataataaacgcggactgaatatatgtcttataagttcacgtttatcgctaaataatttttgttgcttttgtgtgaagttgtacctgttagccttgttcggttacagggatgaaattctaccatagatat

SEQ ID NO: 172264 - DNA, 423 bp, Zea mays
  unsure (1)..(423): unsure at all n locations
  Clone ID: MRT4577_88686C.1
cgggggtttttttttttttttttttttttttttttttttttttttttttttttttttttttttttttttttttttttttttttaaaaaagaaaaaacaaactcggttttttactaaaccctttggttttcacgaggactttggggggaacccccccggttggggggtttcggacgggggcggcccctcaacccttttatagggggggggctttaaaccccggccagcttttttacttccacaccccctcaaaggatttttaccttaaccagataaccgggggggttccttttaatagggggggggccgcggggctaatcaattcggccgaagggggggcccaaactttgggcccccctgggggccctggctcaggcccgggggtgnggaatgcccccttttcctcccactgggccttaggggc

SEQ ID NO: 172265 - DNA, 318 bp, Zea mays
  Clone ID: MRT4577_88687C.1
caactcaccaaaattcgcccttaagcagtggtaacaacgctgagtacgcgggaatgccctgtgattcacccacaggcattctcccttgggacttttgatggtacttattagaaagatctgctgccttctgttgtatctttatcccataagaactgtgagaccaaatcttttcgatgcccatggtatggtagcaaaaattagactttaacttatccgatccaataattgtccgttgagcttattttttcttcggaaaaaaaaaaaaaaaaaaaaaaaaaaaaaaaaaaaaaaaggccctctgcgttgttaccactgctt

SEQ ID NO: 172266 - DNA, 1833 bp, Zea mays
  Clone ID: MRT4577_88688C.1
cattgggggcctcgaggccggccgggaccagttccgcagaataaacgagcgtgcaagcgctgctgggctggtgtcagtcacctgagcaaggaagagagatggccacgctgcctcgcgagggcgccgcggcggcggactccgaccagcttttggtagaagcacatggctctacacgaacgctgattttgaataggccaaagcagctcaatgcactctcctctgaaatgattaaaggtctcctatggtatttcacagcttttgagaaagatgatggagtcagattgttgattatgaaggggaatagaagagtattttgctctggaggtgatattgctcaatgtgcccggtgtttatataatggaaactggaaatgggtcgatgatttcttccaaaatgaatatttgctaaattacatcattgcgacttacataaaacctcaggtttccattcttagtggaattgtcatgggtggaggagctggtgtttcaatacatggaagatttcgagttgccactgataacacggtatcttctacaaatatgtcccaaatttttgcaatgccagaaacagctctaggcctctttccagatgtaggggcctcttattttctatctcggctaccagggttctatgattgtgttagctgatagactgttgacatatctttctccaggagaatatgttggtctaactggtgccagattggatggtgcggaaatgcttgcctgtggcctggcaactcattttgtcccgtcaaagaggttgccattgcttgaggaatcgcttaaaaagctggacacgtccagtacttttgctgtgtcgggtattatcgaccagttttcacagaggccattagtgaaagatagcagctctttaaataggatggaaaccatcaacaaatgcttctccaaaaggacagttgaagaaatcatagatgctcttgaacaagaaatctcaaatgtttcagacaaatgggttgctgcaacaatcaagtccctgaaaaaggcttcccccaccagcctaaaaatttctctgagatcgataagagaagggagaacacaaactcttggggagtgcctgcgtcgggaatatagagtggtttgccatgtcctgcgtggcaccttcagccgagacttgtctgaggcaaatatgaaacattttgcacactgttcatctaatcatctccgttcaagctctctgtacgctgtcgtttttgtgggacagcaggccactgtacctaacatctgattcttgttgcagggatttagggctgtgctactagaaaaagacaacaagccagaggttggatagtttcatatttagcacattcagtaaaatttgttgttgagagctgcgactttggatcatgggtgatcttaatcggttgattcttgcagtggattcctccaaggttggaacaagttcctgacgaggcagttgagcaatatttcttgagaattgatgatccccagtgggaagatctgaacctgcctgcgagacttccccaccgaagaaatattgagtccaagatttgattgaggtcttggacgaagagtgagcctcggtcaggataactcgtcaactcatgtttgaagttgtgtgcggaatgttgacgacgattgataaataataaacgcggactgaatatatgtcttataagttcacgtttatcgctaaataatttttgttgcttttgtgtgaagttgtacctgttagccttgttcggttacagggatgaaattctaccatagatataattcgggtctagattggatgaatcgatacctcacccaatcatatgtaagattaatccatcatttatcatcacctccc

SEQ ID NO: 172267 - DNA, 966 bp, Zea mays
  Clone ID: MRT4577_88689C.1
tttcactccccacctccctcgcggatcactcgccgccgccgccggtatctcattcgcccctctcctcccttcctcgagtgggactcttcccgtgcccggaatccttacccgatccgtcgttctgcaggccgcagccatcgccgtgatgctgtccctgtcgagggcgatcgggaggcggctcttctcgtccgccgaggccgcgtcgacggctgcggtgaggacggcgcagaacccgctcgaggagttcttcgaggtcgagcggagcaccgaggaggggcaagcctcctccccactacggtcgcagctggaaggcttctgaactgcgactaaaatcttgggatgaccttcagaaactgtggtatgttcttctaaaggaaaagaacatgctaatgacacagcgtcaaatgctgcattcagagagcatgaggttcccaaatccagaacgaatttccaaggtaaagaaatcaatgtgccggataaagcatgtcttgactgagagggctatagcggagcccgatccaaggagatcttcggaaatgaagcggatgataaatgccctgtgattcactcacaggcattctcccttgggacttttgatggtacttattagaaagatctgctgccttctgttgtatctttatcccataagaactgtgagaccaaatcttttcgatgcccatggtatggtagcaaaaattagactttaacttatccgatccaataattgtccgttgagcttattttttcttcggaatgtgattccaatttagcccttaattgggttgccaatccaactgctcgattgagcagcgatgctggaattttacccctctagggatccgtagtcttgcacttatgcggcattacgactccaacaccctcatacagactgtgcaatactctatttattttaaattataagatgttatatttctttctaaaaaaaaaaaaaaaaagcggccttag

SEQ ID NO: 172268 - DNA, 278 bp, Zea mays
  unsure (1)..(278): unsure at all n locations
  Clone ID: MRT4577_8868C.1
ccctaaaactcancagcagnggggctttttataaaattttttgggtttttaaccctaacccccagattttcaagtcatgcgagccaaacgattttccactgcctgacagtccaccacgaactttagaagtaaactggagacttacttcctctgacacttacgctacaggctgtgtgactgatgaaaggtctcactcagccactgcaaaaagcgccaaaattgccccaatggaagacgcttgaacggaatatacagccaacaccgataacttgaacact

SEQ ID NO: 172269 - DNA, 373 bp, Zea mays
  Clone ID: MRT4577_88690C.1
aatatatgttgttgagaggaacaagacatcgatcactcaacccccccatccaattctttcagcgttaagctactagcataggaatatatcctgacgggcgggcacagcccgaaaaccaagaaacccaaggaaaaacagaaacatactgagccagctataataccggaatcataccgaaacgaattgcatcttcattataactaccagctttgaaaactcaaaacgagcccacttgcatctaaactcagcatgccggtagaatccactatccatagaatacttctttcttggggggaacaaagaaataggcgggagtgcacttgaccttactcgatcttgaccgatgaggaaatcaggcttgtgaacaggaagc

SEQ ID NO: 172270 - DNA, 769 bp, Zea mays
  Clone ID: MRT4577_88691C.1
gctcgaggcggtgcgtcaggtggacgttgtcatctgcgcggtgtccacgaagcaggtgctcgagcagaagcctctgattcgggctataaaggaagctggatgcgtgaagagatttattccggcagaatttggagcagatccaacaaaggttcaaatttgtgacatggattatggcttctatgagaagaaaattgaaatccgtcattcaatagagagtgaaggcattcctcatacttacatatgctgcaacttctttatgcgctatttgcttccttcactggtgcaacctgggctagatgctcctcctagagatgaaatcaaaatatttggtgaaggaaatactaaaggtgtttttgttaaagagaatgatgttgctaaatttacaatatgcaccatagaggatcccagaacattgaacaagacgttgtatctgagacctccaggaaatgtcttctcaatgaatgaattggctgacctctgggagtcaaaactcaagaaatccctgaaaagatgctccatttcccttgaagatggatttaatctttatatattcagcgtttgttaagggtgaccacacgtattttgaaattgacttgtcaatggaaggaactcaactgtatccccatgtaaattatacaacagtgaacgagtacttggatactctagtttaggatatttgttcggtttatatctttcttgtaataagtcagaaataatgccttttttgtttctgatattttgatgaatgaattgtactgctatttggacg

SEQ ID NO: 172271 - DNA, 495 bp, Zea mays
  Clone ID: MRT4577_88692C.1
cacgcctgcgtgtactgggctcctattacacggtcgaccttagcgttcgtgcgctgcttgcgctttatgcgagcgcaacatcagcgaatatttgtcatttgttggctacactatgcgggacagagggccccattttctactacctgttacttgaatgggataagatacgcccctctaaccaagggtatctgcttcaacaagcaatggctgataaagtataactgcatccatggcaccaattgctgctcttcctgagaggcatgtacaatgcatacctctgatacagcattaacaacctgttctacctgctctgagtccccataacatggtgaactcctgccgtctacttaatgacagcagttgcttgcattaaacccacttgctctgcacaacttagttgctaaccactcgcacaaactgttgcaacaattgttgtcagaggtctgtcaactaattatggagaaccctgccgcttaactaaaacagctacaactg

SEQ ID NO: 172272 - DNA, 314 bp, Zea mays
  Clone ID: MRT4577_88693C.1
atcgccggtcaccaacgtctaagggaaactcatctacttgggagatttattctcgatgcttgttttcggcaaggtcttgaatcggtgtgcatcaaaaggttgaagctgacgctgtcgttgttgctgttttggccttggcacaattggacttgcagcaagtggataggattttgacttctgagtttctcttttagcgacatcaaaggttcctgcaatagtggcatggacgaccagttcctgggtgaagctgtttcgagcaacaactgcattcgaagtggcaaaggttttgaaccctgagcttgttaaagagccat

SEQ ID NO: 172273 - DNA, 1628 bp, Zea mays
  Clone ID: MRT4577_88694C.1
aactcgtccaagcgtccaagaaaaggaaattgaatctgctaaattctccggaacccccgttgccagccggcgatcgcgccgtgggatctcatcgaacgaagcgggcggcgacggcgatgtcaagggaggcggcgaggacgaggagccgggtcctggtggttggcgccaccggccgcctcggtggaaacatagctcaggccagcctcgccgcgggtcaccccaccttcgcgctcgttcggccccaccacttcgcacgccccgattcccccgtgctcgagccgctcgtagccgccggcgccactctgctccaggggtcactggaagattactcgagcctgctcgaggcggtgcgtcaggtggacgttgtcatctgcgcggtgtccacgaagcaggtgctcgagcagaagcctctgattcgggctataaaggaagctggatgcgtgaagagatttattccggcagaatttggagcagatccaacaaaggttcaaatttgtggcatggattatggcttctatgagaagaaaattgaaatccgtcattcaatagagagtgaaggcattcctcatacttacatatgctgcaacttctttatgcgctatttgcttccttcactggtgcaacctgggctagatgctcctcctagagatgaaatcaaaatatttggtgaaggaaatactaaaggtgtttttgttaaagagaatgatgttgctaaatttacaatatgcaccatagaggatcccagaacattgaacaagacgttgtatctgagacctccaggaaatgtcttctcaatgaatgaattggctgacctctgggagtcaaaactcaagaaatccctgaaaaggttatatgtaacagaagagcaacttcttaaagaaatccatggtaaattgaaactgctaaagatgctccatttcccttgaagatggatttaatctttatatattcagcgtttgttaagggtgaccacacgtattttgaaattgacttgtcaatggaaggaactcaactgtatccccatgtaaattatacaacagtgaacgagtacttggatactctagtttaggatatttgttcggtttatatcttccttgtaataagtcaaaaaataatgtttttttttttgtttcgaatggagcattaaaagaaggggactgatggcccccctccgtggttgtgtctacgaaaaagagttgaaaaaacatgaagaaagtgtgaaacctctctttcctagttgcaaactgcaagtcattttctgaaagacttctgtttcatgcataaatcatctactctcattcttcctttctcctcattgcagatgctccatttcccttgaagatggatttaatctttatatattcagcgtttgttaagggtgaccacacgtattttgaaattgacttgtcaatggaaggaactcaactgtatccccatgtaaattatacaacagtgaacgagtacttggatactctagtttaggatatttgttcggtttatatcttccttgtaataagtcaaaaataatgttttttttgtttcgaatggagcattaaaagaaggggactgatggacacctatccatgtttgttttgacaagtgaatgtcgtgatgatctgacatttttt

SEQ ID NO: 172274 - DNA, 820 bp, Zea mays
  Clone ID: MRT4577_88695C.1
cattgggtacctcgaggccggccggggacccctttctccccaccgatccgagaccgcgagagacaggcgccgcacttaatggcgacgccaagccggtagggtggggcgcgtctctgctggttcaccccatcgccatcgttggtcccccaccacggcaggcctacggcgccgctgtgccctacaccgccgccaccgtccactgttccagccatgttcttcgattccgacgaggctgagtaccacacaaccctattagtctccctcaaatcgtgtgaacaggggtatcttcttagatgaagtggcgccaagtcttcataggcagcagtttatcccttctctatgatctggtagagtggacgagttggacctaaactctagcgacatggagttctagaacattgcatcatttcaagaccttcgtctgtccaagttcgctgccaactactatgctactccggttcgtgatggtcacaggggtcgcagtcattctcgattagttggtattggtccttgtgactccaaattttctttatccttctgatccatgaaatcactgttttatattcactatcttgttttatattcacaattttttccatcctcaaggttcatgttgcaaagtatagaaaacaactagtttctaggcatggtctactatctgcagttttagttttgttaaattttctttatccttctgatccatgaaatcactgttttatattcactatcttgttttatattcacaattttttccatccctcaggttcatgttgcaaagtatagaaaacaactagtttctaggcatggcctactatctgca

SEQ ID NO: 172275 - DNA, 317 bp, Zea mays
  Clone ID: MRT4577_88696C.1
ttagctttttaacagctcacagcctacagcagttttttccacagctcacagtccacagcaacttttttcacagccacagcccaaccaaacaaaccctaaggcatttccacacctctattgggatactgttatggtgggcaaaacatatgaaaggcggcccaagcaacccataggccaggccacgccaggagatcaagattagagggataaggataagtttgtttagattagatatcaaaggagaaatagtaggagtttgttagagaataaataggggcggcagcagtttatgtgcgcctgtactggaccgacagcaa

SEQ ID NO: 172276 - DNA, 297 bp, Zea mays
  Clone ID: MRT4577_88698C.1
caacaagaacatgtacaagagattctttagcatcaaaaaaggtgagtcctcaatcctcaactgctcaagcctctgactcagactgaacctaagatgaggattgaggactcaccttttttgcactttggattttgtttgcttgttctgtgatgtgctgcattgtactgaaattgatttgagtaaccatgtgttggtaccagacaccacaacatgaacatgtacaacgagacctgtggcttgcaaggagctcaaaagtttgccagtacaaagcaacttggtgacttactcaagaaacaa

SEQ ID NO: 172277 - DNA, 544 bp, Zea mays
  Clone ID: MRT4577_88699C.1
cgcagcaaaatttttggaggaaaaaaacggaagcgggggaaggcgggaaggtgcccacaaaacatcctttccagggcccccagaaaagcgaacccttggccctccctaccaaacaaccaacttaaaacccccatacttgcccggggccctgttttgaggggggggttaaacccaacccagttgacgcgaagggggggggggttttccaaagcccaccccccctcccaaaacctaccttaaaatttttaaacaaagtggtttccctttttgggggcacccagttgccaggggaaaaacccggggttacgcccaaccgggcccagaggggggctctccaactatccccccgaaaatcagcccaggcccaacaaaaatccccgttcagtggttccccggccccctttgcaacccgccccagtggcttgcgggatttaggttcagtaaaccaggctccaggcggcacaacttattgtttcagaagaaggatcttctttggccaaaaaactgtgggaccgggaacgggccaccttggccccacccttcc

SEQ ID NO: 172278 - DNA, 395 bp, Zea mays
  Clone ID: MRT4577_8869C.1
aattgagcatcgcagagataggcgtcttcgtactcgcctacctccgcggctcaaacctttcccccttctcccaattccttccgccggccgccgctccatccggacgaagacaccatgagggagggcatttcgatccaccttgggcaagccgggattcaagtcggaaacccctgcttggaactggactggctttaacatgggatttaaggtgaacggcaaaagccccgggacaagaacattgggggaaggggagaaggttttaacaacctttttaatgaaaacgggggctggaaagaccggcccccggccggttttggtggaccttgaaccactggtctttgataagggagaaacgggaactaacggcaagtttttcaaccttaggaagttattaa

SEQ ID NO: 172279 - DNA, 1451 bp, Zea mays
  Clone ID: MRT4577_886C.1
gcttcattcttctgaacggagaagccaagtaaggtagatcaagctacggtgtccatggagcaaggcggcaagatggcccatgggtgggctgccagggatgcctccggcctcctctccccttacagcttctcaagaagggttcagggggacgacgacgtgacgatcaaggtgctcttctgcggcatctgccacaccgacctccacatcatcaagaacgagtggggcaatgccatgtaccctgtcgtccccgggcacgaggtcgtcggcgtcgtcacggacgtcggccatggcgtcagcaagttcaaggccggggacacggtgggcgtgggctacttcgtcgactcctgccgctcctgcgagagctgcagcacggggcacgagaactactgccccgacctcgtactctcctccaacggcgtggaccaccaccaccacgacggcggcgcgagcgcgagcgcgaccaccaaggggggcttctccgacgtgctggtcgtcagccaggacttcgtggtccgggtgccagagagcctgcctccggacggcgccgcgccgctgctctgcgccggagtcacggtgtacagcccgatggtgcagtacgcgctcaacgggccgggcaagcacctcggcgtcgtcggcctcgggggcctaggccatctggccgtcaagtttgggaaggcgttcggcatgacggtcaccgtcatcagctcgtcgcctgccaagcgcgaggaggcgctcggacgccttggcgccgacgcgttcttggtgagccacgacgcctcgcaaatgaaggctgcagccgccacgatggacggcatcatcgacacggtctcggcggggcaccagatcgtgccgctgctggcgctgctgaagcccatggggcagatggtggtggtcggcgcgccgagcacgccgctggagctgccggcgtacgccatcatcacgggcgggaagcgggtggccgggaacggcgtcgggagtgtcgcggactgccaggcgatgctggacttcgcggcggagcatggcgtcaccgctgacaccgaggtcgtgccgatggactacgtcaacaccgccatcgagcggctggagaagaacgatgtcaggtaccgcttcgtcgtcgacgtcgcgggcagccagatggataccgttgcttagaagcctggatgcgtagttcgatcgagtcatgtagcagccgtcgttgtgcgtggtgtgaaattgtttgctcgtgccgtctatttgttggtgggtgtgggtcaataaactaggcagaacaattgggccgtatgcatgcatggtctgcacttcctgccattcgttgaatccttatgtacctttgaattttaaatttgactgagaaagtggatgctgaaacaccgtaggtgtatacacttgtttgtacgagcgcttccgacaatctaagccttttgagattgatcaaaaaacaaaaaaccaac

SEQ ID NO: 172280 - DNA, 174 bp, Zea mays
  Clone ID: MRT4577_88700C.1
agagccatcgcagctttacggtatacataacctcaacccatatgcttagaacagcatctggcattgattcaagaatggccacaactacaacacgtgtccaactaataagtgtgcgaaccttgtgttacctcgaacaacagttttcattcaataactagatgggggaccctgttt

SEQ ID NO: 172281 - DNA, 837 bp, Zea mays
  Clone ID: MRT4577_88701C.1
gggttgagatggccgccggggagcgtcatccacagcaggtcgttgctccgtctgctccctccgttccaactctccctctaacctccagctcgccagcaccctcagccgtcgcaggttccctcccatggcgcccagctgagcatcttcttccccacctcttgccgcccacgtgccattccctggaaggtgctcgcgcgtcctcatgtgcttgtcagggactccggcatctagattctgactccatgccggcgctgccctctcatgctcgccgagctgctctcaaatggctgctcacgagtttcccccagccccgtcagcttgccggtctccatctcagcgcgtgagctcctctacagggctcaacagccgccgttctgcgccactagaccacgcccaacgcatacgcagtccgtcgctgggactccatcagcgctgatgtcgttcttcttcgtcaacatccaccagccagcgcccatcctcgccaccaaccacactcgcccggatccgcgactccctggtaccagccgaccgtccctgtgccccacgcccagatcgacctggccccatgctcgactgctcgttgtccaatccatccaggcatcaacgtcgacatatgctcctctgctgctcacctggactgaagctgccaagctgtcgaactccatcgcgcccctccgttcaggccgcgccctgctcggcttctctggtgcacgcgcagttcatcggccaagtcccctcaccggcatccttcacagctcgccctaccacgccgatgcccttccctatttagccgttcgtcgaggtcgccaatggccttcatcaatgccgcacctgctc

SEQ ID NO: 172282 - DNA, 437 bp, Zea mays
  Clone ID: MRT4577_88702C.1
agcacgcatgtgcagactcctaggtctaggttaacgagatggctactgccacgggcttagggtttaatcaagctgactcttctacgtcccagtcaagatttatacacgctgatattgtcagaatcattttatattacacataatatatatacacgcaccttagtgaatttccaaagagatttgtagagctatctgcatatcttgatattatgcctgtacagaacggtcaacgaagagcagtgcctgtaccgtcaactccagaacttgctaggagcatcgtacattctgttttgaacgaccatgacactcgctatcgtcaaagatatgttgatgttatggcaaatgatcaagcgaggcacacttttgagaatcaacctatacttgttgtatatatccaaacatatcttgttgaccgagaatttttcgctgtagctact

SEQ ID NO: 172283 - DNA, 345 bp, Zea mays
  Clone ID: MRT4577_88703C.1
ttattttttttttttttttttttttttttggagagattaaaaccatgcatttgtattgtttcatcacaggaacaacatctgttatgcgttctgacagcagaaggagaccccacgagcggcccccacgggacagaccacacggttggagtggggcatggggctacacgaacacgacacactaacatacaaccagacaggcccccggggccagggaggaacttcgcccaacagcaaccagggcccagggtaaaagaagaaaccccgtgatggcccccccccatataagacgctgtttgcatgaaggcgggcggaagcccgcccaggcggccactaccgctaccccct

SEQ ID NO: 172284 - DNA, 341 bp, Zea mays
  Clone ID: MRT4577_88704C.1
gaggaccgcatcctcttgagcattcctctcatgggttaatccaacgcttcttccatgcatgtctttcaacatttgtctccctttctccaacttgctcttacatacccatcctcctgctaccaacaacacatcattgatggtgccctcttttagattgcttattagttgtaattcaataataaagttttttggatgatgtatgtggccaaccataaataagaagttacatttccagattctaaaaaaaaaataataaacaaaatttatataccttaaaatttatcatttccaaataaacaaggacaggggttatacattttaacttaaataaaaaaaaacat

SEQ ID NO: 172285 - DNA, 514 bp, Zea mays
  Clone ID: MRT4577_88705C.1
gccacggcagtcggtcagcagggggtgcacatgggggagcccaaggaccactgcgctaacgaccatgctattgctcatgctgttgagcatgtcctgagctcatacttgcaactaatgctcctgaccatgttcctgatcaggatccgtaactggagctataaacctcgctatcctccacacatgactacaaacatcaataatacgaacgctgatgatgctgatgaacatgacgaggaactcgacacggagcctaccacccgcaatactaagggtgaaaggatgagggataacataatgaataacgtagttagaaggatacaaacagagatacaagatatggctacacatagggatacgcaacaagcaatggttaaatcaatggacacttggaccacaccaggctccgcactgttctgtgtgctagcatgaatggtatcatatgttacaccgtatgaaacaactgctgaattaagaggtgtatatggaaggaggcacccaaggatgaaacataggt

SEQ ID NO: 172286 - DNA, 410 bp, Zea mays
  Clone ID: MRT4577_88706C.1
gaggggtacatcaaaccggaggggacaactttcgcccaaaaagttcgacaggtttacaggcccccccttactgccaggaaaaaactctagcatgatttcatgaaacaacaccccgggcagctacctcacaaagcttaatggatgaaaggggaaagaaaaaaaaaaaagggccattctggaacaacaacccccgccccaggcgtaattttacgggagcgttcccctcgagggggccagcgagccacccccccaggaacatgaacggggggcgggggaataaatttccttggggagcaacagccagcgtctactctgagcatcagggacaacagccaaaaaaaacacagcaccgaggatccctacaccaaacaactaggagggttggcccttggggggctctttggcgcccc

SEQ ID NO: 172287 - DNA, 400 bp, Zea mays
  Clone ID: MRT4577_88707C.1
aagtcccctctcatctctcttgagcttactccattttatgcgcccactatacttcccttaatccaagcgcaccactacaccggccggttcatctgcgatgccggcgccgacgccaccacggaaccagcccaagcgccggcggccgcttgctctccccgcggtctgcccgtgcgagggcatcgcgccggagccactcctcgcctccgtcgtctcgctcacggccgatgtggcgagccgcagggccggcgacgccagcgccttccccgtgctccgccgcggcacgcgccaagcagtacgcctcgcgggcctcctgctcgcgttcctcgaggagatccaggacgcgacggcgacgctgtcctactccgccgtgaatggcctcacggacctgcacccccccatg

SEQ ID NO: 172288 - DNA, 790 bp, Zea mays
  unsure (1)..(790): unsure at all n locations
  Clone ID: MRT4577_88708C.1
cctcgaggccggccgggatgccaatgccgacaacccgcattgagccagttcgcctctcgctccgagtcggcttcacataaccatgttggatcgctcagcactgtgtacggcacgcaccgtcggggcctggacccgcaatgccagcagcagagcagcttcccgctttgcctcgacatactacctctgccgagggagctgcctccgcatggaagaacaacgcccgtccccgcgcggtgccaccatcttcgccgtcggctccactgcctggtactggcatctctacagacgcgatgtcgatgccatgactcccgctgaacaaagtctgcaccctacccagtacccatgggagcacgaaaagtggtacaagacgtacgatcacgctgccctccggcgcgaattccaggactaccgcgaggactgcgcatcctgccactccatctctcgtgtcccttaccgagctctcggtggcaagttcatgactgtcgatgaggccaaggcccttgccgaggagaacgaatacgacactgagcccaacgaccagagcgagatcgagaagcgccccggaaagctctctgactacatgaccgcgccttacaagaacgatgaagctgcccgtgctgccaacaacggtgcactgcccccggatctatcgctcatgggcagagaccgccacggaggatgacactacatcttcagcttggtgactgactaccccgaggagccacctgcgtgtgctgatgtgcaggatggcctcaacttncaaccctacgtccccgggaccggattgcca

SEQ ID NO: 172289 - DNA, 400 bp, Zea mays
  Clone ID: MRT4577_88709C.1
ccggccgggcaacgacggcttcttgaaaggatgcttggccgcgctctgctgctgctgcatgctcgacatgtgcttctgagactgagttgccgtcagggatggggtggcgctggcgccgcgtccagatccatcctgcagtcgcggcgaatgcatgaggatgttttcggagtcatcactagtcatgaactcacgatgatacatctgtttttttttctcccattccgtgtatgttctccagttctatgaatttcactagttaggccagaacagtaccagcagggattatttttctggcattcatgtgcgtgtgttcttaccatccattcttttaaacattacccacctacgaatgtttaataggatcgaaaagttttcttgaaaaaaaaaaaaaaaagcggcc

SEQ ID NO: 172290 - DNA, 458 bp, Zea mays
  Clone ID: MRT4577_8870C.1
aatggtatggatccaaatttccctaatataaatggcaacaataataatttacactaagtaccagcggcaacaagtttgagtagaccaatgtcagatactagttcttagcgtgatactcccccgtttctttttagttgtcgctggatagttcaattttgcactattcagcgacaactaaaacgaaacggagggaatatttcattacgattggacttatacaaacatagtttagtgttatcagttacctatcaaattataaatacttaaccaaacaccaccatgtcaattcttgaatcttgatggccagcttccgtgcaggggacggcgttttctgctcatgaaacatcaaagaccagtctcatgggtgaaaacaagcgttcctctacattctcctacagtttacgaggcaaggtatagcaggctagccggctagctgggtaaaaaacactttatgcatg

SEQ ID NO: 172291 - DNA, 365 bp, Zea mays
  Clone ID: MRT4577_88710C.1
cccactctttcgcccacgcgtacggggctggcttgtggtcccccttttatgaagccctactcgggttagggttccttagggttttgtggaggggcgatggcggcggctgatgtgaagtaccgatccttaggcggcagacttgcctggggcaccagctacgagtcgatggagaatgcctcatctttgtagggaaagatcttggagtccaaggtcatcaccctccgtacaacagacagagcgagagcactcctgcttcggtaccttgtcctacgagaactccatgctcgacgctgaaaagaacatgaacggcaaggatctcgacggacgtaacatcactcggtcaccaggcccaaccccgtggccat

SEQ ID NO: 172292 - DNA, 623 bp, Zea mays
  Clone ID: MRT4577_88711C.1
aaaaaacaaaacaataaaaacaaaaacaaaaaagaaaaagaaaaaacaaaaaaacaaaacactatccccaacctaacccaaacccaaacgctgtcttggccttggctcaaccccacgagggcaatgggggcccagggcccttcccctgccccctttctcagcgcatagtccctctcatggtcggcctccatcgccgccctgccgaatcccgccagcccctggcctggcgctccacccactagggaatcctcccgcctccggaaaccgccagtagcgctaatctaacccatcgccaacccgcccccgaagagcccggtggtgtgaccggtgggcacccggcggacgcgcggggaggcggaccaccggcccaaccgcaagtccgggaggcagggcacggacatggacatgcgcccatgcctgctcaatgcttttttttccaagcgcttcgggcacgcacaggtcatgcccaggggcaccagcaaggtcattgccgccccccccaccaacttgagggaccttcggcataccctcccatctttaagggacgacaacccctggcggaccatagggaggttaatcgccgataggccactgggcgcggccgagctttggtttggcctatg

SEQ ID NO: 172293 - DNA, 662 bp, Zea mays
  Clone ID: MRT4577_88712C.1
ccggccgggcctaccgcccggtcgggccggcggcgtgtcaatctccgagatcccagggacgcagaacgctgccgatggtgaagccgaggaaaacccgcacctcggctccagatccgcccgtaaacgccgttcggcttccgtggcacccaccggcgccggcggtccctgcggccgttctgatctcgctcgctgcgctactcatccgcgtgctggtttccgtgggcccctactccggtcagggtgcggcgccaaagttcgacgactatgaggcgcagcggcactggatggagctcacactccacctcacgcccgccgactggtaccgacggcctgcaggagtacggccaggtcggcgacgccaacgtcttctactggttccagatccgcaagtcccgctccaagaacaagctgcgcaccggacagctggggctgggccttgcgcgcgccgggttgcggggccgctgcggcagcagcgcccgtcacgctgcagccgcaacccttgatccagaaccaattccagctgctcgcctcgcccgcgcaggtgccggcgccagcttcctcgtccacgtcctcctccgaccgctcctctgggtccagcaagccggcgccgcacccgatgtccacgacgctagggttgctgcagtacggcttcggagctagcg

SEQ ID NO: 172294 - DNA, 297 bp, Zea mays
  Clone ID: MRT4577_88713C.1
cttgagtgtttatgtaagttcaacatcaaccaaaatgtggttttagaagagttcgaagttgaactcctcccagctgaagtcgaaggtagttggttgtccgacgtgtgcgtcagagccgctccagtcgctccaagagaatggtggcaagtttccagaatctctgcttggtccagcgatggcgtagaaagctccttgatgttggagttcgtagttgattgccttgctgtcaatggaaccgaatgccaaagcaccagtggtacgaaggtcataacgtgaagcaatagccttagagggatc

SEQ ID NO: 172295 - DNA, 299 bp, Zea mays
  Clone ID: MRT4577_88714C.1
gggcgcaaaattcaccttttggcggaggaaacaatgttatgccaaaagggtggccccaaccaaaaagcagttttaccaacatgaaaggggcccctaaaactaatacaaagcccctaaagtaaacacaaaaatcatgcgcttaaaacaaaacctaaggcccaaaacttaaccatgtggtcgaaaccttgctcttgtttacccaacaatgcctgctgtaacaaccaaaggccttgtttaaaaaaccttgatgtgaggtccaaaacatatcagttggagggcctccctagccagggtgggga

SEQ ID NO: 172296 - DNA, 945 bp, Zea mays
  Clone ID: MRT4577_88715C.1
ggaagcgctgcaaagggagataaacgaagcgaacgccgtggtgaactggacggacagggcgccgtacgcgtactggaaggggaaccccaaggtgggcgccgaacgcctgctcctcctccggtgcaacgcgtccggcgagcgtgactggaacgcgcgggtatacgcgcaggactggggagaggaggtgcggcacggattcagggggtcggacctgtccaagcagtgcacgcacaggtacaggatctacatcgaagggcgggggtggtcggtgagcgagaagtacatcctggcgtgcgagtcggtggcgctcatggtgcggccgaggttccacgacttcttctcgcgggggctgtcgccgctgcgccactactggcccgtccgcggcgaccgcggcatgtgccggtccatcaagcacgccgtggactgggggaacgctcacgcggacagggcgcaggagatggcagggaacgcgagcaggttcatccgggaggagctgacgatggaccgcgtctacgactacatgttccacctcctgacagagtacgccaggctgctgcggtacaggcccgcggtgccgcgcggcgccgcggaggtcaccgtcgagtccatgatccgggggaggcgggggctggagaggcagttcatggtggacacgcttgcggccagtgcgagtggcgatggcccctgcaggctgaagccggcttacagtcccgaggaactgcaggcgctgcggagagcgagagcggatgcggtgaggcaagtggaggcgtgggagatctgacgttgacacgcgtagagactagaggaatttggacaaaggaatatacagcgaatttgtatcagaatcatttactttttgacgcttttgtgtccttggctatggttgttaaatcaaaaggcctgaacttgacagttgacactttgtttgcttccttggctccggtc

SEQ ID NO: 172297 - DNA, 627 bp, Zea mays
  Clone ID: MRT4577_88716C.1
aggaaaacctagtgactgggcccgggccaattctccgagaccaagatagattaggagagctagctgatcccaggcttggcggccagtacccgaaagatgattttgtgcgggtgtgcacaatcgcagcagcctgcgtttcgccagaggcgaaccagaggccaacaatgggcgaggtggtgcagtcactcaagatggtgcagcgctctgtggagttccaggaatctgtgccaacacctcccgctcgccccaacgtccggcaatcgtcgacgacctatgagtctgatggcacctcgtccatgttctcttcgggccccttctcaggcctcagccccttcgagaccgaaaccattccaaggactgcggttttctcagaagatctccatgaaggtcgatgactggtggggggtggctgccttgccatcgccgagccgagccgtttctctagagcctgtagccatgtagtcaagcattcaaaggctggtggtccaattggcctggccagccattgggaggaaaggggtacctgtaaattccatttttctgcgccgtctcaaaagactactactagattattacaacccacaaggacgttctctggctttgtatggaagaaatggttttgttcga

SEQ ID NO: 172298 - DNA, 306 bp, Zea mays
  unsure (1)..(306): unsure at all n locations
  Clone ID: MRT4577_88717C.1
cgtacgcccacgcgtccgcccacgcgtccgcacagntagaggcaaaaagcagcttaggttgaagaagaacagtgataagaagaaaaaaggaaagaaatggcacaagggaaacaactccttgcgtggtggtggtaaagacaacaaacagtttcacagaggtggtgggagtttggataagtggtataactacaaaccacttgagcttcatggtacggtagtcaacgatgcctcaggcaaccttgatggttttaaggctggcaagacagacccctactgcgggactagctatttgaaaaaatcactcac

SEQ ID NO: 172299 - DNA, 659 bp, Zea mays
  Clone ID: MRT4577_88718C.1
gtgaccgcgctgctacgtgacggatgttctagatccgttcatcctggcggctgtgtgaggtcgaaagtggcgagggaattacgagatggtggacaagctgtgcgacgacgtggaggccgaccctcgcccggagtagcgggtctctagaagctccgcaaggtcaccaccgaccggccgatcgtcatcaacaaagacgaggacggcggcagctacaagcgggcgcagtggatgccgacgaccccgacgacgccggtgacgccgtcgtcgacgtcgtcgacgacgactgcgtgcggtgccggcaacgtgtggcgcagcgtcttccacccgaggagcaacctggacaccaagggcatgggggccaacctcttcgaccggccgcagaccaactcccccaccgtctacgactggttctacagcgacgagaccaggaggaaccaccgatagatcggctgagatggatggacagagaagaggacatgctcgctggttctggcggctatctaaaacgcacgcatgctctattataggtagtcatcacgatatatatacttgtgcatgtgcattgctgaccgtgttctgctgatgtctccgccgtttaatatgacctatgatatggcgtgagtgatatatgggtcgtcactgctaggatatagtagtga

SEQ ID NO: 172300 - DNA, 298 bp, Zea mays
  Clone ID: MRT4577_88719C.1
agctcggaatttgggtcgaggggcaggtctcacgcaagatcttttcgggcagcctgatctcgctgtcggagcgggtgcttttggactcgcgtaagttctatgaccagggccgcggaggccggataaaggacaatgctgaactgctcatgatcaagaacagcatgatcgacacacaaagactgcctcccctgcactgtggccgactggaacgccgatcgtagcctgaagaatccttgggaggactgcagggagtacttctggcagtctgcccatccgctacaaaagtgcgcttgagcag

SEQ ID NO: 172301 - DNA, 422 bp, Zea mays
  Clone ID: MRT4577_8871C.1
agcaggagcagctcaggatccaccaacttcgtttggccccgcccgtcgccgtctgagccgagccattgactgctcagagcatcaggacgttctagcgcgcttctgcggtaggatcaggaggctggtggtcgccggcgcagcgtctgcggggcggcgtccgagggtgactctgcaaggattccccggtggccccgaggcgttcgagctcgtcgcgaggttctgctacaccgacggcggacggtgcggggtagtgacggcgggcaacgcgtgcgtgctgcggtgcgcggcggagttcctggacatggcggcggcggagaacgcggccgaggccgaggccgcgccgagcctggtgcggatgacggagaatgcgctggaggagatgccgcactggccgtggcacacggtcgtggacgccgtgaagc

SEQ ID NO: 172302 - DNA, 192 bp, Zea mays
  Clone ID: MRT4577_88721C.1
aggggaccaaaggcggggcctcgggggccgcttttttttttttttttctgtgagaggacgaaatattggggtgaccgaacagaagcaacatttttcctggatgacaaagaaaacacacaagactgctaagctcgcaggggcgcatttgcctttccagaaatgcatcagggaccaactacaatgcagaattcg

SEQ ID NO: 172303 - DNA, 695 bp, Zea mays
  unsure (1)..(695): unsure at all n locations
  Clone ID: MRT4577_88722C.1
gagggtaccgccttgcccgtgaagtctcgactgactttacagggtctgcagcaggaccgactctcagcttcctcgagcgaatgacgtccaaagggttcacaatgagtaggggagccttccccttcgatgtggctccactgattgtatcatgccctgcaaaacaaaccaaaatgacaaaaaaagagagaagaaataaaatgaaaaataaatcaacaaaacgaagtggccttacccgtaccacacgacgcctcctccgatagtacattcgaacccaaattcaaaatttggtcaacgtcatggtcctccacggacacatccctggcctgcggagtgtcttgaggtcccaagacctcgccataacgcacatacggagcatcgggggctggaggtgtgacaccctccgacatagaaggtactgcctcgccacgtgaagtctcggcagactctgcaaggtcaacagcatggtgaatcctccacttcttcgagcgaatgacgtccagagggttcataatgcagagggggccttacccttcgatgtgtctccatacattgtatcaagccccgcanaacaaaccaaaatgtcaaaaatttaaaaatgtcagaagaaataaaataaaatgtaaatcaaaatcaacaaaacgaagtggccttacccgcaccacccgatgtctccttcggccgtacattaggaccca

SEQ ID NO: 172304 - DNA, 386 bp, Zea mays
  Clone ID: MRT4577_88723C.1
ttttttttttttttttttttatcaataaacagggcttggatttcacaatcgttagcttaaatgcacagttaccacatatctaatacctccgtcgataggggtcatgatcctcggacttggcaaccttgcaagggaccacaaaaacaaataggcatgggaacaccccttagcaaagacaggatgtcgaaggcagttctggtcaaaggacccttcctaaaattcggtatgttttataggaataaaaaatattagggaatacattttatacaacacttacctttacttagcaggtttaccgcgcctagatattctacaaattgataatataaagattataaatggttcaaaaaccctaaccctaataatcaaagaccgaagggtgaacc

SEQ ID NO: 172305 - DNA, 304 bp, Zea mays
  Clone ID: MRT4577_88724C.1
gggggggaaaaaaacccgggttcaaaaggaagggattaggggagaaacacaaaaaaacaacggggaggtaggccaaaagggtatatattatgggttttataaaaaaccaaaagggcattgggaaacaggggggtcaaaaaaataaaaacccaaaaatatttgggggggggataaaggttacatgggaaaccgaccttttggtccccacccaaagccaaaaagggggggtccgaagaaagagggccccgggcaaataattggcccggggggcaggttcagggggttcccgaacccccaaggaaaa

SEQ ID NO: 172306 - DNA, 197 bp, Zea mays
  Clone ID: MRT4577_88725C.1
gtgacaagttgtgccgggacgagttgaagttgaggaagagcagaggggtcggttccaggagtgtttggtggcgggacgcaaggaagcgcacgggtgggcagccaggggtgtgtgtggtcggctgtggggttggcagttgtcacggagggttcagagagacgacggcgtcaggatgagggtggtgttgtggagggttt

SEQ ID NO: 172307 - DNA, 107 bp, Zea mays
  Clone ID: MRT4577_88726C.1
aaaacatgtcactaacagaatttattccctacataaccaaccatgtagtagctcatgcgattcgaactcacaaccatccactaatgcatgacatcatctaccactac

SEQ ID NO: 172308 - DNA, 882 bp, Zea mays
  Clone ID: MRT4577_88727C.1
atggatcctaagggcaaggggattgtgatcaatgataaggagaaggagtcatttgtcaacgagcctaaagatgacaagcctaccgactcgggatcgggccacaaacgaagagatgggaagaagaagaagacgaggcgcatcaaggagatcgtctactacgacgacaacgacgagtcctcttcttcccaaaaggatgatgacaacaactacgagaaaaagaagacgattaactcaaacttctctttcgattattctcgtattccgcatagttcaaatgcacatttgctttccattccacttgggacgagtaccataaggtacacgaagatgacgcccgaggagatccttggaaagttcgtaagcgggcggatgatgatcaaggaggctagatacgtcgacgatgcattaaatggtccaatccaagagcctcaaactattgctctcaaggcaacaaggagcaaggaggcactacctagcaaggtggcgcaagttgaggcggccgggcttaatgttgaagagatgaccctcatcatcaagcggttcaagacggcgctaaagggtcgcaaggagcaccccaacaagaacaagacgaaggggaagcactcctgcttcaaatgtggtaagattggtcattttatcactaattgtcccgataatgatagtgaccaggaaaagaagagtggaaagtgggaaaagaagaagaactacaagaaggcgaagggcgaggcacatcttggaaaggagtgggattcggattgctcctcgttcgactccgacaacgaaggactcgccaccaccaccttcaataagtcatccctcttccccaacaagcatcacacttgcctcatggcaagggaaaagaaggtgttaatgatgatttaa

SEQ ID NO: 172309 - DNA, 2035 bp, Zea mays
  Clone ID: MRT4577_88728C.1
atggatcctaggggcaaggggatggtggtaaatgagaaggagaaggagtccttcgtcaatgatccaaaagatgacaagtctactaactcgggctcaagccacaaaagaaaagacgggaagaagaagaaaacaaggcgcatcaaggagatcgtctactacgacgacagcgacgagtcctcttcttcccaaaaggatgacgacaacgactacaagaaaaggaagacggttaattctaacttctcttttgattactctcgtatttctcaaagtaccaatgctcatttactctccataccacttggtaaacctcctcagtttgatggagaggactacggattttggagtcacaaaatgcgtagtcacttgttctctctccatccaagcatatgggagatagtcgagagtggaatgcaatttgatagtactgatagtcctatatttattaatgagcaaattcacaaaaatgcacaagctactactgttcttctagcatcattgtgcagggatgaataccataaggtgagcggcttggataacgccaagcaaatttgggacaccctcaagatctcacataaggggaacaacgttaccatgctcaccaagatggagttggtggagggcgaactcgggagattcgcgatgatcaggggggaggagccaacccaaacgtacaacaggctcaagaccctcgtcaataagataaggagctatggaagcacgcgatggacggaccacgacgtcgtccgcctaatgctaaggtcctttactgtccttgatccacatcttgtaaacaatattcgtgagaatcctaggtacaccaagatgtcgcccgaagaaattcttgggaaatttgtaagcgggtggatgatgatcaaggaggcaagatacgtggatgatgcgttgaatggcccaatccacgagcctcaaactgttgctctcaaagcaacaaggagcaaggaggcgctacctagcaaggtggcgcaagttgaggcggtcgggcttaatgaggaagaaatggccctcattatcaagcggttcaagacggcgctaaagggtcgcaaggagcaccccaacaagaacaagacgaaggggaagcgctcctgcttcaaatgtggtaagattggtcattttatcgctaattgccctgataatgatagtgaccaggaaaagaagagtggaaagtgggaaaagaagaagaactataagaaggcaaagggcgaggcacatcttggaaaggagtgggattcggattgctcctcgtccgactccgacaacgaaggactcgccaccaccgccttcaacaaatcattcctcttcccaaacgagcatcacacatgcctcatggcaaaggagaagaaggtatgtactcgaaacaatactacttatgcttcttcaagtgaggatgagtctagtgatgatgaaatagactattcatgtttattcaagggcctagatagaactaaggttgataagattaatgaattaattgatgtcttgaatgataagaatatgttgttagaaaagcaagaggatcttttgtatgaagagcatgataaatttgtagaggcacaaaattctcttgcattagaaattaaaaggaatgaaatgctttcctgtgaattgtctacatgccatgactctatttctagcttaaagagcataaatgatgatttgaatgctaagttagaaatagccaataaatcaacatcttgtgtagaacatgttgcaacttgcaataggtgtaaagattttaatattgatgcttgtagtgaacacctagtttcaatttctaaattgaatgaggaagtggctagtcttaatgcccaacttaagactagcaaaaatgattttgataaactaaaatttgcaagggatgcctacacggttggtagacacccctcaattaaggatggtcttggcttcaagaggaaagttaagaacttaacaagccataaggcttccatctccatcaaggagaaaggaaaggcccctatggcaaatagtattcaaaagaaccatgctttcttataccatg

SEQ ID NO: 172310 - DNA, 363 bp, Zea mays
  Clone ID: MRT4577_88729C.1
atggcactcatcatcaagcgattcaagacgacgctaaagggtcgcaaggagcatcccaacaagaacaagacgaaggggaagcgctcctgcttcaaatgtggtaagattggtcattttatcgctaactatcccgataatgatagtgaccaggaaaagaagagtggaaagtgggaaaagaagaagaactacaagaaggcgaagggcgaggcacatcttggaaaggagtgggattcagattgctcctcgtcagactccaacaacgaaggactcgccgccaccgccttcaacaagtcatccctcttccccaacgagcatcacacttgcctcatggcaagggaaaagaaggtgttaatgatgatttga

SEQ ID NO: 172311 - DNA, 427 bp, Zea mays
  Clone ID: MRT4577_8872C.1
attcggctcgagctctagccggacttcacatttcttctacactaccagagcatgctcgtgggggcgacccgaaccgctgccgccgtcgacgatcaccctacaagcgccttcctgctgctcttagtactccttggatgagcgtccatcgcgatcggaggagcagacatggccgggcacgtgctctggggcgggaaggagaacccagccggggtcaacaacgccaagttccacaggctcgctcgcttagccgacgtcaagcacaacaggcgcacgaacgccctgctgaagatagttcgcgttgtggacgccaaagaacaggtcgtggcctggacgctgaaccacctcacgctggacgccgtctaagccaggaggaagaagctctaccaggcccaggtctggggcaagccatggctggacttcaaggagc

SEQ ID NO: 172312 - DNA, 342 bp, Zea mays
  unsure (1)..(342): unsure at all n locations
  Clone ID: MRT4577_88730C.1
cggacgcgagggcggacgcgngggaggcgccgacgcagccgaagacgggccgcagcgggggcatcaacaagggccanggcgacaccaagcgcgagctgccacngcgcccggcccaccgcaaggggaaagcaacgaagagggngaccaaggncaggggcccaaacagagagggngccggctgggcaccgaaagagaagcggancaccgagcnncagaaggnnggcaaggacaagcgcgcncngaagcnngccaagagaaagcnnggaacccacaagagggcaaagaagaagagagaggagaagaagggcgagcacaggaagaggagaacggccgagacgcaca

SEQ ID NO: 172313 - DNA, 374 bp, Zea mays
  Clone ID: MRT4577_88731C.1
actattgcaagtttgtaactgatacaaagaatgaacaatcgtgaacactggtcatgagtgcaccctctgttcctgtgcatacttggatgagtctactaagcaggtctattatgggaacagtctcacgtctgagacgtcctgggagcggccaacaaatgaatgaagatctataaccttggtgtgcggtcaaccgaacgatacaagttgatttgttaatgtagttgatgctgttgaatgggcagcccaattttgtttggcagccaaccccatcctttagagaagaacaaaccacacctcaccaggagatggctgattgtttcattgtcttggtcacaaggcacaaaatttttgatgggataggttttgcttggctt

SEQ ID NO: 172314 - DNA, 966 bp, Zea mays
  Clone ID: MRT4577_88732C.1
atcgtcaacccggtctacggctccgtcggcctgctctggtcgcgccagtggcacaggtgcgccgacgccgtcgaggccgtgctcaggggggaccccgtcgtgcaggtcgacgccgggtccgacgccgccgctgccccgccgctgctcgccggcgccaggccgccgccgccggccgccttcgacatccgccacgtccccagggatcccgacgccaccgccgccgacctcctccgcgccggccgcaagaggttcaagcgcgcgggttcgtcttccaacgcctccaaggcgaagcccctgcccctcgagctcgagggcaaggccggcaacaacgaacgcgcgtcgcccagccctcccccgacgcaacaacgagaggcggaggagctgcagccggtgccgatggtcgtcgagccagaacacggcgaggagtccgccggcagccacgaccaccacctgcagctgcaggggtggtcggaggaggacaccgacgtggaggcggcctcacacgtgagccaagccgaggctgagccgccagccagcagccagagccaggtgctggtagcggatcaggaggaagaggaggttgggctcgagctcacgcttgggttcgagcctgtcgtcaggcagcagccgaggtcgtcgcgctgcgacaagagcggcttgagcgcggcatcgagcctcatcggcctgcggctgcagctgccggccgcctaagcacaggcacagctcgcacctaaacgaatagagcagttttgcgaccctgcgcctgcggtgtttgcttaaaaataagcttttggacccccgggtgccaggagacacacagtagccaacttcaaattttctaggttttgtttatctttttcaatttttcttcttgtctttaactgtaaaagttgatggactgcacaattactcaggtagagggggtttggttccccgatcaaagagggcgtttgtttaaaagaaaaa

SEQ ID NO: 172315 - DNA, 3258 bp, Zea mays
  Clone ID: MRT4577_88733C.1
aacagtggtagctcagtctgaagaatttactcaatgttccttgcaggccggtaatcctacatggaacattgagtaaattcttcagactgagctaccactgtcaaaattgagtgaatgcctatgggtaacctcactcagttggcagcatctaagcgtggggatttcaggatgtgattgttccctcctcggttcgtatgtctctttctttataaaaaggagaatcctctagcattgcttgggcaatatagtgatgatgaagtggaagatgaggaagcagcagatcaacccactggtgaagctaaggggagtccaggagatgctagtgctcagttaactagtcagcgtgcggatatagctggtgataacagtgtggcaaaaattgaaccatcggcttctgtcggtgatcaacaagaagcagcacctcaagctggtgacgttaagaactacacccaaagtgttactgaagaaaacactatagctcctgagccaactgtacaagaagagagtgtgaaagcaactgaatctcttcccgattcatctggcatgcagattgttggtgatgtcggtggaaattggaaagcagtaatgcatgaacagagtaatcagtgttattactggaacacagttactggagaaacttcttgggatataccaaatggattagcttcaggagttgcaactgcatttgttccttctgatgtggactataaaaatcttcctcatagttggctcgttatccatggatcactagacgcagcaagtctattatgggaacaacctcacgtcagaaacgtccttgggagcggccaacaaaatgaaaatctacagccttgtgcggctacgaacagtaggactaagggcatggttgtttggaattctaatgtgttcggattatataatcctatataatttggagaacgtaggctatgatgatttcccctactgataaggtaaggtggcttaaactaaggtgttgagttgataagaagagaaattgagatacggatgtcggacttaaatgcactttcatcttatggatcttctttgctcccattgtggttgcatgctgaggtgcacctgaagcaactagactcttctatttccaagctggaaatgaactatcatgcagattcagaacctaggaattcaaagacagaggttgctgaacacagggcacctgatgatgctgacttgataacaccctccaatggcgaggctttgaagtatgaagtttgtgctgggattactatcgatgcaaatatgaagattggtaagccagcttcaacgtctcagaattcacaagatagggataatgcagctgttcctccaaaaattgaatctgacaatgatgaagatatggatgtggaaatggaagttgatgaagataatgtcgaagagcaggcacagtgcagttctgtacctgaaaaggagcatcctccatcagaacagttgagttcatctaatttgccatcatttgaagttcctacacctcctgaggataattctgttcctccacctccgccagaagaggaatggattccacctccaccacctgaacacgaacacgaaccagctcctccagcttccccagaagagccggctgcatcatatgttcaggtggatacaattcctcagccatatatagctcaagaaaatgttggctatacaatttcaggaatggagtattatagtactgaaggtacaaatgccaattactatatgcaagtgagtgagcctcatgtccttcaagcacaacattcttattatgcaccagtatctgggagtggcatatctgtttctgttgatggcacatctattgccccagaatcttattatacctatccttcagtcactgtggctgcaagcgctgtagcagctgaacattctggatactacgcttcatcagtctctgccatttctagcagtgcagcagatatcaaaacaagctcagcttctcttgtttctgcaaatagcaattcggatctaaaaaatcctgataatgttatatccaatgatgcaagtattgtgcctttcacccaagctgtagtagcaacatcagctgcaggaacgacatctgttcttgaaagttctacacagccttctagcagcactacaaaccagaccaaagttattcgtaacaagaagcgggttgttggtattacatcgtctctgaggtctaataagaaggtttcaagtttggtagataagtggaaagctgcaaaagaggagcttcgtgatgaagaggaagatgagcctgaaactgctctagaggcattagaaaggaagcgacaaaaggaaatagaggagtggcggaaacaacagatagcttttggacatgctcaggaaaatgccaattttgttcctgttcgtggtgattggcgtgaccgtgtaaaacgcagaagggctgaagcaaaaaaggagtcaaaagatgacattgttgttgcatctttaagtagttccaaacagcataaaggatctcctgatctagcagagctttccaagggtcttcctactggttggcaggtaagtattctcgattgtatcatatcagatgctaacatagtgtgctgtgtttaaggtagcttccgctgcagcttccaagaatttgatatctattgcaagtttgtaactgatacaaagaagtgaacaatcgtgaaacactggtcatgagtgcaccctctgttcctgtgtagtgtactgtaaaaccttgttaatctgccatgccatgttttacaaagtggttagcactgcttatttgcgttatcctctctgtgcaggcatacttggatgagtctactaagcaggtctattatgggaacagtctcacgtctgagacgtcctgggagcggccaacaaatgaatgaagatctataaccttggtgtgcggtcaaccgaacgatacaagttgatttgtcaatgtagttgatgctgttgaatgggcagcccaattttgtttggcagccaaccccatcctttagagcagaacaaaccacacctcaccaggagatggctgattatttcgctgtcttggtcacaaggcacaaaatttttgatgggataggttttgcttggctaacctatctgcagtacaacatctcttattaatcactaactagatgaaggcacatttcggtcataggcctgcaacctacgatccatgcaacagaaaggaagcgacaaaaggaaatagaggagtggcggaaacaacagatagcttttggacatgctcaggaaaatgccattttgttcctgttcgtg

SEQ ID NO: 172316 - DNA, 2865 bp, Zea mays
  Clone ID: MRT4577_88734C.1
cagaagcaccagcagcacgttgcatctgtggtccaaaggttagctcgtgaaaaggataagtggttgagctccagtccggatgcaatgaaaatcaacatggaattcttgcagcgctgcatattcccacgatgtgtttttagtatgcaagatgcagtgtattgtgctacatttgtccaaacactacactcccttgggactcccttctttaacacagtcaatcatatcgatgttcttgtctgtaaaaccctacagccaatgatatgctgttgcacagaatttgaagctggcaggcttggaagattttttcatgatacgttgaagatggcctactattggaagagtgatgaatctgtctatgagcgtgaatgtgcgaacaaacctggttttgcagtgtacttcagatacccaaacagccagcgtgtgtcctacagtcagtttgttcgggttcattggaagtggagttcaagaatcaccaaagcacttaatcaatgtatggaatcaaaagaatacatggaaattcgaaatgcccttattgtccttacgaagatttctagtgtcttcccggtgatccgtaaaagtggtgtcaatcttgagaaacgggtggctaaactaaaaggggatgaaagagaagaccttaaagttctagccactggtgtagctgctgctttagctgctcgcaagagttcttggctatctgaagaagagtttggcgggggtcacattgatctgaagccagcaacagcaagatctgtgcttggaaaccagtcagcagatctctcgatggcaaaagatcaaaatgcccgtgcaaagtctgtagagaataggcatgaaaggtcagagggtgctatgaagcctgacgttcagcaaaagaagagcactgtggcttcaaatggatctgatattctaatacaatcttcctccgtacaagggaaatcttcagtggttgcacgtgcaatggatgagcctccaaaacctgtgtctgatgagggggttaaagtttctacaaaatctacttcagaatttgagacaagggcaacacaaaagcgtgctggcaatgctgggaaggtaatgaagcatgatgttgcaaaggaagatgcaaaagctgggaaacctacaagctggaatgtaaatcaacaagtctccactgttgatagagaagtgtctcatgcagctgatgctgcccaagaaaccagtaccactattagcaatggtaacttgcatccagcgccgcataaggtttcatcatcttctcaaagaaatgcagttacacataatggagcagccaatccctctgttgagtctactgatatgattgactctcctgtgagacagcaaaaaagaccgccggttgaggagcaagatagatcaggtaaacggaggaagggagaaaatgaacccgatttgagtgaacaccatgtagacaaggaaaagagtttggactcacgtggtggagataagtttcgttcagtggatcatgagaagagtgctaatgaggaacaaaatttaagagcgggcaaaataaaagaaaaatctgatgataaatatgacagagatcctagggaaaaattagatcggggtgaaaggcgtcgtggggaagatgccattgagagatcaacagatagattgtcggacaggagagaacgttccattgaaaggatgcaagagagaggtacagataaagcccttgaaaaaggtagagaggatagaaataaggatgagaggaataaagttaaatatgctgaaccttcggtggaccggacacattcttctgatgaacgattccgagggcaaagtttgccaccgcccccacctcttcccgcaagttttgtaccccaatcagttggcgccaaccgacgtgaagaagatgctgaccgaaggggtgggagctccaggcatgttcaaaggtcatctcctaggcacgatgagaaagaaaggaggcagtcagaggagaatatttcgtcatttcaggatgatgggaagcacagaagagaggaagatattcgtgatagaaagcgtgaggacagggatactttatcaaacaaggtagatgacagggatagggaaaaggggacttctttgaaagaagacagtgatcctagtaatgtttctaaacggagaaagatcaagcgagaacagactttagaagctggggaatatgcaccttctgctccacagcctccctcccatggatctggcagctcacaattgtctgacatacgagaaagagaaaggaaaggggtaatttcacagcatcgtatttcacacgctgatgaccttcctaggacacatggcaaggacatgacaagcaagtcaagtcgtcgagagtctgaccaaatgcacgagagggaatgggaagaggaaaagcgaccaagaactgaaacgaaaaggaagcaccgaaaatagctgatcaatgttgacatggattcagttgagcctcataatttttctccaagcacagtagtggatgcacttgaatttcatgctttcgtgttgtgaggaaacatacttcagcatatagctaagcagatcgtttattagtgtactgtgccagttgcgggatgtggcctttcctgtcgagctcaccaatgcgaatttaacagatgggagatgagtcatgtttagcttcatacattttgtgctgtaaacaatgtacaatgtgtcataatgatttgtactgtgaacataaatggatggctcaccatccgggtattatgtattttattactaactgctaagttgtttggtgtaggaagcatcaccattttttttgcattgtgtaggaataatgttagggatgcagcataattgaaatgtacatattttggccagaatttttgccaagctatttaacttttcgggttcatt

SEQ ID NO: 172317 - DNA, 226 bp, Zea mays
  Clone ID: MRT4577_88735C.1
attgcttttggacccaccttccacccagcacgtgtcggttcccctctccgggcctggcccggactccccggtggccgacgccccctcgccgcccccgccttctcccagggagggggtcaggtgggcgggcactattgttgtaggagcgggcgccagattcctcagccgcgctcggggtgggaccggctgggtttgggggggtgactttgttgtataaccactttaa

SEQ ID NO: 172318 - DNA, 589 bp, Zea mays
  Clone ID: MRT4577_88736C.1
ccggccaggaccgtcgttattgactccggctccgacctcgccggagaccgctcctcattgtaaccggcggtcgcgcccgcctcaccggtgccctaggtctcgctcgtcggcaccgaccacatcttcctcgaccccttccacctctacgacgcctgcgccacccaccctgatccctccatcgatcacgccgggtgagtacaacaagggtgagctcacatacattcatcgcttaacaagttatggagaataattcaagagtcaaaggatatattgcggaagaatttaaacttaaggatgtagcacactttacaagttgttactttgctcaaaagaagaggtaacatgatgatgaacgaaggctacctccgtgcagtgatctttcgatttttcaaatgaacagcaaaacaagaggcacctctgttcatatgtgaaatactttgtaccctcaaatacttcatgttctataatattatgtaacaatgagtttgatgagcaaatcaaagaggctgaaaatagggataaaaaaaaaaataaaaaagcacgcacacgtcactgtaggaagagccacgtagtaatgccgcctgttgca

SEQ ID NO: 172319 - DNA, 260 bp, Zea mays
  Clone ID: MRT4577_88737C.1
taccgagatgacccagcatcacttgtacattttcaactatctcacaaaaaactgtcaacccgaatcatttcatctgctgcttgggctctaacaatcatgaactgatcagcaattactcactaaaataactcaatcacttctaacatacctatgacacagacattgtcttcatcaattaccgctgaaatcacgtatgaatgtaccatgtatttacatacaaagttagtagttttatttttcaataatttagataatttttt

SEQ ID NO: 172320 - DNA, 962 bp, Zea mays
  Clone ID: MRT4577_88738C.1
ccccccgcggccgcccgcccggcccccctcgcgtccgcccgcgcgtcccgcgtgccgcggttggcgccgggcctgctcctgagtggaaactgtcctcagatccgtgcctccatggggctacccttgtccccgctccgccgctcctcatcagactgtgtacccttgggccggtgactatgctatggtggctggggctagggttggggaccgtgggggtgtggtccttggcgcggttccagtcagggctgtgatctggtgacacgggatctgagccgtccttgatggactcttcttgagtcttggttgcgatgtttcgttttggtgcactctctatctctttgttgctaattattcttcaccatgtccttccatttcgggactggcagatcgatacgcctgtatatttccgtgcgattggattgatttttaccaagtgcggaaagattgggagttgagatagtgagtgggttttcttctcctgttcgctctgcctgctctctcgctcacctggcgagactaggaccactgccaccatatgtcaggtgccaggcctttgtgagcaagtttaataatatgtcctgttgatgctctaccacgatctaaggatgctcttcttcacttgccttcctatttgatctgatcatgggctgacatatgcgcctttgagcaatcaaggctgctatgggtatcaaactggagcccttcctcttcgctcctgggaacccttatccatttatgttctaatgatagtggttctgtccttggatggtcatgccattctgtgtgtgataaccagggcagctccacttataacatcaggacaagttgatctggtgctcggagatggtggggttaccagttaaatgattgagcaaaggcgaagctgagcccccacgaatatatactaataaagtacataaactaatacaacataataaacatatgaaaaaaaaaaaaaaaaa

SEQ ID NO: 172321 - DNA, 435 bp, Zea mays
  Clone ID: MRT4577_88739C.1
gatcgatgagggttgttggatgccgcagattgtccctgcacagagaagatattgaatgtgttataccagatgaatatatatcatgcaagactagaattttgatactcacaggagtatggaactaagcagggtcaactagagggaacaactaaggtggtggagcaaaaccctgtgtggcgccatggctctatatgtactagaacatctgtgccatcctttgctgatctgccaagcgggccacccgctctgcctcctgctacgccatcattctcgcctgcatctactgtcggttcctcctcacttattctagctgggcctgtaatatttcacccaatgttataataactcagagagcaggcatataactcacggaatgacgagttacataagcactaacctagagttgatgtatccgatgatgtgagttgtcctgct

SEQ ID NO: 172322 - DNA, 614 bp, Zea mays
  Clone ID: MRT4577_8873C.1
ggggggggggttttcaacagtacccgctaaaatggtagggacttaaaacataatttatatgtactctaaagcgtacctaggccaagggcagatatactagcattgctgggtacaatgatgacgaataggcaaagggcatcacgggggacaatacgacgacatttataccggtcagttaatagtcacagccctcagcacaaatggacaacacacagcggtttggctttggtggcgtgttattaagtgtaaaagctggctattgtggaaggctcgctgcgcacgacgctggctactgtgcctatgctactggtaagatcaggggtggccgccgtggccttggtggcgccaacatacctggccgtgccttattagagttgcatgctggctccgtagaatcctctgggtttgccctacatacctgagttggatttggtggcgatgcacgaattggcgccacacgcgctggtggctatgttggcggtggctacgaccgtggtggccgtggaccaatcggtattaggggcctcctcctccaaaccctgtcgctcctcgctgtttgatgttacgaccgtgtcgcttcaaggttgctactttccccagttatgacgtgacac

SEQ ID NO: 172323 - DNA, 548 bp, Zea mays
  Clone ID: MRT4577_88740C.1
cccgggggacctctagtgcaccaatacattctcatttctgtccaccatcttacaaaacatattatgagccgcggtcaaagaaagcaagtgctagcacccgagccccgagtacctaggcgcttacgagcgccttcaactatgtactgctatttgtcgattcatccgcacaagcgcgacacttccatgtctgcacttctggaatagctgatcgttatacgactcggagactctagacttacagacgcatagattgcctcacaacgcatccttccacttttggcctcggcctactgtccacacggattctactggctcatgtttttaacatgactacattttccttgcacgatcaaattatactacgttcattgcttagacctcctacgatgtccttctaaacggctttctgatcctatccctaagacatctcattactctcactaaacttcttaagagtaaccatagcaataacactgctaacctgctattatgccgccggagctcgcggggctcaagagcctcacgctgctggacctcaagaacaacgg

SEQ ID NO: 172324 - DNA, 307 bp, Zea mays
  Clone ID: MRT4577_88741C.1
cggatgcgacccacgcgtacgcttggagatcgtgacgtagaacctagacaggcactcgcaagctgacagaaccaagctcggttggaccgcgtaaacagcaccagcagcgtacagatccatagcagaaccatacaccagttacctgacagccacactttatactacacaccgatgttgatgaccgggtcaggaaccaggaggtgctggacatctgctgtcgctccatctacatcaggctggacacgtacaacaatctgaacagggacatgacgcagaacgcgttaaggctcgccggcttcaaggagct

SEQ ID NO: 172325 - DNA, 180 bp, Zea mays
  Clone ID: MRT4577_88742C.1
gccggccgggcctgcatctctgctctgttctgctccaccacctcgatgacgacgaggccagacggcagcgcctccacgcccgcggctgcagcagcagctgccgggcatggccggggaggcgtccgccgccagggtcgacaactacctccccgtcgcgcaggacaacctcaatctgctgtt

SEQ ID NO: 172326 - DNA, 348 bp, Zea mays
  Clone ID: MRT4577_88743C.1
gggccaacgtcttcttacgatggctcctacattttcacggctttatgaacaggctcctcgccggcgagctcttcctcaccaagctcgacatacagcgcgccatccctctcgtccccaagaccgaggctgatatccataatagcgcccacaatctcttcaaagacattgaaattgtcatatctgatgtggacatggcgatcgtttctgacgtcatgctcgtctatcttcctgctacaactattgctttacagccgccactgccaaaaaacactcgagctattgccaactttttctataactggcctgataatactttccaaattgctatggctggaacgtcattctcac

SEQ ID NO: 172327 - DNA, 394 bp, Zea mays
  Clone ID: MRT4577_88744C.1
aaaggggggggggccaaaaagacccttacccccttgggcccaataaccccaggggaaaaaaaaccgcccaaaaaaaaaattgggttccccccaaaagggggggattgaaaaaacccaaccgcccaaagggccaggcccgtttttgaaagaacccggttttttttttttggcccggttaaaaggaaaacaacaaaaactgggacacgggggcccgaccaggcacccagcccaaggaaggggaccgttaccccccggaaagatttttttggggggcccaagcaagtgaacagggggccttcgaccttcccccgggatggggtggatttaacagggcccccattggtgatcccccccgcggcaaacggggaaagggttgacaaaacaaaaaggcgcc

SEQ ID NO: 172328 - DNA, 663 bp, Zea mays
  unsure (1)..(663): unsure at all n locations
  Clone ID: MRT4577_88745C.1
tccgggaaggagancaccaccgcggaagctaatctcgaacccaaaaattcagaatcaccgaaaaagcgaagaagagagacgaaggatgaaaaaaatgatgggctcctaggcccgccgcggttctataacaacggggacccccctcccggatggactcccctagcaaggttatagatctttccttcaccagagaggggcccgggaccttctattcccatgaatgtgtcagattatgcgccatgcttggggggcgttgtgctagatcgggcaggagaaaaaacagctgtgcccaacttattgaactggtgcgaataccccctcttcctgatgcctcaataccgagaaatcctgcaccatgacaccctccacaagaggtgagcatcctgatgggggactgatgaaagtgatccctgatattatcgtaaaaaacgcgttgaatattttgtaaaacgcccatgtttttgaaccaacagggcggaatggctgatccccgttctgatgctgaagaatactgcacgaaactcgggaggagcgttctccgatgctcgaacgagcctccattagaaaactgctactcctccagaaatgggcgaataatggtctatcaaggagagggtgcacatacccagcatatcacctctataatgatttttaaacgggttg

SEQ ID NO: 172329 - DNA, 305 bp, Zea mays
  Clone ID: MRT4577_88746C.1
tagtcggggccgcccttttttttttttttttttttctctcatgtattttttaaacagaggatacttagagtgggggaggggatctattccagttcagtccttttcataaaccacaaaaatttttgcatccttccatgggacatacctcgactgaaacgattagtgtacaacacaatgacctggcacgcctttgcccggtctgttatttaatacccttgaacgaacttggtggcctaaacccagaccgttacggcgaagggctcgcctaggtggtcgagcatcttcttcagggaccccttggcggc

SEQ ID NO: 172330 - DNA, 288 bp, Zea mays
  Clone ID: MRT4577_88747C.1
gccgtcgagacataccaagggtagacggaggctccttgaccgccgtcgttgggccgtcgtggtggatgcgctcgtgctcgccgacatggtcaacgtaggcgcaggaccaaacctaatggacgggctgggagcagtcgtcacagttataagttctgcacgcgtacttgccactcctcgacaatatagaggcgtcattgcatgacgcggcggcggggtgcgaaaaccattcagaggtcttgacgggctactgagatgcgaagaaacttgaactgtaccatggggtggcga

SEQ ID NO: 172331 - DNA, 483 bp, Zea mays
  Clone ID: MRT4577_88748C.1
cctcgaggccggccgggatctcacttgcaattctctgatcaactgtagaagtctgtcctcaagaactcgtctgttccatcaaacacactttcaacccacacattacacccaaaatgtccgcaccccagcaaggccgccagtctcctgagcccgagaaccagtccgacgcacagaagggccagcaggcacagcccaaccagcagggcggcgagaccgagacccagcagaagtcagacgaccagaagtccggcctcccctccaaccccacccacatcctcgagaagcactccgaggagaccacaagcaagaaataggtccatgcgggttcggatataagatctgatatgcggctgatgcgatgacggaacacgattgataggcaagagccttcgagtatataccttaaggtgcctgatgagcagggtaaccgaatgaatataatggtttaacgtcacttctaaaaaaaaaaaaaaaaaggcggcc

SEQ ID NO: 172332 - DNA, 538 bp, Zea mays
  Clone ID: MRT4577_88749C.1
actgatgtcattgcagcatatggctatgtattttaccggtgcctttttacatttcaccttcgtatatatatatagctaataatatcagaaaacagaaagtacaataatatacatgaagccaacatgtgatcacaaagtcacacactaacttccacagctgcattgatcaaaagactccgctgacatcaaaactgtcctacaactttggatcatctggagttgctccagattttttgctttacccaataattttagcatgtgacatgtctcctttcgcatctttcaaatcctttgataatacaacttttacagcaatggtaaagaaaaaagtagcttccactaactgagcttattgtgttactgccgtaatcttgatatatggaagcaaacacaaaattgtgaatataaatatatcataaagaaaatggagaatcatgtgctgatcttgccacaaatagattctataaatagagagcaggccttggaaaagtgacatggaggaaatgatcagattcatatgctacaaacactaagaaac

SEQ ID NO: 172333 - DNA, 255 bp, Zea mays
  Clone ID: MRT4577_8874C.1
ctctacgctgtacatccccatccaggcaacttcccaacccgtcaaaaatgtcaccaatgttgatttcacgggcattacttttaacgcgtccaaccatggaaaaagcctggcttaatgtaactgaatccctttgcgacaaatgcccctttctgaagctggagtaaaaacaaacaggccggcaactatcgcctttcctaacatttgccccgccgcattggcaatcggaacgcccattgtcccggcccattaaccgcg

SEQ ID NO: 172334 - DNA, 463 bp, Zea mays
  unsure (1)..(463): unsure at all n locations
  Clone ID: MRT4577_88750C.1
gttttggttcagaattcacaacaatggctggcaggaggcttcgtgatgccgtcaaagctgtacttacaagtgacaacagcggtgaatttaataacattcatgttgttcttgcggggctaacaaatacatattcgcagtatattacaacttttgaagaatatgagatccaaagatacgaggtatgtatatgcgcggctcatttgatgttcagtctgagaacataatatagaatggtacaactatagctagcttgatgctcggtggcccttgtgcaattaaattatgtcatttttaactgccttagtagcaacatgttctgggcatagctgaattggcactgccattaagattcaatcccttttgttttcatgcttttccccgcatccctgccattctagaattcaagcaataataggtctgcactgcatggtcctcttcgatcntgttggaggggggtacactg

SEQ ID NO: 172335 - DNA, 1195 bp, Zea mays
  Clone ID: MRT4577_88751C.1
agtactgctcctttgttcgcttcctatccttcctcctcctccccgcctcccgagtcccgtccctctgcggatttagctcccacccagtggctcagctcaactcggaccactgagctctgaccactaactcaaccactccagatcacggcgggcactggtgcagcaatagcagcggggtccaagtccaagaaatgagctcgcggggtcccgacccggcgccgcccggggacgagcaggagacggcggaggagctgctggagcgcgtccggggcatggtgccggcggcggcggcggcggcgcgggcggcgggcgggttcccgggccggtggaaggcgatcgccgcgaagctggacgcgctgccggcgtgcctgtccgacctgtccagccacccttgcttcgccaggaactcgctgtgccgggagctgctgcagtcggtggccgccacgctggccgacgcggccgagctcgcggcgcggtgccgggagccgccggcggacgggaagctgagggcgcagagcgccgtcgacgcgctctccgggaggctcgacctcggcctccgggactgcgcgctgctcgtcaagaccggcgtcctgtcggacgccgccggcccgtcaccgccgccggaggaggcgcccgacgtccgggagctgctcgcgcggctgcagatcgggcacgccgaggccaggggccgggccgtggacgcgctgctggacgcgctgcgcagggacgagcggggcgtgctggcggcgctcggccgcgccagcgtcgccgcgctggtgcagctgctcacggcgtcggcgcccgcggtcccgggagaaggccgccacggccgtgtgccaggtcgcggggtcgggcgcctccgaggcgctgctcgtgtcgacaccatagtcaacgctgaggacaacatccaggacaaggagggcatccctccagaccaagagggtgtcatctttgctgggaagcagcttgaggacgggcgcacgcttgccgactacaacatccagaaggagagcaccctccacttggtgctgcgcctcaggggaggcatgcagatcatcgtgaagaccctgaccggcataactatcacccctcgaggtggagtctttagacaccatcgacaactgtaaggccaagatccaggacaaggaggggattcccacagaccagcagcggttattttttgttggaaagcagc

SEQ ID NO: 172336 - DNA, 318 bp, Zea mays
  Clone ID: MRT4577_88752C.1
cccacgcgtccgcccacgcgtcctaggccatcaacaattttacatatacactactctctggggtaacgatatctaacggtctacattccctccatgctaataggctaacctgtcctctatttaatctctttcatatgttgaaattgacttgtacttactaacactcttggctgacttacatatacatgagctcagctatagatctctgcctttattacacatcctcaactgagtactaatccattctcattctactatattggccttattaactatattaccacttctttaccatctttaacaaagacctccactttt

SEQ ID NO: 172337 - DNA, 185 bp, Zea mays
  unsure (1)..(185): unsure at all n locations
  Clone ID: MRT4577_88753C.1
cgcgtgtgcgcacgggcaccggctgccgcaacattgagaggtaccagaagcctggcgcaaccgaagctgtangcggtgaatgacacggccaagcgcctaggtatcagctccatccatgacaccacctcggcgggctctgaccaccccacgtcatgctgcagcgccggagagatcatggctgtcct

SEQ ID NO: 172338 - DNA, 386 bp, Zea mays
  Clone ID: MRT4577_88754C.1
ttctcaattacagagatctagatagagaggtggatgttatatctacgcgcgagcgacagatccacaaccaaccaataggaacagccccatatggtattgacgctcgaccccggaccgttctacacctactgcctgcctagtcccaccttcttcaagaacgacttcattgacatcaacaacctcctcagcaaccctctgattattctaccctctaaccgcacagcaccaccaaccgcaatttcactatttttctacaaatttatttccccaaaaagagctccaatatattgtttttttgtcacacaaccgttatattttattatgcaaccctactttataccagctgattgatattataaaatgatgtattttttagtcctcttact

SEQ ID NO: 172339 - DNA, 322 bp, Zea mays
  Clone ID: MRT4577_88755C.1
gagcttactagtcggcggccgccctttcttgatgttctgtgccgaccctgccggcccaccccattgtgcactcttggtgacgctagagccctgaccctgcacctgcatcatatcttgcagctatgaccgaaagccaaacggacggctgaagacatccatgttgagcttatcaggttccctccggccctgtcggggagatacctaataattatgacgcccctcatcatggcaaacacaccggtttctgtacaagatacgaacacttttttatacctggccaatatacgctattggcgacgagcctatacaccttgatcctggc

SEQ ID NO: 172340 - DNA, 1013 bp, Zea mays
  Clone ID: MRT4577_88756C.1
acaggtaagctatgtttcgcgtaaaggtaatcaaacagtagcacgtgtaaagtcaacgcatacccatcagacggatagtaactccacacagactggcctgcaatctcatacaacaaatctaaggattcgtgtcctctccactacaataaaaacgcaaagctttggttctcgcggatgaaaggcagcaggtcattaactgacgtctcctcaatgtttggcattgacttcgaaatatcttcaagcgaaaagggtatgctggaatcatcatccagcaggaccgaaaagctggagacgctatttgattcttcgcgcagcatagctctcatgcttgacatgaactcggctgaagttacatttgttccctttaaatcatcccaatacataccgactatccgctctagctgctgcaaactgagagccgggcaaatatcattgcatatctcttcccatgtccttatcggcttcagagaaattaccacaaagtcaacagcttgtcttatatgcctcagtgctacccatgctgagtctgcaaactcttgactgacgtcattgcaccaatatcttagttgagttagcccatctttgatgtattgcccattgctaaaggaacagcattcacgcctcaagaggagcctgttaaacaattgcacattgaccacagaaaatatttgggtaaacaatttgtggaccaaaattgagggaacatgattggctctgaggacatgcaaatagctgttgaagattttcacgatgctcagccaatgcatgagttgatcctgttggcccaagccactagaaggagacatcaaggcctttgcttgatttgagtaagttcttggatcctgtatgcacaactcaagtaatgggtttagctccttttttattttatcgcttatcactccatacaccttttcaacctgatccactagctgctgcttgaagagcgaagccggataccttgcttcaatttggtgaaacagcgatacctccatccactgatccctttgagaaaa

SEQ ID NO: 172341 - DNA, 483 bp, Zea mays
  Clone ID: MRT4577_88757C.1
ggaatgcccgccgccgaggctggatctttatagggggcgccccttttttttttttttttttttttttttttttttttgggttttttttttttttttttttttttttttacgagaacccacgcaaataaaggggtatacattttaaaattggtatgggaataaccccaacacccaaaagggcctggggggtttttaggaacaccttttgggttgtaaacttaagaaccgaatccttgtagtcaaaaactggggaggcaacattaaccttggggagttcctcagaggaagcaaacgctggagcccttatccaggcatgctcggaaataactgtaaagggcgggggcatgcactttagggggggagctcgtttgctaggccccaaagggttggcagcaggggggtctagggtgaactttttttttgacaaaaatagtctccaagcaagtaaacatgtggacttgtcgtaaaagtatgaattcccaa

SEQ ID NO: 172342 - DNA, 525 bp, Zea mays
  Clone ID: MRT4577_88758C.1
cgtattcgttgtttcggcaaggcttaccggctagcccaagattcgtctgtgtccgcggtcgcgccggtgttctgtcctgccggagccgccgagcgctgccatgttcgcgtcatttgtgctcgctgctcgcctcaccattcgtcatcatctcgaggttgtgacatgggaatcggaaatggcagaacgccacgggtggggacatgggaatcggaatggcagaaccaggaatggcagcctacaccttatcgacttaatagtacaatgctcctgatgagtacaacgcagtgtataagtttgctttgtactgcttaagaccatctctggaaggcgttcatattttgacgatgatgtgctcctgtattttcctttctgaataccaaattctttaatgtgtcctcttgtgtggaatcaagttcctaatttagctagagcaatacttgaaaagaggaatcacaattagttgtttttcatgtgattgtataacaatttctcgtaaatgaatataatgctgactaatttactgtt

SEQ ID NO: 172343 - DNA, 629 bp, Zea mays
  Clone ID: MRT4577_88759C.1
aaacggggccgaccccaaaggatcaaagtccaagcatccctccctttacaaagccccgaaataaataagctaaatctccggcaccagttcctatttagccagagacattaagacatacatacatacatagggctactacataagcttaagcctaagcctgggggggggggactcctcatataggggaaagggagctagctagatactaaatagaggggggtcgagctacctggcctagctagatcccactacatgcaactgcaaggggcgggctgaagtcaagcatgcatgcacatgcgcgcgcgttcatggggctccgaccccgaggaaatttataaacgctggcgggggggggggcgcggaattttaaaagggagcgccggagccctggtgttttggcgtcccttaaaagggggccgcgcccccgtggttgcccaaaacaaagggcgcctcgggggggtttgccggggccaccccgacgccgtcgatccaaccgttttgaacgggcagctgcaggagctgatgcggttccccgtaccgggcgacgccgggcgcgtccgacaacgggggcagaggaaggcgcctgctgtcggggtgcgccgccgcgctgttgggcccagggaacaagc

SEQ ID NO: 172344 - DNA, 420 bp, Zea mays
  Clone ID: MRT4577_8875C.1
ggacctttgggctggtttatgtgcttgtttatgtgcttgatctgcgtcggagaaggttgctatgtttacggtgtttggtgttggtgtgtagcttagtgttcatactcatgagtctcctaatgaggattcttgggtgggttttgcgctggaggtgaatcggggttcgcctcatgggaatggtattttggcgcattcttcgtatgcgcttggcgtggatgggccttcggggaatgatatgatggattggattcctcgtgcggttgttgatgatgtggattagaaggtggcgtaggtggttacggatcgggtgcgtgggtttgggtgtgttgatcgtatggtgacatagtttgggtaggtgcgtcattagtttgatgatgcgtgtagttatgtgctgcctgtgcctgatgttcatcattagct

SEQ ID NO: 172345 - DNA, 484 bp, Zea mays
  unsure (1)..(484): unsure at all n locations
  Clone ID: MRT4577_88760C.1
ggggtggggttgtgttttttttttttttgaacaccgagggggcttttttaaagtttattaaccacgggcacttgnatgggctggaatgaaacccgcttgccagtttagctccatgcgcgcgctgggtttgccatcctgttctcaactttgtgggtttttgttncggggntctnntctcctcttctcttcttttctttcttctctttctttttttttnttccttctctctcttttttttttttttctttttttttttttttttttttttntttttttttttctttntttttnntntttttttttcttttttttttttttttttttttttttttttttttttttttttttcttttttctttttttttttttttttttttttttcttttttttctttttttttttttttttttttttttttnnnttttttttttttttttttttttttttttttttttttttccctttttttttttttttttttttt

SEQ ID NO: 172346 - DNA, 316 bp, Zea mays
  Clone ID: MRT4577_88761C.1
agcggagacaaattatattacaagggatgtacaaatttacatgagtttttacataataatattacaaaaggcttttcagaatttttgcaggaaagaatattgtggcaactatcaagcttcagctttggaatacttgacaatagttatacttcaggttggccatccggcgttaagatgacttagagcttcgtcacccgtaatttgtcgcccggcatttacccaaaactgggtgataaatgatataaccgatacttcgagctaggctcggaatatctatcagatctgatgatggtaagccttatgtgggcctattaac

SEQ ID NO: 172347 - DNA, 324 bp, Zea mays
  Clone ID: MRT4577_88762C.1
gtaagctcggaattcggctcgttaccgttgcggccggcagtcctcttccgtttgcaggagagcccatctcggggggactttgagatcaggatgctgctattcccgggcagatgggccagaagggtgaagcgaacagcacctatggaactggtgcctgcatccttgttaacacaggggaggagcctacccaatcctccgatggtcttgttagtaccattgtttacaagcttggtccagctggacccactaactatgctcttgcagggtccattggacttgcaggcgcatcatttgaatgagtgagggacagacttggaatcattc

SEQ ID NO: 172348 - DNA, 838 bp, Zea mays
  unsure (1)..(838): unsure at all n locations
  Clone ID: MRT4577_88763C.1
gcacgagccaacgacgaacccgatgccgccccaccgtgccggaggggccgcaggcggcggcgacacgagcgcgttcttcgcggcgacgctagtactttgggctgtgtctgtggggttcgagatcggcgtgcgggggagacgcgagctggcgcccgtggccgccggcttcgccttcttccaggccgccaacaccgcagtccgcggctcggtctcccgcgatccgctcttcgtcaacaccgccgtatcgcttctccactcctccctcacctccgtctccgctgcactccatatttttacatgtaaggaaagtcaggcgaatggttggatttcgggattttgacagaacagtggtgaagctggaatgggtactcaactggactacctttgtaacagcaagggtgatatgccatatcttgattacttacaagctcatctctgatgcccacaaatttgggaagggcattgagcttccgctagctctacttggtatggcaggaatgaatctgcttaacatatttcttgggctcgatctacttaaagcattcacacgagaaagaaataagcagaaccatcaggattgaatgcacctttcttgatggcggtgtactctaaattttgagaaggctgtagttccgttcttgtagggacatagaggtatgtttaagtcttaattaatcagcaactacactggaggctatggatcttatgtatcaacacgtgctaatgctaagatctctacaagaaaggggttgttaccagtatgtgtaatcatgtangnataaccattaatggtcattaggngaattaagagagttncaagcnggtaactggatgcagg

SEQ ID NO: 172349 - DNA, 1367 bp, Zea mays
  Clone ID: MRT4577_88764C.1
ccagcccgcccaccgtccgccccccctccgccgcccgtccggcgctgtgcgggtgcggctcgccgttcgccatccgagccaacgacgaacccggtgccgccccaccgtgccggaggggccgcaggcggcggcgacacgagcgcgttcttcgcggcgacgctagtactttgggctgtgtctgtggggttcgagatcggcgtgcgggggagacgcgagctggcgcccgtggccgccggcttcgccttcttccaggccgccaacaccgcagtccgcggctcggtctcccgcgatccgctcttcgtcaacaccgccgtatcgcttctccactcctccctcacctccgtctccgttatctttgttcttgctaatcaatggcgtaataagggccttgagaacatgtttgagcatgaagaactatttggtggcagttggattggagcatattctgctctgtgcttttcttgtggctactttgcatatgaccaactggacatgctccgataccggctatacagtggatggcttcctggaattctcatgcatcacttgatcctactcatttgctttacactagctctgtataggaatgtcacaatcaactacctaaatctctcccttgtatgtgagctgcactccatatttttacatgtaaggaaagtcaggcgaatggttggatttcgggattttgacagaacagtggtgaagctggaatgggtactcaactggactacctttgtaacagcaagggtgatatgccatatcttgattacttacaagctcatctctgatgcccacaaatttgggaagggcattgagcttccgctagctctacttggtatggcaggaatgaatctgcttaacatatttcttgggctcgatctacttaaagcattcacacgagaaagaaataagcagaaccatcaggattgaatgcacctttcttgatggcggtgtactctaaattttgagaaggctgtagttccgttcttgtagggacatagaggtatgtttaagtcttaattaatcagcaactacactggaggctatggattctttatgtatcaacacgtgctaatgctaagatctctacaagaaagggttgttaatgtgtaatcatgtaggtataacattattgttcattaggagaattaagagagtgcaggcgggtaactggatgcaggatttacatacattttgcaatcaggaatcggaaagaagagaagcgtaccatgtatcaaaccccttggtcccaacttccatacctcatctaaagtaacacctaagcaacttgtagattggcactgtgactttgaggctacaatgctcttgtttattaatatttataatatttgacgatttcttgctgc

SEQ ID NO: 172350 - DNA, 1281 bp, Zea mays
  Clone ID: MRT4577_88765C.1
cacgatgccgccccaccgtgccggaggggccgcaggcggcggtgacacgagcgcgttcttcgcggcgacgctagtgctctgggctgtgtctgtggggttcgagatcggcgtccgggggcgacgcgagctggcgcccgtggccgccggcttcgccttcttccaggccgccaacgccgcggtccgcggctcggtctcacgcgacccgcgcttcgtcaacaccgccgtatcgctcctccactcctccctcacatccgtctccgttatctttgttcttgtcaatcaatggcgtaataagggccttgagaacatgtttgagcatgaagaactatttggtggcagttggattggagcatattctgctttgtgcttttcttgtggctactttgcatatgaccaactggacatgctccgttaccggctgtacaatggatggattcctggaattctcatgcatcacttgatcctactcatttgctttacactagctctgtataggaatgtcacaatcaactacctaattctctcccttgtatgcgagctgcactccatatttttgcatgtaaggaaagtcaggcgaatggttggatttcgggattttgacagaacagtggtgaagctggaatgggtactcaactggactacctttgtaacagcaagggtgatatgccatatcttgattacttacaagctcatctctgatgcccacaaatttgggaagggtattgagcttccgctagctcttcttggtatggcaggaatgaatctgctcaacatatttctagggcttgatctacttaaagcattcacacgagaaagaaaccagcagagccatcaggattgaatgtgcttttcttgatggtggtgtactcaaaattttgagaaggctgtagttccgttcaagtagggcagagagatatgtttaagtcttaattagcaactacactggaggcaatttttgtatgcattctttatgtataccaaaatgtactaatgctaagatctctaccagaaagggttgttgctagtattttcatccatgtaggtataatattcattagcagaatgcaggcgggtacctggatgcaggatttacatacatattgcaattagaaagaagtgtgtcaaaacctttggtctcaactccctaacctcatgtaaagtaaacccgaaagcaaaaccttgtggattggccctgtgaggctacaatgctcttatttatctttttaatagttgataattgcttgctgcaatgcctactatattaaaatctatctcatacct

SEQ ID NO: 172351 - DNA, 1339 bp, Zea mays
  Clone ID: MRT4577_88766C.1
cttttgtcagagaaatgctacataatgcaaaagctgacattgcaactttacgagttgacaagaacagtagccttgttttacagactgcactgaagctatcgtctggtgatgataatgaattgcatcatataatatcaatacttcttggttatgatgaatataaaactgtacagacgagagattacagtgaaaaaatggacgagattgttactttacttgaagaaagtgcttatagtcatctcttggaggtgattgtggaggttgccccagacggattgcgcaatggtatgcttgcacgtagtctgaagggtgcattatttgcaatctcatctcaccactgtggtaactatgtggtgcaagctttcatatcatctactaaaacctcagatcagatgaatcaaatatgggaggaacttggtccaaacatgaaggaattgcttgaactaggtaaaacaggggttgtagcttccatcttagcggcatgtcagcggcttgaaacttatcgccttgagagttctcaagctcttgctgcagcgttaagttcagattctgagtctactgagagcattgttgcacgtatactttttcttgagaactacctacatgagagatctaattggaaatggattcttggtgcaaaaatgagcattctgggttgcttgatgctgcaatctattttccagtacccgcatcaatatattcgcccatatgtcgcaagcttgctggccatgggggatgatcagatcctccaaatttccaaggattcaggaagttgcccgtgttctttgagtcttttctaaagttcaagtgccactgcaaagcgtaaatttaatgtttttggaaagttgcaaggtcattatgggagatattgctatgaatccttctggctcattcttagtagagaagtgctttactgccagtaacttctctcataaagaggctatagtggcagagctgttggctgtgcaatctgatctatctaaaacaagacacggattccacttgctaaagaagctggatgtcgatagatatgctaggcgacctgagcagtggagggctagtcgaacttcaaaagaaacaacccaaaaaaagtttgaggcagaatttggctcaaacagtcaatctactgggcagattgttaaagaaaagttctctcaaagtcgcatgaagaagcgtaagcagaaagagaaggttgacaaaattactgaggatgccaggagcaacaaatcagacttttctcagaaaggaaacagtaagaggccagaatctggcagcgcaagttctgagggaggatcaagtgacaagggacctctgagtgaaggggctagtgctagcatgg

SEQ ID NO: 172352 - DNA, 575 bp, Zea mays
  Clone ID: MRT4577_88767C.1
cacaccagctgtcccactcaccatggagaagatcctgatcctcctgcttgtcgccctctctgtggcctatgcagctcctggcccccgggggatcattatcaacctggagaacggtgagctctgcatgaatagtgcccagtgtaagagcaattgctgccagcattcaagtgcgctgggcctggcccgctgcacatccatggccagcgagaacagcgagtgctctgtcaagacgctctatgggatttactacaagtgtccctgtgagcgtggcctgacctgtgagggagacaagaccatcgtgggctccatcaccaacaccaactttggcatctgccatgacgctggacgctccaagcagtgagactgcccagccactcccacacctagcccagactgctgtaggccactaggcgcaggggcatctctcccctgctccagcgcatctcccgggctggccaactccttgaccagcatatctgttttctgactgcgctcttcacaattaaaggcctcctgcaaaccttcaaaaaagaacgtttatatcctgtgattactctaagcaaggggcgtattaa

SEQ ID NO: 172353 - DNA, 610 bp, Zea mays
  Clone ID: MRT4577_88768C.1
taatgtaccctctgtgtgtgtttaaccaaatcttaacaagtcttgcacttgaatcttccatttaaattaatcttaaagtgccctgggggctgggataaaaacctgttttttaagtatcaattgcctggttggccactgcaataaacagaccattgctaagctgctggtgtctaaaactcacatatttgtaaacgatgcagctattatctccagaatttcgcagttcatgtcattcacaattatggatgataaaggttttagagcaccacacttacaccgttgaagttaggggtgcgggttcaaatgttaatgagatatagattgacttggtagatttctgtggcatggtggcacctgtcaatgattttagtatatattatatatcttcatcagatttgtaaaaagagatattggccatgcttaagcctcatcatgtggtgtgatagcattctatcaataacctgtattgaaacctgaaaccactttacagcagattgatagcaattatcccaaaactgatgttctgcttttcgacaccagtggggtacaatatgcagtatgcacacttcaacaattcctttgtattattggaagtttaggattttgattt

SEQ ID NO: 172354 - DNA, 133 bp, Zea mays
  Clone ID: MRT4577_88769C.1
ccaaaaaccatggacgtttttttcatcagctcctcacacacggacacggcacaaatgtctaacacctaaaccaagcaatttacatagtacaaaacattcatcacaatggatggggatcggtcgccggagaagg

SEQ ID NO: 172355 - DNA, 415 bp, Zea mays
  Clone ID: MRT4577_8876C.1
tttttctacactattgtccaatagggggggggggggggggggccgcatcacagtggatagcggtaccattgccctgagggacacatgctaaacggggtcctgatctaaagaaggccgctggctctcttctgacacactcttgacacgatgcggtagcacactgtcaataacaataccggggggggggggggggggtctttggtatgggtccaacctaattctctacctgaggctccattgtcgggcaagtctgatgctcctaaccggcgaatttccaggtgaaatacggcttatatacagttgttgctgtctaaaacactcgtagtcggaccttaagacaccgccgctcggtgcaactcacttccagaacccactgtttggacccttctgcctgcgatgcccctgtgctcttaac

SEQ ID NO: 172356 - DNA, 145 bp, Zea mays
  Clone ID: MRT4577_88770C.1
cacctctaacacccaatcacatgcacgaacagcagctgcagcagcagcaggatcaggtgctaaacgtcagagtgctaatggatggtagaccaggcttggtgaacggcatcgctgaaggtatacaagcttatatactagcagatgg

SEQ ID NO: 172357 - DNA, 489 bp, Zea mays
  Clone ID: MRT4577_88771C.1
actcttgcggtcgccttcttcctgcgcctgctgcgtggtgctgtactcaccgtacaggtaggatgatatgtttatactcatatcatttttttttcttttttttttttttctaacaaaaaacgaaacacggttttttttttttttttttggcggcgcgccccttttaagggataaacaaattttttttcctaaaaattgtttttaaaaaaaaaaaaaaaaaaatatgttttttaccgtggtgggtcaaattataatttaatatttgattagtggttggaatttgttttttttttaataacgtgtcccaattttataaattagggtttctactatttaattgggggtacccccataatacaatatttttttgaatttttttttaactggggaaggaaaaaattctggtattattttaattatttttgtttgggctgatatatatttttttaaaaaaattttaaaatatatatttcttttttgttaattaat

SEQ ID NO: 172358 - DNA, 713 bp, Zea mays
  unsure (1)..(713): unsure at all n locations
  Clone ID: MRT4577_88772C.1
gaccctcgagtccttccggggattatcccggtagatttcgactcagactcgattccctcctgcgattataaaagtccagccaccatagccatgcgagcagcgcacgtcggagagggagctcgggtgtcgtcgagtgcggaaccagggagccccgtcgtccggggggcttcaccgcgccgcgctggtcaggtccgtggctttggccgggcaggttttcgcccagaattgcggattgggcggaccttctgtcacggagcttcttctcgtcgcgagccgcaccgattgtgcccggattcgtgtgaggttacgaatctcgaagagcaagttggtacctagaatctcaagtcccagtcttggagcagtggctggtgctgtacgtatccgctgatacttcgtcctcgttgactccagtcgtagcacctcactggttcaggactgaatgttgctggcgacttggaagaccgaacgcttcgatgtgcctgctaggagaaatgcaaagctcgagttgctgcattgtgacgttgtggctcgagaaatggcgcccttttggacagtcatctccagttgtgtttgattttaccgggtcttcttttttttccctggccatacatggatcttagttgcgcaacgttggtctgggattgtgcacaagtcatcatggacgtttgtggcanaattctactagcatggatatctggactcgggtactactc

SEQ ID NO: 172359 - DNA, 265 bp, Zea mays
  Clone ID: MRT4577_88773C.1
gacaacccatgcatggccggtccgatggagcgagagggacgagacgcagccgagaagcccctcttggtaagggtgggcggcagcggtggtagccagggcggcagcgcctcctcttcttcggttgccgtggtggtcggctgcaccgccatcgccgtcgccggctccttcgagttcggaatgtcgatcggctactcgtcaccgactcagctgggcatcatgcgcgatctccgcctctcgttagctgagtactctgtgtttggctcga

SEQ ID NO: 172360 - DNA, 409 bp, Zea mays
  Clone ID: MRT4577_88774C.1
acgatgatattggacggaacttggatcatgaatgtacaaccatccgttatcagcacaaccaagcagattactaacaccaaacgggacatatacgggacatgcaatgattcggcgcatgtgctagctaggacatctatacacacacatagcttacacaactgcgggttattacgggatatacaaaccatgcatgcgtgatattttacaaaatgcactgcaggtatagatattacatgcatatttaatttatgcgaattcatgtctatggcctcgaccctgcacgttttcagtgcttgcacacgccatccatctgtatggtggaggaggtcgcaggccctgggccagccagggtcatcatcggcgagatcttatgggccagtagcctgggcaccactctgcgacaccattg

SEQ ID NO: 172361 - DNA, 227 bp, Zea mays
  Clone ID: MRT4577_88775C.1
ctctctcgatgtcaccgaagtggagccctattctttagatgctgtggctttctttgtactgtcggggcggcacaagcaccaacgaactcggccgctgaaatggcttctacctgatgacatgcaccctatctgctgcaacaaggacacagcacaggccaggtgtgtccctgctggggataaacctaccataggtgaggtaccctgatgttcctgtacacgtgctgcca

SEQ ID NO: 172362 - DNA, 110 bp, Zea mays
  Clone ID: MRT4577_88776C.1
agcttatgcctttcccttcgcttcgacaaaagctccaatagacacacacacctgcgttcctcactcacgccggcggcctgtatcactctcaccatggctgctggactggg

SEQ ID NO: 172363 - DNA, 198 bp, Zea mays
  Clone ID: MRT4577_88777C.1
aaaaccaaaactttattatgaagcactatatttttggtcaaaccacacatgatagggcgtgccacacttacatgcattattacatatatacatagatagggatggatagaggagattggccaaatttcaggaatcatcccaagggcggaaaggcagcggaaacgccacaggggttggggcaccccctgggcagttggg

SEQ ID NO: 172364 - DNA, 143 bp, Zea mays
  Clone ID: MRT4577_88778C.1
caccgtcactgggtctccgtgagccaatctgtattgcttaagggatcagcactcccagcaccagcttataaaactacgcccaaaactgtcaccatgtctctcaaattttctatttacacttgtctcccaattccaaccaaggt

SEQ ID NO: 172365 - DNA, 290 bp, Zea mays
  Clone ID: MRT4577_88779C.1
gccatcaccgaagcgggagcggccaaaatgaagtttaatccctttgtgacttccgaccgaagcaagaatcgcaaaaggcatttcaatgcaccttcccacattcgaaggaagattatgtcttcccctctttccaaagagctgagacagaagtacaacgtgcgatccatgcccatccgaaaggatgatgaagttcaggttgtacgtggacactataaaggtcagcaaattggcaaagtagtccaggtttacaggaagaaatatgttatctacattgaacgggtgcagcggga

SEQ ID NO: 172366 - DNA, 236 bp, Zea mays
  Clone ID: MRT4577_8877C.1
catcatttctcctacccctatagttaagaatggggcacgtcagattggtcatttttcaattttccgggactccaaaccaatatgatctgcctcaacgagaaatacaccctcttatctagagacatccgctacgagacccactaccactacgtgcacacaacaacatggaactatcgttaaggcctgtcgtccaagatcatcctgtactggcataagcactgctctcttcgatcgcg

SEQ ID NO: 172367 - DNA, 250 bp, Zea mays
  Clone ID: MRT4577_88780C.1
gtttagtggacctaagaatgtgaatgtatatgagtgtagtctcataagcaataacagattgtcatgattaaccttgagatacgtgtagtcttcttttaaggagctaagtctagaattgagctccctattaatttcatcaagcttatcatagttttcttttttatttctaaggaaaaccttaagctctttagaattggatgagatagctttgttttcatcttttaattcatcgctacctttttctgctatg

SEQ ID NO: 172368 - DNA, 2153 bp, Zea mays
  unsure (1)..(2153): unsure at all n locations
  Clone ID: MRT4577_88781C.1
gtcacggagatccacctgcccggggaaggcctccggggcgcgctccccgtcggcgcgctcggcgggctcaacaagctcgccgtgcgtcgctgcggnnnggacgataatccggcccgctgcctcgggacctcgcctcctgcgtcgagctccgggtgatcaacttgcagtccaacctcctctcgggggagctcccggtggaggtgctggcgctaccggcgttgacgcagctcaacctcgcgcagaaccgcttgtcggggaggatatcgccggccattgccaagaacgggcggctgcagctgctcttcctgaacggcaaccgccttaccggagagctaccgaacgtcagcatgccgtcgctcaccgcgctaaacgtctccttcaacaacctcagcggcgagatacccaagagcttcggcggcatgccgtccacgtctttcctcggcatgccgttgtgcggcaagcccctcccgccgtgccgagcgccgggttcggaagcatcgccgtctcagcctcccactcccacgcttcggcccgaggcaccggccccgactgacaaccgcggacggggcaggcatcacctcgccggcggcgccatcgctggcattgtggttggctgcgcgtttggcttcctcctgatcgcggccgtcctcgtcctcgtgtgtggcgcgctgcggcgggagccgagaccgacataccgcagccgtgacgccgttgcggcggagctggccctgcacagcaaagaggcaatgagccccaacggctacaccccacgtgtctcagacgcgcgaccgccgcccccgccttcagtcccgccaccgccagccgtctccgccgcagccgcggggcggaagaagctcttcttcttcggtaggattccccggccctacgacctcgaggacctgctccgcgcgtccgccgaggttcttggcaagggcacgcacgggaccacgtacaaggccgcgatcgagtctgggccggtcatggcggtgaagcgcctcaaggagacctcgttgcccgaacgcgagttccgggacaaggtcgcggccatcggcgggatcgaccacccaaatgtcgtgcccctgcaggcctattacttcagcaaggacgagaagcttatggtgtacgagttcgtggccatgggcagcctttcctccatgcttcacggcaatcgcggctccggccggtcgccactgagctgggagtcgaggaggcgcatcgctttggcctcggcgcgcggtctcgagtacatccacgccacgggctccatggtcacgcacggcaacatcaagtcgtccaacatcctcctgagccgcaccgtggacgcgcgcgtggccgaccacgggctcgcgcacctcgtgaaccccgcgggcgcggcgacgacgacccgcgtcgcggggtaccgcgcgcccgaggtggtggcggacccgcggcgggcgtcgcagaaggcggacgcgtacagcttcggcgtgctgctcctggagctgctgacggggaaggccccggcgcacgcggtgctgcacgacgagggcgtggacctcccgcgctgggcgcggtccgtggtgaaggaggagtggacgtccgaggtgttcgacacggagctgctcaggcacccgggcgccgaggacgagatggtggagatgctgcggctggccatggactgcaccgagcccgctccggaccagcggccggccatgcccgagatcgtggcgcgcatcgaggggctcggcggcacggcgtcgacgtcgacggcgacggcgcggtccggccggagtgcgtccgtggacgaggcggacgaccggccgctgaggaccaccggatcgatccgtcagagctgaggtccgtccgcgtccgatcacttgtgttattgtcactgacggaaggttctgaacaagggggaaaaaaagaagagatctttctgttctgtcttcttgcgcttgtcgtaggggcgttgtcgtgtgctgtttattctttcatgcgtctcttgacgcttgttcgccctcagatgaattctttcgttttagcagcggtgatgagtgtgcgctgatggtgtgtgaattggtggtgatagtaatgcaatgtgtaattgcttctagtaaaaaaaaaaaaaaaagaaaaaaatcaactacaacttaaagatcctttaacgaggatta

SEQ ID NO: 172369 - DNA, 184 bp, Zea mays
  Clone ID: MRT4577_88782C.1
gataaaacagcaagatccagtggaggtttctgatgcagtgaagagagctgttgctagatcgctcatatcaacgtatggcggcaacgacccaaccaaggacgacgacgccgtagaaacatcgcaatggcaggaccagatgccgttccatacgtattcttgtgaacttaagggcctctctcagcgg

SEQ ID NO: 172370 - DNA, 412 bp, Zea mays
  Clone ID: MRT4577_88783C.1
gacacatcgcaggtacttaaaatttttaggaaaacaaaagtctgatactacaatgattttttaaaaagaaaaaacaattagcaacacttctaaaggttcacaaaactggcccagcttgcacctcggtccacaaaacagggcttatagctacagaagaccaaaaattccaaaccctggctggactagggtttaagcttataaaaccattatcgtagattggcagcaagacatgaaactgatttaacattggctacatgggtaaccaccgcacccttagttgtgacggtgccgaaagcaccgatgaggtcgggcatatgaaattacattgaggtctggttagtaagatcctgcaccaacttaatcatactcattgaggggcctcccagctgcattttgttcgcaattaggatac

SEQ ID NO: 172371 - DNA, 377 bp, Zea mays
  unsure (1)..(377): unsure at all n locations
  Clone ID: MRT4577_88784C.1
aggcaatttaggttcaggttgtccatttccacaacataaagnttctctagggtaagtgtgaaacataaagtggggagggcatttctaatccttattatcacaatcttaaatattatcattatcaacttaaatacaaccaactgataactcatattaccatttcttattattctgcgaatcatttattcatcctcaaaccaccatatctatttacacaacatcctatatttaaaatccttttattttcatttgtcaattcacaacattataatcccacctattataattaaacttctctcaatttaacccccataacttatacttttcttaatcccttcccccttttttaacccatttttttaaccctacaataaaaa

SEQ ID NO: 172372 - DNA, 560 bp, Zea mays
  unsure (1)..(560): unsure at all n locations
  Clone ID: MRT4577_88785C.1
gtgccaaccaagcaaacttatacctcgatgattgcaggatactgtagacttggcaaattgacctcggctctcaaggtctttgagaggatggttcaccatggatgcctccctgactctataactggtggggcnctaataagtagcttatgcaaggaatcaagtctagaggaagcaagggcattatttgagcccatgcttgataaacatttggtgccatgtgatgtaactcgtgtcactttagcttacgaatattgcaggagggacaagataaccattgctgtatcattcttggatagactggacaaacggcaacaggctcatacagctgatgcactagttagaaagctcagtaccgttggcaatttggatgctgctagtcttttccttaaaaatgttctggccaagcattatgctgttggccatgcaacttatccaagctttatcaattcatgctatgaaagcaatagatatgctctagcttctgaaatatctgaaaagatctcaaagcggatttctggctttaagaaaaaggatactgcagttattgcttgatttgcaag

SEQ ID NO: 172373 - DNA, 218 bp, Zea mays
  Clone ID: MRT4577_88786C.1
cggccgcgcgtccagaccaaacgtaacatatttacgcgctaacatgcatttcgcactattatgccgagtttgtaacataattagaggggttttttaggactgagggcaagcaaaaaataataaattttactagtcaaaataaaccagttgaaatcggtaccgggtgaaaaaaaaaaaaaaataaaaaaaaaaaaaaaaaacaaggtgagaaatgaaaa

SEQ ID NO: 172374 - DNA, 112 bp, Zea mays
  Clone ID: MRT4577_88787C.1
gaaacactggatctatacactgatgtgatgtgctaaagaagctcgataagcactaggatggggtctacaatattgaatgagagtagcctaatattgatacataggatatggc

SEQ ID NO: 172375 - DNA, 216 bp, Zea mays
  Clone ID: MRT4577_88788C.1
aaaaaattgggactacatactgaaaaattattttcactggcttataacacatctatacgagggaatacaacatccaactataagagatctatatctctagcgcctaataatgttgacccagattatgatgacactagatcctgcgctcaagctactacgcaatccttgtgtaagacaaatctgtctacctctacctaaatttgaaaaccgggaaca

SEQ ID NO: 172376 - DNA, 378 bp, Zea mays
  Clone ID: MRT4577_88789C.1
gccaaccctgtttggtttgattattatagtactggttttccaacatacagttcactagcatgtgttagccatgagttggaccatgtgatttccccccactccactccccccccccccccccccaaaaaaatgatcttaaggtattaagttttaactcagtctcccacatggcaaaattcttgtctgaattttctttaaaaagtgcacttttacttttaattgtacagaatctggagaattgtagagtatcaagttaattttgttctgtttaagatatgtaagaaagtacataaatgtactttaaattggtgaatattttgtttatagaaagacttaaagcttcaattttgtgttgattttttagattgataccatttt

SEQ ID NO: 172377 - DNA, 444 bp, Zea mays
  Clone ID: MRT4577_8878C.1
agcagtggaacaacgcagagtacttttttttttttttttttttttttttttggggcgcaaaagacatatgggaaagcatgtgcaaaaacgttttgtacaagagcgagggggacacagcacagctatacgctccacagtgcaagaccccaggggatagaaaacaagcgtgcgtaacaggggcgcggaaaagtgcgcggctgtggggggggccccacacgcgcgcgcatgtgtatatataaaaaggggcgtgaaaaaaagtatatgtggggatataaaaaacacttttttacacacagtgttttttttatagagacacccgcgctctgtgcggtgtccccagtgttaaggggagaatcacagcacagtggggggcgtttataggggacccgctctcggccccaatttgggggaaaacggggacataggtgtcctctgtgagaaagt

SEQ ID NO: 172378 - DNA, 265 bp, Zea mays
  unsure (1)..(265): unsure at all n locations
  Clone ID: MRT4577_88790C.1
acaccggctcgcctcaacgccgccgcgcccgagtttaccccccgatccgccgcccagcaccacggcaacaacgcccataccactngccacccaccaccaccatcagcccgcacaccacccccactaccagcctcaccagcaccggctcgcccaacccgaggtccgcaagctcgtcaaccacgttcaatctcagttcagcgacatcaacttgggcacaactgaacatctgatgaacttcatcgctaacgatccagatggatttgtg

SEQ ID NO: 172379 - DNA, 555 bp, Zea mays
  Clone ID: MRT4577_88791C.1
cgagataaatctcaatcaattttttgattttttttaggaaacacatgccgctttgggggccccattttcgagtccatctcatttggaatctaaaagatggcccccccaacgatgggttgctgccaccacaaggcagggttcataaaaaagaactggttgtttggcaacaattgttgctgctgtaggaaggcaccccccaatgggttagcccccgctgggggattaagtaactgttgccgctgttgtaggtccccaccaaatttcgacccaaccagttggttgaatggaagtagttgttgcaagtaggcaacagggtttgccacaactagctgagtaagagctggtccaatttgttgcagcaactgttgttgcaacaactgttgttgcaggtttgtaggtgcattgcccatagcgggcgggctaaataaaaaaagttgttgctgttgtaggtaggcaatagggttcaccatggcttgttgactgacccctggcaaaaactgttgcaactgttgttgttgttggtttgcacctacctttgccaaaacaagtgggttg

SEQ ID NO: 172380 - DNA, 250 bp, Zea mays
  unsure (1)..(250): unsure at all n locations
  Clone ID: MRT4577_88793C.1
tgtgggttttttttaaaaaaaaaaagatctattattcacaaaaatttacaaaggaatgtgttaatgtataacatgacgccttgtttttttgaagggaggatgaaaatgagaaaaaaaacttacaaaaaacactattttttctaggggggggggaacannncaacttctgaaattttgccaaaacttagtctatttccttgagttgacaaaaaaactaccatgaccaaacaccatacccacgacacgttct

SEQ ID NO: 172381 - DNA, 184 bp, Zea mays
  Clone ID: MRT4577_88794C.1
gaggacggcggacttacagagcgcagataatatgcagttgtcgttggacaacctgagggcgatgacgtacaagctggcgagcttgagcctgaagacaagctacctgagggccctctcgagagctaacacgttgccgcggatacagagccaattgaggacatcttgactctacaacttgaggagg

SEQ ID NO: 172382 - DNA, 281 bp, Zea mays
  unsure (1)..(281): unsure at all n locations
  Clone ID: MRT4577_88795C.1
aaagcagngcacgcaaacaccaccgagaaagccccaaggaaggccgaacgcccgccaaccaaggccccgcagaaaagnaaggacacaaaggcaacgagggacggcaaaggggacggggaagaggaaaagcaancnangcacacgcanagggannggcagcagcaaagcaaaggagaagagacccaccgaagaagggcacggggcncacccccgacaagggaccgaacngcaaaacacaaacaaacanccacacccannggaggcccaacaaaaggggaccc

SEQ ID NO: 172383 - DNA, 211 bp, Zea mays
  Clone ID: MRT4577_88796C.1
ccaaccaatacacttaaagaccaaaccacccgagagggcaggctaacgaaaccagaacggccgacaccacagagagcccgaggaccatggttacgatccccccgagtgctgctaccctacttctactgggtaccgcgaacacccccgaagcccgcaatacccccgagctgactcacgaggaccaactccagcggacatgcaaccagttgca

SEQ ID NO: 172384 - DNA, 1348 bp, Zea mays
  Clone ID: MRT4577_88797C.1
tttttttttttttttttttagcggagaacaccaccacgagaggaccggaatccccaaccaggccaagggaaacccggcggctaaggccagtataaaaaaaagaagaggggataaataccatcagaagcgccaacaaaatacttgcatttcaagcatttgaggcacatacgtaagtattgcagagaccaagttcttactctgatctcagttcttctgcaagtgcgcaatccctcaccatacaggcaggaaactgggaacgagatgcaactttctcatacaaattgggttgcgatacagaatgcatgacaacacacattatctttgacagcaaactgcagcatccaccagctggtcagatcagatttgtgactgacggagatcactcgggcggaaacaaccacaccgggaaaccggagctctgctctggtgcagaaatgctgcaaggcaatggctcggcgatgaaccttgtcttgccatccatcatgttgtacacgaacgcgtcgtgagggttgtaatggtcaggaacaaagtagataaggtcaccttcaactccacggtactgaccagcaggaaaggacttgcagccgcctgaaccaacaaagacgcagtcgccaccgaagctgtggatctcagtgaggctatttggcttcgtgttcaggtcgatcgcgaacacttggaccttcagaactctgtgtctgacttggtaaccgccatagtatcggatgattaacagcagccttccgtgccactccaccatgttgcagctcaatacatgactggacccaagaggggtagcgaggagcttctcgagcaggcaatccttcatgcgagagaacttgaccccatgcccatcctccgcgatttcaaagacgaagagggacggcgtgaacctccagagcatgtacagcctcccctgataaaaggccatgtcgatgtgcccggcaatcaaagagtgctgccaaacacaccatgacttcatcccgggtctccagagcgccagttcaggcttggacctgcagaacgcgaaagcggccacgatgcactcgggtcccgactgaggtgaaccagacagcaccactttgcgaagcgagcaggcggaatggctgagatcggaatcgcccaggcgtggcaggtggtgcacctcgtgggagaaggcgttcaccaagaagcactcgccgccggcctgcctggcgcccacgagccacgcgtcggaagatcccacgcagtcggcatccacctcctgcggcatccaagcgcgccgcgccgtcgccgtcagcacgcccccgggggtcatgctggcgaacctgaacctgggcatcaccagcaggggcagcggcggggccacgcc

SEQ ID NO: 172385 - DNA, 429 bp, Zea mays
  Clone ID: MRT4577_88798C.1
ttctctcctccctacccaacaccaacgtgagcctttttaccaatcggggcgctcctcaaaccccgccgccatgaccatcgcctccgtcaagtcctcctcttcctcatccgaggttccgatcgccgaccgcaccttcttcttcttcagcgaggtggcagaaggagcaatcgctacaatcatcggctacccgttcgcaaaaaattgcggcaagtgctccaatttcctttacaggataacagcttcaataaacggacctcgtcaaggttttctaccactccaactgtttgacctgtattctgaggatgccatcctacaatgagaaccctttctctccacagtgcatacattcattctgattcttaaccgtgcaccgttctctcgactgctgcttacattactacctggtcgagagagtgtattcctccttct

SEQ ID NO: 172386 - DNA, 215 bp, Zea mays
  Clone ID: MRT4577_88799C.1
aaaataggaaattgtaacttattaataatcacaacctttctacaatcatttacaatgtctgactattaccatctttggttggatttattgcctttttacacgaaacttgaaataaagcaatggttcagtgcgaggctgttaaaccaccggagcaggctgaggaactgtaggcctgtttttgtttgcaagaccaggacgatggttcgtaggatgtt

SEQ ID NO: 172387 - DNA, 229 bp, Zea mays
  Clone ID: MRT4577_8879C.1
gcgactgctagtgctaggaggccatttttaatggcacacactttttttttataaatgtacgggtagccaatttgacttgtcctgccaattccgctcaaccccctccaaatccatctataaaacacacaataataaccataaagtcaatgttcgtggattgccatcatcccttactacaactatgcgctccatcaactaataattgattccactgccaatacctactatg

SEQ ID NO: 172388 - DNA, 455 bp, Zea mays
  Clone ID: MRT4577_887C.1
ggccccaaatggggggttttccggggcattccaaacatttaaggccccctttttttttgtaaccctcactttttgtggggggggaaacagaagttaaaaggggccccacttttcccgggggggattttttatggtgccgcaaaaaaggttcattccccggttgggggggggattcaactttcttttttccaggttgggggccggaaaaccagagataactcccatgctttaagggggccccccctcccaaatggcttgaagaaaggttggttactggggggcgcactggactttttggggttccccccggattttggcggcctcctcggaccccccctggggagggggaggttggttcctgggcatttttttcttggaggtggtcaaaataaggatagggggctccccggattcatttatttccatgggttggaacttggatgaaaggcctgggg

SEQ ID NO: 172389 - DNA, 556 bp, Zea mays
  Clone ID: MRT4577_88800C.1
ggccgcttttttttttttttttttggtgcttttttttggtgcataaccgtttagcaatatcggggaccaccattgctaacaaccatccttaaaaaccatcggaaaaaccgagcggcaaaaagcagaaagcattaccagatagggtgacgacaaccagagcggggaaccaaaccggacacaagagcgggggggaaggctgaagaagacttctagaacatactaccattattaacttccttaacctccttaaactcactaacaaacctcaggaacaacctcctgagagctcttatataccgctgggacatacagaagtgcctcttataaatacccttactgaataacctgagcgacaaagcacgcctggaaggcacgatggccaaacaggaggtcaaacttgagaacaactccacaaaacacgtggacatcgctattgtagacacagatcattcacacttggccctgtaacctgcacagaccacacattagacgccagacttgaataccggaatttaagaccgttcggaaacacagcacaaaaccgatcgacaaactg

SEQ ID NO: 172390 - DNA, 304 bp, Zea mays
  unsure (1)..(304): unsure at all n locations
  Clone ID: MRT4577_88801C.1
gggaactccaccatgagtcctgatgggccttgggatgggggtgacagtgagtgtgcttgggtgagtttttgagtgggtttttattgcgtgtgctatatgctctatgcgatgtagatgggtgcgtgtggatcctgcttcctgtatatatacctacggtgcttatgactcatnattgtgggccgtgggcgtgtgtataaataaaataaagggagtgggtcttccattccatgtggggggggaaaaaaaaaaaaaaaaaaaaaaaaaaaaaaaaagggaaagaaagggaaaaaaaaaaaaaatattt

SEQ ID NO: 172391 - DNA, 683 bp, Zea mays
  unsure (1)..(683): unsure at all n locations
  Clone ID: MRT4577_88802C.1
atttcgcccatttgttggttttcgtgaagttcgtcttgtcaacaaggagtccagacatcctggtggagatccacatgtgttgtgtttcgtcgattttgacaaccctgctcaggctacaattgctctggaagcattacaaggtgaaacttcttatatatgtggatatggactgtgtagttgtgttgatttcctgattctttactttgttgactttcaattttgcatgtatatgtttgttaaattctatcatgcatgttgcatgtctatagtttgtcgtgaagcttgttttggaattggtaaattcttgttcattccgcatctaacttaatgcgtgtggtaatagtttttgaattagttcatatattagttatagcaggaagctgggtaaacccatctattattcaaagcactcaggcaagtggcaacaccactcagcatttcctaacaagctaatattttcgtgcatttaataggactggtgagtcatgattttttgcgctttgcttcctattcaagtgcacattatgccctttctaatacattacatctaggaattgttaccaagttgagaaactcatgaccagagtatggaacctaggcgttcttaggttctacactttgagcttgctttgtgtcagcatccctgccaatttaagaagatntgcattagcattctgatgtac

SEQ ID NO: 172392 - DNA, 208 bp, Zea mays
  unsure (1)..(208): unsure at all n locations
  Clone ID: MRT4577_88803C.1
ctccttcctcttccccgccttnnnggnnnnnttttccgattgcgtacctccgagccggccggggcacctctcacaacttaaagcagagtatggtgcaatttcagaagccaaaacagatatataatcgaccgtgagattcgttcctgcggcggtggctcaaggccgttatcgcatgcgaactacacttctgcgcggctgggcgcctcca

SEQ ID NO: 172393 - DNA, 437 bp, Zea mays
  Clone ID: MRT4577_88804C.1
cggagggacgggcacggtcaggcatcaagcaaccaagcacaagggggcggctatcctgcaccaccgccatactaccatggtcagtatccaccatactatccacccccaccaccatacggtggctacatgcctgcaccgcgcatgccctacccaccacaatatccaccttaccagccgatgctagctcaaccagcacaggcacaggctagttcatctcggcaaccaccgcatgcaggtggagggcagcagcagccgcctgatggccctccagctcagcagcagccacagcagccaaatcagaactgaagtcctgtcaagagaatgcaacccccgtgggtcaccagctttcgtaatttcttaatttgtggttaacagcaaaaactttggtgtattgcttatcaacgtttgaagaaaaaccgtgagatataccggatgtt

SEQ ID NO: 172394 - DNA, 1298 bp, Zea mays
  Clone ID: MRT4577_88805C.1
agtctaatcgaaatcgaggtctcgtcccgtgcgctctcttctcgctctcgctgcgcctcggcgactgcatcggcggcggcggcggcgatggcgcaccggctgctgcgggacgcgcaggccgacggctgggagcggtccgacttccccatcatctgcgagtcatgcctcggcgacaacccctacgtccgcatgctgagagctgaatatgacaaggaatgcaagatctgtgcgcgtccttttaccgtcttccgttggagacctggtcgggatgcaaggtacaagaagacagagatctgccagacgtgctgcaagttgaaaaacgtctgccaggtctgccttctggaccttgaatatggtctgccagttcaggttcgcgatactgcactcgcgatcaattcgaatgatgcaattccaaggagtgatgttaaccgtgagtactttgcagaagagcatgatcgtaaggctgcagctggcatagattatgactcttcatatgggaaggcccgtccaaatgataccattctgaagcttcagaggacttcaccatattacaagaggaaccgagctcatgtttgcagtttctatgtgcggggtgaatgtacaagaggtgctgagtgcccatatcgccacgagatgcctgagacaggggagttatcccagcagaacatcaaagatcgctactatggagttaatgacccagtggctctcaagctttttgggtaaggcaggtgagatgccatctctgcagccaccagatgatgagactataaggaccctctacattggcggacttgatagcagaataaccgagcaggatttgagggatcagttttatgcccatggtgagatcgagtccataaggatggtacttcaacgtgcaatcgcatttgtgacgtatactacaagagaaggcgcagagaaggctgcagaagagcttgctaataagctagtcatcaagggcgtgcgcctgaagctgatgtggggcaagcctcaggccccaaagcctgaggaggatgagtctgggaggctggggcaggtttcccacggagggctgctccctagggctgtcatatctcagcagcagccacagcagccaattcagaactgaagtcctgtcaagatgttgggtattggtactgctctaactgctcggcaggagaatgcaacccccgtgggtcaccagctttcgtaatttcttaatttgtggttaacagtaaaaactttgttgtattgcttatcaacgtttgaagaaaaaccgtgagatataccggatgtatccagcttctggattttgtggt

SEQ ID NO: 172395 - DNA, 1912 bp, Zea mays
  Clone ID: MRT4577_88806C.1
ggcgtgcggactagttctagaggcgagggcgaggtatgccccacgcgtccgccggactcgggagtcggcactcgggtctcgacgtctcgtctcgtctcgtctcgcctgcccgcagccccttggcttcgttccatccggcttctcggcggcggcggagaggagggggatggcgcaccggctgctgcgggacgcgcaggcggacgggtgggagcggtcggacttccccatcatctgcgagtcatgcctcggcgacaacccctacgtccggatgttaagagctgaatatgacaaagaatgcaaaatttgtgcacgtccttttactgtattccggtggcgtcctgggcgagatgcaaggtacaagaagactgagatctgccagacatgttgcaagctaaagaatgtctgccaggtctgcctgctggatcttgaatatggtctgcctgttcaggtccgagatacagcactctctatcaattccaatgatgcaattccaaggagtgatgtcaatcgcgaatattttgcagaagagcatgataggagggccagagctggcatagactatgattcatcctatgggaaggctcgcccaaatgataccattctgaagcttcaaaggacagcaccatattacaagaggaacagagctcatgtttgcagtttctttgtgcgaggtgaatgtacaagaggagctgagtgcccttatcgtcatgagatgcctgaaactggggagttatctcagcagaacattaaagatcgctactatggagttaatgatccagttgcactgaaacttttgagcaaggcaggtgagatgccatccctgacaccaccagatgatgagactataaggaccctctacattggcggactcgatagcagaataaccgagcaggatttgagggatcagttttatgcccatggtgagatcgagtccataaggatggtacttcaacgtgcaatcgcatttgtgacgtatactacaagagaaggcgcagagaaggctgcagaagagcttgctaataagctagtcatcaagggcgtgcgcctgaagctgatgtggggcaagcctcaggccccaaagcctgaggaggatgagtctgggaggctggggcaggtttcccacggagggctgctccctagggctgtcatatctcagcagcagagcggtgaccagcctcagccccccgggatggagggccaacagcaacaggctgcaccagcatcgtactacttcaacattccagcaccaccagcaacggagcggactgtgtatccatccatggatccacagaggatgggtgctatagtaaaaccacatgacagtgaaggcaaaccagggccgcagcaagccgggcaagctcaggcatcaagcaacccagcacaagggggcggctatcctgcaccaccgccatactaccatggtcagtatccaccatactatccacccccaccaccatacggtggctacatgcctccaccgcgcatgccctacccaccgcaatatccgccttaccagccgatgctagctcaaccagcacaggtacaggctagttcatctcggcaaccaccgcatgcaggtggagggcagcagcagccgcctgatggccctccagctcagcagcagccacagcagccaattcagaactgaagtcctgtcaagatgttgggtattggtactgctctaactgctcggcaggagaatgcaacccccgtgggtcaccagctttcgtaatttcttaatttgtggttaacagtaaaaactttgttgtattgcttatcaacgtttgaagaaaaaccgtgagatataccggatgtatccagcttctggattttgtggtaaaaaaaaaaaaaaaaaaaaaaaaaaaaaaaaaaaaaaaaaaaaaaaaaaaaaaaaaaacccacaccccccccc

SEQ ID NO: 172396 - DNA, 185 bp, Zea mays
  Clone ID: MRT4577_88807C.1
gccatcctgccatacctatgtctaaagtcgtcgacgacgacccactgaaaagtccacagccttttccaagacgaatggatgggctgctgcataaaccagagctccgattccccggccatccgcgtgacgcggtggttctacacagggatcgtgtggctccgagacgccagattgaaggaagtgcc

SEQ ID NO: 172397 - DNA, 706 bp, Zea mays
  Clone ID: MRT4577_88808C.1
agcagtggtaacaacgcagagtcgcggggaaagcaaccctctctctatctctctctctcaaccacctccctcctctctctctctctccacaccacagtccccctccctctccgtgggcggcgtagaattgtggtcggcgcgtgtccctcgccggaggaacggggtgtgggacgtgtggagaaaggtgcgcgggcatgctttccacaggctttcttgaactgtgaactcgtgggtggtggtggtatgtcggatggaatgcttggctcctcccagctagcaattctcttcccccatgcaccggccgtgaattgagctgcggagcttccccgcagcctcgctcggccggctctacctgttgatggttcaagaaagcccatggaaaccatgcagcctccctcttgtgctaccatcgccgagaattcagccggctgctggttgcttgcgcgaggggaatttaggtcctcccgccctgaatttcggctccgtatgggtcgcccgggtgtaattctcggggaattcgctgacaacgagttggctcttgccgcatcgggtgcctgaattccctcgcgtgtgcggaggcgaattgtggctcagatggttttctgtgggtcgaattcaggtagctaggggggtggttccggccttgtttgtgaatttcggtttgtttcgctgcgggtttcttggctcctaggatgtgttccttcct

SEQ ID NO: 172398 - DNA, 279 bp, Zea mays
  Clone ID: MRT4577_88809C.1
tctcgagccgattcggctcgagcagagtgttcgtccagaagcatgtacccagattcggcacgacatccatacgatcttctgaaacagaacagaccaataaggattagccgaatgggtacagcttctgaatatttcactattcatcgtcagtatcaagcctcttcacaagaggaggttcctaagataagagtccacgatgtggtgtatggaagcatgaagacttgcagaaaatttgaggtcctatcatggagatctccaatacccccctactacagctat

SEQ ID NO: 172399 - DNA, 266 bp, Zea mays
  Clone ID: MRT4577_8880C.1
tcttagggttgtatttaccctcaaataaacccggtgggatattaagctgcactgaacagagtatgcaatatgccaagaataacattatgtgatactttacacacaaaaaggaggaagctagaatgccaccctgagcagcaaaaggggcaattcaaacctttttcctggtgacacaacatgtttggggagaatgcatatattgtttcaaggaacaacactagtcttataaccaaaacaggaagcaacccacgacagctgattggagc

SEQ ID NO: 172400 - DNA, 329 bp, Zea mays
  unsure (1)..(329): unsure at all n locations
  Clone ID: MRT4577_88810C.1
tccctttatttacaattttttttcttannnanaagaaggaacngcacaaaagggggaacgctttagggactgggggcgggactgacccaacaggcgacaaaangaggcnnaacaaagggagcgacagaagncacgagcgccccgacagacccagacaaggccacaggacaaaacgggcccccgcaacacgcaccaccaaggaaggggaccgggcagggagcccaacacaaaaccgaaccaaagcaggacccaaagggcgggcaaaaacccgggacccacaagcncaccagcggacaaaaccagggganaccccccaacccaacccaaac

SEQ ID NO: 172401 - DNA, 384 bp, Zea mays
  Clone ID: MRT4577_88811C.1
gaagcacgaagtagttttgtggcctgacaaaccaattatgtggtccaatccaagagcctaattatgtggggaccgtgctggcagttcggcaacttttgtttgtatatggccaactaaacctatttcacatatgtgattcgatgtttatgtagttgcttggatcttggggttttgggagtctgtactcctgcctccgctacctcaaatccatgccgcgctgcacctactctgttttcaatgaaagagttttctgttgcgtctgcactgaggactggtcatggcattaacagggtcagatggtaggcgataatttccattggtcaagcggtagttgcgtccagagagatctcttgacacttatttaggaccaatccctgttccatc

SEQ ID NO: 172402 - DNA, 234 bp, Zea mays
  Clone ID: MRT4577_88812C.1
tcggagcccaggcagccatggtcctactcctccgtcccgtccgggtccgggtccggccttgcgcagttcgtccgtctttatgagcaagggagcatgcaccgatccccattccgacccttctcccagtcctgtgcggttggggcgacacactttcatgtgcgaccaatgaactcaccatgtttcaggtatcggtggattgaatattttctacgttacacttctttctatctttcc

SEQ ID NO: 172403 - DNA, 571 bp, Zea mays
  Clone ID: MRT4577_88813C.1
gatcaggcgcggggcggtgtatgtgcgtgccgacatcccatgcagccaacgcagtgccccagcccccagggtaggccgataccggagccccgcgccacccaacgccagcgacagcgacgccgaggactcctcctcgccctcgccgacgcgcacggtgcgttcctggaggcgctgctcgacctaaggtgcggccacggcgcactctggctgtgcgacacggcgggcgcccagcggcacgctgagagtgaccttgtccgcctcgtgtcctccgcgcgcgccggcgtcaggctcccgcaggcggcggtgcccgtggcgccagccagcgagcgaggaatagcacttcctgtttggccatagatgggcgatgaaagccaactgcatcgtccgcacctttcccctacgttgcccgcatacgctctgtagtggcggaccatggccttccgcttcacctgcagggcgccgccgaccgagcgcgcctgtggcaggagccgctcgctcagaccagattggcgcctcttcagcagcgtgacttctgttcttcaagctatgaagggacacgtatttgggcagt

SEQ ID NO: 172404 - DNA, 436 bp, Zea mays
  unsure (1)..(436): unsure at all n locations
  Clone ID: MRT4577_88814C.1
tcccgggggtctaacgagnatgcatacgcagcctcggnaggatcgctgccggttgcagctgaagagaaagagagttgcgccgtactgaggaattgtattagaggattggaacactgatgttaattaatagacatgtaacagcgctctcaacacagttgctttagcgtgaaaaaaaaaaaaaaaaaaaaaaaaaaaaaaaaagagaagaggaaaaaaaaaaaaaaaaaaaaaaaaaaaaaaaaaaaaaaaaaaaaaaaaaaaaaaaaaaaaaaaaaaaaaaaaaaaaaaaaaaaaaaaaaaaaaaaaaaaaaaaaaaaaaaaaaaaaaaaaaaaaaaaaaaaaaaaaaggggggngggcttttttaaaaataaaaattttaattaggtttgttttggaaaaatttttttttttttttttggggggcttaaaataaaa

SEQ ID NO: 172405 - DNA, 256 bp, Zea mays
  unsure (1)..(256): unsure at all n locations
  Clone ID: MRT4577_88815C.1
cccgggttcgnacccacgccgtcccggttctnnctccgtttttccccnttcgcgtnannncttcgtccgcccgcaacccccttcacgtannncgtgctctcttctcacgacggtcacacccctggagnnctcccccatcccccctcccagaaaaanacaccctcgnaaaaacgggncggcgctgcgaccatggcggnagggtcgagggctcccagctaccttgcggtcgagggctccacgctgctgcnnggtcgcg

SEQ ID NO: 172406 - DNA, 372 bp, Zea mays
  Clone ID: MRT4577_88816C.1
cttatacaaagtgcagatttgtctgttgtaaattacatcttccacatactgcagttatgaactatgatagttttcttatcttaccaaataaacagtggtcagtgatgtgataaatggagcatgaatgagacaaaagattctctaagttttgaaaaatcaaataaactgcctctgacgttgacagtatccactactagaagcatcactcagtaatcaagctctactgatgaccggtttatgtgaacctatgcatattccaggtatcaacccctattcgtaagtagacagcagtacataaaatgaagtaaatataagaataagagtttgccaacctcagtgcctcatcaatatcccatgggttctagatcgcga

SEQ ID NO: 172407 - DNA, 363 bp, Zea mays
  Clone ID: MRT4577_88817C.1
gaccaccaagcaacatagaaagtggaatgcattaccaacaatagagcaacaatggcggccaggggattttccatccttatgctccttgctctttctgcatgtgttgctaacgcaaccatttttcctcaatactcacaagctcctatagctgcccttcttcccccataccttccatcaatgaccgcttcaatttgtaaaaacccaacccttaaaccttacaggctccaaccagccattcgaaccaggcactttacctttatcacccctgttttttaaacaatcgccacccctatctttggtgcagtcattggcacaaaccatcggggcacaacagttgcaacaacttgcgctaccagttatcac

SEQ ID NO: 172408 - DNA, 338 bp, Zea mays
  unsure (1)..(338): unsure at all n locations
  Clone ID: MRT4577_88818C.1
cgcacactggctacccgggtgaactagctggcccctctacttattcccacggcgcaaatccgggcgatcgtcctcgcgctacacgccttgcgccttccgcggcaccgggagtggcgctgccgcaccccagataggcgacggcctagaactacaagggtgggctgcagtttcccgtgggcaggatcgctcggttcctcaaggccggcaagtacgccgagcgcgtgggcgccggcgcccctgtctacctcgccgctgtcctcgagtacctcgccgctgaggtcctggagcttgctgggaacgcatcgagggatntcntgaaactcgnatcgngccgcggg

SEQ ID NO: 172409 - DNA, 362 bp, Zea mays
  Clone ID: MRT4577_88819C.1
cggtcgacctatctttttttttttacaatgtacttacttatttctgggaagcccaacatagacaaacttattattgaactataatataaaaactaaaaaggaccaccatgatggtggagagaaacatttttgctgtaaaggaggcggtgaaaggcagcaattgctgcaggtgaaaacacgatgccatcaaccatacacaatccactaggaaaacggaaacaactgtgttacgctgtcaaaaaggtagcacctctaacaaccattagccgtattacatggaatacctgtggcgcatgtataataaacaaaacatgacagtgcagcaactacaacaactggagctaacaaaccttggtggctac

SEQ ID NO: 172410 - DNA, 1297 bp, Zea mays
  Clone ID: MRT4577_8881C.1
aatcaactttttaatctggccccttgacgcgcagcgggagaggctcatcaccccgtgtgccctcgcctcgcctcgccccgccgcccgccccaatcgaccaatcccgtccatatcaaaaaaatgggaattgtcgccgccgccaccaccgccgccgccacgtgcacgtcccgactcctccaccaccacgcaacctatcaccggcaccagctcaggtactctgcgagtccgtttcctctctcgctgcactgtggctccggccggcgtgaggcggcggcccgggcgctcctgcccgaccgcgtcaccccgttctcttacggcgtggatgaggacgcggatgaccacccgcgcgaggagtgcggtttagtcggggtcgtgggcgacccggacgcgtcgtcgctgtgctatctggggctgcagaagctgcagcaccgcggggaggagggggccgggatcgtcgccgtgggcggggacggcaagctcaagtccgttaccgggctgggtctcgtggccgacgtgttcggggacccgtcccggctcgcctcgctcccgggtcccgccgccatcggacacgtgcgctactccacggccggcgccgccgcttcgctgcgcaacgtgcagccgttcctggccgggtaccggttcgggcaggtcgccgtggcgcataacggcaacctcgtcaactaccaggcgctacggaacaagctcgaggccagggggtccatcttcaacacgtcctcggacacggaggtcatcctccacctcatcgcgacgtcgctgtcgcggcccctgctcgcccgggtctgcgacgcctgcgagcgcctcgcggggtcctactcgctcctgttcctcacggccgacaagctcttcgccgtgcgcgacccacatgggttccgcccgctggtgatgggccgccgccggaacggcgctgtcgtcttcgcgtcggagacgtgcgcgctggacctcatcgacgccacctacgagcgcgaggtggagcctggggaggtggtcgtggtcgaccgccgcgacatgtcggtggcctcggcctgcctcgtcccgcaccgcccccgccgcgcctgcgtgttcgagcacatctacttctcgctgcccaactcggtggtgttctcgcacgccgtccacgagcgccgtaccgccttcgggcaggcgctggccgaggagtcccctgccccgggcgccgacgtcgtcatcccggtgcccgactcgggtttctacgccgcgctcgggttcgcacgcgcgtcggggctcgagttccagcagggtctcatccggtggcactaca

SEQ ID NO: 172411 - DNA, 532 bp, Zea mays
  Clone ID: MRT4577_88820C.1
gtatgaaactatggcttaatagggaacaacatagtttagagttaataacaactaattgatccggcccggccgtgctttctacaaaaaattaccactccttatgatccaagggtgggcaattgggccaccaattctacacaatttcgctggtaaattatcctacgcggtcttccgttggaacatgccaccccgataaaggctctatgacccccgggcctgacaaaacacaacgagggactttgacttcttcggttttggttcaggacttggcccaaagagacctttgtagagctacttctgcttccggaatatggccttgtcttggtccgcgagcaaaccgagctccctaatgatctccttgcattctggggagtacttcttggctttgaggaaaacttcccttggtgattctggctggccaaattcaaatttaactttttctcgcctgaacagcgctttgacattactttgattttttgacaaaaaaagctacactgagcaatagcttcatcaaatctctttagtttgatca

SEQ ID NO: 172412 - DNA, 221 bp, Zea mays
  Clone ID: MRT4577_88821C.1
ctctcccgcgacgccaccaccacacgttcacggtagcgagacttatcgtcgtcggcggcgaagatggtgtcgctgaagctgcaaacggtcgccggagcgtcctcaagtgtggaaggcaagtctgcttgacccatgaagtcagcgagatctccatgtactccgagaatcgagtgtaggtggtactagagctaagtatcagtcgtcagaggctagcacaagag

SEQ ID NO: 172413 - DNA, 283 bp, Zea mays
  Clone ID: MRT4577_88822C.1
cgcggacgggcagctcgacccggtctttaaccccaagctctcctcctcctacgccgtcgtgccatgcaccagcgacacctgcgcccagctggacggccacagatgccacgaggacgacgatggagcgtgccagtacacctacaagtacagcgggcacggggtgacgaagggcaccctggccatagacaagctggccatcggaggcgacgttttccacgccgtggtcttcggctgcagcgactccagcgtcgggggccctgccgcgcaggcgtcggggctggtc

SEQ ID NO: 172414 - DNA, 221 bp, Zea mays
  unsure (1)..(221): unsure at all n locations
  Clone ID: MRT4577_88823C.1
gctattcctctcgtgtcttcgtgttcgtatatcagncagcaatggccccgtgtgacctggatacctttctttttntgccaggttgtttgggggctctatnaatttcttttaatcccttaaaaaccttntntnttcnatcnnataatcnanttattttctttncantnaaaaaaaaaaaanaaaanaaaaaannnnccccnaaaaaaaaaaaaaaaanaaaa

SEQ ID NO: 172415 - DNA, 547 bp, Zea mays
  Clone ID: MRT4577_88824C.1
tacggctggatttgatttgattggatccccaattgggtgtccgggtccgcgcgttcgggcgggcgggcggggggattgctttagggtttcagcgggtgcggtcgctgtgtaggcgggtagggttttgccatggcggagaagggctgcctgaagcggctccagaaggagtaccatgcgctctgtaaggaaccgccgccgcaggtcgtggctcgcccactgcccaacgacatattggagtggcgtaagtagcctcagctaaccctactactcgtagatacgatccgtcgccttttgattggctaatgtttggagtcaaacggggtttgattgcgcttggttttgtcggaagcaatggtgtaggcataatcataacgcgcaacgcacaagatcatgttggtttagcaatcacttcgttcggttttgggaatttctatatacatgtggttgctccgtgtaccgcgtgatgtgctcagctcgtctgctcactgcttacagtttctgagcagtgcgtgctgcctgcaatttattgtttaaagtttaaattgtc

SEQ ID NO: 172416 - DNA, 457 bp, Zea mays
  Clone ID: MRT4577_88825C.1
attcaaaacgggggggggccccccctcaactctgaaaaaaaaagaccggccatggcccacaaaccggattcggaggctatatatatgtatatgggacatggccccttggaaccaccgctcttgggggggccctgggggtccatccatccagggccaggccaggcccccccttttaaccattttaacttggccgggaagtacttgtcgattagggacatgtagaaggggttcaccccccccaccgagaccctggtggggctcttgctggacagggcaaacttggggaacacatgcccccacttgggggtctccttggcctcaacgcccaaaaggggggggaaggccccatccttgggcaggggggaaaaccaggggtttctgataaaaaacacccccccaaaaggaggggggccccttttttccttggcccccaagaacatgtagtcctcggggcccc

SEQ ID NO: 172417 - DNA, 831 bp, Zea mays
  unsure (1)..(831): unsure at all n locations
  Clone ID: MRT4577_88826C.1
cattgggtacctcgaggccggccgggagcacacctcccccagcagctgattcgcccggccgcatcgcccgagccttctaacagctgactcgtcctcgtcgctccggcgcggcgactaggcacgcagccaccgcgcgatggccgacggcgccagcagcagcggcggggcgcagaacgggggtgagtcggtggtgattgactacggccggcgccgcactacctgcggctactgccgatcctccgggcccacgagcatctcccacggtaccgatttccgaaccccccgtccgatgaaactgattcgctctgcttcgacctgtatcgggccctcaagctttgtagcgcgtggaatcgcccgtgggttctattatagcgttgaatcgcttgttggctctagcatcttgacgcgtcacgcagatgatgtttgaccgctgatcaccatgataacttgtgaatttccttttagatattgctgccaagggacagtgcaagcgcacaacggttttgtagtttgagctggggagagtagttattttttcagcttatggccataatgaatcatggtttttgaacaaaaaaccatgatgaatcatggttgccagttgaggggcatggttaatctatgaacctctgaacgctcgttgttacttgttagctgctgaatcctgaatggttcanatgcctcattttattcacttagcttgtaatacttgaaacaagccagcgaccatctagttttgtctctggaaatgatccatgtggatcatgtaatccatggtatctagggtggtatacacagtgatggagcaaagccccaggctgcctgggattt

SEQ ID NO: 172418 - DNA, 804 bp, Zea mays
  Clone ID: MRT4577_88827C.1
gcgcgcgcacgcaggtcgtcgatcggcggccccgcccaatggcgccgcgccacctgccacgccgacgtggccgtcactcctttatctgcagccagcggccgagctgcgtcgggttgacgacgccggggacgtgggcccctctcgccattagcagccacgacacctccgcatacctccttttggggtccggctcggcccgcgccggagcctgagccggagctggggctccgcggctcggctcgatccgccgccccaggagcgtgccgtggacgaggaactcgtgggccaggtggccggccaggagcttgttgtcgccgccgccggcggcggccgcacaagccggagccggcttcctcggctcggctttagccggcaccgggagcggctgcgcctgtgcggcctgcagctcgcgctcacgctcctttcgcttgccgagagcgacacgcgccgcctccagcttctcgctgagcgacatatcgacggcctcggttcgcctctagccacgtcagcgcggagcagagccgtccaaaaggggataaaaaaggaggagaggcacaggtttatcttcttttcctgctgtggcaaaaaggggtaggaaataggaaaaaaaaagagagagacagagcacaaagtaaagaacggagattgtgggacccacacaggggcaggaccgtaacttgccaggacagaggcaaggggagggaggggggagcggtggagagcgagagagggagacgggagaggatggaagaaagcagaaaaaattctgttcaagttcgaacccggccgcctcgagcgccgcac

SEQ ID NO: 172419 - DNA, 444 bp, Zea mays
  Clone ID: MRT4577_88828C.1
tggacgtcagcctagcagttagctcatcgactccagattgtagagctcgacaccatgaaggtgctgatcgttgcccttgctctcctggcgctcgctgcgagcgccgcctgcactacaagcggccgctgtggctgccagacaccaccgttgcatctaccgcctccgttctatctgccgcctccgttctatctgccgacgcagcagcagccgaagccatggcaataccccactcaaccaccgcatctaagcccgtgccaggagttctagatcctgctgcgtcagcagggtacgctgcccgttcctgagccagtgcagccagattctgaagcaccaatgcagtccggcagagaggccctactgctagccacgaggccagccgctgaagcagcattgctgccaccagatcaagcatgtggagccgatgttccgataccaggcgacata

SEQ ID NO: 172420 - DNA, 479 bp, Zea mays
  Clone ID: MRT4577_88829C.1
tcgaggccggccggttcgggaaaaccctaattcattttctctcctacttctcctgccgctccaacaggcagccgccaatcctcctggccgaccgcagggagtgtggccgactgtgcctgcatttccctggccgcctgttcttttgcttctttcttttcttcagccgatggaacttgtaatcaggcgctggttccctttaccagagatggtcagccgattatggggcgccgtcattaaccttttaaagcttggatctagacctcatttactcgaatcccttactgtgtgtgaatgaatgtatgagatggatatcttgtaatgagatcgagttttggaggtaaaaaaaatcgtagatccgggccccgcgatatttctgttattttctgtgtttagtgcatctatgcacattcacgcggtttaaaataaattagggttctaaccctaattttatagaaaaaaaaaaaaaaaaaaggccccta

SEQ ID NO: 172421 - DNA, 665 bp, Zea mays
  unsure (1)..(665): unsure at all n locations
  Clone ID: MRT4577_8882C.1
aattcggcacgagggcccggctcgccccgccgcccgccccaatccctcgatctctcaaataagcgggaatgggaattgtcgccgccgccgccgccgccacgacgtgcacgtcccgtatcctctaccgctacgcagccgctggcagcgaccgccataaccggcaccacctcaggtgctacgcgagtccgtatcctctctcgctgcgctgcggctccggccggcgtgaggcggcggcccgggcgctcctgcccgaccgcgttaccccgttctcatacggcgtggatgaggacgcggatgaccacccgcgcgaggagtgcggtgtaatcggggtcgtgggcgacccagacgcgtcgtcgctgtgctatctggggctgcagaagctacagcaccgcggggaggagggggccgggatcgtcgccgtgggcggggacggcaagctcaagtccgtgacagggctggggctcgtggccgacgtgttcgcggacccgtcccggctcgcctcgctcccgggccccgccgccatcgggcacgtgcgctactccacggccggcgccggcgcgtcgctgcgcaacgtgcagccgntcctggccgggtaccggttcgggcaggtcgccgtggcgcataacgganacctcgtcaactaccaagctttgcggaacaaactc

SEQ ID NO: 172422 - DNA, 305 bp, Zea mays
  Clone ID: MRT4577_88830C.1
gccccacgggcccccctttgttttcacaaagcgaccccgcttacccccccaaaaggtaaggcccacaggcgggggcggccgccaaaaaacccagcattggggccaccaaggcgccccccccgcagggcccgggccccccaagggcccctcaggcggggagccggtgtacaccctgccgcccgggggaaaaaaacggatcccccccggcctcactccaactgtaacccccggccttccgccccggacacaaaacccacctgggggggcgaccccctaaaaaaaaccctccaccaggggcccgttgg

SEQ ID NO: 172423 - DNA, 1212 bp, Zea mays
  Clone ID: MRT4577_88831C.1
atggacgagtctggtgtgaaaaaggagatcagcctcctgggactagtaactttatcacatttgagtcccaaaggatcgggacacttcacggtcgtattgaaccgtgaaagagctgcatcggaccgcctaaaacggatgcctatgttgttcgacgactaccgtgatgaagatttttatgggctaccgcagaaatactgtattgtcgctcggggagccaagatcgaggccataacatatatgtatgagacagtcaaacatttcgacaatttgctccatgaaaagcatgtttataagatgcataacgtaaagtttggtcttcatccaggtgaatttaattttcgacatctaaatggtctcatggaattgtgtctcaaccaacaaactatcgtggagccatacaatgttccaattcaaatggcgtcattcccaaaacaaatattcttgaaccttgctgatattgcggagttgccaaacaggactttagtcgggggtctttacatatcattaaagtttgggggtgacctactaaacaaaaatgcactccgctgggcgttggctaaggaggattatggcataataattaggactatgtttaggcggttcagaagacaagagtgcctcgagccttcggatcataccgcaatacacttcaatccgttccatcacaacacccattattttggacgtatactagctccagctgcatcctcttttctgatactgtcatgtgtttgttggaccgggaacactaatacacaaggttatattgtagctgatgaaaatggatcgaaatcgcttggtccaaatgttgatgctaaggaatttagtctttcagatggttgtagcacaattgatttcacaaactttgcaacacaagatggagacgaaaaagtaaatgtgaatcaagatgatgatagcgattggttgcaaaggaatgagacattcaaggcagacgatgttttcacaactagagaccttctgacaccaggcggtgtgcatgaaactgttggtaacacgcctaaccataatttggaaagggccgcctactttagagagcggtacaaaaacttaactcccaccgagagggagtttaggcgtgaacgccttaggttgtataataatacaccaaagcggaaagggtcaaagatagagtacataagaaaacatagagcactgttggctgatgaaaatcgcctagaggggggtgaatag

SEQ ID NO: 172424 - DNA, 1008 bp, Zea mays
  unsure (1)..(1008): unsure at all n locations
  Clone ID: MRT4577_88832C.1
gttttgtctgcatcaagngaccaanatcgagccataacatatatgtatgagacagtcaaactttcgacaatttgctcctatgaaaagcatgtttacaagatgcataatgtgaagttcagtcttcatccgggtgaatttaattttcgtcatctaaatggtcccatggaattgtgtcttgaccaacaaactatcgtggagccatacactgttccaattcagatggcgccattcccaaaacaaatactattgaaccttgctgatattgccgagttgccaaacaggactttagtcgacattatggctgttgtagtccacttggatacaatacatcgcacaatgtggggccctttcagaaagattgtgataatggatgctaggggatatttacatatcattaaagtttggggtgacctactaaacaaaaatgcactccgctgggcgttggctaaggaggattatggcataataattgggactatgtttagacggttcagaagacaagagtgcctcgagtcttcggatcataccgcaatacacttcaatccgttccatcacaacacccatcattttcgaccaatccaaaaagctttggtggcgctgaacaaccgtcagtttgctgttacatttcttgaagaagaaaggcgtagatagattctacaaattcgcaaagagcaataattgggactatgtttaggcgtagagagatttgatagaatacgtgtcgtactgttattgagcaaccaaacgcaacaagaggcaaacttgtatgtctatgaatcttgtttgtaatacctatgacatgggtttaataagagatattttgtgaagtttttgaccgtgcaaatgataattaaatattttgtgcggaaaaaaaattaaattataaattaaaagaagaaaaaaaaaaaaaaaaaaaaaagtaaaattataggctatggctttttaaagggggggcggtttccaagggtccaaattaacgggctcgtttttggcaatgtttaatttttt

SEQ ID NO: 172425 - DNA, 173 bp, Zea mays
  Clone ID: MRT4577_88833C.1
aaaaaacgtgcaaatacttcacatttctttttttttccccacccagagctggggattatgcattatttatatttatctaaacacaacagggatagcaacctattctatgaattttgccaatctaaaggggacatacaagtttacaggtggaaattttcacttttcaacacgtg

SEQ ID NO: 172426 - DNA, 617 bp, Zea mays
  Clone ID: MRT4577_88834C.1
tgggtggtttttctgatttggtacagggttttgtttgtactgatatatggctgagaaactagtaaaccaactctggcgtgcggcactgtgctcgccgccagccaccctagggttttcttccccgatggcccatcagcgcctgcccagaatttgaacctaagccctcgcgcacgtgcgcgccggccgcctggctgccggccgaatccgccctccagccgctgacaacgtcgatctgctactgacacaccgacagggagcatttagctgcagtgaaatgggtatcctttatcagtgaaaggaggttatgaagaaccagaagctacggcgactggtgctatatcctggattcttactggttcacttccctcattacttatgctaacacaagcaatacaacaagggctgtgatgcaaagggctgaccagacttatacctcctcccctgctgcagactgaaccaccaactgacactgtaaagctgtacaaggctgccttgtacctactgcagcgaagacagatgaatggggacccaatagcagtgctgcataatgacctaacatcctgcaacggcaagggaaaccaccatatgccccaccatgctacaaaacttggtgcacc

SEQ ID NO: 172427 - DNA, 1465 bp, Zea mays
  unsure (1)..(1465): unsure at all n locations
  Clone ID: MRT4577_88835C.1
cggncgcgtgggcggacgcgtgggcggacgcgtgggggaacaccatttcagcaaagaagaattatgtcttccttggaacgagccaagaaacggaatcgtgctgcactgggcacacccaaagttcctaatgtcaaatgggaagatgttggtgggctagaggatgtgaaaaaggttattctagatactattcagttgcctctgatgtacaagcacctgttttcttctaaattgcgcaagcgatcaggtgtcctgctatatggacctccaggaacagggaagactttactcgcgaaagcagtagcaactgaatgctcattgaactttcttagcgtcaaaggtccagaactgataaacatgtatgttggagaatcagagaaaaatgttcgggatatttttgagaaggctaggtctgcacgcccatgtgtcattttctttgatgagcttgattccctcgctcctgcacgaggagtcgacccacgcgtccgcggtgtcatggacagggttgtttcccagttacttgtggagatcgatgggttgagtgacaacagccaggaccttttcattattggggctaccaataggcctgaccttcttgattctgcccttcttcgccctggtcggttcgacaagcttctttatgtcggtgtaaatactgaggcatcatacagggaaaggatccttaaagcacagacacgcaagtataagctgcacaagaacgtttctctcttgtcagttgcgcagcgttgtccaccaaacttcactggtgctgatatttacgcgctgtgtgcggatgcatggtttcatgcagcaaagcgatcagttgaaacattcgaaatcgatccttcaagaagtaatgaagccagtgccgaagaagtcatcgtcgagatcgacgattttatcacggtgttaggagatatcgcaccgtcgctctctctggacgagctacaaaactacgaacagttgaggcagaagatcgaaggaccttctagatgaagttgggtttccactccctgctgacattcttaaactgctaacacaccaaaacattccctgtcttacattttcgttcgtacacaagttttcctccctgaaaacttgggcacttctatatccattcctgatttatacaatcacatccttgtagcagcatctgtattgacatcagaatgacattttctctgaagagaaacatcctgtcattctttgttagcagctccgcaactattctgaatgagcccgtgaagtcaagcactcaaagccttacctgggaaacaaaatgctattcctgacctgaaggaagcatccaccaatacagctagtttgggtacacacgctgaaccagctagttcgcctgggagaggcctctgtctcgtttagatgccatcgtctagaagttgtatcggaaaaattataagcgaatgttgcaatgaacagagttccttgtactaaaaaaaaaaaaaaaaaa

SEQ ID NO: 172428 - DNA, 426 bp, Zea mays
  Clone ID: MRT4577_88836C.1
gtccgtaacaagatctcttggctggaggcaaggttgggcgcccgcgacctgtgtgatgacattgtgcacgataacgacgacacagtgcagtcagaagagcattggtttgtgcgaaggtgcagagggctgtgggcaatggcaggggagaggctagggttcactgacgaggagagattgaggaagttgcagactaagaaacttgtgctcgcaagcaggctatctgattataaggaagggtgcgcccctggcgctggtgtagcttttgtggtgtttaaagatgtctacaccgcaaacaaggcggtaaaggatttcaagatggagaggaagaagacaccgattggtaggtttttcccagtgatggagctccagctcgagagaagtcgatggaaagtggagagagcaccaccggcatcagatatctactgg

SEQ ID NO: 172429 - DNA, 186 bp, Zea mays
  Clone ID: MRT4577_88837C.1
tgctgtatcacggttgagccgtcatacccgttgatggagggcgccactccgccgaaccctggcgccagcccgccgtccccgactccggcgcccgccgtgtggcataactactactcgtgccctgacaggaacatctgctgccgcatttacgattacggtagctactgcttcgcctgaggctgtcgc

SEQ ID NO: 172430 - DNA, 2430 bp, Zea mays
  Clone ID: MRT4577_88838C.1
tgaattcggcacgaggggtagatcaagctttgaacgagtactttaagtttgataggttcctagcaagaggagatgtttttggtatacaaaacagttggaagtgtggctcaagctgctgcctggcatgcaataagcaggataataaactgaatccccgtaatatgatctactttaaggtgactggcatggaaccatcagatgaacctatacttcgtgttaattgcaatgaaacagcccttgtacttggtggagctgcttctgctgcaatccccccttattccttttttgcttcttctggtaattcagtaccattgcacagtgaagtagtggagcatttagcatctgtcattgcaccagcattgtgcccttcggatattttaccaaaaatcaagttttccacttttttatatggcccgccaggatgtggaaagcgcacagtggttaggcatgttgctaaccatcttggtctgcttgtgggccagttgtctctggcgtgacctagaaacttcttgagagaggggggcacctactgcacttgcaactacctttaaagaagctcagaagtattctccttgtataatacttcttcgccactttgatgcaattgggaatgcatcctcaaacgaaggtccacagtctgagcaatctgggattgcatcgaacattgaatctgtcattaagcagtacattggacaacgttgggttgctaaggattcgctgccaggaaaagatgtaaatgggagctcatacctcgtggagcctgaatgtgtaagctctcttcaaatcatactagttgcaactgcggacagttctgaaggaatgcaacagtcaattagaagatgcttccgctatgagatcgacatgaagactatgaatgaagaacagagaaacaaactgatatctgagacgcttcaaggcattcctaaagttgctgatgagagtatttgcgacaagttcttaaaagatttagcagcacaaacatcaggtttcatgcccagggacatacttgcattggtcgcagatgctggtgtgtcttttgcgcataaaattgcagcagggaatgatagcaaagcaatcagtaagcatacggaggtccttccagaaagctcttctgccactcaaaatgaggaacaccatttcagcaaagaagatattatgtcttccttggaacgagccaagaaacggaatcgtgctgcactgggcacacccaaagttcctaatgtcaaatgggaggatgttggtgggctagaggatgtgaaaaaggttattctagatactattcagttgcctctgatgtacaagcacctgttttcttctaaattgaacaagccatcgtgtttggtgctatagcgacctccaggaaccgggaagagccccttttcgccgctccggggaggccagtgcccgtgcgccctgatggaggggggcggtttgccactgccagcgcaccatctttgagtcttaacgaaaaatgttcgggatatttttgagaaggctaggtctgcacgcccatgtgtcattttctttgatgagcttgattccctcgctcctgcacgaggatcctcagcagattctggcggtgtcatggacagggttgtttcccagttacttgtggagatcgatgggttgagtgacaacagccaggaccttttcattattggggctaccaataggcctgaccttcttgattctgcccttcttcgccctggtcggttcgacaagcttctttatgtcggtgtaaatactgaggcatcatacagggaaaggatccttaaagcacagacacgcaagtataagctgcacaagaacgtttctctcttgtcagttgcgcagcgttgtccaccaaacttcactggtgctgatatttacgcgctgtgtgcggatgcatggtttcatgcagcaaagcgatcagttgaaacattcgaaaccgatccttcaagaagtaatgacgccagtgccgaagaagtcatcgtcgagatcgacgattttatcacagtgttaggagatatcgcaccgtcgctctctctggacgagctacaaaactacgaacagttgaggcagaagatcgaaggaccttctagatgaagttgggtttccactccctgctgacattcttaaactgttaacacaccaaaacattccctgtcttacattttcgttcgcacacaagttttcctccctgaaaacttgggcacttctatatccattcctgatttatacaatcacattcttgtagcagcatctgtattgacatcagaatgacattttctctgaagagaaacatcctgtcattctttgttagcagctctgcaactattttgaagcctttttttggcagatgatgcgaatcaactttgtatagttagtttcgttgatgtacgcctgtatcatgttgtagtaaatgataaagagaataggagtcctcggatc

SEQ ID NO: 172431 - DNA, 996 bp, Zea mays
  unsure (1)..(996): unsure at all n locations
  Clone ID: MRT4577_88839C.1
ttttccttttaaccaaaatannnnnnccgttgaaattagatcgagatctgaagttggattcattcataatatacataaaggtacatgacaacttatacacgtctgaaaataggaaaacacactcaaaacatttatcctacctacacaggtacgtgaccatatataactgcaacagtccaaatattgctcctgaaaggtaccatccctctcgagcatttcctcgtctaagtcattaagtatatagtaatggacttccagacgtctactatgaaaagaaatatatatcaaatgaaggaatctcctccctgataaatagagcacaaagcccagctgacaactgttgaaggttaccctaatttgcgacaattacttcgtcaaagttccaatctctaacaaggtccctggacacagcacggctgcgttgaagtcgaggagtgccctccgtgccaacttgaccactcacaatgggtggaaagggggtcactttcgatgtcccagcactagtagaagttccagctggtgttactcttcgagctaagcaggccacagcagctccacatcggctttcctcctctgaacttgacaccgagtagcttctaagagagtgtgaggagctgctcatgccatggcatacaagacaagcaagactcatggttgttgtgttgctgctactgcgacgagctgggggtggcttgggcggatatggacggcgagctcgcctacagatcctcgccggggagaacgcgatgtggcgacgatttggttgacgaggaccaccgccgtgtgcttcacgcagggctaccgcagaggaaggaacggcgctggcgggaaaagagggtagggggtggaacgccgtcgggccgagaagagggctggagatgtggtaggagagaggaagagggagagggagagggagagatagagggggaggaagagatcggggaaacccgaggagggaaggaaaggaaaggagaagaggagggaaaagaggccgaa

SEQ ID NO: 172432 - DNA, 1374 bp, Zea mays
  Clone ID: MRT4577_8883C.1
aacctaggaattcggcgcgaccgcatcctccgcttcgtgtcgtctgccctgctgcccaagcctccggaggttctaccggagccggctcactctcgcgacaccgccgcggcctccggctatatatggacggcgaggaggcgccccttggcgcgctcaacctggctgagtacgcccccgccggcgcccgcaccgtcgactgctacaggcgtatccgcaagatcggcgagggcacctacggtgaggtatttgaagctgtggatattattactggggaaagagcagcacttaagaaaataaaactggatgatggcaaagaagggtttccacgccaaatcttgcgtgagattaaactattaaaaaagctggatcatgagaacatcatcagattgaaagagattgtagtatctcctggttctgcacatggaacaggcggatcagatgatcacatctataggggagatatctacatggtgtttgaatacatggaccatgatttgaagaaagtattgcaccatagtgccccatcccaagtcaaggtttatatggggcagctgctaaaaggattgcagtactgccatgccaacaatgtacttcatcgggatatcaaaggggctaatcttctaataactggtggtaagttgttaaaactcgcagattttggccttgcaaggctgttcactagagacggaactttaacaaatcatgtcatcactttatggtaccgaccccctgagttgcttcttggtgccacaagttatgctgaacctgtggatatttggtctgtcggttgcatatttgcagaatttttacttaagaaaccattatttcctggcagaactgagcaagagcagttatcaaaaatatttgaactgtgtggatctccaaacgaggaaagctggccaggtgtttccaagctaccattgtataagacaatgactatccgtcctgcgactcctaccaaacgaagcctgagagatatcttgcagaactttgactgtcctgctgttgaattaattgaacgaatgttgatccttaatccttcacagaggatttctgcacaagatgctcttggtgcggcatacttcatcaactaaactcatatgggggtggaagggagtatagattcgctgttctttgcgagtgcgaccaagttttgtttaccttgtcagaatgggtctagggatctctaatcggtgtaagtactacctgaagactgaaagtcttgtttctcctgctgacattggattaggactagcaagcagtttaactttctctgttctagctttaaacataatatatatagatgcattgtacattattactcatgggaaaaatgtatttgattattaattaatagcaagtgattcttggtat

SEQ ID NO: 172433 - DNA, 201 bp, Zea mays
  Clone ID: MRT4577_88840C.1
gtgatgctagggcggcagccggcgaggtagtggataccatgtcaccgtcgctggcttccaagaacacacttatgatcatgcgcttcaagattccgaccgactggccttatgatgaccacgtgcgcactaaggaaacgctgatttgtcccagacttatgcactagctaaggatgatgctcttggcagctttcgagattacgg

SEQ ID NO: 172434 - DNA, 285 bp, Zea mays
  Clone ID: MRT4577_88841C.1
catacttaagcttcggattcaggtatagatgtagccgtgcatcgcgggcggctacgctggcgacggcggcacgtccacgtcgggggcgaccaacatgatgcttctcaattcggccgtgaccaccatgacgccggcgtcctttgagcaccaccaccagcagcagtcgccgccggccgcgcattagcacttcgtttgcattccgattcaggtccaggcgccgccgacgtcggactacaacctgtggaccccggtcatgtctggctgcaccgaagacatgtcattcgc

SEQ ID NO: 172435 - DNA, 581 bp, Zea mays
  Clone ID: MRT4577_88842C.1
ggaccagctagctagctcctcccactgctatcacccgggccccggccagccatctcgctgaaagagaaaagcgcagccatgaagactactagctcgggcattgcagccgtgcctgcccttcctgcagggcaaggcagccaaacccagcgagagcaacaaccagtgctgcgacggcgtgaggaccctgtacgcggcggcggacaccaggcccgacaggcaggccacgtgccggtgcctcaaggcggcctacgttcaggtccacgctgtgctctccgcggcgcaggagctgcccggcgactgcggcctctcgctgtcctacaacatcacccccgacatcgactgcgacaagatcgaatgaagggatactgttcccttaccagaatccatacgacgggatggtgatgttcagtgccctgctagcagtaggctgcatctgcactgagtgactagaataaaggatttggtgatgtttgtgctgattggtgtgttcgcctgtaatcgtgtgatgccgtcgttggcttcttatatccgtgtctaatctcgcaagtgctcgtgtttgcaactataccatttataatgtc

SEQ ID NO: 172436 - DNA, 840 bp, Zea mays
  Clone ID: MRT4577_88843C.1
gcacgagcaaagttcaacgattcacacgctttggaactagaacaactgctgttggaaacctcctggtgaaatctcaccctattaataacgtgctgatcagcgcgtcggagaagcctcccccactaatcaacaagcaggaccagctagctagctcctcccactgctatcacccgggccccggccagccatctcgctgaaagagaaaagcgcagccatgaagactactagctcgggcattgcagtcgtcctcctggtggcgatgctggcagtccagtccgcggtggccgacatctcgtgctccgacgtgctcaacgacctgtcgccgtgcctgcccttcctgcagggcaaggcagccaaacccagcgagagcaacaaccagtgctgcgacggcgtgaggaccctgtacgcggcggcggacaccaggcccgacaggcaggccacgtgccggtgcctcaaggcggcctacgttcaggtccacgctgtgctctccgcggcgcaggagctgcccggcgactgcggcctctcgctgtcctacaacatcacccccgacatcgactgcgacaagatcgaatgaagggatactgttcccttaccagaatccatacgacgggatggtgatgttcagtgccctgctagcagtaggctgcatctgcactgagtgactagaataaaggatttggtgatgtttgtgctgattggtgtgttcgcctgtaatcgtgtgatgccgtcgttggcttcttatatccgtgtctaatctcgcaagtgctcgtgtttgcaactataccatttataatgtcaacttatcatgcttgtcattcgattcacacttttagctccttt

SEQ ID NO: 172437 - DNA, 2405 bp, Zea mays
  Clone ID: MRT4577_88844C.1
ccggccgggccgggaacccggggtgccagcgcacacgacaccggtcaccgcccgcctcctgataggcttgtctgccagatcgaaggcaagcgcgggcgccggcgtggccttgcgatggagagccccacgtcgacggcgtcgcgcccggacttctacgacttcctcgaccgcatgcgccgccccgccgccgccgacctcttccgctccatcaagagcttcctcgtctccttctccttccacgcgcccaacgccgaggaggacggcagcaaggtccaggccttcctcgcggagatggagagcgccatcagggaccacccgctctgggccaacgccaccgatcaggagatcgaccacgcgctcgagggcctggagaagtatgtcatgaccaaattgttcgaccgcacgtttgggacttccactgaggatgccgttaccgacatggacatctcggagaagattggtctcttgcagcagtttgttaagcctcatcacttggatatacccaaggtcctgcataacgaggcatcgtggctgcttgcagtgaaagagctgcagaagattaattcctttaaagcaccacgtgagaagcttctgtgcatcatgagctgctgtcaagtcatcaataacttgcttctgaacatatcaatgtcaaatgatcgaacattatctggggctgatgagttccttcctattcttatctatgttactatcaaggccaatcctcctcagctgcactcaaatctgaagttcattcagctctttagaagagaaacaaagctaatttcagaagtcgaatattacctgactaacctcatttcagcaaagatgtttataatagatgtcagtgctcactcgctctcaatggaggaaagcgagtttcagaaacatatggaatcggcaagactagctactcaagtatctgttgcaagcccaagtagctcacaggggcttcccacatctgcaagggcaaatcaggaggaaactgatatggcaggtttgcttattatactattcaatttattcggagaagtttgtttgaccatgaatttgcattccaaaacagtttttttttttgtcaccaagcaaaatgtgttcttttttgtttgaaaacaacataatgtggtttttattgtggtcctgttcaggaaccattttacctatcaaataaaataaaatgctaagctcttacggattttcctttaaatagttgttgtgtgtctgtaccagttttgaggtcgaatgatcatagcattcaaagcgatacatttgacaggttccagattccctttcatggactcagaaactgaaagcttgactccaggggaagtcaagcagctgcatgatatgtataagcgagttgtcacaagatacacgctgttgtctgaagccttaagaaagtcatcaatagacgaggatcaactccttaattcagtgcatgatccatgaggtgatgtgaagatgatgtctaggcatgatggtattaatcataagcaggtctcgtttccattagttgcagaccttataggggaaagaacgaggtcctagataaccaatgttccagcaagtcctacgcaatgcagggcacaacagctgtgagttgagcattacgcatgggaaggtgttatcttgttcctgatagccttggctcactagagttttgtagcattgtggtgccttggcatgacttgtacttaggttgggggtcctttattcaccaggatggatcttctgaaatcagtgctgaaggaactggaaattggcacacatgacatattgccttctaactcgtacaatctgccaccggatgtctcacagttttggtgccgatcggcttcctgcaatggagaatgtgaaaatcgaacctggaatgtagggcagaaaaccactactgaggcaggcggggataaagatggagtaacataggctgggaaatgtctagatctcttgccatactacacatgggagtatgtgttggatcccaatgttctgtagttagtgttgagccttgaggttttagagctgtagtgttggggaaaatgtgagcgggtaacactgatttttaacagctgatgtgctgctccgggcaaattcagtcgggcgttatgctaatgaagattatgtcaaaggaaaatatgaccaagggtgaaaggagatttatgtagttcccttttagttacacatctgattttattttaagcaagtacggatgagggatatccgtggtcaagtttgatgcttcaggttgaggtgaaatttcgttatttggcgactcggtatgcccacctcactgtgtaatctttatatctcaagcgtgtaaaaggatgcccaaaatacaactgtatagatcatcgtggatcactcgatcagctcatatttattctatcaataaaggcaaatataagact

SEQ ID NO: 172438 - DNA, 157 bp, Zea mays
  Clone ID: MRT4577_88845C.1
caagtgccggcctcgccattagatctccaagcgaatcatgtcgagatatcaccatcggtccaggctcttgcagaaacgaggaaaaaatacatgtcatctcgctgggttagggcggctgtgtatccgatgttctcgacgacaggggtagtgctgggga

SEQ ID NO: 172439 - DNA, 731 bp, Zea mays
  unsure (1)..(731): unsure at all n locations
  Clone ID: MRT4577_88846C.1
gtcttttcccctttcccattctggacgctctgtttcgataagcttgagggcgagctcgagcggcgcagcacagcaggcgattctctccgtccatggcgattcttgccggtcgattttgatttcggttccctttcttcttcgatccccggtgtcgcgcttggttgttcctctctcccgctctctttcgctctctgcccgtgtgctttttgcttgtgtttggttccagatctaggtgagttcatgttgtccctgtcgtctcgcacattgttgtagttgtagatgcatgatgttgttgactccctgttgaaggtggagatgcctgatttgtgtgtgccgtcgagcacctgcttgtagttgtagacgcatgattttgttgacttcctgccggagttggagatgcgtgatttgtgtgtcttcccgagcacctgttctgtagttggagatgcataatagatgcatgattttatggttgactccctgtgggnaggtggaggtgcgtgatttgtgcacctccccgcgccgctgatgcagttgcagatggcggtggttgtttcctgtctcctgtccacgggttgttgtagtttgggggattatgtagatgtgaccccccctgtaggtgcgtgattccgtgaatttttgtgttctggtctattatgtcctgatgcttgctgcggtatgcagctgtgtagcttgcttttgtgcctaagatgtttgtatgatgttttgagttc

SEQ ID NO: 172440 - DNA, 302 bp, Zea mays
  Clone ID: MRT4577_88847C.1
tttgggctgatttatgtgcttgtttatgtgcttgtccggccttactggcttggagaggagaagtcagtcaatcagtaggagtcgcgccggcgcgcgcgcgcgcggagggcagtcgtagtcggggtcagtcggaaaggctgggagttacggggaggggttgggcggagtcgaagtggactgagaataagactaattgttaggctattcctgttaagtgttgtaatggttcgtctaagaaggtgcatgagtctcaatagtctcgtgatgttcaagctgtgtctactgctgcacttaattgtggt

SEQ ID NO: 172441 - DNA, 335 bp, Zea mays
  unsure (1)..(335): unsure at all n locations
  Clone ID: MRT4577_88849C.1
ctataaacctcaaacctaccatacagccncagctggcgaggcaaacgaggatggtgggagtgcccccactggaggccgaactcttcgacatcgaccgaaccatgcccatccatcacccattgcaccaccggcccacctaagatatgctcctacacctacactacaacaaccgcatgcccataactcccgaactcggaatccataacatggcacccctgatcaaccagcacataaggcacttactattcccggacttcgaccaacaccccctcaacgccttcttcaacgagaaggaggcactcttcaccaagaactccatcaacttgctacttgag

SEQ ID NO: 172442 - DNA, 298 bp, Zea mays
  Clone ID: MRT4577_8884C.1
gcttacttattctagcatcctatacaacgtcctaccttaatattttattattactccacaagaatctaatctatactacgcgtctcttcctatatctatatcttcaacagataacaattcttaccatatcctttcccttctattcatccctatgtgaacccaatttcataccctctgtcttataactaattaaccatctttatatcttattttcatacatcatgcctacaactacaaacaatttaacaaagtatctaatgaatcgaccaaaaccctcaatagggtcatatataaattt

SEQ ID NO: 172443 - DNA, 436 bp, Zea mays
  Clone ID: MRT4577_88851C.1
acacccttccgcgaccccttggccgaccccttggggttaattcctttttgagacaaattttaaattttggggaaaggtttgttgaactggggagggtccactttaactgaaatttgttaccaatcatggaaagaaatgtaactgtttcctttttgttttttttggacctccgttgaaacccaatctttttttttttttggttccctaatggcctttaaaccccgttgaacccggccttttttaaaaaaaaaaaaaaaaaaaaaaaaggggcggccaatataaaggatcaaaaatttacttacccttgaatgcgaagggggggggtattaattaatgggggcggacctttttaaaggtcccagtttttttaccccttctttgcaaggtaaaaccttttttttgccgaccccaaattcaattgcatggcccccctttt

SEQ ID NO: 172444 - DNA, 224 bp, Zea mays
  Clone ID: MRT4577_88852C.1
caaaagggaaaaaaactgcaccaacataatagaaccatccgactgacgcataccccttcggatccagggaacatgcgggagcctcatctttaaggtgaagcagttcctttgtgtaaacctacttgacaactgcatatcagctccatgttcatgttacagcggatgcctgacagcacggcgtgggatgattcaaaggagacaactcccatagagatgcttggggc

SEQ ID NO: 172445 - DNA, 233 bp, Zea mays
  Clone ID: MRT4577_88853C.1
aagtctgaaggtcatgttcaagatcagggactaaacaatgccgatttgattccaggtggtttgaaggcacaaacagttagcataccagtagaagatgagcttggagactatgcacgtgcacgaggatttgagatatttgataaaatgtgctcagagaaagagagagttcaaatgagtgaggctgctctgaccgcaaaggcacgtatggcgttgtccatgggtgacagtgatat

SEQ ID NO: 172446 - DNA, 156 bp, Zea mays
  Clone ID: MRT4577_88854C.1
ctagctcggcgttctagtgcgtatggagatcctcggacctacatgcggcagctgtgcaattcgatacatcaagggtggatgatctcgggtgatggttgcgaggctggcacagctgcgcgctcaggcggtgcaggcggcggagttcgcctcgaagca

SEQ ID NO: 172447 - DNA, 202 bp, Zea mays
  Clone ID: MRT4577_88855C.1
gcactccacgcgtctcatcaaaatactacattagatagttcgaattttcactacacgtttttagtatccataggggtagagagtgaacttaaacaggcgcaaacagcatcaactcataaattgaaaataaaaaacacacaaagccaaatcaacactcaaaaataaccttattgatgaccaggaaagctagatgccatacatg

SEQ ID NO: 172448 - DNA, 335 bp, Zea mays
  Clone ID: MRT4577_88856C.1
cggcacggcaggcgccatggatgggctcgaggtagccctcaggatacgggagctcagtaacacctgctggctgctggtcctcgtcgccgtggaagccagcggcgtcgatgacaccgtgcgtgatatgtgccggcgagcaggagtcgacgggctcatccacaagccatcacgctgccgcgctcggagctcagctccagagagtccttcagaacaactgatccaacctccaaggaacctgtgtgtcgatttgcagccttcacattacgccacgtcatgatgtagctgtgtagagactcatgttgagcgtctctcatcgcaattatgttgaagctgta

SEQ ID NO: 172449 - DNA, 485 bp, Zea mays
  unsure (1)..(485): unsure at all n locations
  Clone ID: MRT4577_88857C.1
cggggtcgagggcactttctctcaggacgtgctcacggtggcgccgcccgtggccgtccaagacttcaccttcttttgcctggacgcaggcgcttctgatggtatgccagaggtcgggaccctcgacctcagccgcgaccggaactcgctaccgtcgcggctggctggttccgcttccgccgccttctcctactgcatgccacagtacccggactgcgcaggcttcctctccctcggcgacgacgccactgtcagaggagacaactgcaccgngcacgcaccgctgctgagcagcgacgaccccgacctggcaaacatgtacttcatcgacgtcgtngggatgagcctnggngacgtggacctnccgatcccgtcgggcaccttcggnaacaacgccagcaccatggtggaaggggggaccaccttgancatgttgggaccggacgcggacacgccggtgggcgacgccttacggaaggcgatgg

SEQ ID NO: 172450 - DNA, 775 bp, Zea mays
  Clone ID: MRT4577_88858C.1
ccggccgggctttccttctctacctttcctttgttctctcactaatacccctataactgtatccatatacacccccttcacccttcactgtatccaccacctcacagactctatcaaaatgcccattgctttcgactttgcccagaaatgtgtcatcgttaccggtggtaacagaggtatcggacgagccatctctgagaccctcgccaaagccagcgccaacgtcgccatcatctaccactcggccaaggacgctgaggacgtcgcggccgagattgccaaggagcacggtatcaagtgccaggcttacaagtgcgatgtcggagataccgatctcgtcaagtcgactttcaagaagattgacgaggagatgggacccgtcactggacttgtcgccaacgctggtgtttccgtcgtaaaggatgctttggagatgaagaaggaggacttctcgtttgtctacgacgtcaacgtttggggacagttcgcctgtgctcaagccgctgccgacctctggaccaagtctggcttcaagcacggttccatcgtcctcacctcgtccatgtcttcccaaatcgtcaaccgtggcatccaccaagtcttctacaactcgtccaaggctgccgcctcgtcgatcgttaagcagctcgctgttgagtgggccgacaagggtattcgagtcaacgctctctgcccaggttacgtcgctaccgaccagacctcgcacatggaccccaagctcctcgaatgggagaagaaggagctcgttcccctc

SEQ ID NO: 172451 - DNA, 190 bp, Zea mays
  Clone ID: MRT4577_88859C.1
tattagttaatatcagcatgttaaagatttgaggtacaaactggaatgataatctaatagttaacatttttttacatgcttatcatgtggtaggtactgtgacacgtgctttatacaatctgtctctaattctcagagcaactctgtacaggtgggaaaactgaggggtaagtaggggccatgtgatggc

SEQ ID NO: 172452 - DNA, 166 bp, Zea mays
  Clone ID: MRT4577_8885C.1
aaaacccggcgcgaccgcacgcgtacggctaaccaattaaagaagatacaacttttttttttcacaacctactatcaaggtggggtgcgaggctaaccatgtgacgctcatctaccatcagatgaaatatatgtgaaaacacttaatgcctgatcccattaatatc

SEQ ID NO: 172453 - DNA, 271 bp, Zea mays
  Clone ID: MRT4577_88860C.1
ttgcaatcatatatttgaattttatgacatttgttatgtccatattgaataggaaagaattacaagattccagccaaattctcatacgaaacttcttatttaaatagccaaatctcgtatgactaaccaaaaagttgtaacttccactgtatattttgttacacaaaatttaaatgtcaataatatttatacaaagctccatttctatcatttacatcatcctaaaattcattataatgttcatatcccatattcttaataattattatca

SEQ ID NO: 172454 - DNA, 397 bp, Zea mays
  Clone ID: MRT4577_88861C.1
cggtcgtttttttggggggcaacccaacttcataggttctacttaatcaacagtggtaaactgttactgtagccggactgctgacagtgagatctgaatattgctgataacatgattgaattagcctactgacgtgctgggagctcttatgagtcacaacttgagatctatattgaagggttcagaatcacatatctgcactgcgtgctgcctatgacacctttattatgcgcctggtagactgctatatgcagcgcaagaaccttctggggtatagatggtttctacgcctgaagaaccacatgaatgggtgttgaagcacaacgtgtttaaccttgggccttgagttgaaatgctcaatgacacgcatacttgactcaacaaacgttttgaacct

SEQ ID NO: 172455 - DNA, 506 bp, Zea mays
  Clone ID: MRT4577_88862C.1
tcgaacttttcataattataagggattggcgtacccaatcattggcaatggtagatcaatccttttctgggaagatcagtggaataagagtattccaagtcaacaatatccagaattattctcttttgccaaaagcacaaaactttctatcgcagaggctaaagagcaagatcacttatttcgtatttttcaattgcctatttgtgaacaagcctactaacagtatttggagttacatgtagtctgggagcaaattgatctaagcactgtaaaggaccgatggagatacatatgggattcagacagctattcaacaaaaaaggcctacagacacctaatggggcgcacacatgctcattctatttacaagtgtctatggaaaaacaaatgtcaaccatagcataaagttttctattggttatggcttaaaaacagactcaacactcggaatatgctgtgaaggaaaaacatgacactagagtcatattcatgtgagaactgtttat

SEQ ID NO: 172456 - DNA, 1230 bp, Zea mays
  Clone ID: MRT4577_88863C.1
ggtaccctcgattcggctcgagcggcaacggacgggtcgcaccaccagtccaccgccaccccatccaatcccatccccacaaccgggtgccgccgccttctatggcggacttcggcgacgagctctttctcgacgtcggggacgatggtttcggagacctctcctacgtctccttctccgagtccatcgagttggatctcgcctgcccacgcgacgtcttttccgcggggtttgatcccgaaaccctaacccacatcccggggtccccaatctccttcgactccgaccccgacctccgccacctctctccctcgctgacctgctccccgcccttctggggctgcctcgatgacgccgctagcttcgagtgggaggagatcgcggacgctgccctcggcgtcggcggtggcgctggcggcgccggagggggaggacaaggactagaaggagacgccgatgccgacgccgacgtgttcgggttcctcgacgagcgggagatgctgggcgtgatggagggcatcgacagcggtgacgacgactcgatcttctccgatgagcctccgtttgacttcggcgatggcgacacggagcttgaaggcatcttccggagcggtgtcgggtgggagctgctcccggtgcctctggacgaggacgagttcgaggtgctgccggggcacgtcgtggaagtgggcggcgccccgccggcggcgcttgcagtggtggagcggctccaggtggtggccgtcagaggcgaggaggttgtgcaggagtgcgctgtttgcaaggaagggatggaacagggggagctcaccactgggctgccgtgtgggcatttctaccacggggcgtgcattggtccatggcttgccatccggaacacgtgcccggtgtgccggtatgagctgcctactgatgaccctgagtatgagaagcggaggacgaggcgccattctgctggtggttcaacaccacagttgggtgcaccgatgcaggtttgagctagggctgattggtgctatgtcttggatgcaattccatcattccacggaagttagaaacctcactcattgaattggcgctaggatgtttacatgccagtagaattatacttctatgatcttgattttttcaggatttagcttttgtgctcgagagttgaatggtaagaacaattatcttaacaatttgtacatacatcttgtttcaatcaaattcttccttgcttttcag

SEQ ID NO: 172457 - DNA, 555 bp, Zea mays
  Clone ID: MRT4577_88864C.1
ctctttttttttttttttttttttttttttttttttttttttggtatcttttttttgttattttttttgttttggtttttttttttttaaaggacagctgggaagaaccaactactttgggatgggaccgataacccaaactccagaacggggaaaatctttacactttttagccagacggggacgacagaaactgagactgctactttgacctcctccgccacgacgcggtaggccctttaacagggatacggggggcgaccttggatgcccttgggcatgagggtgacccccttggcgtgaggggcgcaaaggttggtgtcctggaaaagaccgacaaggtatgcctgggacgcctcctgaaggggggggacgggggaactctggaagcgaaggccgggcttgaattcctgggcgagctcacgcaccagtctctgaaacggaagctggcgtataagcacttgcgggctcttctggcactgggggatctcccggagcgcgacggtaccggggcggaaccgttggggctctttcactcccccgggcgccggggca

SEQ ID NO: 172458 - DNA, 442 bp, Zea mays
  Clone ID: MRT4577_88865C.1
attcggctcgagagaccaccaatttacttgtgagtgtatacccaacacaaactgaagtcatcatgcactactacacccgcctctcataagttgatagggaacctatcatggagtattccacaccaccaccaatgataggcaactaccaccaccctaatgctcaccgtgtcctcaacgagaagattgtctatgaggagaatgttatttgaggatcccgccacaaccacattcatcaccaccaccctgagactcatgagagagtcaaggtggtcgagtatgaacaagttcctgataatcgcattgtctatgaatagaaacctgcttatgacaactatcgttactactctccaaggtattgaaattggacaaatgcaagaacacctataacgtgttatcatgttgctttttattaagcaggctacctattataccaaaagcacca

SEQ ID NO: 172459 - DNA, 618 bp, Zea mays
  Clone ID: MRT4577_88866C.1
caaaacatgcgggctggttggacagaggtagatggcttgctgttgtttaaagggaagattttcattcctgatgcttcggaattatgggctactcttttggcagacgctcatgacagtggccatgagggtgtccaaaagaccttacattggtgtcgagtttcattttataattcacacgcggttgtctgaattaaggaatttgtccgaggttgcagcatatgtcaaagaaacaaatccgagcacttacatccagctgggttgttgcagcctcttccagtgccttctgaggtttggagtgatatttctatggactttgttgagggatttccggaagtgggtggtaaatcagtgatatttgttgacagattttctaaatttgcccatttcattccgttgggccatccttacacggctgcctcagtgtcccaagcattttttgacagcattgtccggttacatggtctcccttgttctattgttagtgatagagatacagtttttacaagttctttttggtcagaattggggaagggggaaatgttatagataattttgttgggttgcaatatcagtgacaggctgtcagccttcagatatggatagcagcagggagatagc

SEQ ID NO: 172460 - DNA, 119 bp, Zea mays
  Clone ID: MRT4577_88867C.1
caaatacagtagataaggatagtgagagagctgtgacaaaaaacgagcggattgcatttgctagggaatacggttgtttgcctctagaatgcagtgcgagaacaaaagtacatgtagaa

SEQ ID NO: 172461 - DNA, 1887 bp, Zea mays
  Clone ID: MRT4577_88868C.1
tggattaggcatgttcgttgcgaaaaacgaagaaatggttccggtggaaaaaaaactcgtgctttgtatgcaccccgacacccgttttcagaatgggtgacgtgcggcaacgaaattgcgagttttggacctaaagtagtggattgggcatgttcgttgcgaaaaacgaagaaatggttccggtggcaaaaactcgtgctttgtatgcaccccgacaaccattttcggaatgggtgacgtgcgacaacgaaattgcgcgaaacctccccaaacatgagttttggacctaaagtagtggattaggcatgttcgttgcgaaaaacgaaaaaatggttccggtggcaaaaactcgtgctttgtatgcacccgacacccgttttcggagggtgacgtgcggcaacgaaattgcgcgaaaccaccccaaacatgagatttggacctaaagtagtggattgggcatgttcgttacgaaaaacaaagaaatggttccggtggcaaaaactcgtgcttttatgcacccgacactcgttttcggaatgagtgacgtgcggcaacaaaattgcgcgaaaccaccccaaacatgagttttgtacctaaagtagtggattgggcatgttcgttgcgaaaaacgaagaaatggttccgttggcaaaaactcgtgctttgtatgcaccccgacaaccgttttcagaatgggtgacgtgcggcaacaaaattgcgcgaaaccactccgaacatgagttttggacctaaagtagtggattgggcatgttcgttgcgaaaaacgaagaaatggttccggtggcaaaaacttgtgctttgtatgcaccccacacccgtttttagaatgggtgacgtgcggcaacgaaattgcgcgaaaccacccgaaacatgagttttggacctaaagtagtggattgggcatgtttgttgcgaaaaaaagaaatgtttccggtggcaaaaactcgtgctttgtatgcactcgacacccgttttcggaatgggtgacgtgcgacaacgaaattgtgcgaaaccaccccaaacatgagttttggacctaaagtagtggattgggcatgttcgttacgaaaaacgaagaaatggttccggtggcaaaaactcgtgctttgtatgcacccgacacccgttttcggaatgggtgacgtgcgacaaccaaattgcgagaaatcaccccaaacatgagttttggacctaaagtagtggattgggcatgttcgttgcgaaaaacgaagaaatggttccgatggcaaaaactcgtgctttgtatgcaccccatacacctattttcggaatgggtgacgtgtgacaacgaaattgcgcgaaaccaccccaaacatgagttttgtacctgaagtagtggattgggcatgttcgttgcgaaaaaacgaagaaatggttccggtggcaaaaactcgtgctttgtatgcacccccgacaaccgttttcggaatgggtgacgtgcggcaacgaaattgttcttttccaccccaaacatgagttttggacctaaagtagtggattgggcatgttcgttgcgaaaaacgaagaaatggttacggtggcaaaaactcgtgctttgtatgcacccgacacccgttttcgaaatgggtgacgtgcgacaacgaaattgcgcgaaaccaccccaaacatgagttttggacctaaagtagtggattggcatgttcgttgcgaaaaacgaagaaatggttccggtggcaaaaacttgtgctttgtatgcaccccgacacccgttttcggaatgggtgacgtgtgacaacgaaattgcgcgaaaccaccccaaacatgagttttgtacctaaagtagtggatgatgcggacatcaacaccaacacgagcacatctaca

SEQ ID NO: 172462 - DNA, 1503 bp, Zea mays
  Clone ID: MRT4577_88869C.1
ttgttttttttgacgtaaccgaaggagaaaaataaggaagcggcgttgactcggtttgatgtaaccgaaggagagaaacaaggaagatggttgcggcgcgctagggtttgatgtaaccgaaggagaaaaataaggaagatggttgtgacgcgctagggtttgatgtaaccgaaggagaaaaacaaggaagaaagaaggatggtaagaaaaaaacacaatgcgaccagcaacaaatgacgcgaaagcacacaaattcaacaatgcatattattgaaagaaggtgcgaggctcaaaagggtgctggtataaggtctaacctgaatttttatgtggttttgtggactataggaaaaaaacactcgataaactcaccgatcaacctagaaatctgataccacttgatagagctggagtgcccgatctttcagtgagtgaagataatttcgatttggtggaagtagaccctcacgatctgactacgacgagcggacccgaagcgccaatgcaatcgctgaaccaactcccaatggttaccgaccttgctgctgcgagatcggcctgatcacgaagatcgtttcctatgcgcaatcgaagaacgaacaagaaaaagatgcgagcaatcttaatatcactcgaggtggagttctgaatcacagaggacagcacgtatttgtgcgtgttctggggtagctaaagctagatgtaaaacaaaactcaagttctaaatgaaacaggtctctgactaaatagaggagaggcgtgaacagtagggccgactccctaggcgccccatacgggccttcctgttgggccatcttctgggccttcgttctttaacaacatgatgtagttcaattctcttgcacgggcccgagtcactggcccaggtggaaggggtggcgcctggactggggaagatggtgcctaggctggagaaggtgctgctggtgtagatgtactcgtgttggtgttgatgtcctcatcagcatgcgcgcatgggtgaaacgccggcgagccggagagctgcacggcagaggaaccgagcagggagaacgcagaccagcggaccagggaggcaaccatggatgggagcaagggccggctgacatccatggttggggacaggaggcgagctgggaggatgagaacgacagagagcagagcgcatagaggagctcacaggcctgacaaaatccgagcagggaggagactttggcccagcatggagctcgacgcggccaggcgagcaggagatcagggaaccgcgacctccatggccgagcagataaccacggtgcgacggctgagggagaggcagagcgcgcgcgtcggcatgggagagagagctcaggggatgaagacgtgagcaactcgcagggaagaccgacgcagggagccggccatggacgaagcaggcgcggcgctggacgctggagactagagaggagagctgaggggggcgcgactggagaagctgggaaggagttgggcgatcccggccgg

SEQ ID NO: 172463 - DNA, 424 bp, Zea mays
  Clone ID: MRT4577_8886C.1
ggggggcaaaaaaaaggggttggcccaatttataaaaaggggggggaaaaaaaagggttacccgggggggaaaacggggccccaccaaaaagggggggggcggccccagaagggaaaaaattttccctaaaaaaagggaccccatgggggttaaaaaaattttgggggccttggttccaaaaacagcaaaaaggggttcccgggggggttttttgttccccaattttgggaaacacaattttccccggggcccaaagtttactctttggggggggggccgggggccccgggaaaaaccagggaatcccccccccctttgggggaaacggggaaacccccgaaattttgggaaaaaccgttcccccccaatttttcccccaaaaagtttttgaaaaaccaaaaagggttgcccttaaagaaaagg

SEQ ID NO: 172464 - DNA, 309 bp, Zea mays
  Clone ID: MRT4577_88870C.1
ggtggggcattattgtttgccacaaaaaaactgagttagcacacaaactgatttatttacgatggatgtttgtccttaaacctgcagagattgaaccgtaacaaccctaggaagaggcacaaacaggtctacacaactaaatatgataattctggcagctggccactggatataacagaacgatgcttgaacttgcaatacctggtatcccagagcccagaactatggataaacaaggagcattggtcccgaacttgtgacatctaacatttgacaagatacatctcaatcacgcaccggatgatcctt

SEQ ID NO: 172465 - DNA, 2050 bp, Zea mays
  Clone ID: MRT4577_88871C.1
tccttttttttttttttttttttttaaagaaatgatgttttggtgtcatgttctttcgagcgagaagaaacaaacgtatcctttctccttcgttttctttttttttgtttctgtttttttttatgtaaccgaaggagaaaaacaaggaagcggtcgttgactcggtttgtttttttttttgttttttttcgtaaccgaaggagaaaatcaaggaaacggccgttgactcggtttgttttttctgtttttttttgacgtaaccgaaggagaaaaacaaggaaacaatgttgactcggtttgtggcgcgatcaaacgggagatggtggcggcgctagggtttgaatggtggaagaacacaatgcaaccagcaacaaatgacgcgaaagcacacaaattcaacaatgcagattattgaaagaaagtgcgaggctcaaaagggtgctgggataagatctaacctgaatttttatgtggttttgtggactgtaggaaaaaaaaaacgctcgaaaaactcaccgatcaacctggaaatctgataccaattgatgaagctgaggtgcccgatctttcggcgagtagagataattccgatttggcggaagatgacccttgcgatccgactacgacgagcaagcccgaggcgccaatgcaatcgctgaaccaactccctgtggttaccgaccttgctgatgcgagatcggcctgatcacgaagatcgtttcctgtgcgcaatcgaagaacgaacaagaaaaagatgcgagcaatctaatctattactcgagggtggagttctgaatacacgaagacagcgcagatttgcgcgtgttcgagagtagctaaggctaacgtaaaacaaaactcgggaaataaaggaggcgcagctcctgaataaatagagagggggcgcaggccctaggggcggccaaccctaggtcgtccattatgggccgcaattgggctggtcgtctattcttccgggccttcgttctttaacaacatgatgtagttcaattctcttgcacgggcccgagtcactggcccaggtggaaggggtggcgcctgggctggagaaggtgctgctggtgtagatgtgctcgtgttggtgttgatgtccgcatcaacatgagttttggacctaaagtagtggaatgggtatgttcgttgtgaaaaacgaagaaatggttccggttgcaaaaactcgtgcttgtatgcagcccgacacccgttttcggaatgggtaacgtgcggcaacgaaattgcgcgaaaccaccccaaaatgagttttggacctaaagtagtggattgggcatgttcgttgagaagaacaaagaatggttccggtggcaaaatctcgtgctttgtatgcacaccaacacccgttttcggaacgggtgacgtgcggcaacgaatttgcgcgaaaccacccccaaacatgagttttggacctaaagtagtggattgggcatgttcgttgcgaaaaacgaagaaatggtttcggtggcaaaaactcgtgctttgtatgcacccgacacccgtttttggaatgggtgacgtgcgacaacgaaattgcgagaaacaaccccaaacatgagttttggacctaaagtagtggattgggcatgttcgttgcaaaaaatgaagaaatggttccggtggcaaaaactcgtgctttgtatgcacccgacacacgttttcggaatgggtgacgtgcgacaacgaaattgcgagaaatcaccccaaacatgagttttggacctaaagtagtggattgggcatgttcgttgcgaaaaacgaagaaatggttccggtggcaaaaactcgtgctttgtatgcaccccgacaaccgttttcggaatgggtgacgtgcggcaacgaaattgcgcgaaaccaccccaaacatgagttttggacctaaagtagtggatagggcatgttcgttacgaaaaacgaagaaatggttccggtggcaaaaactcgtgcttttatgcacccgacattcgtgttcggaatgagtgacgtgcggcaacgaaattgcgcgaaaccaccccaa

SEQ ID NO: 172466 - DNA, 1208 bp, Zea mays
  unsure (1)..(1208): unsure at all n locations
  Clone ID: MRT4577_88872C.1
gacgtaaccgaaggagaaaaataaggaaaaaatgttgactcgatttgtggcgtgatcaaacgggagatggtggtggcgctagggtttgaatggtggaagaacacaatgcaaccagcaacaaatgacgcgaaagcacacaaaatcaacaatgcagattattgaaagaaagtgcgaggctcaaaaggtgctgggataagatctaacctgaattttaatgtggttttgtggattgtaggaaaaaaacgctcaataaactcaccgatcaacctggaaatctgataccaattgatgaagctgaggtgcccgatctttcggcgagtagagataatcccgatttggcggaagatgacccttgcgatccgactacgacgagcaagcccgaggcgccaatgcaatcactgaaccaactcccgtggttccgaccttgctatgcgagatcggcctgatcacgaagatcgtttcctgtgcgcaatcgaagaacgaacaagaacaagatgcgagcaatctaatctattactcgagggtggagttctgaatacacgaagacagcgcagatttgcgcatgttcgagagtagctaaggctaacgtaaaacaaaactcaggaaataaaggaggtgcagctcctgaataaatagagagggggcgcaacacctaggggcggccaaccctaggtcgtccattatgggccgcaattgggctggtcgtctattcttccgggccttcgttctttaacaacatgatgtagttaaattctcttgcacgggcccgagtcactggcccaggtggaaggggtggcgcctgggctggaggtgctgctggtgtagatgtgctcgtgttggtgttgatgtccgcatcaaccccaaacatgagttttggacctaaagtagtggattggccatgttcgttgcgaaaatcgaagaaacggttccggtggcaaaaactcgtgctttgtatgcaccccgatacccgttttcggaatgggtgacgtgcgacaacaaaattgtgcaaaacgatcccaaacatgagttttggaccttaagtagtagattgggcatgttcgttgcaaaaaacgaagaaatggtttcggtggcaaaaactgagtttgtatgcacccgatacccgttttcggaatgggtgacgtgcggcaacggaattacgcgaaaacaacccaaacatngtttggaaccggccagcccgagggtacccc

SEQ ID NO: 172467 - DNA, 1309 bp, Zea mays
  unsure (1)..(1309): unsure at all n locations
  Clone ID: MRT4577_88873C.1
cagcancaaatgacgcgcaagcacacaaattcancaatgcagatattgaaagaaagtgcgaggctcaaaagggtgctgggataaggtctaacctgaatttttatgtggttttgtggaccgtaggagaaaaaaaacactcgataaactcaccgatcaacctggaaatctgataccacttgatatagctgaggtgcctgatcttttggcgagtggagataattccgatttggcggaagatgacccttgtgatccgactacgacgagcaagcccgaggcaccaatgcaatcgctgaatcaactccatgtggttaccgtccttgctgatgcgagatcggcctgatcaggaagatcgtttcctgtgcgcaatcgaagaacgaacaaaaaaagatgcgagcaatctaatctattactcgcgggtggagttctgaatacacgaagtcagcgctgatttgcgcctgttcgagagtagctaaagctaacataaaacaaaactcgaagaacaaaggaggcgcaactcctggataaatagagagagggggcgcaacccttaggggcggccaaccctaggtcgtccactatgggccgcaattgggctagtcgtctattcttctgggccctcattcttcagtagcatgacgaagttaagatctctggcacgggcccgagtgattggcccagctaatgaaggaagtggcgcttgatgtggaggtgctgctggtgtagtcgtactcatagtgatgtcctcatcagttccgttggcaaaaactcgtgctttgtatgcaccccgacaaccgttttcagaatgggtgacgtgcggcaacgaaattgcgcgaaaccaccccaaacatgagttttggacctaaagtagtggattgggcatgttcgttgcgaaaaacgaagaaatggttccggtggcaaaaactcgtgctttgtatgcaccccgacaaccgttttcagaatgagtgacgtgcggcaacgaaattgcgcgaaaccaccccaaacatgagttttggacctacagtagtggattgggcatgttcgttacgaaaaacgaagaaatggttccggtggcaaaaactcgtgcttttatgcacccgacactcgttttcggaatgagtgacgtgcggcaacgaaattgcgcgaaaccaccccaaacatgagttttgtacctaaagtagtggattgggcatgtttcgttgcgaaaaaagaagaaatggttctggtggcaaaaactcgtgctttgtatgcaccccaacaactgttttcagaatgggtgacgtgcggcaacgaaattgcgcgaaaccccggc

SEQ ID NO: 172468 - DNA, 1671 bp, Zea mays
  Clone ID: MRT4577_88874C.1
aaaaatgcgtgaaacaccccaacatgagttttggacctaaagtagtggattgtgcatgttcgttgcgaaaaacgaagaaatggttccggtggcgaaaactcatgctttgtatgcacctgacacccgtttttggaatgggtgacgtgcggtaatgaaattgcgcgaaaccaccccaaacatgagttttggacataaagtagtggattgggcatgttcgttgcgaaaaacgaagaaatgattccggtggcgaactctcgtgctttgtatgcaccctgacacccgttttcggaatgggtgacgtggtgcaacgaaattgcacgaaaccacccgaaacatgagttttggacctaaagtagtggattgggcatgttcgttgcgaaaaacgaagaaatggttccggtggcgaaaactcgtgcttgtatgcaccccgacacccgttttcggaattggtgacgtgtggcaacgaaattgcgcgaaaccaccccaaacatgagttttggacctaaagtagtggattgggcatgttcgttgcgaaaaacaaagaaatggttccggtggcaaaaactcgtgctttgtatgcacccgacacccgttttcggaatgggtgacgtgcgacaacgaaattgcgcgaaaccaccccaaacatgagttttggacctaaagtagtggattggacatgttcgttgcgaaaaacgaagaaatgattccggtggcaaacactcgtgcttttattatgcacatcgattcctgttttcagaatgagtgacgtgcgacaacgaaattgcgcgaaacctccccaaacatagtggattaggcatgttcgttgcgaaaaacgaagaaatggttccgggggcaaaaactcgtgcttttatgcaacccgatacccgttttcagaatgggtgacgtgcgacatcaaaattgcgcgaaacctccccaaacatgagttttggacctaaagtagtggattgggcatgttcgttgcaaaaacgacgaaatggttccggtggcaaaaactcatgctttgtatgcgacccgacacccattttcggaatgggtgatgtgcggcaacaaaattgcgaaaccaccccaaatatgagttttggacctaaagtagtggattggacatgttcgttgcgaaaaacgaataaatggttccggtggcaaaaactcgtgcttgtatgcacccctacacccattttcggaactggtgacgtgcgccaacgaaattgcgcgaaaccaccccaaacatgagttttggacctaaagtagtggattgggcatgttcgttgcgaaaaacgaagaaatggttccggtggcgaaaactcatgctttgtatgcaccccgacacccgttttcggattgggtgacgtgcggcaacgaaattgcgcgaaaccaccccaaacatgagttttggacctaaagtagtgggttgggcatgttcgttgcgcaaagcgaagaaatggttccggtggcgaaaagtcgtgctttgtatgcaccccgacacccgttttcggaatgggtgacgtgtggcaacgaaactgcacgaaaccaccccaaacattagttttggacctaaagtagtggattgggcatgttcgttgcgaaaaacgaagaattggttccggtgacaaaaactcatgctttgtatgcacccgacacccgttttcggat

SEQ ID NO: 172469 - DNA, 1161 bp, Zea mays
  Clone ID: MRT4577_88875C.1
gggcaattccgcttcggcactagaccagcgctcgccgacgccgctcctccgtcttctgcttctcccagcgccgcccgcccccgctgttccctcacacgccggccgccgcgcaagagccgtggccccgtcgacgtccgcccgcacaggactctccgagtgtgggattgagccgtagttttttttttttggtggctcgggccgatatccggtactgtatgagggttgccaactactagactttaagatcgctgattcaatggaggcctccgaggcagcacctgcagcggcggccaccgtcatggaagcagaggatgtgagcggcgggaagggcgaatggtacgtgcttggggagcgggcgctgatggtgccgtacacgcgggagcacgtgccgcggtaccacgactggatgcaggacccggcgctgctggaggccaccgcgtcggagcccctctccctctcgcaggagttcgaggtccaccgctcatggaccctcgaccctctaaagcacaccttcatagtgttggataaggagctcatagagggagagttcgtgccgggcaacccgcacattgaagctatggttggtgatgtgaacatatatatgaatgactctgatgatgtgcagatcgcggagatagagattatgatagctgaacataagagccgtgggaagggtattggtcaagaagcaatcttactgatgatggcaattgcagtagagaaatatggaattcacacgttcagggcaaaaattagcgaatcaaatatggcatcgcttaagctcttcaggaagttgggcttcaaggatgcttcatacagtgtggtgttcaaggaggtgactctggaggcacccgctgactcactcccgttgagatttcctctgaccattggagactggtgacgtctgacatgccccaagctaattccatgcagacgacacaagaagctaatgctgtttgtctgtactatctgaccaaaatttactcgggctgatattgtatgaaaaattgaataaaacagttgcacagttgtgattcaattgcattagaccagtcgggtttttcatgtcactattttgaagaccccatatcttataaacaaatgtagacaagttttatctcataatttttttatagaaaaaaaaaaaaaaaaaaagcggcc

SEQ ID NO: 172470 - DNA, 1361 bp, Zea mays
  unsure (1)..(1361): unsure at all n locations
  Clone ID: MRT4577_88876C.1
gttgcgaaaaacgaagaaatggttccggtggcaaaaactcatgatttgtatgcacaccgacacccgttttcggaatgggtgacgtgaggcaacgaaattgcgcgaaaccaccccaaacatgagttttggaccaaaagtagtggattggctatattcgttgcgaaaaacaaagaaatggttccggtagcaaaaactcgtgctttgaatgcaacccaacacccattttcgaaatgggtgacgtgctgcaaagaaattgcgtgaaaccaccccaaacatgagttttggacctaaagtagtggattgggcatgttcgttgtgaaaaacgaagaaatggttccggtgtcaaaaactcgtgctttgtatgcaccccgacacccgttttcggaatgggtgacgtgcggcaacgaaattgcgcggaaccaccccaaacatgagttttggtcctaaagtagtggattgggcatgttcgttgcgaaaaacgaagaaatggttccggtggcaaaaactcatgatttgtatgcaccccgacacctgttttcggaatgggtgacgtgcggcaacgaaattgcacgaaacccccccaaacatgagttttggacctaaagtagtggattgggcatgttcgttgcgaaaaacgaacaaatggttcgggtggcaaaagcttgtgctttgtatgcaccctgatacctgttttcggaatgggtgacgtgcgacaacgaaatttttgtgaaacgatcccaanacatgagttttgggactaaagtagtggattgggcatgttcgttgtgaaaaaaacaaagaaatggttccagtggcaaaaactgagtttgtatgcacccgatacccgttttcggaatgggtgacgtgtggcaacgaaattgcgcgaaatcaacgtaaacatgagttttggacctaaagcagtggagtgggcatgttcgttgcgaaaaacgaagaaatggttccggtggcaaaaactcgtgctttgtatgcaccgtgatacccgttttcggaatgggtgacgtgcggcaaagaaattgcacaaaagcaccccaaacatgagtttaggacctaaagtagtgggttgagcatgttcgttatgaaaaatgaagaaatggttccggtggcaaaaactcatgctttgacgctttgtatgcaacccgatacccgttttcggaaggggtgacgggcgccaacgaaattgcgcgaaaccacccccaaacattagttttggacctaaagtagtgcattgggcatgttcgttgcgaaaaaagaagaaatggttccggtggcaaaaactcgtgctttgtatgcaccccgatacccgttttcggaatgggtgaggcgcgacaacgaaatgtttt

SEQ ID NO: 172471 - DNA, 224 bp, Zea mays
  Clone ID: MRT4577_88877C.1
cgtaccgaattgccatttcggcctacacgtacgcgtacaagcatgtaccacactatcgttacttcagcttcaatgataacactttccgctttgggcatcgctacactgctgatccggtggactcaacttacgcaacatatggacgtttaacgcttttctccttggctgacgacccccatgatgctttctttccatacatgttagaatatgcttagaaacgtatt

SEQ ID NO: 172472 - DNA, 175 bp, Zea mays
  Clone ID: MRT4577_88878C.1
ccagaaccaaaaattgggcttaaaagttggtcataaaggggatacagaaacaaaggtttgtcaaaacaggtaatgtttgacaaaattatgccccgaaactaattccaaaacttatgtacaagaagcaccagcatctgcagttgcaggaactgaaccgcctgggcacggtgggccc

SEQ ID NO: 172473 - DNA, 880 bp, Zea mays
  Clone ID: MRT4577_88879C.1
ccggccggggacgccgctcctccctcttctgcttctcccagcgccgcccgcccccgccgttccctcacacgccggccgccgcgcaagagccgcgacctcgtcagtcgtcacgtctgcccgctggtgccgtggccccgtcgacgtccgcccgcacaggactctccgagtgtgggattgagccgtactttttttttttggtggctcgggccgagatccggtactgtatgagggttgccaactagactttaagatcgctgattcaatggaggcctccgaggcagcacctgcagcggcggccaccgtcatggaagcagaggatgtgagcggcgggaagggcgaatggtacgtgcttggggagcgggcgctgatggtgccgtacacgcgggagcacgtgccgcggtaccacgactggatgcaggacccggcgctgctggaggccaccgcgtcggagcccctctccctctcgcaggagttcgaggtccaccgctcatggaccctcgaccctctaagttccgcaccgcaccccctccttccggtttgcatcgatttagttttgtggttgatttggccgaattccttttttgcttgcttgcttgtttgttcgcagagcgcactttcatagtgttggataaggagctcatagagggagagttcgtgccgggcaacccgcacattgaagctatggttggtgatgtgaacatatatatgaatgactctgatgatgtgcagatcgcagaaatagagattatgatagctgaacataagagccgtgggaagggtattggtcaagaagcaatcttactgatgatggcatttgcagtagagaaatatggaattcacacgttcagggcaaaaattagcgaatcaaatatggcatcgc

SEQ ID NO: 172474 - DNA, 314 bp, Zea mays
  Clone ID: MRT4577_8887C.1
attcggctcgagggccaataaaaaaattgtttttatactgtagaaaccaccaagcattgtggtggttgattcattgcgaacaaaaatacaggtgtatgtactcggaaaacgaagcattgtgctagagaatgcttatgctgcttacttatgagcaagggttcagactgcgcctgcgaatgctatcagagttacatacagaattatggggacaggaacgcttcctcttaaggaattatgggtagatccatattcctttcgctcgagattggaaaacaatatcacaaatgtgatcattcaggccttatcattgactc

SEQ ID NO: 172475 - DNA, 713 bp, Zea mays
  Clone ID: MRT4577_88880C.1
ggggccttagggccttttttttttttttttgagcaatattaatatcacttgaggtggagttttgaatcacagaggacagcacgtatttgtgcgtgttctggggtagctaaagctagatgtaaaacaaaactcaatttctaaatgaaacatgactctgactaaatagagaagagacgtgaacagtagggccggcgctatagtaccgcggttactgttcacgacttccctaggcgccccatctgggccttcctgttgggccatcttctaatcttctgggccttcgttttttaacaacatgatgtagttcaattctcttgcaagggcccgagtcactggcccaggtggaaggggtggcgcctggactggggaagatggtgcctggtctggagaaggtgctgctggtgtagatatactcgtgttagtgttgatgtcctcatcagcatgcgcgcatgggtgaaacgccggcgagccggagagctgcacggcagaggaaccgagcagggagaacgcagaccagcggaccagggaggcaaccatggatgggagcaagggccggctgacatccatggttggggacaggaggcgagctgggaggatgagaacgacagagagcagagcgcatagaggagctcacaggcctgacaaaatccgagcagggaggagactttggcccagcatggagctcgacgcggccaggcgagcaggagatcagg

SEQ ID NO: 172476 - DNA, 2174 bp, Zea mays
  Clone ID: MRT4577_88881C.1
acgtaactgaaggagaaaacaaggaagcggtgttgactcggtttgtgccgtgatcaaacgggagatggtggcggcgcgctagggtttgaatggtggaagaaagaaggatggtgaaaaaaaacacaatgcaaacagcaacaaatgacgcgtaagcacacaaattcaacaatgcagattattgaaagaaagtgcgaggctcaaaagggtgctgggataaggtctaacctgaatttttatgtggttttgtggactgtaggagaaaaaaaactctcgataaactcaccgatcaacctagaaatctgataccacttgatgtagttgaggtgcccgatctttcggcgagtagagataattccgatttggcggaagatgacccttgcgatccgactacgacgagcaagcccgaggcgccaatgcaatcgctgaaccaactccctgggttaccgaccttgctgatgtgagatcggtctgatctcagaatggtgtcaacaagctcctgtaaaaatttcagattttttgaacaaccgagcgaaaagttatgcccggtttaaggaaggtacctcaagttatggttaaaaacgaccgagatgagacaacccctttgtttcctttccctattttttttgtttgttctctggttctatcctctctttcgttttctcttatttcttttctttttttttgtttctgttttttacgtaaccgaaggagaaaaacaaggaagcggcgttgactcggtttgtggcatgatcaaacgggagatggtggcggcgcgctagggtttgaatggtggaagaaagaaggatggtgaaaaaaacacaatgcaaccacaacaaatgacgcgcaagcacacaaattcaacaatgcagattattgaaagaaagtgagtctcaaaagggtgctgggataaggtctaacctgaatttttatttggttttgtggactgtaggagaaaaaaacactcgataaactcaccgatcaacctggaaatctgataacacttgatatagttgaggtgcccgatctttcggtgagtcgagataattccgatttggcggaagatgacccttgcgatccgacacgacgagcaagcccgaggcgccaatgcaatcgctgaaccaactccccgggttaccgaccttgctgatgcgagatcggcctgatcacgaagatcgtttcctgtgcgcaatcgaagaacgaacaagaaaaagatgcgagcaatctaatctattactcgagggtggagttctgaatacacgaaaacagcgcagatttgcgcgtgttcgagagtagctaaggctaacgtaaaacaaaactcgggaaataaaggaggcgcagctcctgaataaatagagagggggcgcagccccgagggcggccaaccctaggtcgtccattatgggccgcaattgggctggtcgtctattcttccgggccttcgttctttaacaacaagatgtagttcaattctcttgcacgggcccgagtcactggcccaggtggaaggggtggcgcctgggctagagaaggtgctgctggtgtagatgtgctcgtgttggtgttgatgtccgcatcacattagagatagagtgctcatttgatattgcaatcttgcctaaacctttcaccttgctttggttcccatcaccgaatatgattgaatcttgggaatccttattcttgacgtaggaggtgaacatcttcttctcccccgtcatatggtttgtgaatccgctgtcgagtatccagcttgaacccccggatgcataaacttagactaataagaaggccgagcccaccggcacttaacaccatcatcagcagcacaaaactatgaccttattgcagtgaagaggttctagatccctctattaaacccagttagatggctcctccacttgatcagtagccactggagtagattcctcttcagtcaccacttcaggttgaatcttcactccttctggtaggagttctgagatgattatagaacaagcttcatacgggccagcaactccttagggcatccgagccatggcgaggtgggcgaactgtaggcgtggtcaccaccggcacttgatgctctggacagagcagacttggtggctatgggagagggtcatcgctagcagaaatacaagaaccccaacacccatgtagtggtctgtgagtag

SEQ ID NO: 172477 - DNA, 3253 bp, Zea mays
  Clone ID: MRT4577_88882C.1
gctttgtggtgcctgatccatgtggtgttgggctaatattgttgtatcaagtttgaagaccacatgttagtgtgcaactttggttaaaggtcatatccctaaagctacttggaacttggagaaaagatggtccaaagtggagctgtcagacttgtgatttctggactttgattcagaaattgatgtccagtttcagcatttttagcaaactttagatctctgttgtgataaacttttgatgttatggcatgcactctccacagagaagtcttagagggtagtgtggtgagtaacttctattcagtttcatctccttgagcttgtttagaaaggggagaaaatgctgctccaagtcgctatgtcagacattggtgtgctgaaccaaattcagctaggctgaattgttgagttcgctggtgctgccccaactttggtgctcgataacttgaggtcagttgagcttttgatagtaaccattaaaacaaagttgaagactttgtatcagtgagcaatcttggtacaggtctgttgtaggttgatgcactggtgttggagtaaattgtgttcaaactctctctgtcaggtgcgagttcagcttttggttcagttagctgaatctgaatttcagtattttcatcccactttgaagcaccataacttttgatccatgaatctttgacctaaggctgctgcagcaaacatttaaatctatgtgttgggaacaatctttgttaactaagattggcatgtattgcttgcactagtgaggatcaaaggggtttaaagatggggggttcatttggcgccaggtgcagttttagaatctgaaacgtgattcagcttttctgaatttttagaagacgcatattcctctcagttttggacccttctaattattaattcctaaactttggtggatgatcattacaccaaatataaagagttattattggagaaccattcttattaagcattgatttcctgtcattacttagaactggaagaaaatcgtcctccaattccctctgttttgcaagttggaaactgaaacttgtgtcagttttgggggccagggttcaacatgctcgcctatgtctcagccatcctcatcccttttgttttctagagcatgtctatctccatggaatatccccaccgcctactcttcttcttatcccaagagctaccgtattctttttctctcatacggatagagatagctggaaggagaatttcctcacgtatctctccctctgttctgtgcaaccggccacgtactgaagctcttcctcacgccacctctgcatctcattcacgtcatttatttcccacgtattcagctcctggaaacttccttcacaagatgcgttgaacaccctgggaatcacccacgccacccatctcaccactgcaccactgcgcgcttcgtactgctggccgggctgctccagcaccaggaacgctcgctcctgctcgtcgacgttagattttcccagacgcgcgagctccccagcaactccaacacgttgctcgcctcgctcagtcttcaagccatcgtgtcgctggttctagccaaagtcgggcgcgttctttccttcgccaggcagcgcctccagtcgtcgtttcttttccacggctgcacgctcaccgactcaagcgcttggccatggagctcagtttcgtgtgtgcctgtgctgggtcgccgggtcacgtgctcatccgttttgatgccgtgcacgctccggcttgtggaactcgccggcgtcgtcatctactactagacctcacagtgcatcggcgctctcgatatcgtcctgagttcactccgcgtgctgcgacgtctcgctcacctcctcgccaagccgtcgtcgccctcgcggttatcgggtcgattcgatcagggtaagctgatctattattcccgctagttaaatctggtaaaactagaaaaatcatgattgttgtgtttagtgaattatagatgtctagtgctttcgtaggattgtgttgatgtcttgccgctaaatatttgattctcttttttgtatcatccggttactttatgctcatacatgtgcattgtgcatcttatgaggtacgataattaatcaagtaagacgaaggaaaagagtcaagtcgataccaagcgcgggctaatccgcaggatgatgctgatgaacgaaccggaagatggataatctgaacgagtgccaagccaatggatgctcgtcaagtggtcgcctaacaaacactaacctagtgttacccagttttgatgcggacatcaacaccaacacgagcacatctacaccagcagcaccttctccagcccaggcgccaccccttccacctcggccagtgactcgggcccgtgcaagagaattgaactacatcatgttgttaaagaacgaaggcccggaagaatagacgaccagcccaattgcggcccataatggacgacctagggttggccgcccctaggggctgcgccccctctctatttattcaggagctgcgcctcctttatttcccgagttttgttttacgttagccttagctactctcgaacacgcgcaaatctgcgctgtcttcgtgtattcagaactccaccctcgagtaatagattagattgctcgcatctttttcttgttcgttcttcgattgcgcacaggaaacgatcttcgtgatcaggccgatctcgcatcagcaaggtcggtaaccacagggagttggttcagcaattgcattggcgcctcgggcttgctcgtcgtagtcggatcgcaagggtcaacttccgccaaatcggaattatctctactcgccgaaagatcgggcacctcagctacatcaattggtatcagatttccaggttgatcggtgagtttatcgagtgtttttttttcctacagtccacaaaaccacataaaaattcaggttagaccttataccagcacccttttgagcctcgcaccttctttcaataatctgcattgttgaatttgtgtgccttcgcgtcatttgttgctggtcgcattgtgttttttttctcacaatccttctttcttccttatttttctccttcggttacatcaaaccctagcgcaccgcaaccatcttccttgtttctctccttcggttacatcaaaccgagtcaacaccgcttccttatttttctccttcggttacgtcaaaaaaaacagaaaaaaaaacctagtcaacgccgcttccttggttttctccttcggttacgtcg

SEQ ID NO: 172478 - DNA, 379 bp, Zea mays
  Clone ID: MRT4577_88883C.1
gccctcttttctttcttttattttatttattttatttatttatttattttatttatttatttattttattttattttatttttttttttatttttttttttttttttttaattggaggccctgggggcatgaatcacaaacaaacatggacaagttccacttggcaaaacaggaaaaaacccccgacaaaacgttgggggaaattggggaaccccctaaaccggagctttattttaccctgttaaaccctggaaaggagcataggggtataaaaacacaaaaaggctacaaccccatgggaggaaactaaaagaaacaatccaaacatggggggggggggggctacccaaaattgaaaggcttggcaacggcctcgggg

SEQ ID NO: 172479 - DNA, 504 bp, Zea mays
  Clone ID: MRT4577_88884C.1
gtggtctatgctaactggcctcgactcgttcgattgctgtgcgcgtgggtgtgcccctccgggttcccaccctgagggccccgtcgtgcctacggatctcccagcacgtcgctacgcgagtcattacgcaggcttgctcgccatacgtgcatgggaggtggcgctcttaccgatgcgaagagggactatcacagtcgcacgacactcgctaccgtcatgcttcccatcgcttgtagcatcgttgctttcaaactgaacacgcacatgaccggaagccggacaagctagatgattctggatcacatcctaatacctgcgacacgcccatcgatgtgggcaaagccataacaaccacgcaaactctccgtcggcctcgacgtagagtacaggaggaatcacatggaggccatttcatctatgcaagcaggaacgccaactgactgcaatatcggcgataacatatagaatcattcctttagacctgagcatcatgatcaatcctct

SEQ ID NO: 172480 - DNA, 393 bp, Zea mays
  Clone ID: MRT4577_88885C.1
tttggaggaacggacgatcgaccgtttgccacaagtcaggtctgaacagacgcgacgaggacacgcggagatgatccgaggcgagaagatctagacgacaaccagcggcgacaaccatcagcgagtgggtcatcaccacttcatcaatggtggtaagcccttcccttcccgatttgggtaccatttctcgagttgggacccgatttgggtgtcgagtagggcttagtttaggtttgatttaggattaaatttgggggaatatcaattcgatttgggggaagggcaatgttatttggggggatatcggttagattttggggaacattggcgatttgaaggaagatcggtgtgatttaggcttagatgtgatactgtgttgagcaataatcttca

SEQ ID NO: 172481 - DNA, 251 bp, Zea mays
  Clone ID: MRT4577_88886C.1
gaattttcatggagcaggcaggactaaggctgtttcatcctcctctcctgcgggatgggcggggtcgtcactcgtggcgtcactcatggcgtctcgtgcagtagggacgacagcggggagctatcaagatgggttacctcaagacagacgaggagttcctcaagaggggcaagagcgggggcacatgctgcatcgtagcccttctccgaaagggtagactggtcgtctacaatattggagactgtcatgtg

SEQ ID NO: 172482 - DNA, 611 bp, Zea mays
  Clone ID: MRT4577_88887C.1
atatgctccaagcctgatgattggggctgctgttggagctgtttttgggggttcagctgcttattgaataaattcagctttacctggtaatgctgctgttgcacagccacaagcttatgctctggttggaatggctgctacactagcttcagtctgttcagtcccattgacttcagtactgcttctctttgagctgacaaaggattacaggattttgcttcctctcatgggagcagttgggttggcaatatgggttccttcagtagtaaaccagccaaacgacagtgagccttctgggtttagaacatccagacgaggttattcttcaatgtcaccagaagaaagaaatggtagcttaaggcaaggtgatgttgtggatgatcttgagctcagtattatacaaactgacatgagtaactatggaacttataatgcagaaatgcttctggaagatttgaagacagcaaaactgtgccctggttgtggaccctgaagattttcttgaaggaattattacattaggtgatatacggcgcatgggatatgggttacatgtggaaagtttcatcaatggagatcactccaaggctgacgacaactcttttttcatt

SEQ ID NO: 172483 - DNA, 1877 bp, Zea mays
  Clone ID: MRT4577_88888C.1
atattcggcacgaggtttaggtgggctgggagctggtatcatagctctgaaatatccagggatcttatactggggtttcacaaatgttgaagaaatattgcataccggtaaaagtgcttctgctcctggtatctggttgttaactcaactggcggctgcaaaggtagttgcaactgctctctgcaagggctctgggcttgtgggaggactatatgctccaagcctgatgattggggctgctgttggagctgtttttgggggttcagctgcttatttaataaattcagctttacctggtaatgctgctgttgcacagccacaagcttatgctctggttggaatggctgctacactagcttcagtctgttcagtcccattgacttcagtactgcttctctttgaactgacaaaggattacaggattttgcttccgctcatgggagcagttgggttggcaatatgggttccttcagtagtaaaccagccaaacgacagtgagccttctgggtttagaacatccagacgaggttattcttcaatgtcaccagaagaaagaaatggcagcttaaggcaaggtgatgttgtggatgatcttgagctcagtattatacaaactgacatgagtaactatggaacttataatgcagaaatgcttctggaagatttgaaggtcttccaggccatgtcaaagatatatgtcaaagtgttaccatctgctacagtaacagaagttcttaatctgttgcatgatagacagcaaaactgtgccctggttgtggaccctgaagattttcttgaaggaattattacattaggtgatatacggcgcatgggatatgggttacatgtggaaagtttcatcaatggagatcaccccaaggctgacgacaactcttcttccatttcatcgtgtcttactcgaggattccagtatcgtgggagcgagcgtggattgttaacatgctttccagatactgatttgaccactgcaaagagtcttatggaggccagagggataaagcaactgcctgtagttaagcgtggtgttgcccatagaactgcaggaaagcgcaggccgattgcccttctacattatgattctattggttgctgcgtgcgggaggaaatagagaactggaagaccatatatcagagactggcttgttaataatatgaaactacttggacgatatgattattcgtttgattgccgagggagaatattgtgaactgaaggtcatgtatcagcgaaaagcaggctttcctcttgtagcaattgtgcactgaaaaactacagtgcccttatgacaccacaacagtaagcaagactacaggacatctatgcgaaatgcagctagccagctacactgatgtagagatcattcaggcagtttaacctctatactgtatcattttgatttcacggtgatctgcaggggcaagcctgacaaattctgcaaagacctcccattactgcaagtttcatgtggcatccctgctcgtaccacttatttgttcttgttacgacctggacttgtactttacgcgggataggaacgaagtacagacctagtgtaagaaggcggtactttttaccctcgtactgcttgtaaattgtaatgtgtagcatatattagagcatgatatcacttctgctgcatatattcgtcagtgtgaccacacaaggaagttgtgcagtagaattttgtcatgtcgatgttgtaagttgaaggatcacattgcttgtaaaatttggcagcatgttgtcttatcctcggatgagtatgttgttgtagaaacttgcatttggcctttgctctgcacactcttgtatgttgtgacgtattcaatccgttctgatttattgatcctcgtgc

SEQ ID NO: 172484 - DNA, 769 bp, Zea mays
  unsure (1)..(769): unsure at all n locations
  Clone ID: MRT4577_88889C.1
ccggccgggcaataacccggctttagttgccattggagaagtaaccaagcagatattcaaggaaaacccagatttcttcccaataaaacctatggattatggccggtttttggtcatctcactaggcacaggctcagcaaagtttgaagcaaactacaatgcacaaacggccaaatcatggggactgttgggttggttgcttggcagtggatccactcccttggtagatattttcacacaggcaagtgcagatatggtggatatccatatctctgctgttttcaaagcattacattctgagcaaaactatctgaggattcaggatgatactctgcaagggacgctgtcctcggttgatgttgcaaccaaggaaaatatggagaagcttgccagagttggagatatgctcctaaagaaacctgtctcacaggcgaacttggaaactggccatatggtgcctgcttgtcatagggcagagatgaccaatgaagaagctctaaagaggtttgcgaagctgctgtctgatgaaaggcgacttcgcaaggcaagatcgccaaaatgaagaaagcactgatgcttgtttcaattcactgaggggactgtgcattacttcagttaatagntatgtttgatattatttgttgatacggagttgcgttgtaacaataaaacaatttgtacggggtcatgctgacagtctgacactatgaattgatgatgntagcttctgccggctgccttttgtagcatgtaaaaaaatggaaacact

SEQ ID NO: 172485 - DNA, 279 bp, Zea mays
  Clone ID: MRT4577_8888C.1
taatatgttagatagcaaccaaggaaaacgaagagtaggccaaatatttggtgtgtggagttggatggacaaggctagattcgttggggttgcagtaaccctattcctttttctttgagaacatattcttttgtacaattagaatctgcaattttttttaaggttaacagtgaacaactgggaacctgagatcagttttaccatgtagttctcaattggtctggtctgaaattttctactgggaaccatatggaaacaggatgtggctcctttgatcac

SEQ ID NO: 172486 - DNA, 231 bp, Zea mays
  Clone ID: MRT4577_88890C.1
tccacgcgtccgcccacgcgtccgcttgtcggtgccggtgttcgccgacgccccgctcaacaagctggtgccgacggccacagacagcctgcacggggtggcgcaggtggaccgccgatgaataagcggctggtcacgcagcaaacggcctccgtgctgtacgttagcttcggatgcatggtcgccatggacccgcacgagttcgagaagcttgcgtgaccggctccccac

SEQ ID NO: 172487 - DNA, 160 bp, Zea mays
  unsure (1)..(160): unsure at all n locations
  Clone ID: MRT4577_88891C.1
cagcccgcngcgcgcatgcttcgcggantatcccgctcccaggacncngccgctggggacggcaccacgactgtngtacgacctcgctggatccctcctcggcagcgcgcagtngctcntntncnccggggcccagncaaccgncgcagcnggacgcntt

SEQ ID NO: 172488 - DNA, 238 bp, Zea mays
  Clone ID: MRT4577_88892C.1
ctcaattgtaaaaaggctttctctatatgtaaattatgctgttatctttttctatacacaaagtatatagacctataaatattatacatatatattatatatataaagactaattcttgtacagaccaacgcggaccgatggtccatattcttttctccatgtttgtttgtgtcgactgttgcagagtgagttgatgtaagaaggtggtttcatgttttcttttggggggccacttct

SEQ ID NO: 172489 - DNA, 540 bp, Zea mays
  Clone ID: MRT4577_88893C.1
ccataccaagacgacgccgtccgaacgtccgccagagacagaagtatgcttactccgatcgcccgctcaaggacgagatgcatccatcaacgcctgcaccacttgtcaatgcacaaatgcttaacatgtttgttgactgacgactgcccactcttgttcaagttcaccaccatcgaattcggagtgcttgtctgccactccaccgatgtccaccaactgggtaccgaaaatgctatgcacactccccgtatctcattttatggacgttatggaattagatgaacactctcagaccattcgtgctgaagcctccacacattttggtcccaactttgatccttaggcttctaatgactcgagccagttggctactgccacgctctagcacctgttactgtagagataatcatatgatggatgatcttcaaacaactgaactatttttgaaactgaatgtatcacctttaaatataacatttggctacttgctcctttccttgcatgtaggaccttcaaaaccctgttactccacagaattgg

SEQ ID NO: 172490 - DNA, 607 bp, Zea mays
  unsure (1)..(607): unsure at all n locations
  Clone ID: MRT4577_88894C.1
gtaacttgtttaatgtaaatctaatagtacttgtaatttctttctgcttagaatctaaagatgtgtttagaacctcttgtttaaaaataatagactgcttatcataaaatcacatctcacacatttgaggcagtggtcaaacaggtaaagcctatgatgtgtgtcattttaaagtgtcggaatttagcctctgaataccttctccattgggggaaagatattcttggaaccactcatgacatatcttagaaggtcattgacaatgtataaactaattgttggtttgatatttatgtaaatatcagtttaccatgctttaattttgcacattcgtactatagggagcctattggttctctattagtcttgtgggttttctgtttgaaaaggagtcatggcatctgtttacatttaccttatcaaacctagaatgtgtatatttataaatgtatgtcttcattgctaggtactaatttgcagatgtctttacatatttcaatacagaaactataacattcaatagtgtgctgtcaaagtgtgcttagctcacctggatatacctacattgntaaatgtctaaacagtaatcattaaaacattnttgatt

SEQ ID NO: 172491 - DNA, 321 bp, Zea mays
  Clone ID: MRT4577_88895C.1
gttacgtcgggggccggccagggcctgcgctccccgcgcggcgtggggaggcgggggggtgactctgtacttggagcggcgcaggagcttggggatcaccgcgcgggccacggagctgtgctgcaccgccagcgcgtgcttgtgctgcagctgcagctgcagctgcagatccaccccgtcgactgggggggccaccgtcttccgggggcgcggctgcggcgccacgggcggagtgagaatagcggtggcagcaggggggcttggagggggggagagacaaacaagccacccggatgttgttcttgtcccgcgagggaagcg

SEQ ID NO: 172492 - DNA, 227 bp, Zea mays
  unsure (1)..(227): unsure at all n locations
  Clone ID: MRT4577_88896C.1
aaacagcatatcgaggaggttttaagggaggttatggagttgtgaagagctgctgccgctggtctccagtatccaccgatggcgatcaagaacatgatggtggcggcgacgacgcggtcgatgtacgcggacatgacggtggacgagttcaaggagtagctgcgggcgatcganaacgancaggangggngcatcagccgcgacgaactgcggcgcgccctgcgtgc

SEQ ID NO: 172493 - DNA, 369 bp, Zea mays
  unsure (1)..(369): unsure at all n locations
  Clone ID: MRT4577_88897C.1
cggaaacccgggacgacccacgcgnccggngcccgataatggataagggcacgccccacgacaaggagacagagacgaggagcagcagcaacgccaaagacgaggcgcacccgaacgaggagcggggcgccctgnangaggcacnnnacggggaaaagagcgcggaacccccagacgggaagcncaccaaaaaccgcggcaaaatgagcggcgagccggagcgcaccgtcgggaggagggaccctaggatagacaaaggaagagtacgaggagacaacaggcccgcgacgcccacaaaccccggaaagcggcaaaatgcccggacgggtcggcggagcgggaaaagcccgagaaagaacgagaggcggc

SEQ ID NO: 172494 - DNA, 392 bp, Zea mays
  Clone ID: MRT4577_88898C.1
agaatgaagaatggacatgtagcataccaatccaccgtcagtgttgttccaaataatacatccaagtaatacagcgtctagtttccaaaaaaaaagtaacccagcatcctaatggtattagttcacggctccaggcctacaatatctggtttcccatccgacggcagaaaactttccaagcatccactggtaggtacacactttgatgattcgttaatctttccactccagccagacaaaacccaatctcccatgtacatcaagtggcacttagtcattcaaacttgcactctctttctccatctcaacaatacaagctaatctatcatggacctctgaaagtttttgtgctgcttcttgtttgaacttctcgtcataccattctcggggta

SEQ ID NO: 172495 - DNA, 508 bp, Zea mays
  Clone ID: MRT4577_88899C.1
gtggttttttttttgtttcctttttttctgagtcgggcttctcttctttgcatgcaaaagctctgcgagtctttaaacccacccaaaaggctcattgctcgtgcatatataagacacatctcttcctccagttcttataagggcatgagggggtgtgcatggttttaattcaaagcttgaaggctccttagcgcattaacctggatatctcatggccctggatcaccatctggttgcattgtcaagcgaaggctgataccttcactattgaaaagggttttaacaaagattaacctggcttattgatccttcgtgcacaaggttaatgggggggtctgatttaaaagaacaacgtttttgggagttatacatggaatttaatgctaaaaatattattgttaaaccatatatagttcatactgtgttgactgattattactctatggacatatacctgaactaccaaacatcactggactgatcacctttattacatacctatgtgttt

SEQ ID NO: 172496 - DNA, 258 bp, Zea mays
  Clone ID: MRT4577_8889C.1
aaaaccggccgagccacgcgtccgcagtgtgctctttaactgtgaacactttttttaggattataagcaattaatatccttcagcggttctttaaacagagaaggggcgtccacttttaatgatccaaactaacgtgccgatcggcatagatacacaggttcataaccatactcatatgcatatcttcgccctcttattcacaacgctgtgactggaaaaacctttaagacactaagcaaaatcatttatcccctaaa

SEQ ID NO: 172497 - DNA, 807 bp, Zea mays
  Clone ID: MRT4577_888C.1
ttgggaccctcgaggccggccgggatgacctatcttcaaccaaacgcacctcccagtgcccgtggcgacgacgggcgattgcgagccaccgccctcgtgaagcacctcgggcacggcgactgccgactgacccgtggaaagaagcaccgctcccgtggaaacaagaagtcgttctagggatccaagacggcggcgcggatgctcatcgccgatccgcccagaatactacgccgtcaagcccccaagccccatgcacccacctctccagccactcctcccgctgccaaaaagccagatctggttgagcgcactgcagattacgcggtaattgtttcatcgagactgccgcctccagctcccggtggtccgtcgccggtttgcagcgacgacataaaactcgtcccagagactccatagttcagggtcagcttgattaggcaatatggttatccctccaccagctagggctcctgcaatcaccaagttcctcaagccgtatattttgaagatgcatttcacaaacagtttcgtgagcgctcaggtcatccacacaccgacagccacggtcgcatgctctgcaagctctcaggagaaactcctgaggccaagcatggagtcgacacgggatgttgctgcggctgcaaagattgggaagttgcttggagagcgcttgctgttcaagggtatccctgcagtatctgtctccatgtcaagagaccagaagtaccatggcaaggtcaaggccgtgatagattctctaagaggtgttggtgtgaaattgctgtagggaaaactgactgttttatg

SEQ ID NO: 172498 - DNA, 3959 bp, Zea mays
  Clone ID: MRT4577_88900C.1
gaatggtgtaacatgctcctgtaaaaatttcagattttttggacacccgagcgaaaagttatgcccggtttacggaaggtacctcaagttatgttttcaaacgaccgggatgaaacaatcgtatcctttctccttcgttgttttttgtttctgtttttttttgacgtaaccgaaggagaaaaacaaggaaacgatgttaactcggtttgttttttctttttctgtttttttttcgtaaccgaaggagaaaaacaaggaaacgaccgttgactcagtttgttttttctgtttttttttgacgtaaacgaaggagaaaaacgaggaaacgatgttgactcggtttgtggcgtgatcaaagggtagatggtggcggcgctagagtttgaatggtggaagaacacaatgcaaccagcaacaaatgacgcgaaagcacacaaattcaacaatgcagattattaaaagaaagtgcgaggctcaaaaggtgctgggataagatctaacctgaatttttatgtggttttgtggactgtaggaaaaaaaacgctcgataaactcaccgatcaacctggaaatctgataccaattgatgtagctgaggtgcccgatctttcggcgagtagagataattccgatttggcggaagatgacccttgcgatccgactacgacgagcaagcccgaggcgccaatgcaatcgctgaaccaactccctatggttaccgaccttgctgatgcgagatcggcctgatcacgaagatcgtttcctgtgcgcaatcgaagaacgaacaagaaaaagaggcgagcaatctaatctattactcgagggtggagttctgaatacacgaagacagcgcagatttgcgcgtgttcgagagtagctaaggctaacgtaaaacaaaactcaggaaataaaggaggcgcagctcctgaataaatagagagggggcgcagcccctaggggcggccaaccctaggtcgtccattatgggccgcaattgggctggtcgtctattcttccgggccttcgttctttaacaacatgatgtagttcaattctcttgcacgggcccgagtcactggcccaggtggaaggggtggcgcctgggctggagaaggtgctgctggtgtagatgtgctcgtgttggtgttgatgtccgcatcatcctccccttcttgaactgaagtcgtcctcgacggcaactcctcatcttctcccgcatacggtttcaaatctgcaacattaaaactagtggaaacaccaaactccgcaggtaggtcgagggtataagcattatcattaatcttggttagtatcttaaaaggaccagcagcacgaggcatcaatttagaacggcgcaaagtaggaaaacgatcctttctcaaatgcaaccaaaccatatcaccaggttcaaaagtaacatgttttcttcctttactaccagcaacctgattttttgcattagtagcagcaatgttctgtttcgtttgttcatgtatgctaatcatttgttcaacatgtgcagaagcatctacatgtggggcgttcgcagcattaagtgaaatcaaatcaataggtgccctaggaatgtaaccataaacaatctggaaagggcacatctttgtagaagaatgtgtggcatgattgtaagcaaattcaacatgaggcaagcaatcctcccaacgtctcaaattcttgtctaaaacagccctaagcatggtagataaagttctatttactacctcagtttgtccatcagtttgagggtgacaagtagtgctaaacaacaatttaattcccaattttgcccaaagagatctccaaaaatgactaagaaacttagcatcacgatcagagactattgtttttggaataccatgtaaacgaataatttcacgaaagaacaattcagcaacaatgctagcatcatcagttttatgacaaggtataaagtgagccattttagagaatctatcaacaaccacaaaaatactatccctccccttcttagttctaggcaagcccaaaacaaagtccatagaaatatcaggccaaggagaagaagggacaggcaaaggcatatacaaaccatggttgcccagacgtgacttagctttctgacaagtagtgcagcgtgcaacaaggtgctcaacatcagcgcgcatccgaggccaaaagaagtgggcagccaacacctcatgcgttttgtagacgccaaaatgccccatgagaccgcctccatgcgcttcctgtaacaacaaaagacgaaccgagctagctggaacacacagcttgttagcgcgaaacaggaacccatcctgtatgtgaaatttgccccatggtatcccattactacaatggccgaaagcatctttaaaatcagcatcgtcaacatattgatccttcacagtgtgcaaaccaaagattttaaaatctaactatgacagcatggtatagcgacgagacaaagcatcagcaataacattgtccttcccgttcttgtgtttaataatgtaaggaaaggactcaatgaattcgacccatttagcatgacgacggttcagatttgtttgggtacgaatatgttttaaagcctcatgatcagaatggattatgaactcacgatgccaaagatagtgctgccatgtatgcaaagtgcgcactaaagcgtaaagctccttatcataagtagaatatttcagactagcaccgcttaatttttcactaaaataagcaactggttttccttcttgtaacaaaacagcacctagcccaataccgctagcatcgcattcaagctcgaaaactttattaaaatcaggcaattgcaagaggggagcttgggttaacttatctttcaaagtgctgaacgctacctcctgcgaatcactccaggcaaacggcacatctttctttgtaagctcatgtagaggtgctgcaatggagctaaaatcacgaacaaatctgcggtagaaaccggcaagtccaagaaagctccgaatttgtgtgaccgtcgtcggtgtaggccactcccgaatggcagcaatcttgatgctatccacctcaatgccctgcggagtaaccacataaccaagaaacgagacacgttgcgtgcaaaatgtgcacttttccatgttaccaaacaagcgagcagcacgcaaagcgtcaaaaacagcacgcaaatgttctaaatgctcctctatagacttgctgtaaataaggatatcatcgaaataaacaacaacaaacaaacctatgaaggcccgtagaacttcgttcattaaacgcataaaggtgctgggagcattagtcaatccaaatggcataaccaaccattcatataaaccaaatttcgttttaaaagccgttttccattcatcaccgagtttcattctaatctgatggtaaccgctacgcaaatcaaccttagagaaaataacggcaccactaagctcatctagcatatcatcaaggcgtggaataggatatcgataacgaactgtgatgttattaatagcacgacaatctacgcacatacgccatgacccatctttctttggaacgagtaaaacgggaaccgagcaagggctaagagactcacgaatgtaacccttatcaagcagcgtctgtacctggcgctggatctccttcgtctcatctggatttgtacggtacggggcgcggttcggaagggaagcgccggggatgagatcgatctgatgctcaatgccacggaggggaggaagacccggtggtaagtccgtaggataaacatcagcatactcctgcaaaaggttaacaacagcagggggtatatccaaagacggtgcatcatcaagcggaacaagcattcgcgagcatacaagtgcataacagggcatatgagcttcatggagatcatcaaaatcagcacgtgtagcaagtaaaacaggagagtgcatcacagtcgaacaatgaagaaa

SEQ ID NO: 172499 - DNA, 392 bp, Zea mays
  Clone ID: MRT4577_88901C.1
attcggctcgaggtttatcatatctgatttttctgctgattaaacggccttttcgagggcacgtcattactgagggcacgagctgcctatttcaaacgatcctccacgaatagatacatagcgtcctacatggtctatgcacatcgtgaccaacacgaagatgtgcttgaacacctaccatgtatatttatgcaggagcatagagtatacactgccgaacaacgagaagcagtcgatcataccatacgaaggacatgttgacttcgcccatcatgatccccaaaagtccatatccaatagaggtggcctggctacgcaatcccactgggtcgaattaataaaagtgtacccactcatcctgccacaataccaacgccaactacgcaaccaac

SEQ ID NO: 172500 - DNA, 2927 bp, Zea mays
  Clone ID: MRT4577_88902C.1
agtacgacggacgggccagcagcgggtggttttgtcgtagcacgaacggtgggcgccaaatgttggaactcgctctctgcagcaagaaggccaacaagggtgaacagtggtgacaacagggttacgtgcatgggggcaatagctctgttgatctagcctctcacgggcactgtgcgggggtatttataggtacctgaacgcccagcgccttgtgttaaggacgcatgtgccctcagctaccttggttatccccagaatattcccataaagcagggttacagactgtaattacagggatgcttttacaaattaggcccgtaacaagcggcggccacacagggcccgttacaatgggccggatcgcacgtgggcctctgagctggacgaggccgcactgtgggatgccttcgtcgccggtcttcgtctggtgccgatcaagcgaagggtgtccctgcctgctttgtctctgtcagagcagcggctaagcagcggagacttcgagcgaagggtggcgtttctgccttcgctccaacacaaagtaacatgttttcttcctttactaccagcaacctgatacttagcattagcagcagcaatgttttggtgtgtttgttcatggaggtcactcatttgttcaacatgtgcaacagcctcgatatgtggggcatcctcagcatcaatagaaaacaaatcaataggtgtccgaggaatgtaaccataaacaatctgaaaggggcacatctttgtagaagaatgtgttgcacgattataagcaaattcaatatgaagcaagcagtcctccccacgtctcaaatttttgtctaaaacagccctaagcatggttgataaagttctattcaccacatcagtttgcctatcagtttgagggtgacaagttgtactaaacagcaatttagttcccaatttattccaaagagatctccaaaaatgactgagaaacttagcatcacgatcagagactattgtattcggaataccatgcaaacgaataatctctcgaaagaacaattcagcaaccttgctagcatcatcagttttatgacagggtataaaatgagccattttggagaatctatcaacaaccacaaaaatgctatctctccccttcttagttctaggcaaacccaaaacgaagtccatagaaatatcaagccaagggaacgtagggataggcaaaggcatatacaaaccatggttgctcaatcgtgacttggctttctgacaagtagtgcagcgtgcaacaaggcgctcaacatcacggcgcatctggggccaaaagaagtgtgcggccaacacctcatgcgttttgtagacggcaaaatgccccatgagaccgcctccatgcgcttcctgtaacaacaaaagacgaaccgagctagctggaacacacagcttgttagcgcgaaacaggaacccatcctgtatgtgaaatttgccccatggtatcccattaatacaatggccgaaagcatctttaaaatcagcatcgtcaacatattgatccttcacagtgtgcaaaccaaagattttaaaatctaactatgacagcatggtatagcgacgagacaaagcatcagcaataacattgtccttcccgttcttgtgtttaataatgtaaggaaaggactcaatgaattcgacccatttagcatgacgacggttcagatttgtttgggtacgattatgttttaaagcctcatgatcagagtgaattatgaactcacgatgccaaagatagtgctgccatgtatgcaaagtgcgcactaaagcgtaaagctccttatcataagtagaatatttcagactagcaccgcttaatttttcactaaaataagcaactggttttccttcttgtaacaaaacagcacctagcccaataccgctagcatcgcattcaagctcaaaaactttattaaaatcaggcaattgcaagaggggagcttgggttaacttatctttcaaagtgttgaactgatgcggacatcaacaccaacacgagcacatctacaccagcagcaccttctccagcccaggcgccaccccttccacctgggccagtgactcgggcccgtgcaagagaattgaactacatcatgttgttaaagaacgaaggcccggaagaatagacgaccagcccaattgcggcccataatggacgacctagggttggccgcccttaaggggctgcgccccctctctatttattcaggagctgcgcctcctttatttcctgagttttggtttacgttagccttagctactctcgaacacgcgcaaatctgcgctgtcttcgtgtattcagaactccaccctcgagtaatagattagattgctcgcatcttgttcttgttcgttcttcgattgcgcacaggaaacgatcttcgtgatcaggccgatctcgcatagcaaggtcggtaacacagggagttggttcagcgattgcattggcgcctcgggctttctcgtcgtagtcggatcgcaaggatcatcttccgccaaatcggaattatctcgactcaccgaaagatcgggcacctcaactatatcaagtggtatcagatttccaggttgatcggtgagtttatcgagtgtttttttctcctacagtccacaaaaccacataaaaattcaggttagaccttatcccagcacccttttgagcctcgcactttctttcaataatctgcattgttgaatttgtgtgcttgcgtgtcatttgttgctgattgcattgtgtttttttcaccatccttctttcttccaccattcaaaccctagcgcgccgccaccatctcccgtttgatcactccccaaaccgagtcaatgccgcttctttgtttttatcattcggttacgtaaaaaaacagaaacaaaaaaagaaaagaataaaagaaaacgaaagagag

SEQ ID NO: 172501 - DNA, 381 bp, Zea mays
  Clone ID: MRT4577_88903C.1
aaaggggccaaaaagggaggaggaccaaaaaaaccgggggggccaacccaaggccgggaaagagccaaacaacaggccaacaagttaaccagggcacgccaccaaaggttgacccaacagctgaaacaaaacccaagggccagcccttgacagggaacccctagggggggccacaaacccatggagggaaaccaaccccactgggcccgggacaaaggcaaaaaggccacccccctttaccaaaggggcccggggaagaaaaaacccacccccaaaaaccgggaggcaataaaccctgggccccaaggccgggggaaccccgaccccaaacaaaaaaagggcaccggaccgaaccccccgaagcaccctgaaacaatttgg

SEQ ID NO: 172502 - DNA, 677 bp, Zea mays
  unsure (1)..(677): unsure at all n locations
  Clone ID: MRT4577_88904C.1
aattcggcacgaggcactctcccccgcccccctcggccctcgccccacgcatgagaggagagcggccggacctggaagcttctccgcggcgctgcgtcgccagctcgcagcggtgactggtgtcctttcaacttgaccttcgccaccgttagctagactcgttcgcgatctcagatggacaccctagtgacactataccatggaggaagtgtggagcaagatgtttatgggaatgttagtttttatgctatgaagaatgtgaccgtgatgttcgatgaaagaccctcttttggccagattttcgctcgggcttgtgaggagattagttgcaatttaaacgaccctagcatatcaattgagggtttattgtcccatgttacatctgggacagttgttcgacggttgatctccattgcctctgaagatgactgggtgaaatatgtcaaaattgtgaagacgattgttcccccatgtttggatngtggttgttcgaaagttatcgtttagtcattgcaatgctccagtcgggttatctccacaaatgccaaatgcatgtcgtagtgaagctcctttgcctgagcttccggaagaagtggttgntgtgccagatgctcaatcggcctcgaacgagtttaagatttctcgtcctgttcgcgggcgtttgtgggtcttcgaat

SEQ ID NO: 172503 - DNA, 1286 bp, Zea mays
  unsure (1)..(1286): unsure at all n locations
  Clone ID: MRT4577_88905C.1
gcacgaggcacgcccttgactgtgaagttgcaccgtccgcctctgcgagtcgggtggtcgccgcacgaggacggaacggaatgctcagtctcgccgcccacatcacgccgctgtcctactcggccaccgcgctcacctactccaatccagacccctctctccctcacccacagtccccgccgccgccggcgccgcgtccgcgtcctgtgcgcctcgctcactctgcttccgccgccgccgcagcagtcgtctcgcagcggagcggacccggaggcctaccatggcagcggcaatctcgctggaggccggcggggccctggcccatgacctagggtctgcagtcgtcacaggtggtgtcgccctcgcgctcctcaaattctttgaggagctcgccaagcgcggcgtcttcgagcagaaactcagcaggaagcttgttcatataagcgttgggctggtgttcatgctcttttggcctctttttagctctggatggtatactcctttccttgctgcgctagcaccaggggttaacattataaggatgcttctactggggctgggacttatgaaaaacgaggctatggttaaatcaatgagccgctctggagattacagggaacttctcaagggcccactgtattatgctgctactataacttttgccacgtctcttttatggagaacctcaccagttgctatagcacttatatgcaacttatgtgctggggatggtatagccgatgttgttgggagacgcctaggtaaagaaaagcttccatacaatcccaacaaatcatatgctggaagcatagcaatggcggtggctggttttctggcctcagttgggtatatgcattacttccacactttcggttttattgaggaaacatggtacatggctttaagcttcctcgtggtctctgtagctgcagcactcgttgaatcgcaccccatcagcacagaacttgatgacaatttgactgttcctttgacatcattcctagttggtagcctcatcttttgatgtttaggcgcaaggacgtatgagatgtttctccgtcatgctgtaatcttctgatgtttaggctcaaggacatatgagatgtttctccgtcatgctgtattttatgtaaaacgtttctaaaatactactataattgtgagaatctgtacctagagtttggagaatatgttcggtttgtttatcataatacaagagtgtgtttggttagggagttgactggaatgaagcagttccattccggttcanaaaaaaaaaaaaaaaa

SEQ ID NO: 172504 - DNA, 172 bp, Zea mays
  unsure (1)..(172): unsure at all n locations
  Clone ID: MRT4577_88906C.1
ggggttggggagacagatttaggggggccaaagcagggtttggaaatacanngggtttttaaaagaggttaatggaaattttaagggggatttttaaattacattccaggagcaccaaatgtgaaagagacaaaaagtcctataacccttttttctcccgaactctttattt

SEQ ID NO: 172505 - DNA, 5734 bp, Zea mays
  unsure (1)..(5734): unsure at all n locations
  Clone ID: MRT4577_88907C.1
acgtaaccgaaggagaaaaacaaggaagcgacgctgactcggtttgtggcgagatcaaacgggagatgttggcggcggctagggtttgaatggtggaagaaagaaggatggtgaaaaaaacacaatgcaaccagcaacaaatgacgcgcaagcacacaaattcaacaatgcagattattgaaagaaaaagtgtgaggctcaaaagggtgctgggataaggtctaacctgaatttttatgtggttttgtggactgtaggagaaataaacactcgataaactcaccgatcaacctgtaaatctgataccacttgatagagctgaggtgcccgatctttcggtgagtggagataattccgatttggcggaagatgacccttacgatccgactacgacgagcaagctcgaggcgccaatgcaatcgctgaaccaactccctgtggttaccgacattgctgatgcgagatcggcctgatcacgaagatcgtttcctgtgcgcaatcgaagaacgaacaagaacaagatgcgagcaatctaatctattactcgagggtggagttctgaatacacgaagacagcgcagatttgcgcatgttcgagagtagctaaggctaacgtaaaacaaaactcaggaaataaaggaggcgcagctcctgaataaatagagagggggcgcaacccctaggggcggccaaccctaggtcgtccattatgggccgcaattgggctggtcgtctattcttccgggccttcgttctttaacaacatgatgtagttcaattctcttgcacgggcccgagtcactggcccaggtggaaggggtggcgcctgggctggagaaggtgctgctggtgtagatgtgctcgtgttggtgttgatgtccgcatcacgccactggcttggtcgtccctgtgcgcgatgtagtgctaggcgtagaaggtgcagggctggaaggagttgagctgtgtgttggaccccggcccgcaagagagttagtatatgtctttgatcgtcgtccctgcacttcacgttcagctttgcaagcatattcaaacaatgtggttatatcaaaataatccttataatcaagtatatcctgaatttccctgttcaaaccaccacgaaaacgcgccatagcagcgtcatccgactcaactaaaccacaacgaagcatacccttttgtaactcctggtaataatcctcaacagactgtgaaccttgttgaaaacgctgcattttgttaagcaaatcacgagcataataggaaggaacaaatctgtggcgcatggcagtttttaattgggtccaagtaatgacactgttaatgggaagtttttgtttatactcacgccaccaaattaaagcaaaatcagtaaattcactaatggcagccttcacttggctattagcaggaatatcatggcatgaaaatttctgttctacctctaattcccaatcaagatatgcagcaggatcatatttaccattaaaagatggaattttaaatttaatcttagaaaataagtcattagggggatgacgaaccacacgacgtgcacgaccacggcgatctccatcgtcctgctcagtgtcaccgccgtattcctgctccatctttgtggtcaatgcatcaaggcgtgccaggatggtgtcgagtgtggtgcgagtcgccgtttgagcaaggtcaagttggttgaaacgctcggtcgtcgaagtgatcgttgaatcaagccgttcatgcatcgtcctaatgtcagcagcaagtccatcaacttgtccccttacttcctgcaactgggcatccaccatgtcgtgtgctcctgccatagttagcgcaaacaccaaaaggagaaaaaccaacgacaaaaacaggggtgtactgctcacaaggcgctcacactagtgctgttatcaagttcttatccgttcttaccaagccacagtggtgaactgcaaccaacaggtggaaccggtgaaagattggatgagcgattgcgtggagaaacagaaacctgctcgtcgtagaaatatgtggagttgtgggtaggctgcactcaagccaaggattagcacgatcaaacaataatgcaaagttgaattatagtgcaaaacacgaaactatattgctggccacaggagcaaaggatggaggaactagcagaatggcagtaccgtaaatattgtactagtgatgccaaaaaggcactagtagaaatcacaggtgattttgtttttcttttttgtatgattttttttgatatttttctcagcacaagaagcaacaagataggagctacacgaagtttcacctaaaacagatatcagatgtggtctatagaaaatcaggaagttctctgaaaagcgtgcgagaactttgacgaatttttttctttattttcctgatttttttcgacaattttgtcgaaaccaaacagaccgaaggtgagtttggccgggctcagaatggtgtcaacaagctcctgtaaaaatttcagatcttttggacacccgagcgaaaagttatgcccggtttacggaaggtacctcaagttatgttctaaaaacgaccgggatgaaacaaccgtatcctttctccttcgttatctttttttttctgtttttttgacgtaaccgaaggagaaaaaacaaggaagcggccgttgactcggtttgtttttttttctgttttttttcgtaaccgaaggagaaaatcaaggaaacggccgttgactcggtttgtttttttctgttttttttgacgtaaccgaaggagaaaaataaggaaacgatgttgactcggtttgtggcgtgatcaaacgggagatggtggcggcgctagggtttgaatggtggaagaacacaatgcaaccagcaacaaatgacgcgaaagcacacaaattcaacaatgcagattattgaaagaaagtgcgaggctcaaaagggtgctgggataagatctaacctgaatttttatgtggttttgtggactgtaggaaaaaaaaaaacgctcgataaactcaccgatcaacctggaaatctgataccaattgatgaagctgaggtgcccgatctttcggcgagtagagataattccgatttgtcggaagatgacccttgcgatccgactacgacgagcaagcccgaggcgccaatgcaatcgctgaaccaactccctgtggttaccgaccttgctgatgcgagatcggcctgatcacgaagatcgtttcctgtgcgcaatcgaagaacgaacaagaacaagatgcgagcaatctaatctattactcgagggtggagttctgaatacacgaagacagcgcagatttgcgcgtgttcgagagtagctaaggctaacgtaaaacaaaactcaggaaataaaggaggcgcagctcctgaataaatagagagggggcgcagcccctaggggaggccaaccctaggtcgtccattatgggccgcaattgggctggtcgtctattcttccgggccttcgttctttaacaacatgatgtagttcaattctcttgcacgggcccgagtcactggcccaggtggaaggggtggcgcctgggctggagaaggtgctgctggtgtagatgtgctcgtgttggtgttgatgtccgcatcattagccccacatttaacattgcagatttaaagccctacttgggagaggaagttgagcttgagtcgaggacgactcaaatgcaagaaggggagaatgatgaagacatccacactactgatacatctatgccaatacaagtaccaatttctggtcctattactcgcgctcgtgctcgtcaactcaaccatcaggtgattacactcttgagttcatgttcatcttatttagaccatggagacccgtgcactcttgttttgcttaggaaccagggagaagaccgaaagggaaaaggatttgaacatgctggattcggactgcagaagaacaccaacttgtgacggtcaccacggtcagatgcgggctcggattggaatgttcaagcacaacatggaaagcttatcaagtctactttcatatggatccggaattacagtcatatctgttctgaggccgccgtaatcattgttttcttaccgagacatttcctgccttttctgcccatgttgctgcgtcaccctattttggcccaatgggtcgtgtatcaagtttggtccattagggacgcatcctagggttgcagcacgaccccaatacccttgtggtcgtcctcccatgtttataaaccccctagccgccaccaagaacagcgggttttgtttagatcaagtttagctctcgctacttgcttgtaagcgcgcgtgctggttcagccgcccgtcttcttgtcttcggaaccccaccatattggagtttgatttggaaacctacatttagatctggtaattcagtacttgttctacttgttcttgctagttcttcgattgcttgcaggacgagtgccctagtggccagggtgtcacgctccacaagatcgtgacagccataggaggtggtgtatcggttgctaaggcgcagcgtctttggaaggttgtagtcgggccgtgaacgtcgtctcctcctccaatcgagttattccacaccctctcatcgaaagatcgggcaatcacccaacgggtgcacatcattaacttcgtcatgctactgaagaatgagggcccagaagaatagacgaccagcccaactgcgtcctatagtggacggcctagggttggccgcccctaggtgctgcgccccctctctctatttatccaggagctgcacctcctttgttcttcgagttttgttttacatctagctttagctaccccagaacacgcacaaatacgtgttgtcctctgtgattcagaactccacctcgagtgatattaagtttgttcgcatccttttcttgttcgttcttcgattgcgcactggaaacagtcttcgtgatcaggccgatctcgcatcagcaagggtcggtaaccatttgggagttggttcagcgattgcattggcacttcgggatcgctcgtcgtagtcggatcgtgagggtctacttccaccaaatcggaattatctccactcaccgaaagatcaggcactccagctctatcaagtggtatcagatttccaggttgatcggtgagtttatcgagtgttttttttctcctacagtccacaaaaccacataaaaattcaggttagaccttataccagcacccttatgagcctcgcaccttctttgaataatctgcattgttgaatttgtgtgctttctcgtcatttgttgctggtcgcattgtgtttttttctcaccatccttctttcttccttgtttttctccttcggttacttcaaaccctagcacgccgcaaccatattccttgtttttctccttcggttacatctagcgcaccgcaaccatcttccttatttctctcattcggttacatcaaaccgagtcaacaccgcttccttatttttctccttcggttacgtcaaaaaaaatagaaaaaaacaaaaccgagtcaacgacgcttccttgtttttctccttcgattacgtcaaaaaatagaaacaaaaaaaagaaaacgaaggagaaaggatacaaagcggttgtgtcatctcggtcgttttaaacataccttccttaaaccgggcataacttttcgctcggttgttcaaaaaatctgaaatttttataggagcttgttgancaccattctgaggc

SEQ ID NO: 172506 - DNA, 599 bp, Zea mays
  Clone ID: MRT4577_88908C.1
ttgggtacctcgaggccggccgggaaaacattctccttcttgaactcaaggagatggctctcgggaagaggcagtgcagtggttctactactttgcttcttgctgcttcactctcagatggctcgtgctgccacctacacagttggagattctgggggttggacctttaacactgttgcctggcccaaaggaaagctctttcgggctggtgacacacttgctttcaattatagccctgggactcacaatgtggtggccgtgaacaaggctggatatgatagctgcaagactccaagaggagccaaagtgtataagtcagggacggatcagatcagacttgccaagggacagaactacttcatctgcaattatgttggtcactgcgagtctgggatgaaaattgccatcaacgctgcctgagtttaataatatggttaacttcccatacatattgtattgtaatgcaaattgcaccctttagtgggaagttagctcctttaaataatgttaagaaaaaaagtagctatgtgtgctcttctataaatgtcacttatctataaagaataaatgccgacaaaaaaaaaaaaaaaaaagcggcc

SEQ ID NO: 172507 - DNA, 189 bp, Zea mays
  Clone ID: MRT4577_88909C.1
gggagctggcggaggatggctaatctggcgtggaagtgcgcgtcacccgaatgcgcacggagaatcatactgccgagccacgcaacacagaaacgtgctacggacgcagaaaggagaccgcagaatacaggagagcttaacctaccgtcgatccagaagaaggttccaacttaccctagagaaatggcg

SEQ ID NO: 172508 - DNA, 434 bp, Zea mays
  Clone ID: MRT4577_8890C.1
aaacaaagatcgatccatcgagaccgaccgagagcaggattgaagttgaaaggaccgtccgtacgggttacttctccagtcagtctccggtgcgccttcttcgccgatcagcgcgactgctgcttgtacatggccacgagagcggcgctcgtcgccggccgccgtgcggccggtcaggacgggctcgcccttctctcctcgggctgcaggcgcgaaggagctcgtccgagctccccccacaagagcagcagcgccaccgagcgggagggccacggcgacgcgacggcggcgcaggtggaggcggcgctgaaccgcaagaacgcggacgtggtcgacgtcgaccgctccggctccgcgacgctggtcccggccgacgcgcggcgcggcgcgggcgtcaagtgggtgccctaccaggaactggcgtttttgttccg

SEQ ID NO: 172509 - DNA, 875 bp, Zea mays
  Clone ID: MRT4577_88910C.1
gcacgaggtggcggcaaggccgcgtcgtcgtcgtcggcctccgccaacctctgcgaggtctgcgcccgcagcctcctcgacaacttccgcttctgctccctcggctgcaaggtcgtcggctgctcccccgacgccgccaaggccaggaactggctcctccgggccgccgacggcgacggttccaccacatcctcctcggccccgcgcaacgccgacaggaagctgagcttcacgccgcccacgccgcagccgaccctgccgacgaagcgccgcaagggcatcccgcaccgcgccccgttcggcagcctcatcgtcgagtactagaatctccttctcccccagccatcgctgtccacgtccgttgcttctgcattggcagttggcactacacgcgcgcggtagagtggaagtactcttcaaacgacggaatggaatcgcacagtgagccagtgaatccagattacaggcaagccaataggttggccaccacttgggtggcctggcccgcctttctttgccacggcacttcggttggtgggtgcttatcgaggtggatgccatttgctcgctggcttcgctttccagaaaggggagggaggagaaaggaaggtggatggattggatcggacatcggaggaagaatcaaaaccagcttttcatcactgttcacgagatatatgtttctttctgtctgagaaatacatgtaaattttatgtcttgctctgctccaaatcatcgtagcggagcagtatagctagcttttgtgatgcttttaccagattgtattgttataggttgtctgaagaaacgagataaccaacgcacagtgcttgtgtgttaaaaaaaaaaaaaaaaactcgagagtgcttctaga

SEQ ID NO: 172510 - DNA, 320 bp, Zea mays
  Clone ID: MRT4577_88911C.1
cagatcatgataattgactacaaattaacttacccaagtggtactgcaacagctgttcttataaatggattccacacaactcatggagatgcaacggcaaagcagcaagtgaatgggttcacaaaatactttgcaatcagcttcttttggagcttcttccagtggttttactcaggtggagacaactgtgggttttcacagtttcccacttttggacttagagcttggaaacaaacatttttcttcgatttcagtctaacatatgttggcgctgggatgatttgctctcacctcgttaatctatctctccttcttggtgc

SEQ ID NO: 172511 - DNA, 191 bp, Zea mays
  Clone ID: MRT4577_88912C.1
aattctaatcttattcagttcaagcatttatttaatacgccaattgccaaatgtcttacaaatgccggagcgttccaatgtgttacgatatcttgtaggtgctattgcttttgtaagacatttggcaattggcgtattaaataaattctaatcttattcagttcaagcccacgcgtccgcggacgcgtggg

SEQ ID NO: 172512 - DNA, 419 bp, Zea mays
  Clone ID: MRT4577_88913C.1
attttgaacactcaaaatcacaccattcgaaccacatatgctacaacctatcaacactgggtgcgaggatattatccctccgtgcgcttattgcgctttttgcaagcgcaacaaatgcgtacattattccacaatgcttacttgctccaagttccattattacacagctcctccaaccagttacttcaatgggcttcgaacacccacctgtgcaagtctataagctacaacaagcaattgcggcgatgcgcttacaacaaccaatttcccagttgcaacaacaattattggcacatctaacaatacaaaccattgcatcgcaacagcatcaactatttctaccaacactgagccatctagccatggtgaaaactgccgcctacttgcaacagcaagttgcttgcatcaaacccacttgc

SEQ ID NO: 172513 - DNA, 321 bp, Zea mays
  Clone ID: MRT4577_88914C.1
ccggcccggaattaataacccgggtcgacgagctgcactgacggcggccgccctccttttttttttgggggttttttaaaaattttttggggttaccaccagcaggcaaaaagggcagaaaaaaaaaggggacagacggaaaaggaaaaaaaaaaacaaaacgcacaccaaacaagccctgaaaggatgacagactgagaaccgactgctttacatattcgccacaggaggacaacaaagcgagaacaaaactaatgcacatggaagaactggggcaatgagcggctacccaaacagctcaacaggcgcgccaagggccct

SEQ ID NO: 172514 - DNA, 285 bp, Zea mays
  Clone ID: MRT4577_88915C.1
acgggtcactcgaagaaaatttatcaagttttgtaagctacagtggaaccaacacccggaagataaaccatatgggaaccagaggagtatttagaaaaacattttcctgagttcctaggttctcgtaagtgctaggatttgtgtagtttgtctttggtatgaaccaataggggcacacccctgctttgtaggagtaatggggaaataagccagtgacgcatttccttttccattatctagcctagagttttaaatctcgggacgagatttctttttaggggggaa

SEQ ID NO: 172515 - DNA, 172 bp, Zea mays
  Clone ID: MRT4577_88916C.1
gtaccctatgaggcagggctctatattacagaacatgtacaagagattgctaagttgcgattattcgagagctaacatcgtccccacacgcaggtataacgttgaatcgcctctacaaccgtgcggcctatgcatgtgataatcacgtgaatacacgggagtccacaaatag

SEQ ID NO: 172516 - DNA, 363 bp, Zea mays
  Clone ID: MRT4577_88917C.1
accatagtgactatgctcaacgatgagagaaagccctccgcattacctgacaactgtaaggtgggtgcaattttgcaactggaaacgtacttgccggatatcaatcattgcggactgatatgttcttttggcctgcatacaagacatagtgttggccagaaatatgtcatgtgaaaagccttgagaaacagctcaatatgatggccagaatcttgcatctgctgcttacctgcaacggatcaccatcatgcaagccctaatcttctggaccaggaacctcagccgctactgtgtggagcgacacacgtgaatattgctctatgctgtcttggatgcgcagctgattgccacactgattgctgt

SEQ ID NO: 172517 - DNA, 879 bp, Zea mays
  Clone ID: MRT4577_88918C.1
gccggccggtttccggatgtgtccctacccgagcccgctcgaggccggccgacggagacgaaacccgctcgcgttttcttctttcagaaaacgaaatccactcaggagcgaggaaagagggacagaggagggatagatccccgggctccacgcctccacaaccatccgtcccgatcccgaccagctttgagatcgcgatggcggacggccgctgctgcaccttcctggagatcctcttcgccatcatcctcccgcccctcggcgtcttcctccgattcggctgctgcagaatagagttctgcatctgcctgctgctcacaatccttggctacgtccccggaatcatctacgcgatctatgtccttgttgctctcgactctgaccagcacgagagggaatactacacccttgcttagagcatctggttgtgccaggcgggcctgcacagttgagtcgaaatcagtattttttttctcatgtggattgtctgacatggcataagcggcaatgggtaaccaagtgttgtggtctatatctctgttacccaacttgtgagctctctttattgtgctccagttattcaatctgtaattgtgatactacaagagaataagatgcgcatgtatctctgagagcaactgtgatttatgattggtgctaccttgggctcaaaaacatgtgaacagtcgttctatgaaatgcgatgtgtacacacatgttctttgaaaaaaaaaaaaaaaaaaaaaaaaaaaaactagcggccatcgtgcagtaattttgacggaaaaaaaaaaaaaaaagcggcctcgagctcagctcccttaaaaaaaaaaaaaaaaaaaaaaaaaaaaaaaaaatccgaggaaggggcccggtacc

SEQ ID NO: 172518 - DNA, 327 bp, Zea mays
  Clone ID: MRT4577_88919C.1
ggatggtcaagggtgcaggcatcctcattttttatgccatgtgctcagactcagctaggcttggaccctagccccccgatgagcagcgagggtggacctcccaacgacggggagaatgaaggacgtctgaccctcgcgacccttgtcctcccggtgggacaagcgacgtttgtagcgccagcaagctagggtgctacacaaggcatgagcccgaggaatcgccaagcttgatgtatccatcataaacccctcgtagttctcggcaggaatgggttcacatcccactttaattcatttgtgtttgttaatgaaaactgattccaagac

SEQ ID NO: 172519 - DNA, 191 bp, Zea mays
  Clone ID: MRT4577_8891C.1
cagacgcgatgggttacccgctcatattgctgaaagctaatcaacttggggaggcaatatcatttttctttactacaacttatttgggcccatactcgaacgctcaatatgcatactctgtgctttccttgaataaatttaaccgtgatcgctttgtctgaagcgtgttaaaacggacaaattacggttac

SEQ ID NO: 172520 - DNA, 130 bp, Zea mays
  Clone ID: MRT4577_88920C.1
aaaaaaactcgggtttattccctacttaccaaaaggaacccatgaccactccccgggggcttgtacatacgggccaaaagaaccggaccccaccaatactgtaaaccctagacgacgcaagaaacaataa

SEQ ID NO: 172521 - DNA, 272 bp, Zea mays
  Clone ID: MRT4577_88921C.1
tgcatcgttcggtagacgttcacgttttcgacgctgtcgcttcctgatctggggccttactaatccgcggtgacttgcccaccggctcgctgtcctgctcctcgatttcacacctgattgctgacacagatctgggctagcctgcatcgctcgcaccgtcttgtgtgcaattctgcttgtcattggaaactatcccctgtctcaccgggtcaagggcaccggcagatacactactgatgtggccatgcctgacacctatacgtccatggctg

SEQ ID NO: 172522 - DNA, 622 bp, Zea mays
  Clone ID: MRT4577_88922C.1
gtgcggcgctcaggcggcggcctgtgatcacatccaactccacacattcgcaaacaaactacaaccttcacttttccaaccaaccaattacactttctttatcttcaaagatatatcagcttttctccaccatcaaaatgcagttctccatcaccaccatcctcgccttcgctgccaccgctgccttcgctgctcccctcgaagagcgccaggttggcctctgctcctctggcaaccccgtctgctgcgcaactgacgtcctcgacctcgctgacttggactgcagtcctcctaccgtcacccctgctggcgtcaacgagttcatcgatacctgctcttcagtgggccagcaggccaagtgctgcctgatccccattctcggccaggcacttatctgctctgacgttaaccctactgcccctgccccttctgctgctgcttaagcatggagccttttagagtccgctagtaatgtatagtacctgattggtgtgtttgttgggtagcttttgagagtagtacaatattcttgtttttggaattttctagagaggttgtagggttagtagtgagtctttaatcgaagtttcacattgaaaaaaaaaaaaaaaaaaggccccta

SEQ ID NO: 172523 - DNA, 710 bp, Zea mays
  Clone ID: MRT4577_88923C.1
cctcgaggcggaagtcccttctgtgctctcctgtacctgtgctggagcttaccgaagacgtgtacgacgatcctgctgcattgacgaggactccttctcttgctggctcgtcgtatctcggtacgcaagcatttggcatttatccaagcttacattacgcgaaaaaaacccctcatcggacctatcgcagcgccttatccgagaactatcaatcatgccaacgaccctttaatgctgatgatatcgacgatgtaaaaaagcacagtgaagatgatgaacttaacgacttctgaatgctgagctacggaggtcgagaagcgttgggctaactatctctagcgtaaaagaacggtacttcgtgatctagatgtcaggtgaggtctgatacctgacaaggatgaggagaagaatcacgctgcgtacatgaaagctgcgatagatatactgacaaaggttgaccatcctttcatagtgcacgtgaagtactcctttctcacgaagaaccgactataccttgtactggacttgataatcggtggacatctcatcctccagattgaccaccagggcatgatataatcaggaactagcaccgctcaaagctgctgaaattgtatctgccgtataccacctccatgccaatgtaagtatgcatatggatttgaagcctgcgaagatcttactgggtgctgacgatcatgctatgctga

SEQ ID NO: 172524 - DNA, 176 bp, Zea mays
  Clone ID: MRT4577_88924C.1
cgtccgattcccggcgccgccctttttttttttttttttaatcacaaagcttttttcacccgaaagaaatcccaggggcggaattctaagggggggggggtcactcatggtaatatttaacataaagctcaccacctgctgtatagaaacacaaacctcatttatacatccaaata

SEQ ID NO: 172525 - DNA, 319 bp, Zea mays
  Clone ID: MRT4577_88925C.1
ccccccaataaattcttcattcaaaaattgcatggtgggctcccggtttccaaaaaaaaattttgctcaggaatgcttaaaaaacaatgggggaaaaggggggggaaaaaattccgcggggggtccatttttgggttatttaaaaccccaatattggcccggggggggacccttaaacttttgaccttggccccaattcccccccccatttttttgttttttcttaaaaatgggaccgggggtgggcccaaaccccagttggttggaactttgaaggcccccaaaacccgcccccaaaccttgttttttgggcccttta

SEQ ID NO: 172526 - DNA, 399 bp, Zea mays
  unsure (1)..(399): unsure at all n locations
  Clone ID: MRT4577_88926C.1
gggggggggggggggcgacaaaaaacggccgtgtgggcntcctggccgctgccttcggcgtgctgctcgccgcngccgccgtgtcctcgngggccgtcctgactccgctggggactatttttttctttgccnncnacccnnccttgtgggttcgcncggggtctttttttttncnnnanaccatcntnctgtcccccgggggcgcggcgctccggcggagcgtccgtctggcggcgggtctcctccgcctcttggtcctcggctgcttcccgcggggctgcgtcgcgtccttcctcctgggcctcggcgggcgcggcctcccgccctccgtggggctgccgccgggggccgtgctgctgggggggggcctccgcggggtggggcccgcggggtgcgggc

SEQ ID NO: 172527 - DNA, 329 bp, Zea mays
  Clone ID: MRT4577_88927C.1
aaagacgatcgaccagcactcatcgttttatttttaaatacacatcggacatgcttgtttggaaccatccatttgcttttctccaaaaacaaaaaaggcagtcctgtccacgtttttggtttcagcaatttgggcccccgatttatttgcagcgtcctgttggcttgtgggggatagacaataaactccccacccctaatccatggggtttgggttttataaagaggagggggctctccacacttaggcaaattccgggaagccaatcctggcttggccgaattcaaaccccgtggggtaagctcccatgaagacccccccaaaaatcc

SEQ ID NO: 172528 - DNA, 253 bp, Zea mays
  Clone ID: MRT4577_88928C.1
acgtggagaggtcatacatctcgaaaggaatgtttactattgcagggatgaccacactatggggatcgttcaaaccggaggtcctctttgcgatccccaatggcaagcaccaggcctatcttaactaggcatggtgacgaccttttgggtacacggacttcctgaattgtcgaagataattgatgcattgcacactataatattgtactgagattaagcaatactcgcgggctatgtctgtcaccactcgatg

SEQ ID NO: 172529 - DNA, 276 bp, Zea mays
  Clone ID: MRT4577_88929C.1
tgtacatcttccctgtccactggcagtttggccagctggatcagcacccgattgatgggtacctgtcccacacggagctggccccactgcgcgctcccctcattcccatggaacattgcaccactcgcttctttgagacctgtgacctagacaatgacaagtacattgccctggaggaatgggccggctgcttcggcatcaaggagcaggacatcaacaaggatctggtgatctaagttcaagcctcctgcagcagtcctggactctctccccctg

SEQ ID NO: 172530 - DNA, 917 bp, Zea mays
  Clone ID: MRT4577_8892C.1
cgggtcctacgaaacaactgccacgcccttacccacacacacacacacgtcgacacaacatcgagagcagaaaacaaagatcgatccatcgagaccgaccgagagcaggattgaagttgaaaggaccgtccgtacgggttacttctccagtcagtctccggtgcgccttcttcgccgatcagcgcgactgctgcttgtacatggccacgagagcggcgctcgtcgccggccgccgtgcggccggtcaggacgggctcgcccttctctcctcgggctgcaggtacaactctgattagtgattaccaatgcaggcgcgctctctctctctcttgcgggcaccgctgcgtgtagccgtgtacgacctctcacggaagcccctctttggcaggcgcgaaggagctcgtccgagctccccccacaagagcagcagcgccaccgagcgggagggccacggcgacgcgacggcggcgcaggtggaggcggcgctgaaccgcaagaacgcggacgtggtcgacgtcgaccgctccggctccgcgacgctggtcccggccgacgcgcggcgcggcgcgggcgacgagtgggtgcccgaccaggagacgggcgtctttgtcccggccgacgaggagtcgtccgggcccggcgacgggggcgtggccgacgtcggcggcgcgcgcgggcaagccccgtcggtgctggaccaggcggtgttcgtccgcgaggagcacatggaggacgtcgagaggcccgccgtcggcgtggacgatgccggcgccgcctgagcgcggggaccgtgtcctcgggcggcccgccgctgcgaccagcaggcagagtagctgtagcctgtagggcaagcaaagcaaggttttctttgttctagcttccggatcgatagaataatgaagtcagatctcaagtct

SEQ ID NO: 172531 - DNA, 756 bp, Zea mays
  Clone ID: MRT4577_88930C.1
atgccaaaggaaactatcaacaaccccctcgaaggtggtctggttcgactaaagtataccttcagatttgtagaccagtttgtcgagtcagacgatgattggttggaaagtgtcgaagctacaagtgatgaattgcttggggcgtactccaagacagaggataatgcgctatcagcggccttcagaggccggaaaaagaagaggctgaacagagttttcgatgctattggattcgtctatcctgactaccgttacccgctacggggtcagaaaagaaaaggtgcagtttctgtgaaggaagttgcttcggccgcttctagtgagcctatgccgaagagaaaaaaggtgaaggttcttacccaccggccatgctatattgagccggccatagtgtctgattttggtggtgagacctcttcagccactgaagccagggaacctacacatctgcagaatattgaagagccagctgcaatgccggagatggaaaaaattgaagaaccgagggctgaagagacaaggacatcggaagttttaagtccttcggcaagagttgaggtgtcaatgccgaaggcacaaaaggatcttacaacaactcccaagaggaagagaatgatcaacgttttagatgtgctagaaacaataaaatcttcaagctctactccgaagagagctgccgaagcttcaaaaacacaaattgaggagaccgaaactgggccttcagagcccgccaagaagaaatccttggaaatttga

SEQ ID NO: 172532 - DNA, 1249 bp, Zea mays
  Clone ID: MRT4577_88931C.1
gatttatcactgatgaactaaaatttaagaaagtcgttacttacagacctcaagcagcacatgattcccaagtggcctcggtaaaaattgatattggttttgcaaaggaggcccctattttgggcatttttgggatgaatgtctaccacaaagatcgacttataatgcctttctggaaggtccttcaagaaggatctagcagagggagaagtgtggttggtgtacttgaagcaaattttattgaaccagcacatgacaaacaagattttgagaggacaccattgtttattcggctagaaacaagacttagacaaattattattgatttctggaaagaaaggtgccatttgattggttaccagccaatggatccacatttaagatcccagtataaggccaccctcaaagaatcggttggtcctgctccagttcaccataaagcttccagtgtccgaagaactggagggctttcgtcaaatttactaccagagacatatgacgacataacaactgttgggttagcaaataatggttctcatttgcaatcgtctgatcaagcacaagagaacaatatggactcagaagttttggatgaggatctggtggagattggctcctctggtgtcctagatcctagttttattgagaagctgagtgaagaaaacatcgctctgttttcaaggcgtgaagagcttcgacaacgagatacacaactgaagcagacgattggagacctggagcttgagctggaggaaacaaaaaagaagtgcggtcagcttgctgctcagctcaaggcatggaagaaccagcagcatctaccctaaatgtgaagggcatcattaagaccgaggacacggaggtacacgacaacgaccaatactgacagaaaaccgaaggttacaaggaagcacggatgcatataatgtctgtctagtgggctggctaactcatggttgagttgttaaaaagaagtttagcatgtaaatcttaggcgtgtgtgctacttagctactagacagaatggttgtcatgtgcaagcaaggaagatgacttgggtgattcctgctgttaatttgctatgcaaaatgtcacgtaaggcccttatgatccagccttgagcatcaaataaaactgtagaactcgaaaaaaataaaaaaaaaaaaaaaaaaaggcccctttcgcctgccgaacaaccacacaaaataaaaaaaaaaaaaaaaaaaaagtcttctgggttgttaccactgtt

SEQ ID NO: 172533 - DNA, 436 bp, Zea mays
  Clone ID: MRT4577_88932C.1
aaaaaagaagtgcggtcagcttgctgctcagctcaaggcatggaagaaccagcagcatctaccctaaatgtgaaggggaatgtgtttgtcgatcacaggacagcgaccaaagcctacctgtctggggcatcattaagaccgaggacacggaggtacacgacaacgaccaatactgacagaaaaccgaaggttacaaggaagcacggatgcatataatgtctgtctagtgggctggctaactcatggttgagttgttaaaaagaagtttagcatgtaaatcttaggcgtgtgtgctacttagctactagacagaatggttgtcatgtgcaagcaaggaagatgacttgggtgattcctgctgttaatttgctatgcaaaatgtcacgtaaggcccttatgatccagccttgagcatcaaataaaactgtagaactcg

SEQ ID NO: 172534 - DNA, 388 bp, Zea mays
  Clone ID: MRT4577_88933C.1
cccacgcgtccgctctgcttgtagaccgccgatgggtcagcttacaagcaggcgaccttagtcatcggagtcaacacgcgtgactgatgacgctagctgttgtctacgctgactgcatgtgtctagtcgataccttatgcctgtacgctaaactgtatagccagatcagatgctgacgaatatgtactgttagctaggacctgtgtgatcgcatgtacagctactagcatatcagctttgtcgcatgtaaaatgcaagcccaaagttgcagaacccggactgctcgtacaagtacatggtgaactactagctacaaggctgtaggcagagtctctgtcgactgtaactgtatgtcatcgattcactccagatgttaacttggcgtatc

SEQ ID NO: 172535 - DNA, 670 bp, Zea mays
  Clone ID: MRT4577_88934C.1
gatcaaagttttcgtgcacattagctttgaagtttaagatgtcatccgcatagaacacatacactactccaacctcatctacaacagcaagaagataagaatatgatgccaaaactaaccgcttaaacattctgccaacaaagttctcaacatggatatttccctcgtccaaatttgtcacaatggacatagagctcctcagaggcatctccagatcagttctgcattgttgaagaacactgaatgacgtcacaagaccaccagttttcacgttccaaatggcaacaaaacctgctgtattaaggcaggcaagaaacacatctgataactgaaaatcaacccattttggacttggcgtaataccatcagatacatcctgaaggtctgccacaaagttccactgtatgccccagtggtttagctccagaacagtaaccaaaatacactccgcattggatggatgggcctcacaacgtactgattcattaggagtcagaactaagccgatcaaataacatgacgagctagacaaaacttttagacactcccactgacaactgcacgatgctctaagaaaacgtcgtggtgattcactgtcagtttccgccatagtcttcagagaacatttgctataccaatatttcaagaaagagacggacgcgtgggtgtg

SEQ ID NO: 172536 - DNA, 211 bp, Zea mays
  Clone ID: MRT4577_88935C.1
ctcaagttttgttctcctctcctagtctagccagcacctgcagatctgctcgtggcctggggctactgatttgggggaacgaagcgatggttcgaagggggcccggggtttcctgcttgctgttcctggggggggcgggcaacctgttaaggggatggccacgcagacagcggctgcagatgcggctgctggcgaccaacgcggagctgga

SEQ ID NO: 172537 - DNA, 620 bp, Zea mays
  unsure (1)..(620): unsure at all n locations
  Clone ID: MRT4577_88936C.1
ccggccgggcccgcttgggcatcgggcccagccaccctcgcgctagtgctaggctgctaaccatagccagtccttcctcctctcgcgtggccgcgcctgcatccggccacgggccaccgcgcacagccctagccagacaccgtgcacgacccagcctagccgcagcggtggaggcgcgcagccccaccccgccccgcacgaccaaatgaacagccgcaaccagcgaggctaggcccgcaacagcaacgcccttcgctcgccagcaacggcagtgcgtccgacatccttcgctcgcctagttgccctgcagatggccaggaccagcaccactgcggtctgcagcagcgcccctaactgttgaggataagaggaggttgacatgggatgacaagttgacaacctgctaattgcaatgttcaattcactcttcttcaactaccaggaggattgctagcagaattgtttggccgaagtaggaactgccaactggtatatggttcataagctgaacatatccctatttgttttaacccctttacnagatgaaaatacttcatattacatagaggattgcatggaggcacctggggcctttgtcctccacctcctcaagtgcgtgc

SEQ ID NO: 172538 - DNA, 594 bp, Zea mays
  Clone ID: MRT4577_88937C.1
tgggtaccccgggcccctcctcgagtttttttttttttttttttttttttttttttttttttttttttttttttttttttttttggcaaagaccaaccaaagggcaaggaacccccccaaaagcaacagggtttattacacaggctgtaaacacagggggcaacaacaaatgcaaaacaggaggctgccttttttattcaactgggggctccaacccatccgcaacccaagcaacggggcaacgcagggggaggtcaaccccaggaggagggcggcgggggcaaggggatggcggcaacggttttttggaacgcggggcgggcaaaaatggcctcccaccaggccttgacgggggggcgggcgggaacaaccccggccttgggggtcttgctgaggaaaaacaagaaggacccggggttggcgtcggcaagcgtaaacccgcccccgggaaggtacttgttgggggcgaggggcccctcgaacacgtcaagcaccttggcaagctgctccgcgggcttgcccccaccgccgcgtcgggggccccccccaagagcggcctcacaagcaggtggaacaccagcggcgacccgttcg

SEQ ID NO: 172539 - DNA, 413 bp, Zea mays
  Clone ID: MRT4577_88938C.1
ggaaacccgggcgggggggggtttaaaatacaggaattttttcaggggccgggaaaatccaaataaaattggccccggggggaaaaaggggggggggggttcccgaatcccggggaacaaggggcttttacatttaccccaggaaaagctcaaaccgggggggaaaacttttttaaatgggaggggggggaaaaaaaccccccgttttttggatggggcctggaccaccggaatttggcccaccaaggggggcccggggctttccggggggaagctttatggctggaaaaagggggggccagcaaatatgccacgaagcccggaaaaaacgcctggggggaaaaatcacattccctttttgggggaaccattttggaggggggggaaccgggccctaacccgggattgggggg

SEQ ID NO: 172540 - DNA, 275 bp, Zea mays
  unsure (1)..(275): unsure at all n locations
  Clone ID: MRT4577_88939C.1
cacttcttcgagccggccaagtctttcgacagccacgggaacctcatcgacgccgacaccacggagcgacccaagcaggtgctcgtgtgccttgacgccttcacgcgcacgctccacaacaacaacgactgaagcacgagctgccgggatcgccgtgctaataataataatctctacttggttgcttcagcaactagtaactagtggtcgtcctactacaaaccagagtatatgtgctcgaacctataatagaatacatggagaacttngctacc

SEQ ID NO: 172541 - DNA, 147 bp, Zea mays
  Clone ID: MRT4577_8893C.1
aaaggaaagcccgggacgacccacacgtccacccacgcgtacgaaagaacttaataatccactgatttcacaatgaagggggagtcgaagctttttattgtttgaactgttacttgcaacacaaatcctgtactaatttgcgctaac

SEQ ID NO: 172542 - DNA, 430 bp, Zea mays
  Clone ID: MRT4577_88940C.1
aaggggagggttgtgccccccccctccagattgggcaaggggaactggggaagcaacagcaaaaaacagggtttcatgagccacacaccaaaaaaggcaggttttgggttttgttttaattgaaaattgggctcgccaccctttttttggaaaacaaaattttaataacccgtggggcgggagcccctttttgccggggggggttttaaactggtttgtttaaaacacccggggggggttgcccactgggcaattgagggggaccttttcggggttgcccgggagcaccttcatttgggttattttgaccatggacctggcaaactggtcaaaaaaaggggcctggttgaacccaaaacgcgtggggggccgtttgggggtctgggtcttgaaaaggccctggtcccacttgaaaagcccctttttgggg

SEQ ID NO: 172543 - DNA, 311 bp, Zea mays
  Clone ID: MRT4577_88941C.1
aattcggcacgagggccccacgttccattctcgcccatggccagatgccgttgcgctgtgactaacctactccgctgagtgtgaaaaagagatagccgacagcggcgaggtccccaataatgctatacggcctaaggacgacatactcttggccatctgagcgcaaactctaaccttccgagagcttggccccggccccaggaacccgaaccccgcccgcttactgcgacatggacgactccgaccgccttatcggggacgcctccaagacccaggtcgccatgaaccccatcaacaccgtcatttgatgc

SEQ ID NO: 172544 - DNA, 492 bp, Zea mays
  Clone ID: MRT4577_88942C.1
atttattaactattttgacgcttggcacaaaccttgaatcattaaccggaacctgcaggccatccatctgttcataaacagagtacaatgctcgctaggcaaaatacatgtgaactcggtgaaaggtgggtggagggttattcgctagaaattgaacgacattcaatccgggaaacgtataaagtacagaatgatgacgcctgaggaaaaagactggctaaaattatattaccatggagacgaactgactacaataagccaagtcgtgtagaaagcggctatatgcctaattgttatctaaggtaacttctcaacacaaacaacatgatgatgcttgggtatgatcctctagttagctctgtgtttatagccagcctacttgcctcggccaattgctgtaatagccattggacctgataaagtgaatgatgttgctgacgctcttacttgccttcaccttacatatatcctttattagctaaaatggagtgg

SEQ ID NO: 172545 - DNA, 1473 bp, Zea mays
  Clone ID: MRT4577_88943C.1
atggcgcccaagcggaagaaccagaattttgctgcggtagtcattcctcccatcgaccccaatagccagttgtcgttcgcagtggacacccgaaagcctgagggtattcgcccaaagcgtcctcgcgaagttagccgcccaactgcgcctattgaggagaagaagaaaaagaggcgacttcagcgactatcatgcttggaccaggatgctggcccttctgctcctgtttgtgaagaagtaccagcggaggtccttactaaggctgatcccaatggtggtgtatctgttgaagctgaccccaatgggtgtgaccgtgcaccagctgactccaatgggtgtgaccttgttgaagctgacccctatgggtgttaccttgttgaagttgaacccaatgggtgtaaccatgtggaagctgatgccaatgggtgtaaccgtgcagaagctgatcccaatgggtgtgaccgtgcaccggctattgtccgtattttttatgacgacgaagaagaggaagaagaagtttcgctaattcttaaaatagcaggtgtcacagaggcccttaaggatgtcgttcctgaagatatgctgtcggagccgactgctagcgacatgatggatgtttgctctgaaattccaaacgtgggattagaggtatcccgagcagtatctcacgcatcgtcgactttgggaggcagtcttcggtgtcaagaagttggtcaggattacccaactcccatggaggtgactaaggatccttcagccttagaggtggctgttgcagaaaacccagcccccaagggtgtcgccggtagtgatccggctctggtgggtagcgcgagctgcaacccagcccccgagggtgttgtcggtaatgatccagctctggtgggtggcgcgagctacaaccctgcccctgagggtgtccaagtcggcgagccagatgcaagaattctgatatctgctagtggggctgagtcaacccccgacgatgctcttcaaattgttccgattgatcttccttcgtcgagctacaacgcagcttctcatgacttggggttaccctcattcttctctaatcttcaggctttggttgatggaatgtccgctcagttgagatcacacggtgccactatcccagaagaggctctgtctttgacgcagtggaacccattgctgcttcagaaacagatagctgatttgaaagcgtcaaatcctgatatggcccgatggtactctgagcttgagaaaaaaaacatcttcaacaacaagccaactcaacctgacggtactccgagcttgaggagaagtattctcaagcttgactctgaaagggcagctgttggaacttgctctccggtgcaagttgatccaacgggggagtgtagcaacgtaaacagggtttttgcacgagatggcaatagctctgttaatctagcctctcaagggcactgtgcgggggtattcataggtatctga

SEQ ID NO: 172546 - DNA, 345 bp, Zea mays
  Clone ID: MRT4577_88944C.1
atgataacaacacgacgccggagaacgcgccgggggggatcaaaaagggcaagcaaggcggcccgcacgacgccatccagaaccccccgaagcaggccgacacgaaaaaacaaagcgacacacctgcagaaacggaagcaggccaaggaggcacaggcgcaggcacaggcccaggcgcggcaggaacaggacgaccaaccggagcccgagcaacaacaggacccgaacacgcagccggcgcacgacaaagcaggaaaccgagggaggaaaaggccgccgaacgcaaccaacggaaccaccgacggcggccacaagaggaacgacgaagccaccgaagaagacggg

SEQ ID NO: 172547 - DNA, 234 bp, Zea mays
  unsure (1)..(234): unsure at all n locations
  Clone ID: MRT4577_88945C.1
agcaaggatccannananacaattcatccacccgtttatttccaccccagagagcaaaacaaggcgagctacaccaagagggggtgggtcgtaaccctcactttcctggatctccctgagaacgccaccttcacgcatacaagccgcgggagcggctgacaaccaccgccgtcggttcatttaccgacaacgatgcatatgccacctacagtttacctgccacctcccgagcat

SEQ ID NO: 172548 - DNA, 259 bp, Zea mays
  Clone ID: MRT4577_88946C.1
gcgcccacgcgttctcgctactaccgccgctagctggttcaagtgcggctagcggatcccgagaccgggggagtaaattaagaggcgtctatctttcatggggtgcgactacaagtgcgggtgcgccgtgccgtgccccggcggcaaagactgcaggtgcacgtctggtagcggctgtcatcgggagcacactacttgctgcttctgggagcactgctaggtcagcccgtgcacgtgtggcctggccacgatgccgttt

SEQ ID NO: 172549 - DNA, 357 bp, Zea mays
  Clone ID: MRT4577_88947C.1
acctacaggagcgatcgctacggatctgcacaaaatgctctctgagtctatgagataccccatggacctgtggacactcactacaaattagaaagacgtttccgtcctctacacgatgaaccgaacatagcatgctgcgacatgtacggacgaggatactcgcttacgatggacgagatagagtagaggaaaaagaagagctacgaggtcatctcatgagtgactattgcccgacaagaagaagcccatgtggatgaggaagccagaagacaccgccaaagaagagtatgctcgccttctatgaatagctcgacaagacgcctggacatgatcatagtggcctgagaagcatcttct

SEQ ID NO: 172550 - DNA, 207 bp, Zea mays
  Clone ID: MRT4577_88948C.1
cctcaccctttactcagtcttagtttcttattagctctaggctccagaaagacccggaactcattcgtgaagccataaaccttgtcatagccaccaatggccaatggcaacgtccagactaccaccgtggtggaggacgatgaagcccccgcggagaataccttgacgccagccgacttgcacccggaagtctgcacccgcaaggac

SEQ ID NO: 172551 - DNA, 407 bp, Zea mays
  Clone ID: MRT4577_88949C.1
aggggaaaaatttgggggatattgaaaatgtttaccacacggaatatgcatatcatatatgggtaggagtttcgccttttacagatttcatgaatagggaagtgatgtacattaatcactttacatcttatatttaaaacccggtgaaataaagcctgagtacacggcaacagtcacagaaccacatctttgtaaacattataagggctggcttggcctcgtctccatacacgggaacggccacataagtgatagaaccacatctccttgggaagtctctctcacagaaaatttttattatttattcaatcaccagaacagatgagtcacaaagttccctttttaaaagggttgccaatgtgtgaagccaacctgtctgagcctttgtccctttaaaacaccatgaa

SEQ ID NO: 172552 - DNA, 279 bp, Zea mays
  Clone ID: MRT4577_8894C.1
ggggggccgaactgaacttaaggttacacttacaggtgttggaatggaacaactggttcctctttaccgaagaaataaaatcaaatctacgaccccaatggacgaaaaagcgaacaccattacatagatcctttttgaaaaccgagggaagcacgtaattaacatgcatggatctcggggtacaaaagctgggggggagctaaataccccgtttatttaattggacaggatccccctttcacagtcacatgacatccattatgggtcatggggagacct

SEQ ID NO: 172553 - DNA, 923 bp, Zea mays
  Clone ID: MRT4577_88951C.1
ttggggacccacgggccggccgggacgttccctcgtcttttgtagttggacaatccgcagctcctccatctcattcttccccccatcccatccccaaggttgaccggcgaaatcagcagtccgagaaccgcgagcttctgcctgatccagcctcatcccgccatggacgaatctgaggagcacagcaacggcggcgggcacccccacccgcaccacgggtacgagtggaagttcccggcggcgctgagcgcgaacacgacgagcgtgcacgtgacggcgctggacggcgtggtgaacgtgaactcgctgttcacggtggccgtgttcgtggggctgtcgctggcgaccccggggcagctgcggagcctggcgggggacccgcggtgcgacgccggcccgggcgtggcgcggtcgctgctggtgctggaggtggtggccttctcgtccttcctcttctccagcctggtggcgcagggcctgaagctggcgctcaacctcatcaactccaaggacccgcacgacgcggcgcgcgcccacatcgacgcccgcgtgctccgcctcggcatgctcgcctccgccgtcggatccgtcgtcggctgcgtcttcctcatgacgtccatggtcatggtcgtgcaggtccgcctcggcacgctgagctgccccaccgaccgcgccgccgccaaggccgccgcgggcctcgtcggcctcgtcaccaccgcgctcgctttctacgtgggcaccgtcttctacaccttcacccactgatgccagttccatgcatccgtgcgctgcatcccaaatccatctagcgttgcgttgcgttgcgttgcaaaagggcacatcgccatcagtggtgtcggtgtgcgaggaaattgaaaggaggacctgcaatctgcgttattactttgatctgatgcgctggt

SEQ ID NO: 172554 - DNA, 1170 bp, Zea mays
  Clone ID: MRT4577_88952C.1
gtcttttgtcagttggacaatccgcagctcctccatctcattcttccccccatcccatccccaaggttgaccggcgaaatcagcagtccaagaaccgcgagcttctgcctgatccagcctcatcccgccatggacgagtaagtctcttcccctcgccccttccatggatggatgaaggaacctaatgtttcgtgccctgtctccatccatcccagatctgaggagcacagcaacggcggcgggcacccccacccgcaccacgggtacgagtggaagttcccggcggcgctgagcgcgaacacgacgagcgtgcacgtgacggcgctggacggcgtggtgaacgtgaactcgctgttcacggtggccgtgttcgtggggctgtcgctggcgaccccggggcagctgcggagcctggcgggggacccgcggtgcgacgccggcccgggcgtggcgcggtcgctgctggtgctggaggtggtggccttctcgtccttcctcttctccagcctggtggcgcagggcctgaagctggcgctcaacctcatcaactccaaggacccgcacgacgcggcgcgcgcccacatcgacgcccgcgtgctccgcctcggcatgctcgcctccgccgtcggatccgtcgtcggctgcgtcttcctcatgacgtccatggtcatggtcgtgcaggtccgcctcggcacgctgagctgccccaccgaccgcgccgccgccaaggccgccgcgggcctcgtcggcctcgtcaccaccgcgctcgccttctacgtgggcaccgtcttctacaccttcacccactgatgccagttccatgcgtccgtgcgctgcatcccaaatccatctagcgttgcgttgcgttgcaaagggcacatcgccatcagtggtgtcggtgtgcgaggaaattgaaaggaggacctgcaatctgcgttattactttgatctgatgcgctgttcgtttttgttcgtgactaaagtttagatagtgttggatattagttatgaatattaaatatagacttaattaagtttaataaattcatctgatcttttattttcatatgtgtaattagttttataattaaactacttgtaattgtcatcaaacattcgacagatactaaacttttgattacaaccgaaaaaaaaaaaaaaaaagcggcc

SEQ ID NO: 172555 - DNA, 468 bp, Zea mays
  Clone ID: MRT4577_88953C.1
aagcttttttttttttttttttttttttttttttttttttttttttttttttttttttacccgcccgcgggggcgtgggcaagggccaagaccggcgcaccggggggcagcggaagggggcccaaccccggggccaacctgggcggagacatggccggagccaatgcgtgagggaaataggtttccactcacaataccaaccaaaaaaataaccggaaaaaaaaagggcgaaaacggggggggcaaaaaaaaaagaaaacgaacaggaatagggccgcgcccccagcccgcaaaccaaaagggaaacccgcggtgccaaaaacaaaaaagaaaacgccaaggcggggggggaagggggatgggaaaagggcccccttccacttacaccaacaactaggccctgcgcctggggggtcgggtggggggacccgcataagccaacccaaaggggggcataccgcccgccac

SEQ ID NO: 172556 - DNA, 348 bp, Zea mays
  unsure (1)..(348): unsure at all n locations
  Clone ID: MRT4577_88954C.1
cggctcgaggccggcgccttcagccccccaagaagagtgcccgcccatttgtaagctgccaacnctacnctncgccaactgcgcaggcggaaggacaagaagcggccttgtgcccctgcccccaccccctcccttgcttcgcgcgtaccccctccagaacaaccagacagaaccgacgacggacgccggcatagtacttctgctgcgcagctatcactgctctgagaaaatggatgcagcagcccatactgccgatctggacaaacctctagcattccaagttggccaaccagaggagcacaatcaagagagggttcaccagccgatagtcagcaaggaaaggccacg

SEQ ID NO: 172557 - DNA, 591 bp, Zea mays
  Clone ID: MRT4577_88955C.1
ggccgcttttttttttttttttttcttttttttttttttttttttttttttttttttttttttttttttttttttttttttttttttttttcttattttttttttttttgtgagatttttaagttgatttcaaaaacagccgagcccatgggcatacatggtacaaacagaaataccagcccaacccaaaataaccagcaccagggggaacatcataaaacaaaagcaaccaggggagccaaacggggcccgccaattcaagacgggggcccaccgcagcccgtaaattccgcccaagcctgcatacaatcccgcacccggtgccgcacaagtgccaagcctgcaccaaagaccaagaagaagtgtatgcaggggaggggcaacagcgacctgagcgggacaaataccatccccaagagctggcaaagcaccaaaaacacccaacacagcgggccgaaactaatccgcaccaagcttacggtggagctaaggcgttgctaaaacatcagcggaacctatcattgctggccacaacaaagaggacaccctgcgtgtgctggaaccaatgcctccgcagggggcggaaatcgt

SEQ ID NO: 172558 - DNA, 243 bp, Zea mays
  Clone ID: MRT4577_88956C.1
gaggcctcttgccacactccagaaatacgtgtgcggctgcttttaagaactatgtgtctggtcacttatttctctaaaattatctcattgcctggcaatcagtcttctctagtatacttgtcctagcacattgtgtacatgggaaatgtaaacaaatgtgaaggaggaccagaaaaattagttaatatttaaaaaactgtattgtgcattttggcttcacatgtttaactttttttaagaaaa

SEQ ID NO: 172559 - DNA, 324 bp, Zea mays
  Clone ID: MRT4577_88957C.1
atccactcacaattgacctcttcgtgcggaaataagttaactagcttacctccaaatccaacagatgatctgttgatcattacccagttgccgtgggctgcatacataaagggggttttctgtctttaaataaataacctgctacacagtcatatcctgaatgccagcttaactgagccaaagggacttcttcaagctcacaccttacgtgccttatatgaatcaagacaggctgccatcaggccttttacgtggtgttaacctggaactgattgaaaattgacaagtccacggttagcatttgggctgaaaccagccggattc

SEQ ID NO: 172560 - DNA, 321 bp, Zea mays
  Clone ID: MRT4577_88958C.1
gacatagatcatgcgcggactgtatagaatggccaagactgcgtaccacggcctgcgacggtatgaccagtgtatagtataacatataatggagatactggcccttgttcaacaacgcaatgtcatgtagaacctactaacatcccaacatatgttgctgtgctcgaatccaatgttacgccagcttgcactgtagcaagcatgcgcagaccaatgggatcttgcatctgttgaacatcctgaatggaaacagtgacgcgccgttgaacgtgtcaacaaacgcgatgcttgtgaagcactccctcagttggaccgatacac

SEQ ID NO: 172561 - DNA, 1945 bp, Zea mays
  Clone ID: MRT4577_88959C.1
cattgggtacctcgaggccgccggggcgcgcacccaaaagccaccgcgatcccgtgcttccttctcgcacctgcggatctactctccgcacctgcggatctaccccccggcgaaacaagcgccccgacgcctcagggaatgcggagcgatgaggcggcgctcaggcactgacgtcgccggtcagcgcgagctgcgcggcgaccgaacctgccatcgcaagcacgtcgaggacgggtagactcgtccatccttccttcctcctgttagtggtcgtagggtagtttgcactttgcagatagctagctagctagtagttaggggatcaggcatgggtgagggcgaggcggaggtgaagggcggggtgctgcagggccgctacgagctcggccgcgtgctgggtcacggcaacttcgggcgcgtccacgcggcgcgggacctgcgcaccgggcgggccgtggcggtgaaggtgctcgacaaggacaagatgctgcgcacgggcatgatggagcagatcaagcgcgagatcgccgtcatgaagcgcgtgtcccaccccaacatcgtggagctccacgaggtgatggccacgcgctccaagatctacctcgcgctggagctcgtccgcggaggggagctcttcgcgcggatcgtgcgcgccgggcgcgtcaaggaggacgtggcgcggcgctacttccggcagctcatccacgccgtggacttctgccacgcgcggggccgtgtaccaccgcgacctgaagctcgagaacctcctcctggacgacgcggggaaccctcaggtcgtcgactttggcctcagcgcgctgggccgacacgcgcgcagcgacgggctgctgcacacgctctgcggcacgcccgggtacgtcgcgccggaggtgttccggaacaagggctacgacggcgccaaggctgacatctggtcgtgcggcgtcatcctctacgtcctcctcgcagggtcgctgccgttcccggacgacaacgttgccgccatgttccggaagatgagccgcggcgactaccggtgcccgccgtggctgtccacggaggcgcgcaggctcatccccaagctgctcgaccccgaccccgacacccgcatcaccatcgcccagctcgtcgagacgccgtggttcaacaagccgtccgtctcgaggtccgtcagagccgccgccgccgccagcggcgcaaccgagccgccggccgagcctgcctcctccgcaaaggacggcggcgacaaggacgagccaccggagacgatgaacgcgttccacctgatctccctctccgcggggttcgacctctcaccgctgttcgacgtggaaggcggtccggcgagggggccccgggagggcggcatgcggttcgcgacgcgggagcccgcgagcggcgtcgtctcccgtctcgaggaggtggccgcccgcggcggcgggcggatgcgggtgaccaagagcggcgcccgcggcgttcggctcgagggcgcggagcgcgggggccgcaagggccggctagccgtggcggccgacatcttctgcgtggcgccgtcggtgctcgtcgtcgacgtgaagaaggacggcggcgactccctcgagtaccgctccttctgcagcgaggagctccggccggcgctcaaagacatcgtctgggcggccgacccccagcccgccgtcgtgtgacgcccgtgctgccgcctgcccgctcattgtttctggatcgcagtggtgccatagtttagtcagtgtcagttccatttccaaagtgattgcgtcactgttctcgattcgataatgatgtgagatctactgtttgtggggggcgtcaagaatatgtatctccctcggcataattgcgttattattattattattgtgaatggtttattaaaaaaaagcggccaaatttgttgaaacaaaaaaaggcccctagggtcctctat

SEQ ID NO: 172562 - DNA, 198 bp, Zea mays
  Clone ID: MRT4577_8895C.1
cccacgcagtctatatgcttcgacgagaggtgggtcatctcgcaccacactcctgatcttgcgctcgtccatgctcgagcgtgcctagagattatggtgacccaaacagataccccgatgacctatcatgagcaataattgcctcttcgcaagggtgaatcccctctacaaacacacaagtctgtggcgaacatgacg

SEQ ID NO: 172563 - DNA, 261 bp, Zea mays
  unsure (1)..(261): unsure at all n locations
  Clone ID: MRT4577_88960C.1
atatttttttttttttttttttttttttttgggcacggttaacgtggggacactttatgcttccctggccacgggnaaaaaagaggggcacaacaaacgggggcaacgcgggttatttacacagggggaacaaaacaaacaggcaaaaaacacagcttgccaggaggaaagatctgtggcaggcaaccaggtagcggaggaggcggtggttcactgccaacctgatagccgggctggccgcaaaaaacccaagagaggggg

SEQ ID NO: 172564 - DNA, 1545 bp, Zea mays
  Clone ID: MRT4577_88961C.1
agaccatttaggtacattagtctaaatgcggccaattcccccgcgccctggccagtcccccagagtaataggtacaggcagagccaacctagggttaattgcaatgaccgacgacttaaacggcgacgttgacggtgatgctgattgtcgccccagttaggttggtctggttggcgtaactgccagagggacggtaatatgcccactacgggaagcaggtataaacaaagttgtaggcgcattagtttcgtgtcggcaaaacgctcttcgttcactctgattttccatcctgcttatgatcccagcttgaccagcgctgattttcccattaaccctaaccttgctgaatttgtccatggcctctacccccaattccgtaactctctacaccgatggtgcctgctccatgaatcctggccctggtggctatggcgcagtgattctctacggtgatggtcgtcgggaggaattgtccgccggttataaaatgaccaccaataatcgcatggaaattatgggggcgatcgccgccttgagtcatttacaagaaccgtcccaagtgttgctctataccgattcccgctatatggtcgatgccatgagcaagggttgggccaagaaatggaaagccaacggatggcaaaggaatgccaaggaaaaggccaaaaaccccgacctgtgggaaacgatgttaacgctgtgcgaaaaacatcaagttacattccagtgggtcaaagcccacgctggcaataaggaaaatgagcggtgcgatcgccgaattgctcaaggaatccggagccaccgatatttggatttgcgactccaagggcattgtgggcaaacatcgcaccgatttaaacagcaaaaaacagagctttgcggtggatgcggaagggactttagccgatgctatggctggagctgatgtgtttttaggggtgagtgcgccgggggtagtgaccaaggaaatggtgcaatccatggccaaggacccgattgtgtttgccatggccaaccctatccccgaaattcagccggaattaatccaagaggatgcggcggttattgccacggggcgcagtgattaccccaaccaaattaacaatgtgcttgcctttccgggggttttccggggagccattgactgtagagctagcattattaccaccaccatgtgcatcgaagcggccaaggcgatcgcctctttggtgcacagcaacaccctagatagtgagcatattattccttcggtttttgacaatcgggtcgccactaccgtagccagtgcagtgcagttggccgcccgcaatgaaggggtggccggtcaatagttaatcgggaattgttaaacctttactggtcaaccattcctgattgtaaagacgggattggtaacgggctcctccgtcacaaagtacggtaacaatggtatgccccggcccaagttttttggccaattggtaagccgctcccacattaatgcccacggaaccgcccataaataggccatcccgccgcagaagttggtacaccacccgcaacgct

SEQ ID NO: 172565 - DNA, 158 bp, Zea mays
  Clone ID: MRT4577_88962C.1
gtcaattcgaaacttacctgcgggactgccctgagccatgcataggttggtgagcacacgtctggtctacagaatgcggcctctgagacatgaagacaccatctccatgtgaccgaacactgcagctgtctgaccttccaaaactatgactcgcggca

SEQ ID NO: 172566 - DNA, 422 bp, Zea mays
  unsure (1)..(422): unsure at all n locations
  Clone ID: MRT4577_88963C.1
gctacacgtccaaaagggtgtcaatgacttttggggttctcattggcatcacgtgtttaggagctcattgtagttttggagtacacatatccaaggtggcttcggtgaacctcgacgagggggcaaatgaacaggacgatattttagctgatttacgtgggaatgctcgcagtgcaacatgatttatgaagcatttgcaccggaaaaatactcgaagccaaaggaagattgatcagagcatgagcgcagtgattttatttggagaaaatatnagattaagattgttgtttaaaaccaagttttcatgtccttcactactcaccgtgaaacatattcaccagcagcagagtagtagtgtcagtttgcatggtttatgccatttattcaggatctgctggtggagaaatgagcgcgatgccaaa

SEQ ID NO: 172567 - DNA, 325 bp, Zea mays
  Clone ID: MRT4577_88964C.1
atccattctgcatgctaacgttttatatcttctccccgcctatggcactactgggcttaacggcaaactacccaaggctgatgcattaacaacaacaccaaagatctccgacatggttttactggcaagcatcctacttgacacttacaccaagtctttcacaccctcacaaacattgttattgctataccccactcgatggcctctcaaactcacgttaagatacatgttttcgcttataacacagatgttgtcgaggataccaacgttatcgctatcgatatatacaaatccactcgtgactcttctaacaatatttattgag

SEQ ID NO: 172568 - DNA, 420 bp, Zea mays
  Clone ID: MRT4577_88965C.1
cccacgcgtccgttaagtatggacgactttcgctactgaagctacctgggggctaatgaggatttgatcgcgcttttgtggtgtcagttcaacactgacacttacatataatctccatataatccctcgccatactaactgcatgagttctaataatttttcaagcatcactcactgtttatatactacgctataacttagcagagatgcaagatgttacgtacatcatatactcgatgtctgtacgctgtgctgagttagtgtacgagctgaatcgaatgcatgactgtgtatatgtatatagatgaaaacatccacatggaatgtaatacggaaaactaaatctccaactgatcggtttaaacgtctagaatatgcaatattaaacactcgtgcattagagctcgtacgtatcttata

SEQ ID NO: 172569 - DNA, 785 bp, Zea mays
  Clone ID: MRT4577_88966C.1
ccggccggctcccagtctttctcgccttttctcctctctgcttttctttgttaccgtcggcgtcgggaactccgcttccgcacaaatattgcgtttgctatcccttcgtggattagatccacgctcctctagtcgagatcgtcttgcatttttctgagatggagattgggaccgaaaaggttgcaaaaccaactaatacaacccacaacagctgaagaagaaatccagctttctcaaccaccaaatttggaagacaagaccgttgaagagctgctcaacatagatccggatatgtttcccgaagaaggatgtactgttactatatcaagcatcgtgcaaaatagcagatggtggtacccatcttgctccaggtgccacaaatcttcatctcaaacctcaactggatatcactgcacatcatgtggctgcacagatattaaatttagatacaagctcagcttcattgctactgatggaacatgcgaagcagagttcttttgttttgatagcatagccagaaaaatagtaggagaaccttggggcaaccttgttacagcagttacaacttctgagagtcccagcagccctagccgctattgtgtgtctgaaatttactcttgcagttgccatcaatatgtcagcctactatgtcacgaacagagtattctctattctatctattttaacaaatcatggaagacagaccttcataccatctaacatgcctagccatcctcaacaagagttgcatacacaagatgaagggcctagccttccgaccacac

SEQ ID NO: 172570 - DNA, 256 bp, Zea mays
  unsure (1)..(256): unsure at all n locations
  Clone ID: MRT4577_88967C.1
cactacgagcagacgaagtacgccaaacgaacatacaaaagcatctccaatctcatcgccccccacggacctgaaccgagaaccattaccgacgccggagaagcgtcgctcgatcaggatgactaccatggcgccgaagacggaagatgatattatgaaagagaagaatccccgtacgctcgnagaggataacatcgcgctcctcaaaacctatggactgagagcgaattcgactagcattaagaaggtcgagaag

SEQ ID NO: 172571 - DNA, 800 bp, Zea mays
  unsure (1)..(800): unsure at all n locations
  Clone ID: MRT4577_88968C.1
ggccgcaaattttttttttttttttttcgacagaaaaatatggtgataactataagacagacaatacattgtgttgtaataatacatagaatcaagtttatatggcacaatcatgcaagtatcttaaacatatactatgcgtattgggagtgtacatattcgcagcttgacactctggcaaaagcagcccacttgcgcatgcataaaggacgataggctgtcagcgcatgcatagactgccttctctctctttttttcaactgctcagcgcatgcatgctccactcgcaagtccagtccagcgcaaacatgcatgcaccgctttgactgcgtccaagtgcagcgcgcttatccggtaaaaggagtggcagttttcgcgcatgcagatccgttggtccaccaaaatggagagcgcgtccaagcgtgtgcccctaaaaaattgcttggttgcatgccaggacgaaggtcaaaccaccactccttcacacattctgatggatcccacaagttcctgactcagtctagtcgtgtggtgatggacgagcctgtagcatgcaaccggagtccaggcaggtgaagcagcactcgcccgccataccaagaggagcagtaggccccgtgccaccaaggagcatcctggtcaacctgtctgctggccagtgcgtgcgtgcaggggggctttttgaccggatcgaaatccatacacgagcatccacaacgataatggtagttcatcgtgcatggatcacagctcgtgcataacaacagattaagaacagtaaacatatcgttncactacgt

SEQ ID NO: 172572 - DNA, 2147 bp, Zea mays
  Clone ID: MRT4577_88969C.1
cggacgcgtgggcggacgcgtgggctttgttaccgtcggcggggggaactccgcttccgcacaaatattgcgtttgctgtcagcttgctcaacggttctgtttgtttggtgagatgtgttttcctctttctccttcgttgtgagtttccatttggtggacatccttttccagatcccttcgtggattagatccacgctcctctagtcgagatcgtcttgcatttttctgagatggagattgggaccgaaaaggcaagtatttttctttggtagttttggcatgtgcagacaaatgaggaagtgcttctacagttgtacctcatttaactctcttttggagattgagactgaaaaggcaagtatttctcccacgcgtccgctttcgcaagtggacatctgattccaatttttttaaagggatctggttccaaattcgtgcttggacctgccaggattctattgtttttggtgtatcctcttgctttggtacatgtagatcagcaagcaaatgtttttttatttcattgaatttcaatgagtgcaggttacgttctgtttgtactttattgaagttcattatactattttcttttggtaaagttgttcgcatcaagtgcatgttgcattctttttagtttttaacggttctgctttcagcttgctcttgggtgcgtttattttttagctgtgtttccattcctccaactgtgttttcattcttcctttgttgaccatttcgattttgtggacaactaatttcctttgggtgaaatgatcttgacgaagttgagatttcgctttattttgtttatggacgcatcaagattctaacacgccgttatttttcttcgctggtttagtaatgaggaaatcccttttatggccctaattttagggtttagagttttaactgattttttttaaaaaagttgttcctctccggtcccaactccatactgtgtgtaaatttgtcgcatcgcttttttgttctggaaagctctaaaaacaaggaaattatttgcaccgttttttaaaaaaagatagcatcttgcacggttgctttttagagaaagaaaagtaaccaaattcggttttgtccaaattagtttcaatttgatactttctcaagttttacttcatgtttttattgtttgggtttactaaattgctggaattcctgaggcgcatacctactacaacaggttgcaaaacaatgacctccaactaatacaacccacaacagctgaagaagaaatccagctttctcaaccaccaaatttggaagacaagaccgttgaagagctgctcaacatagatccggatatgtttcccgaagaaggatgtactgttactatatcaagcatcgtgcaaaatagcagatggtggtacccatcttgctccaggtgccacaaatcttcatctcaaacctcaactggatatcactgcacatcatgtggctgcacaaatattaaatttagatacaagctcagcttcattgctactgatggaacatgcgaagcagagttcttttgttttgatagcatagccagaaaaatagtaggagaaccttggggcaaccttgttacagcagttacaacttctgagagtcccagcagccctagccgctattgtgtgtctgaaatttactcttgcagttgccatcaatatgtcagcctactatgtcacgaacagagtattctctattctatctattttaacaaatcatggaagacagaccttcataccatctaacatgcctagccatcctcaacaagagttgcatacacaagatgaagtacctagccttccgaccacacaagactctccagcaacatcaatggcaaaactatctacctgtagcaacgaaagaaacgaggtgtttgctttttgcgcacctatcaggagcaccatcacttttggaccatgaatgcttccctatagatatgaacctactgttagactatttgtggatatgtacatattgacttaacacctgcaagcacactgttgctaagtgttgatgtatgatagttgaatgctacttagtatgtattgtagtctaaatccactctacaactggtatcaactattacataaaaacaacgttatatgctttatatttgcggacgcgtgggtaaaccgggaat

SEQ ID NO: 172573 - DNA, 521 bp, Zea mays
  Clone ID: MRT4577_8896C.1
gaattgtcttccaggaatctggagcaaatttttatacaccggccccagtatcattatcaaatgaactggttactgtatgggaccctgaacttggaagaaccaatccatctgagcacaagcagttaaagcttgctaggagcttgactcgtgggatagttgatagagatctaaaaccaagctcaaatgagagaaagttactacaaacaattattaagtttcctcctacacgcaccttggaagtggatgagaagcaattggtgtggaaagtttcgtttctctttgatgtctgagaagaaagctctaacgaaatttgtccgctcagtggattggagtgataaccaagaagctaagcaagctgttgagttgattggaaagtgggaaatgattgatgtggctgatgcactaaagctttttttacctgaatttgaaaggacgaattcgtggttatgctgtagcgtacttgaagggctgatgatgaagattacagtgctattacttcagtagtgcaagctctttggttg

SEQ ID NO: 172574 - DNA, 1131 bp, Zea mays
  Clone ID: MRT4577_88970C.1
ttcgggatatctctctccatccgtcgggtgtcccttcctctcccagtctttctcgccttttctcctctctgcttttctttgttaccgtcggcgtcgggaactccgcttccgcacaaatattgcgtttgctgtcagcttgctcaacggttctgtttgtttggttgcaaaacaatgacctccaactaatacaacccacaacagctgaagaagaaatccagctttctcaaccaccaaatttggaagacaagaccgttgaagagctgctcaacatagatccggatatgtttcccgaagaaggatgtactgttactatatcaagcatcgtgcaaaatagcagatggtggtacccatcttgctccaggtgccacaaatcttcatctcaaacctcaactggatatcactgcacatcatgtggctgcacaaatattaaatttagatacaagctcagcttcattgctactgatggaacatgcgaagcagagttcttttgttttgatagcatagccagaaaaatagtaggagaaccttggggcaaccttgttacagcagttacaacttctgagagtcccagcagccctagccgctattgtgtgtctgaaatttactcttgcagttgccatcaatatgtcagcctactatgtcacgaacagagtattctctattctatctattttaacaaatcatggaagacagaccttcataccatctaacatgcctagccatcctcaacaagagttgcatacacaagatgaagtacctagccttccgaccacacaagactctccagcaacatcaatggcaaaactatctacctgtagcaacgaaagaaacgagggtgatgatagcgcataagtgaactcaacaagcaagagatatcgtcaccaccaaaatggtgtttgctttttgcgcacctatcaggagcaccatcacttttggaccatgaatgcttccctatagatatgaacctactgttagactatttgtggatatgtacatattgacttaacacctgcaagcacactgttgctaagtgttgatgtatgatagttgaatgctacttagtatgtattgtagtctaaatccactctacaactggtatcaactattacataaaaacaacgttatatgctt

SEQ ID NO: 172575 - DNA, 386 bp, Zea mays
  Clone ID: MRT4577_88971C.1
caatggcaaaactatctacctgtagcaacgaaagaaacgaggcacgatgacgtgttctaatatattcagatatgccacatgacacagagggtgatgacagcgcataagtgaactcaacaagcaagagatatcgtcaccaccaaaatggtgtttgctttttgcgcacctatcaggagcaccatcacttttggatcatgaatgctttcctatagatatgaacctactgttatactatttgtggatatgtacatattgacttaacacctgcaagcacattgttgctaagtgttgatgtatggtagttgaatgctacttagtatgtattgtagtctaaatccactctacagctggtatcaactattatataaaaacaacgtcatatgctt

SEQ ID NO: 172576 - DNA, 157 bp, Zea mays
  Clone ID: MRT4577_88972C.1
atgtacttctacagagatggctaatacaattgggcaatctgttaatcatgaatccatgatcactttcaagttaaatccatgctttaccttaacttgtacaacactgaatcgcaatatgtgacctgtagatgttaatacatcttgttcagagagaaca

SEQ ID NO: 172577 - DNA, 2303 bp, Zea mays
  Clone ID: MRT4577_88973C.1
aattcggcacgaggtttgttaccgtcggtgtcgggaattccgcttccgcacaaatatttcttttgctgtcagcttgctcaacggttctgtttgtttggtgagatgtgttcctctttctcttttgttgtgagtttccatgtggtaggcatccttttccatattccttcgtggattggctccacgctcctctcgtcgagatcgtcttgctttttttctgagatggagattgggaccgaaaaggcaagtatttttctttggtagttttggcatgtgcagatagatcagaaagtgcttctacagtttaccccatttaactctattttggagattgaaactgaaaaggcaagtatttctttttgataaattctttcgcaagtggacttctagaaccaaatttttttaaagggatctggttcaaggttcatgcttggacctgccaggattcaattgtttttggcgtatcctcttgctttggtacttgtagttcagcaagcaaatattttcctcagactcttgctttgcactagaccacgtgactttctgtttgtactttactgaagttcattatacgatgttcttttggttatgttgttcgcatcaagtgcatgttatattctttttggtgtgtaatgtttctgctttcagcttgctcttgggtgcgtttattttttagctgtgtttcctttcctccaactgtgttctccttcttcctttgttgaccatttcgattttgtggacaactaatttcttttgcgtgaaatgatctcgacggatctgagattcatgtatatttgctttagagtggcatgacgtctggtccccgcaagattttaacctcccttttttcgtaatgtgtcaatcgctatcaaggaactaaatttgggttttcaagtttttaataatttttattaaaaacattgttactctccattttcaacaccaaaaagggatttgttttgtggtctcctatttggggtcatgacagcttttgcaccaaggatgctaaccgctaggtatactaaagctgttaggctttttgtagagatatcaatttggacttcacatgtgtaaaaaaactgttttttccaaattatgttcagttaacaacttcctcaagttttacttcttgtttttattgtttgggtttactaaattgctggaattcctgaggcgcatacctactacaacaggttgcaaaacaatgacctccaactaatacaacccacaacagctgaagaagaaatccagctttctcaaccaccaaatttggaagacaagaccgttgaagagctgctcaacatagatccggatatgtttcccgaagaaggatgtactgttactatatcaagcatcgtgcaaaatagcagatggtggtacccatcttgctccaggtgccacaaatcttcatctcaaacctcaactggatatcactgcacatcatgtggctgcacaaatattaaatttagatacaagctcagcttcattgctactgatggaacatgcgaagcagagttcttttgttttgatagcatagccagaaaaatagtaggagaaccttggggcaaccttgttacagcagttacaacttctgagagtcccagcagccctagccgctattgtgtgtctgaaatttactcttgcagttgccatcaatatgtcagcctactatgtcacgaacagagtattctctattctatctattttaacaaatcatggaagacagaccttcataccatctaacatgcctagccatcctcaacaagagttgcatacacaagatgaagtacctagccttccgaccacacaagactctccagcaacatcaatggcaaaactatctacctgtagcaacgaaagaaacgagggtgatgatagcgcataagtgaactcaacaagcaagagatatcgtcaccaccaaaatggataaaacatagccacactagcaacggcataccagatcttacagaccccaaaaagaaaagctcctaaatcgtcatcaacttcgtgaaggtgtttgctttttgcgcacctatcaggagcaccatcacttttggaccatgaatgcttccctatagatatgaacctactgttagactatttgtggatatgtacatattgacttaacacctgcaagcacactgttgctaagtgttgatgtatgatagttgaatgctacttagtatgtattgtagtctaaatccactctacaactggtatcaactattacataaaaacaacgttatatgcttaaaaaaaaaaaaaaaagacggacagctcgtaccgctttcaagcatccgagcgcg

SEQ ID NO: 172578 - DNA, 278 bp, Zea mays
  Clone ID: MRT4577_88974C.1
acgtaagctcggaattcggctcgagcgctgtcaaagcgcgtattaataagcagcaacgccaggcacttatcgggggccgcctacaaggagaggaggaggtgctggctgcagggggcagatggcttaccggaaagcgcaacaggccggacaagggggagaagctatgccgggcaaattgacccaagcagccatagggactgccatggaggcgactgccatcatgtatgccagcaagaccagcgccaacatgatggacagacccaagaaatacaagtacc

SEQ ID NO: 172579 - DNA, 581 bp, Zea mays
  Clone ID: MRT4577_88975C.1
ggaagatatctgagatcacaagctcaacatttttgcacatcccttacaggtgatagcatcacatcgtccacatcaatgacttcattggctgccagtcggtcaaattctttgagcacagctggtaaagaacccatggctgctggggtctcaagacgggcatctttgtccagtgatgctggtggccttcctctggatttgcttacttctatggctgattcaaatggacaaatctctgctgccgtgatggaacgtcttacagcagcaacagcagctgaaccttatgattctgtcaagcatgcatttgtgtcttatgggagctgcataactgatcttggagaaagttggaagtaccgaagccgtttgtggtatggtgttggcattccacccaaatctgatatatttggtggtggtggaagtggttgggaatcttggagatctattctagagaaggattcaaatgggatttggattgaatttccacttgtgaagaaatcagttgctgtgctgcaggcacttcttttagatgaatctggacttggtggtggtcttggtattggagggggatctggccctggtatggg

SEQ ID NO: 172580 - DNA, 174 bp, Zea mays
  unsure (1)..(174): unsure at all n locations
  Clone ID: MRT4577_88976C.1
ccgggaggtggagttgncgtggattacgcacccatctttgctcgacctgactagggaggcggacgaagaggccttcttcgccggcgaacggaagggcgagaaagagctagggcaagggaggagcaaaacagccaccagaaagatctactaaacaacatacagagaaacacagaa

SEQ ID NO: 172581 - DNA, 615 bp, Zea mays
  Clone ID: MRT4577_88977C.1
ggccgcttttttttttttttttttctttgttttttttttttttttttttttttttttttttttttttttttttttttttttttttttttttttttttttttttttttttttttttttttttttttttttttatgttttttttttttatggtttttttgtctttacattacattttttaaaaaagagggggggttgtatggcagcaattgatgctgctgaaggaaggcagtgaccaatgggttagccactggtaggggataaaggaacggccgcccgctggggagggtcgcaggaggagggggcatgggcaggtggaaggaagggaagcaggtggggcaggggggcggaggggttgggccagctaggctgggtaccacttgggcaatcggggggaacaattgttggtgcaggaatgaaagagcattgggcccagggaggcgggctagatgaaagcagtggttgttgttgtaggaaggcagaagggttcaccatggctaggtgactgagcgctggcagaaactgttgcagctgtaggtgtggctggtttgcaactacgtttgccagagcaagtgggtttgatgcaagcaactgctgttgcaagtaggcggcagggtt

SEQ ID NO: 172582 - DNA, 2055 bp, Zea mays
  Clone ID: MRT4577_88978C.1
atgtctcaagacaagaagacagttgctgagacgaagctaactgaagaggagaagctccttgaggagaagactgctggatttgttgagtcaatagcaaaaacaaatacagagaagattactaaagagatactggaaggcttgtctgaagatactgatgatagcgacaactatgatgtggagagtggaggcaaagactctgaagatcggccctggcgaccaagtcatgcagtcttcgggaaatcaactatcaaacagagtcatcttgataatatgagaggaagcttcgttgctcgctctggcgcaagctacccagtgccaacgtttcggaagagatggtccggggcctggatggaagagtggttttatgtgaaaaatgatttgaaggtgagagaagatattaaagagatcatcatgcgccccatctggtcccgcttcggccttcgaaagctgaaggtagaaattgacgaggcaaccgaagcctgcagaagggccttcggcacagtttgctcttttattgggacaagagacttacttcaagaacatatagcttacaggatatggccacttatagacagctgggaaatgccgaaagaaaccattgttaaccctagcgaaggtggcctggttcgattgaagtacaccttcaagttaggggataaatttgtcgaaccaaatgatgactgggtgaagtgcattgaaaatactagcgatgaattacttggaacatattccaagaccgaggacaatgcactatatgcggccttcgggagtcgaaaaaagaaaagattaaataggaaaagaaagggtacaacttctggaaaggttgccgcttcggccgctccagacgagcctgctcccaagagtaaaaaactgaaagtccttacccaccggccacggtatattgaaccggccgtggtgcctgaatttggcggagaaacttcttcaactgctaaaccaaaggagcccatctcccctacacagaaggctgaaaatccagctgtaatgccaaaggtaccctcagccgagttagctgagccgaagactgataaaactgaggagccaagaattggaggaacaaaaatattagaagttttaagcccttcggcaaaagtgacagtgccgaaggcacaaaaaggtcttgcggcaactcctaaaagaaaaaggatggcaagtgtactagatgtgctagaatcagtaaaggcttcaagctctattccttcatggaaaattgccgaagcttcgaaaatgcaaatcgaagctgaaacaaaaccagccgaagttgaagctgcagtgagccaggctagtgccgaagccagaccttcaaagcctgctgagaaaaaaccctcggaaattgaagagaaggcaacagaggaagaggctatagaacaaactttgcctgaaaaagttgtcgctcctgctcccaaagctttaaaagaaagtattgaatatatcatccatcatgcttcgggaaaaagactctctaaagaagaagaacgagaagctcaacactattcccagaagctgaaatatccaaagggggcattagtgttcaacggcagtgaagaggaagatttcttgtattgtctcccagatagcaaagatatatctgtttgctgggagatggttagaagctttggattcccaacgttagaagatggcctctcagtactgtcgaaagatgaattggccgatagtttggcatataatagtataaagcaatgccctcagggcacagaaaaatatcgaagacgaaggatgcacaatagctctgaacaaccttcgctcggaattgcagagcttcgcgcatccaaagaaagatgctttgaaaaatctgtggagtgtgtgaaaaagataaaggctagcttcgccaacgtgggcgcgtactcaaacgaagacaacttcatacgaggcgaccctgagggcgtcatcgagtggatcagtggtgaagccgaagcttttgaggagattttaagtgatcgtggggaccgtctgtgcattttctggtgcgagaggggttgcagccgttttggagaaggcagtttgcgaacacgttaa

SEQ ID NO: 172583 - DNA, 381 bp, Zea mays
  Clone ID: MRT4577_88979C.1
cccggcccggaatccccgggcggaccaacccttccgcttgggccggggacaacccaattcgaacctttcggaaagaccaaaaaaccggaggagatggttggtaccaagcagactgttggaaagtccacggaagggaaggttcccaggaagcagtttgccaccaaggttgcccgtaggtttgccccaaccactggtggagggaaaaagcttaaccgttaccgccctgaaactgttgccttccgggggatccgaaggtttaaaaaaagcactgagctgttgatcaggaagttgcccttccaaaggctcgtaagggaaattgcacaggacttaaaaactgatttgcgtttccaaagccatgcggggcttgccctccaggaggct

SEQ ID NO: 172584 - DNA, 867 bp, Zea mays
  Clone ID: MRT4577_8897C.1
cccacgcgtccggtgctctgtgctcagcctcgacttccaccctctctcccgtcgcctcactgcagccggcgtggaccacgacgtcaagatcttggaggtattgtcggatggctcggacggcaagtgtttgtgaccttggtaactccgttttcattaaccacacacctctagcaaggagtacaacctgaaaccaattggtgatgctggtcctgtaactgaggcgggagggatctttgcctatgcccggaagacatgaatgattgcgttgaaagctgctgcatgagggaaaggccaatccttggaggtgacaagattccttacccacgccggtgctgaactggtcgtcccccaactgataccgggttctttcagcagcaatgtcctcactatttctcctaaattaccaagattctcggacatgtacactctcacgatagcaagtgtagacccacagtctatcgcagcaaacaagccaatccatttcactaagagcgtgacaaagtgtgcacaaggccattctgtccaaacctggaattggcaaaatggtgctacctggtgactgaatgtattactacggcgcatcacagtgtatgtctgcaattgctctcatatggttatattgctccaggtttaatattgaaacgagactcttgactcgttatttgaaaagtgctcagagagggccaattgcattaggctcattcttcccagcatatctgacacacctcttccaagggcagctcgatggaaccgattgaatgcaagatgtattgttggtagcatgcatcaacacaactagaatttcactagatcttgtataagtagggtctaattttttggccgttcgcataacaatttctggaaaaa

SEQ ID NO: 172585 - DNA, 396 bp, Zea mays
  Clone ID: MRT4577_88980C.1
caacaacattcccacgccactcccagagctcctaacccggaaccacgaaggggatccatggcggctgagggttggctacgacctgcggcggaggtataactgccccgcctgctcttccggacttcccctcataccgcctgctacttccgggcctgtcaccgacgcgcaaacgctcagtggtccccggaactaggcgccggcggcgggccagccatggagctcatgggcgtccctaagaagaaagtctccaagtacaagaaaggcttgaggaagggacccaaagctttgaagcctgtgccagcgattgttcggtgcatgtgctgctgtcgaatgaagctaccacactcatatagctgcagtggagaaagaggaaactcaagcgagtcgaactcataa

SEQ ID NO: 172586 - DNA, 363 bp, Zea mays
  Clone ID: MRT4577_88981C.1
cccacgcgtgcggtgatgctcgctagcactatctcatcattcaattctgacttcagaacggggtaggctttccctgatacacagactcatgcccgaccaaatgtcgatcattgaactaactgaatccaaaacataaccatgatcacaacatcaggtgctttcccctacacgttgagttttgttactgatagtttcacaacatcgacagcaccaactaatgctgctacacacatcaacagtgctgcccaaggtagctcatctcagatatttaattctggtgtggccaagaacgtagagcaaccatctggatggtctggttattaactgcacatcgacatgcgttaaccatcattctggtcaaaa

SEQ ID NO: 172587 - DNA, 393 bp, Zea mays
  Clone ID: MRT4577_88982C.1
agagaaaaccattttaaggcccaacatgccatgaattacagggtgcgacgactgtgaccgactagaaagaagatgcccagcaccctattataaaggtgccatagaacacctgtttttatttacaccacctcactatcctatacggtctattagccaccgggtagagcatcacaggacggtgggcctgtcatcgcctacttcggggggggatctgggacacccacctagaagggccgcataccttttgcaggggatgcacactggtcaacgctggacaccaccccagataaggctgaatgctagaattgaaccacatgaccgtgatgatatcacatccttcgccaccagatcctgtgccacacacaggttgaccaatttgtaacacacactaaa

SEQ ID NO: 172588 - DNA, 599 bp, Zea mays
  Clone ID: MRT4577_88983C.1
gccggccgggtcggaaggcagacggacgcgcatccccgcaagcacgctcccgtgctctcgcagctcgcttctccagaggcgactagggtttgaaggctaccgagagggtgctactgggccaactcctccgaccgcccgcaggcgaaggagctctccgccttcccgccctcgtgtcatccttcccatcgcgacccgcgaggccacgagcccacgagctccagctcttgttattcggaagggttctggatttgggagccaagcgactggcgcagcggcagagcccggcggacacgctcccccctgtcgcccattctcttcctccccgagcggcacccccgcgtgttgccgcttgtagcatcggggaggtaatatgttctctccttctagtctatttaatgatttaatgaatgttgatattattactgaaccaattaggagaagccaattgaattgtaccatttcggtagcccctgatgggagttctttgatctgagtaagcacttctgcagatgcaccggtctatagtttgtaatcaaattagcatgatgaatggaactagtatcatttctgagtaaaaaaaaaaaaaaaaaaggccccta

SEQ ID NO: 172589 - DNA, 286 bp, Zea mays
  Clone ID: MRT4577_88984C.1
ttgggtccctcgggcggcagggatctcctggctatgagagtttagctcagcatatcggcacggcagctgcaccattacttgatctgagagttttgctcgcatcgacaggcacaggggtcgtcttctatctccgatgatatttgctcacgcaccacctgagacccagcacggactctcgcaaccaatgctcttgattgatgcgtcaaaaagcccatcagaaacagacataaacatttgggccgggccctccctttgactcttcctccgtacataggccctagcccat

SEQ ID NO: 172590 - DNA, 163 bp, Zea mays
  Clone ID: MRT4577_88985C.1
gccccaaccaagaacaatgagggcgtatataaaagggaaaaagtccaatgcaatataagatattcacccatacacacatccaagctaggcattttcaaaatttttcagcaggacgagctgtactaaatgaaaaagcatgatattcttgacaaactcaaatcaa

SEQ ID NO: 172591 - DNA, 401 bp, Zea mays
  Clone ID: MRT4577_88986C.1
ccacaaatgcgggagagcatgggctcgcagtcatcaagaactagagtctgcaaggtcgagtgcgacacagaccccagctatggcacagccagcggactatacgattgcgctgcctcagtggatgaagcagtgaacgactcaacactgacctattcaaggcgctaacggatgctagtcaacgcatcaaacagacctgtgctcaactgtgggctcttgctagagaggtgttatcaggcagatgatgtgaacctgcaccaggccgctctgctgctgatactaaaggcctcacatttttaacgtcttagctgctcgcctaagaactctagtggcagttgggcatggactacgcaagatagtctccgcgagcagggcaccgaccggttggctgctgctgagttgct

SEQ ID NO: 172592 - DNA, 887 bp, Zea mays
  Clone ID: MRT4577_88987C.1
acgagtctttcttctccgttccttccctcctgaaattctccgctcacgccaatcgaggcacgcaaatggctgagagcccgagctgagcaaccagccaaagcgagaaatccacttggagttggagaagcttctgcgcctccctcccgaacggaggcgggccggggcggggaggggagcacgcctgcgctctgcgcctgcgggtagggtttctcccggcccgacgatggcgtccgccaagtcgtcgaggtcgcggcccgccggccactccggagtgttcccggtgaacgctgcggccggcgcgggaggcagcgatggcggggtgcagctcgcggacaagctcaagatattcaagaccgacaacttcgaccccgacgcctacgtgcagtccaagtgccgcgccatggacgagaaggaaataaggcacctgtgttcctacttgcaagatctaaagaaggcttctgctgaagagatgcgcagaagtgtttatgcaaattatgctgcattcatcaaaacatcaaaggagatatcggaccttgaaggggagctactatcagttagaaatttgctaagtacacagtcagctttaattcatggtctgtccgaaggggttcagatagattcgttgaccacagggcctgaaggctctgctgaacaagacatatccagtgttgaggatcaggagccatcagaaatatggaaatggtccacagatttccctgacatgcttgatgttctgctagccgaaagaagagtggatgaagcactggatgccttggatgaggcagaacggatcgctgctgatgccaaacaaaagggaactctatccacgactgacattctggctttaaagagggtatatctgaaaaccgtcagaagttggctgatca

SEQ ID NO: 172593 - DNA, 491 bp, Zea mays
  Clone ID: MRT4577_88988C.1
ccggccggagatgtagatccctcgatgatgggccgtgcgaataaatagagtcacctaggatcgtctgtacttgatacttgcctgcaggatattgtggaccggaggctacacagtttctcaccgcaggcacttcaatgccttcgcattgctcccaacaccgtgtcgcagatctcgtccccaccttcactcccagcagaagagggtaagagacatgtgaagatcatcctgatacctagaatctcaagtcccagtgtcgagaacaggaaccacacgatgacgcgcatggaggatgccgcgaccagctctggagaggactaggccgtcgctctcccaaacaacttctgatggtgctacactcgatgtcaccttatatatcgtaattatttatttatatctgcccagaactcttataatatagtaaagatgtgacattcgatcgttttgcatgattcgtcgtatgtgatgaaacaagatcatgaatgttcgcggcc

SEQ ID NO: 172594 - DNA, 463 bp, Zea mays
  unsure (1)..(463): unsure at all n locations
  Clone ID: MRT4577_88989C.1
aagggnncggcgccagcgcgtccggtcccctcaaccgcgctcgcgcactgctgttacattttctgggctaatggcccgnacaccggcggacgcgggtcggatctgtgtatcagttagtgatggtttaaaccttacgggaggccttaacctcgcgaggcaacccgtctcacgtggtagtcctcgccggaccgactattgtgggacctgtcccgtctgcttcaaggtgcagtgtgatcttttgggtaccaacctcgcttgtcccggcaatcttactctgagtctcctgaggatggctctccatcctgcacatactcttgatttgagcctcaaatgatgttcacttgggagtggtcccgacatgtgtttggtgaaatgacaagcctggaaatgctggatttgtcggggaacaggttgtctggcgagatcccggggtctattggtgggttgatgtcactgagggagc

SEQ ID NO: 172595 - DNA, 346 bp, Zea mays
  unsure (1)..(346): unsure at all n locations
  Clone ID: MRT4577_8898C.1
tatctggtgtgacactgctcgcgctcttcatgnagcgagaaggatgagacacaatggttaaggcacttaccagtagtcaagcatgctagcaactgacaggctctactatggagtagactgcatagcttctacctcactctccatagtgaggtgcaagggtgtgaagttcagcgacagagctgttaactctgagctgttcctttngttaacagtcctatcgagactagagagttttatncccatcttggacgataaagacttcatcggcntgcgccaattctgactgagatttatgttttgccatttaatggaaagaaaaaaaaataaaaaagaaaaaaaaaagaaa

SEQ ID NO: 172596 - DNA, 662 bp, Zea mays
  unsure (1)..(662): unsure at all n locations
  Clone ID: MRT4577_88990C.1
ggccgcttttttttttttttttttctttttttttttttccaagacacagttgaaattggctaacccataaggagaacctgctaagaacatcgaacaccacggtgctcagctttccacagttcagccgcaaggctgacaaaacaaactggagctatcctacttatcccctctgaagctatacaggtggaacaagccttgattgtcaaaatccccatcctctccaatattttttttttgacaaagcaaactggacatggcacatctccatatcgttcatgtcaggcagttcccaagcacccagaaagtgggacagatagtcctgcaatgcctgcaatggaactagtcgctggagcagttagtcctaaactggctgcagctaacttagttgctggacctgatgactggggcttgggggtggcactgtaatctcatcctcttcatcagttggatctacattcatgtcaatgtttcttagggaaaagccctggcactgctcattggtgaagcaacctcttttgcttcagttgcaccggagacctcatcagctatctccacttctaggccggctagcttgctagattggttctcgacgaaatgttcatgagttgagacaacctccgccaagttccacagtccactgtggaagcctntgacacaacccc

SEQ ID NO: 172597 - DNA, 184 bp, Zea mays
  Clone ID: MRT4577_88991C.1
cacgaattcactgctggttagtaacagagaattctccggttaatgtctgctcttggcattctgatgtgttcttggcgtatgaacaacttagatcgttgacgattttccggcaagctggtgcatgatttttgctcgatcatgttcttactcaatgctgagtgcaactcagatacgctgcgtcttt

SEQ ID NO: 172598 - DNA, 836 bp, Zea mays
  Clone ID: MRT4577_88992C.1
gaggttggccgggaccgcgtgctgcactgcatacctatccctatcctatccgtggcgcctggccggtacagcgtgctgctgctgcgtcctgcgtgtactcaagcggcaagcactagcagccagccagccaacccaacggcgccctccacactaggcggctagggtttgtgacccgtgggcaccttctagagctagaacgccagcggcacatcgtcctcgtccagccaggcctctgcaggttatctgtgggtgtcgcgcgcatcgcccttggcccctcaccctcgcccttccctccaggagttgacatgattaagtgaagtattgatgaggagcttgattgctatatatttgatggacaagcatgatggaaagcacataaagaagaatatcctatcttgggcgagttttagtggtggtggttgtgtacttgatctatttcgtactcgtcttgatcctaccatggtagaagcacttgtctgcaccaaagattggatagatggagcaagaaaaggttccaaggctaagtgtgttgctattcctgatatggtttgtgaaatggaggaactcgaggctattgctataaatctttcacttgaggatgaagacctagatgatgatcatgatgagggacccaaggcatcattgtaagcttgttgatgaagacctaaatgatgataatgcgacatgaatgctatgaatgtttcttattgtacttgttgcgtaatgtttagtgaccttgcgaacttctgacatgtggacttgtggcattgtgaactttgtgatcaacttgttatattgtgaactttgtgaccaaaaaaaaaaaaaaaaaagcggcc

SEQ ID NO: 172599 - DNA, 704 bp, Zea mays
  Clone ID: MRT4577_88993C.1
cattgggtacctcgaggccggccgggccgggaagtgcaagtgccaactgcagtagctagcagcctgcctaacacagttcgtcatcgacctcgagggccggcaagcaatcaatcacccaagctaagccatggcgcctcgcagccgcctcctcgacctcgagaagcacgacgtgctcttcttctacggcgatggcgcctaccaccagagcgagcgcgtcagcgtggtcaccagagcgatcgccttctggcccgtcttcctcgtcgccgccctgctcctccacctcatcgcgccgttcccgcacgcggctgccgtctgcggggcgctctacgtcttcctcctcgaccgcgcagcgcaggcgagctgctccagctcgtggccttccactgccactgccgcgccgccggcagaggcctctcgccccactactcggtgcacagcggcaggctatacggtcgtgcagaattgaagccgcgatggctagcatatgctcgtgccatctttctcgttgcaggttgttagttggatgcttaccagttaccatgcttaattgcatgtttccattgtacgtagctgatcaacgtacgaagatggctgtggaatagagtggcttaagcacattccgcgtattacagaaaaaaaaaaaaaaaaaattcagcctagtcttcttccaaaaaaaaaaaaaaaaaaaagcggccctcgagctc

SEQ ID NO: 172600 - DNA, 395 bp, Zea mays
  Clone ID: MRT4577_88995C.1
cgctcactcaggcgcagagacaggcgtctatgtacgcgactatatgcgtgactcaaagcttcccctaattccatttcttatcacatttgtcactaccgccgttgatcaacacgatgaggaacagcatgagggagcgcatctggctgcacattgtccaggctggtatccagggctgagagccgtgctgggtgctgcactgccttgaggatggcggtcaggctgacggcgacatgaccggtgacgggagcaatgagggaggcgacgacgctttcagcgcgactgtcagtgagactgacgctgggaaggacgttctcggtgctgttgaggccgacgttgtgcccaatgtgaggactgaggcgtagactgagacctaccgtcaggtgcagcatactgag

SEQ ID NO: 172601 - DNA, 456 bp, Zea mays
  Clone ID: MRT4577_88996C.1
gcccgatcttgcttcagttagctaactaagcaggtaagttaagctagccttaggcaccaagccgagccgtcaagttaatcgaaaacaacaagccatggcctcaaccaccagttgaccggtggaaatcgcttggctggtggcggggccgggctttttcggggcggcggggatgaactggacaaccttgcccccaaaggtaacttccaacgtggtggccggggccaaccccttgaaggccaaggccgccttcgccagcttaaggcagttaaacttaacctaacccttgccgttcggtttcgtgaaggaaaggctcgagttccttgacgtggacaagtgcgagtgcaagtccacgctcgtcgagggcggcggcaatcgcgtggccatcgagaccgcgcgtcgcacgtcaaggtgagtccgcggcgggcggcggcttgctggtgaagtggactcgcgtac

SEQ ID NO: 172602 - DNA, 1086 bp, Zea mays
  Clone ID: MRT4577_88997C.1
cctcgaggccggccgggccgggtcttcaccgcgcttgcatcctctcatcgccaccccaccctcctcctcctccctgtctttctccccccacctctctctccccctcttgacaaattttcctccacccattcccttcctcccctcttcttcttctccacccactccaccgatccccctctttctctctgaattctctctcgtcgtgcccacccttcccatctgtctgctgcccctctctcgcaatcagtcactcggctcttgtttcttccgtctgctgggttgattctctctctttctctccgtggagaaacaggaggagagagagggaagaagagaaatcggaaccagcctgttctttttgcctggattgcggttcttgcgagttgttcagaaactctgggccagtttctgattcggaatgcacttgaaatgattcaaaggggggaaaatgtaaggctcgagtctatcttctatggcggcctcgacattcatgacagacacagggacatgcgccttgacattgacaatatgtcctatgaggaactattagcacttgaggaaaggatcggaaatgttagcactggcctcagcgaggaagctgtgataaagttgctcaaacaaaggaaattttcatcgtggagactaaaagcatctttggacccagaaccatgctgtatttgccaggaggagtacgttgatggagacgatctcgggaggctggactgcgggcacgacttccatgctggctgcatcaagcaatggctggtggtgaagaacgtgtgccccatctgcaagaacaccgcattgaaagcctgaaaccgaacaaaggcgacacacccatgttccatgtccattcgatcggtcgcaagatcatttacccgattggtttttactatgcgttttttggttgggaaaattttgccatttcacctgggaaagtggtgggggggtgttggaggtggaagagaagatggcggtccctgtaaactgctgctgcagtaaataatccctggaatttgtctccctgcatttaaacaaaatatttatggctgttataatggacgccgtcgtagggtttataactcg

SEQ ID NO: 172603 - DNA, 3491 bp, Zea mays
  Clone ID: MRT4577_88999C.1
gccggccgggccgggctctcccaccgcgcttgcatcctctcatcgccaccccaccctcctcctcctccctgtctttctcccccctctctctccccctcttgacaaattttcctccacccattcccttcctcccctcttcttcttctccacccactccaccgatccccctctttctctctgaattctctctcgtcgtgcccacccttcccatctgtctgctgcccctctctcgcaatcagtcactcggctcttgtttcttccgtctgctgggttgattctctctcttcctctccgtggagaaacaggaggagagagagggaagaagagaaatcggaaccagcctgctctttttgcctggattgcggctcttgcgagttgttcagaaactctgggccagtttctgtaaagttgacatattttggtggcaaatgttgaaggaatagcctagataaagcgtagcctcgttctgtatcccgttcatttcagtccttttcttgtgttccaataaagttggagcacagttctgttgcccaaaatgtttgatgtgttacttacaaccggcaggtcctttaaaatactggaaagaggaaccatcagagatgctaaggcaacagaccaattgatgttatctcgctaccctagtttggatcatcacaatgcaagggcagaggaattctgtggagcattttgctgatgtttttggattcgacattgcatctagttcaggcaaccctgtgatggatcagcagtcatattggaacaatgttcttggatcagtagaatctcagaatcttcaaggttatcagatgaatcacagtgatgctgccatgccatatgggaatgaggcagagcaagatggtacatttcttggtttctgggaatcaggagaagcaagtgcaattggcagctctaacaatgccaatacagagaatcttagtagtggcgagtttcggagaacctgtgatggttcaagagtaataatggaaatacttgcttgccacaggggaatgagatagactaagatggtacatttcttgtcttctggaaatcacccgacgctagtgcaagtgacacctctaacgatggcacaatagagtagcttatgagtggcggggggctcaggattggcgggaggcgactggtagctgacaatggcatttctctggatgtggatatcaaccttaacgccaacgttaacgatctatgtggtcaaagttcaaatgttaactgtacatctcagggccctgagcactatggtggcggtgatcgtagtgttgtaaattctcagccaactgacctgagattacacccatacaggactttcctactagatgcagagcaagcagattcttttactttgaaccctagtgaaaaccctttgtgtgatttttcactgatgcaagaaagcattgaccaaagacccggtagttccctggatggacgccggctagcctgcgagagaaaaaatgttgtgggacttcatggccagaggtcagcaggtgctagcactaatttttcccacaggaacgacaatgctatccgtaaccttgcttcttcaagatacaatcgtgaaactgttagtaaaccgtagtcaccctttatcttggacactaaaagtatctttggaccctaaaccatgttgtatgtaccaaaaggagtactctgagtcggtacgactgcgcgaagttggactgcgagcacgacttgcacgttggcgccatcaagcaatgcctggtgtagtagaactcgagccccatctccatgtgcaccgtgttgaactagacctgttatccgaccaaaggctcgtgtgagagataagccacctcattttcaaagtgcatttgatgatacccaggaggttattcctgtggtcagcagcctcaacttgcaataccagcatccagtgaatgtttctagtgtgccaccggctgctaaccgtttcactggccatggagcttcatcatcgagagctggcagtttggagaacagaattcttggtagtgaagaggttcctaggaggtatgccgcgcctgccaactactctgatttagttcccccacctgcagtagacccgagacgtttggtgccagaaccatctaattggagttctgatgtccgaggcactgcaatatcaggaagtattattcctcctgtatcaagaactaataacagtgcaacagttaatccgccagcaggattcaatcaccaaaacctcaccagacgccatcctcgaaatttatcagaggagattggtcgtctatctggagcactccgcggccatcaacccccacgcttaaggtcagggtttctgttggagcgtcagggcgatggtgtttggggcgttcctttatcaacaaggggtagagaaggaagaaggttaatggagattcggaatgcacttgaaatgattcataggggggaaaatgtaaggctcgagtctatcttctatggcggtctcgacattcatgacagacacagggacatgcgccttgacattgacaatatgtcctatgaggaactattagcacttgaggaaaggatcggaaatgttagcactggcctcagcgaggaagctgtgataaagttgctcaaacaaaggaaattttcatcttggagactaaaagcatctttggaccctgaaccatgctgtatttgccaggaggagtacgctgatggagacgacctcgggaggctggactgcgggcacgacttccatgctggctgcatcaagcaatggctggtggtgaagaacgtgtgccccatctgcaagagcaccgcattgaagaagacctgaaacccgaacgaaggctcgtgtcagagacaccccccccccccccaagcaatggctggtggtgaacaacgtgtgccccatctgcaatccgattcgtattgctacgctttttttggtcgggaaaattttgccagccacctgcgattgggaaaggaaaagagagaaacagagagagagaggattccaggaggagttcgtttatggaaacgttctcgggaggttggactgggggcacgacttccatgctgggtgcatcaaacaatggctggtggttaaaaacgtgtgccccatttgcaagaaccccccattgaaggcctgaaaccgaacaaaggcccgtcaaagacccccccatgttccgtgtccattcgatcggtcgcaagatcatttacccgattggtttttactatgcgttttttggttgggaaaattttgccctttcccctgggaaaatggtgggggggtgttggaggtggaaaaaaaaatggcggtccctgtaaactgctgctgctgctgctccagtaaataatccctggaatttgtctccctgcatttaaacaaaaaatttatggctgttataatggaccccctcgtagggtttttaccttgaaagataaaaaaaaaaaaaaaaaaaaaaaaaaaaaaaaaaaaaaaaaaaaaaaaaaaaaaaaaaaaaaactcgaggggggaacccgggtaccca

SEQ ID NO: 172604 - DNA, 388 bp, Zea mays
  Clone ID: MRT4577_8899C.1
agctagcttaatcaatcacagcatttagcagtgggcttcccataacacaggaaacaaattacagtgggaaatgatttcacaggaggcgtgggcttatgtatacacatgcatagccgaaatgcagagatcccattggccatatcttctactgggggtgggtgtggttttttttatttttgaccctgctcctaccgtgtctggaacacacggcagggcgctcaggtcagtgacttcaggtgcagcagaacgctagcgctcaggtgcgagctgcactgagctcggagctgtttgtatgagccattcacccttgacaagaatgtgtgctggacccaaatgttatttggctggttgtaattcaacaacagacatgcgccacgcaacacaaggg

SEQ ID NO: 172605 - DNA, 1131 bp, Zea mays
  unsure (1)..(1131): unsure at all n locations
  Clone ID: MRT4577_889C.1
cattgggtacctcgaggccggccgggatgacctacattcaaccaaacgcacctcccagtgcccgtggcgacgacgggcgattgcgagccaccgccctcgtgaagcacctcggacacggcgactgccgactgacccggtacactgtttctccctccccatttctctctctcctgcgctgggtttaacgcagcggtaggcgatttcccccgatgcccccgtcgtgggtttgtccccgtggaaagaagcaccgctcccgtggaaacaagaagtcgttctagggatccaagatggcggcgcggatgctcatcgccgatccgcccagaatactacgccgtcaagcccccaagccccatgcacccacctctccagccactcctcccgctgccaaaaagccagatctggttgagcgcactgcagatttcgcggtaattgtttcatcgagactgccgtctccagcgcccggtggaccgccgccggtgtgcagcgacgacatagaactcgtcccagagactccacagttcagggtcagcttgattaggcaatatggttatccctccaccagctagggctcctgcaatcaccaagttcctcaagccgtatattttgaagatgcatttcacaaacagttttgtgagcgctcaggtcatccacacaccgacagccacggtcgcatgctctgcaagctctcaggagaaactcctgaggccaagcatggagtcgacacgggatgttgctgcggctgcaaagattgggaagttgcttggagagcgcttgctgttcaagggtatccctgcagtatctgtctccatgtcaagagaccagaagtaccatggcaaggtcaaggccgtgatagattctctaagaggtgttggtgtgaaattgctgtagggaaaactgactgttttatgagaggttatgttggggcctcatgtttacctccgaagctgcttggcggtccattagtttcgtgactgaattttcttatgggtgctgctgaacaatatcttgaaccatgtaagtccttgttcggttgttcctatacatcatggattggaaaagaaaatatgaaagattttgacttggtatggattggggctcatccaaaaaaggggaanncnataaaaaaaaaca

SEQ ID NO: 172606 - DNA, 406 bp, Zea mays
  Clone ID: MRT4577_88C.1
aagcagctgaaccgtccgcctgtttatattaacaaccgtgtggttaacaaccgtcacatagatgtgatttaacacacaaacccacacaatcccatcgtcatgacgccaagatcgtgtccgagtgcgactgtgcgcgcgtctccgtctcgcttgttttaagcacggcaagggaagaggacaacgggtggacgcttggacaaacagccttgtcgagtactctctctttctgtcctcccacagttccgctcgattccaagagtccagcgccacacgacatcctccgcgcggccggccatgggggaagctgcggatccggcgacggggagggtggcaccgccgatgtcgtggcgtacgcggttctccgtgctcgccgcggggtacctcaccgacgccacgtgccgcgccg

SEQ ID NO: 172607 - DNA, 2366 bp, Zea mays
  Clone ID: MRT4577_89000C.1
gcaggattcaatcaccaaaacctcaccagacgccatcctcgaaatttatcagaggtaattttctccctccatttttcgcattttgttttctccgttttttggttttcagtttgattgctcatcttttcaccaaaatatcaagtagcgtcatacttgaaatttgattgatcatcttctcgatttgatcttttattttcttataggagattggtcgtctatctggagcactccgcggccatcaacccccacgcttaaggtcagggtttctgttggagcgtcagggcgatggtgtttggggcgttcctttatcaacaaggggtagagaaggaagaaggttaatggagattcggaatgcacttgaaatgattcaaaggggggaaaatgtaaggctcgagtctatcttctatggcggcctcgacattcatgacagacacagggacatgcgccttgacattgacaatatgtcctatgaggaactattagcacttgaggaaaggatcggaaatgttagcactggcctcagcgaggaagctgtgataaagttgctcaaacaaaggaaattttcatcgtggagactaaaagcatctttggacccagaaccatgctgtatttgccaggtattttctgtactccatagcttctcaaaactgtgtgcctttttttcttctgttggccatgacgtttcattcacatacatcaatcacattgaattgttgaaaaatgtgcattttgttgtctcaaattatgttcattgggcattcagttggttcacttaggccatttcgtctacaatgaaatgctgctttaactaaattggcgaacaaagattagaagggcaagttaaatcatgctaagcctgtctatttataccatctaggtctccaaaggagaacctgttctggtaggtctgtggttttctattaattaaagattggaatttagaatgtctgtcttgtcccttgagatttccatgtctttgttcttgataactagtgtctcatgaaaggattacaatctgactctagcatttacttccattggaccactcaaaataccattaggtgattggaaagattaggtacaatgtgtgggattatttgcattgaaactctcaagcaagccagtcatccaactaatgcatccttcctcctgcaccccactgcagcctaagacacgtaggaaaccaatcagcaaataacacacctaacattgtacaggcaaaccaaatatcagcaaattgcattgtcttttttcctggttagagtacgctgcataacctctaatccaatactaaggcaagtaaccagtgaggccttaaaatacacagatttggaggggaagatgcctctctggatacatatgtcagactcatgatagcaaataacatcaactccagcaacaaaacttatagggcctctttggcagggctctagctcctctagaaataactcccaactctagctcctttgcaagagcagctccttgacatgagccattgttttatttgaaaaacgtttggcactgtcaacgctcacttttgccgtcagacgagcgccaggatatgcatgtgaatgcgtcgtggagccgcgtggagccactttttcaggctccagcttctgaccgcaaattggctcctgctccctggtcggagctgtttttgacacgctgtttgggagggctccggcaaggagccagagccggagctgctcaagagccctcccaaacgggctcatagcagatagctgtatatttatagcaaataacatcaactccagcaacaaaacttatagcagatagctgtatatttaccaggatttccagtgttagaaaccatatacatcagtatctgtcgtgaacatttgctttccgcctgtgaacatgctccctgcatcacctagctttgttacaaagcaatgaagttagcagttgaacaaggctaatacatactcatgctctttctcgctctccaggaggagtacgttgatggagacgatctcgggaggctggactgcgggcacgacttccatgctggctgcatcaagcaatggctggtggtgaagaacgtgtgccccatctgcaagaacaccgcattgaaagcctgaaaccgaacaaaggcgacacacccatgttccatgtccattcgatcggtcgcaagatcatttacccgattggtttttactatgcgttttttggttgggaaaattttgccatttcacctgggaaagtggtgggggggtgttggaggtggaagagaagatggcggtccctgtaaactgctgctgcagtaaataatccctggaatttgtctccctgcatttaaacaaaatatttatggctgttataatggacgccgtcgtagggtttat

SEQ ID NO: 172608 - DNA, 756 bp, Zea mays
  unsure (1)..(756): unsure at all n locations
  Clone ID: MRT4577_89001C.1
gccgggnnagagagagagagagagagagagagagagagagagagagagagagagagagagagagagagagagagagagagagagaggcgtttggtggtggcgtgggctgttacatatgaatatcatgattcatgatccagatgattattaatggaattctttcatttgtttctagtaaaaaaaaaaaaatacttttgtgtgtgtgtgtgtgtgtgtgtgtgggtcgtgggtgattctttcttagatactgagagagcagaggttatgtgagagattctagtgggtgtagtagcgatgggctgttacatatgaatatcatgattcatgatccagatgattattaatggaattctttcatttgtttctagtaaaaaaaaaaaaaaatacttttgtgtgtgtgtgtgtgtgtgtgtgtgggtcgtgggtgattctttcttagatactgagagagcagaggttatgtgagagattctagtgggtgtagtagcgatgggctgttacatatgaatatcatgattcatgatccagatgattattaatggaattctttcatttgtttctagtaaaaaaaagaaaatacttttgtgtgtgtgtgtgtgtgtgtgtgtgggtcgngggtgattctttcttanaactgagagagcagaggttatgtgagagattctagtgggtgtagtagcgaggggctgtcacatatgaatatcatgattcatgatccaaaagattattagtggaattctttcatttggttcctag

SEQ ID NO: 172609 - DNA, 249 bp, Zea mays
  Clone ID: MRT4577_89002C.1
actaggaggcggccttccgtggctggggaaagatttggttttttaatataccatgattcatatgctttgcggaaaaccagtataggggtctaaaaagcacattcctgtcccaacaaagatgaaagtgccatacattatgtggtttccccgtccataagcggacccttttatgttttttttacaagggagtgagctaaagtaaagtgccttaaccctttttttttaaaaccatggatcaaatttggcagg

SEQ ID NO: 172610 - DNA, 213 bp, Zea mays
  unsure (1)..(213): unsure at all n locations
  Clone ID: MRT4577_89003C.1
gttagtccgggaccaccaggccggcacctnaacgccgagtgttgcggcggcggcggccccggccccggccccggccccgaggccatccatctacccgcccatgggcgcgctgcgggacgaggagtgcgctaatcttctggccctgctcntcaccgggtgcgtgccgctcgaggacgccgtcgcggatttacactctacgcgtgccccccgatc

SEQ ID NO: 172611 - DNA, 475 bp, Zea mays
  Clone ID: MRT4577_89004C.1
attattttttttttttttttttttttggaaaggcacgatcaaatatctgactggatcgtgatctagaggcagatagcttgtttaacatgtgctcctaagtcgtatgttaaaaaatcggaaacaacgtgtaaaatttctcggaacaggttaagcaacagccacgttcaagcagtcaagggattcaccagtcggtccaggtagtcagaagactcagaactccggtgtatacacttgcaaaatgtttccatcatttcaaatgctgtgctctccaatcaacagcaaaatctgtgttgtcatcctcttcatcgctcgatgagtcactgctggagtccgagtccataccgataggttttctatttactctagcagtacgggcggctttcgactctactagctgtttcttcaacatatcaacctgctgcctgtactcctgttgctctagagtcaagtactcctccctctcagcagcagcatc

SEQ ID NO: 172612 - DNA, 580 bp, Zea mays
  Clone ID: MRT4577_89005C.1
aatccacatgagataggaataaccgaacaagcccttctatggccgggaggattgtcgagtgttcctggaataaggaagagaagctttgggcctgtgtgcgtattagatctgataaatcgactccaaacgacatcaacacataccggaaggtgatgagtatatatcacggataagaaaagcttctccacgcggacgacaaaataaaagtaagagcaccttgaagaagaatttgaagtggaagtggaaggggagcttgttcctccatcggaaccttctccaactgaggttgtcactgaaggtcctccagaaggtgtcccatttggatttgctgctaactgcaatatcctggtcgaagaacccgactctcctcctcaccaaggagaaactatcaacacatatgagttttgttaaactcataatggtgacttttacttgtgtacattatgtgggtgctgcgggaagatggtttcttcccagttgatgtaataagttagcactttaactctacctcgggcatgtaataataaatactttgtggtttgtaaacttattagcttgttaatgtatattatcttattgt

SEQ ID NO: 172613 - DNA, 531 bp, Zea mays
  Clone ID: MRT4577_89006C.1
cccacgcgtccgcccacgcgtccgcccacgcgtccggaaattcaggaggatttgcaggaagttgatgaccgccttgaagaagaggagattgatgctgctgctgagagggaggagtacttgactttagagcaacaggagtacaggcagcaggttgatatgttgaagaaacagctagtagagtcgaaagccgcccgtactgctagagtaaatagaaaacctatcggtatggactcggactccagcagtgactcatcgagcgatgaagaggatgacaacacagattttgctgttgattggagagcacagcatttgaaatgatggaaacattttgcaagtggtatgaactattgtggaaagtcagaacctttagtatccagaattctagctcagttcagtttttttacatgtagaaaacactgtagtttttacatcttttatctcattttgtagtatacaccggagttctgagtcttctgactacctggaccgactggtgaatcccttgactgcttgaacgtggctgttgcttaa

SEQ ID NO: 172614 - DNA, 315 bp, Zea mays
  Clone ID: MRT4577_89007C.1
aaaacacataaaccaaaaaaacaaaaaaaaataaaaaaaaaaaatgagagaaaaaaaaaaagcgtaaatactaacaaaaacaatactcacaaggccatgacctccaccctgctcaccctttacttctctatcatccgacctaattctacttatctagcctctcttctacaaatttaaatcctatgcaatctttcacctttaccaactttaaatcccttgatacacctaacgttaccatctatctctttaatcccatttatgcattcacctatcgccctaccatataacgaacccattcttacttgcgaaccttac

SEQ ID NO: 172615 - DNA, 230 bp, Zea mays
  Clone ID: MRT4577_89008C.1
tttcaacaaacaaataaacatcacagtgatgtttgaatccaaggacatctcacttattcaactacaaccatccccatttcctattacaatgccatagcaataaaaaggtacgccaatataaacaaggtgcccaaccatcactgaacactaaaataaacgtcccaaaaatataaacactcccccgaaaaattcacatacatggtccaaatctacaactttcgcaccctata

SEQ ID NO: 172616 - DNA, 141 bp, Zea mays
  Clone ID: MRT4577_89009C.1
gtcgttcagccgcagattagcaggccgcctacgctcctcctttcccctcagcctcccctcatctccggtgtacgtctccgccgagatgaccgcgccgctccagcgaaggtccactcccatggtcgcgcgcttctcacgccg

SEQ ID NO: 172617 - DNA, 351 bp, Zea mays
  Clone ID: MRT4577_8900C.1
ggggggggaaaacccgagctgggggggtttaaaaatacaaaaattttttcatggcccgaaaaaaaccaaatcaaattgccccccccggaaaaaagggggggggcagttccaaaatccaaagtaacaagagctttttacattaaccacagcaaaagctcaaaccggggggaaaaactttttcaaattgaaggggggggaaaaaaacccctcgttttttgtattggccctgaacaaccggaatttgccccaccaaagggagccccgggctttcctgaatgaaacttaatgcctgaaaaaaggggggcccaacaaatatgccacaaaaccagaaaaaaaccccttggacgaaaa

SEQ ID NO: 172618 - DNA, 436 bp, Zea mays
  Clone ID: MRT4577_89010C.1
gcatccgtccccgacagcccgctatcggttcatccccaaccccgcggcagaccaccgctagattcatcctcaacccgcggcggacgcgcgcctccgttgacacgcatcgcggctacatccatccccgacccgcggcggacgcacgatttcggttcatccccaacctgcggcggacgcgcgattccagccgacgctcaccgttgctgcagccgtacgacggcagtcgcctcccggttccccttctcatactccctcacccctccttgaagcgaccgcattacacaagattcgtctttgggtccacaatcgacgcattgcgcctgtcaacaaaaatttcgtcacataaaaaggtagattctgcgcaaaacatgaagcacgtggaccgtccccgactaatcctaagcgtataacaattcagtcaagccaggagtgcttc

SEQ ID NO: 172619 - DNA, 1293 bp, Zea mays
  Clone ID: MRT4577_89011C.1
acacgaaccccagaagctttacttgtatccaagtgcttgtatgtgctttatgtacaaggacaacacaattacatggagtggttagcacatccgttatgttatcttacaacagcacgagcacctcacgtatgcatcaaatccgcatctgttggatattcttcagcgaaatgcagaattggaggttccttcctaaccaacacagcaagtcgtagaaaccgtaacatccccagttctacatgatcgacggaatcgagtcattcttatccgagaagaatgacaggtttcgaaatgcatcgaggctatttgccatcaggcggttccaattccaactactttgactgtcccctatcagtatgtcatcggtttgatatctcacagccggtatgtccaagtccagtggtccgagtgaatcaggccaatatatgtcagctaaaggttgatccttcaactcattagttttgtcatttcgaggtggtgatttagcataaaactcctcttcgtctttggcgtcatcattacaaggattatcagcatcagtctctcgtccagtcaagtcctgaagaaaacctcgaaatccttctgaatttgaaggatgaacttcattgtcagtatcaggagagctgctgtcgacgcggccggaattcagagtgtttgaaccttcttgcttcctggaggactagttcctccgcagtccaaatgagtgcctttagatgcttctgtcagtaagtgcccaaaactgatatttgtaagggtatctgcccactctactgcagatattgccacacaattcattccctgatcatcctcaaaagcttgagttataggaacatgcgcttgcttttggctgccaaactgagaggggggcacattagctggctgatccggaagctcagagttcttgcctgtactggatggtgtcatatgcaataacattgaactgcaaggatatgactcatgagtgcaattactgagcaaagtaccatccttttgcacacaagccttatctcctgatggtgatttgacttggatgacttccggtctcatgcaatcttcaaaatgtgttaaagatatgtcacttactcctgctccaagctcaacaagggaaaaccaaccataccttaaacggaaaacagaagggctattcacagaaagaaacacatcagcgactgcaacagtatctcttgttgtccatctctgatatgtagccaaatcctcttgattagcacaatacggaaaaagaataagctctccagatgcgatgtttgagttaccctagatccattccgagctttc

SEQ ID NO: 172620 - DNA, 521 bp, Zea mays
  Clone ID: MRT4577_89012C.1
gacgcggagaactttatttttatcgacacggccaacgaccaataccgggccggctacgggggcgccaggaccacgccgcggagggagaggaagctcggcgcccgggaccaccccgcgaacagcgaggacctgccggaggccgccgactggagggacaacggcgccgccgccgaggacaaggaccagggcggcagcgggagcggccgggccctctcaacaaaagcagctgcggaaggcagcagccagagtgccacaggcggctagacctcctcgccggaacaagagcgagccgactgcgacactccgtacaaacaggggtgcaatgaaggccggacggaccaagcatctgagaccatcaccaacaaaggcggaatcgacaccgagaaggatgaccctcacaagggcacggacggacggtgagatggcaacacgaaaaacgcgaagggagccactattgacagccgcgaagaggaaccagcgagcgaagacaagagcctgaacgaagggaggggcccaccagc

SEQ ID NO: 172621 - DNA, 1509 bp, Zea mays
  Clone ID: MRT4577_89013C.1
gggccccccctcgagttttttttttttttttttttttttttttttttttttttggtcattaggcaaacttatcttatactcggccccaggaagctttacctgtacccaagtgcttgtatgtgctttatgtacaagggcaacacatttacatggagtacaggttagcacatccgttatgttatcttacaacagcacgagcccctctcatatgcatcaaatccgcatctgttggatacccgtatcagcagcaaacagctcacttgggcaatataaagctccctcttccgggaatggcagattggaggttccttccttaccaaaacaaatcgtggaagccctaacatccccagttctacatgatcgatggaatagagtcatttttatctgagaagaatgacaggtttcgaaatgcgtcgaggctatttgccattagacggttccaactattttgactgtcccctataagtatgtcatcggcttcgtatctcacagacggtatgtccaagtccagtggtccgagtgaatcaggccaatatatgtcagctaaagattgatccttcaactcattagttttatcatttcgaggtggtgatttagcataaaactcctcttcgtctttggcgtcatcattacaaggattatcagcatcagtctctcgtccagtcaagtcctgaagaaaacctcgaaatccttctgaatttgaaggatgaactccattgtcagtatcaggagagctgctatcgacgcggccagagtgtttgaaccttcttgcttcctggaggagggttctctggctgacaaattaaagatgaactcatcacatgtctcttctgctccccatatggttgaatggggagcatgggctgactgctctgatgcttgataacgagaagcatgaagggcaacagcagcatcaaacgagtcatagctgcatggattctcaaaaaacaaaggatttttatttaactacactagttcctccgcagtccaaacctgagtgcctttagatgcttctgtcagtaagtgcccaaaactgatatttgtaagggtatctgcccactctactgcagatattgccacacaattcattccctgatcatcctcaaaagcttgagttataggaacatgagcttgcttttggctgccaaactgagaggggggcacattagctggctcatctggaagctccgagttcttgcctgtactagatggtgtcatatgcgatagaaattgaaaccctaaccagtcagccatgccagcgtgctcgaggatgtcgacggtgtactggcgctggtgcagaaacaggccctgggaccgacgctccacggtgatccccgagaagtggtgcagctcacccaggtctttcatcgcgaactcctgctggagggaggaaatgatgcgccgcaggaggtcgtgggaggaggtcgtgaggacgatgtcgtcgacgtagaggaggaggtacgccatgtccaggccgcgacggaagacgaatagggaggtgtccgccat

SEQ ID NO: 172622 - DNA, 504 bp, Zea mays
  Clone ID: MRT4577_89014C.1
cctcgaagccggccgggaaaatgttcaccactcatgtcgatcctctgtctataccactgctcccgtcttgtcgtatcccgctggtggatcgtgctgaaagtctttgcgcagagggcagtgtattctgtcctgccgcaaccctgcagcgcaaggaaatggactgccaactgtccccagtaagcgtgacgcgataacatgtaccatgtgacttcctcaacagactggtgatcttgtacatgctctactaagtgcccttaaggcttgagaagccctggattccagcgagatggtcgctccactatgaaactcgtcgactcaaggacaacatgatgttgtcgcctgtttgttggattaaccctgacaaaaacatgtgtggccaaggcggacgcggtttttgcccgagtagaaacctatctgatgttgtctcgaccccaccactggagatctgttatctccaaaagggattaacgacggccgcaataaatggccttctgccatgtctgg

SEQ ID NO: 172623 - DNA, 595 bp, Zea mays
  Clone ID: MRT4577_89015C.1
atcccatccatcacagctagctagcgcaccgacgaataatctcttcttcacctcactagctaacaccagctagcagctcgatcgctctgtcctgcaataatggccgctcgctcctcctcctcagcagctggtcgcggcggcggccctggcagcggtgctgctgctgctggcggcgggggccggcacggcatccgccgcggtgagctgcggcgaggagacgtcggcggagaagacgcgcctcgggaacacgatgggcagcgcggagacgccctccacggcgtgctgcaacgaggtgcgctcgctcaacagtccgcgcgtccgactcggcggaccggcacgccacctgcaactgcctcaagagcatgaccgaccgcctcggcggcgccgacaacatgtgcaacgacagcaacatccccggcaactgcggcgcccccgacacggtgcccatcaggcccaccgtcaactgcaccaagatcaactgaacgatggaaccatagtggaagtagctcgctcggtggatgccagccaacgagtccatcaagagcatgcattacgcgacgcagcagagatgacctagctactggcgagcgatgca

SEQ ID NO: 172624 - DNA, 195 bp, Zea mays
  Clone ID: MRT4577_89016C.1
gcaaacaaacggtttttgctagatatagtattcttgctttacatatttcaaaatatgaatacagaccctcccccttgtttgggagaaaataccttttaaacctttgcttttgttccacactctcacccaaatgtgctcaaactatactggatcatatatcacaaacaaagggcctcgtccgctgtttgcctggat

SEQ ID NO: 172625 - DNA, 278 bp, Zea mays
  Clone ID: MRT4577_89017C.1
cgaccttgaagctttactaatatgctgaagaacaaacagtcgatgccagtgaatattcgggcttcgatgcagcagcagcagcagcaagccagtgccagaaacagaagactggcccagcagatggagaatagaccctctgtccaggcagcattaaaacttaagcagaagagcttaaagcagcgcctgggtaagagtaatatccaggcacggttaggccgacccataggtgctctggccaggggagcaattggaggaagaagccttcccataatccaaga

SEQ ID NO: 172626 - DNA, 298 bp, Zea mays
  Clone ID: MRT4577_89018C.1
gagaccaacacagtttggccagaaccacaacaggcaacgcaaaaaaaaaaagggaccgcccccagccggtgcgaaaaaaaaaaaagaaattgggaaactggcggcaaagaacacaggtaacagaattccacccaaaacggggttttgaattaaagcaaattaactttgggactggtgcattcgactcggataggagccaaaaattcttacggggattttactgggcacacaaaggaaacatagagctttgggtaaattagggtgggggattggccaaccaccaccattggcaggaccc

SEQ ID NO: 172627 - DNA, 747 bp, Zea mays
  Clone ID: MRT4577_89019C.1
atgccgccaaagaaggcaatagcgccagtggctgccattgcaccattggacatcaaccaagaagggctccctctgagagaagcccgaaaccagaaaaggaaggccatcagcccaacaccacaagaagagggactagaccaagagatcagagacctagaggccatccaccaacatgtagagagaaagagagagaaaatgctttggctagctgaacttcaaaagaagattgatgaagctaccaaagagatgcgccatatcacgcaagactggcaaggacaaaggctacatcagagagagtttcgtcaagaaagcccaagctatgatgatgtatggtatgatgatttccatcatagtaactttgcttttgatgatgcttctcctctagcagcagagttagctcaggcgccaatggtgccaaatgagattgttatcgaggctatgatcaaggggctccgaccaagaccaacagcgcaatatttcgctaggaagcccccacaaactttggagaagcttatgcagaagatggacgagtacatcaggaccgacaatgcctttcgacagagaagggaagaagtctatagatactccaagatgaccaggggcttcgaggaatacttcaccctaggcatgtcaggacgatccataatcctagctccagcgacaacaaaggaaatcaaactcaaggacatcagcacaactcccaatcttcagggacacaaaaaagctctttcaggccaccagctttaa

SEQ ID NO: 172628 - DNA, 737 bp, Zea mays
  Clone ID: MRT4577_8901C.1
cgggtttgtcttttccctacacccaaaaccccaatttcctgccaccagagcacaaggaaagaaatgaatcaattcgcccctcagcaatcgtcgctcgccatggactcaggggagagctccgccgcctccaacgccgcccacgcggcaatggccgtcgactacgcccccgaggtcgccggctgcgtttcgtccatggtcgacctcggcggcgccgccggcgtggagagccagcgcctgttcctggcgcgccgcacggcgctggagatgctgcgggaccgcgggtacagcgtaccggaggacgagctcgcccgcaccctcccggagttccgcgcgtggtggtccgagacgcccgagatcgagcgcctctccttttccacaaccctcgcctccgacgagtccaacgaggtgcgaattgtgttctgcccacctgagcccgtcaaaatcgcagccatccgggaggtgtatgtccgaatcaaagaagagaacttgtcttgcctgattctgattttgcagagcaaaataacatctagagctagggagtccatcaaggagatgttcaaattcaaagtagatgtattccagatcacagagttactggtgaacattactaagcatgtcctgaagcccaagcatgaagtgctgactgcagaagaaaaagcgaagctcctgaagcagtacaatgtggtggattcacagttgcctcgcatgctagagaccgatgaagttgctcgctacta

SEQ ID NO: 172629 - DNA, 405 bp, Zea mays
  Clone ID: MRT4577_89020C.1
cggaattttgggtcgaccacgcgtccgggcattggtcagaacagacttttgagtgctgcctatctcaattttcagtatcacaaacacattctagagcctgcagcgggggtcattatacctgcgtagatactgaattctattgatttcaaacccttttctgtgttgcggcgtcaagataatattcctcgacttgttatagaaaggtcttatgctttggagccctgaccggttctctcttaggagatgttgcctaccgcttgttgaaaaactcctcttcagtatcagatcttggcttatgctggtggggttactttatatgaccatacattaggtgcatccctatgtgtcctggaaagtagaccaaggtctggctgggtcatttggggccttgataggggtatttgt

SEQ ID NO: 172630 - DNA, 366 bp, Zea mays
  Clone ID: MRT4577_89021C.1
gttgctgtagatggactactggaggatgcacaagacgaatgtacgatctctaatcttgaattctattctttgttcctactctatacatcctgggatacatccttttctttttcttttgaaagaagtcgttgagtaattttttttacagaaaagtttttccagcttcgggtcattaacagtcatttgtgattggttacagggaaagatgctggaggacgaacacaagatactgacttttaggatggtaattctcccccatctgaatagcagttgaaactttgcttgatcatccttcctcctttcaactccttagcataacttatcagtatgcaatattctaaacaaactcaatgttccgagctaacc

SEQ ID NO: 172631 - DNA, 231 bp, Zea mays
  unsure (1)..(231): unsure at all n locations
  Clone ID: MRT4577_89022C.1
aatctccagaatctagcccttgtttgtgcttgtgctttgaggcttgttgttgctcttcccactcttacatctgtgcttctttgtgataatctcattgtaagggcgagaggctctaagttgtggagattcctcgcaaacgggaaagagtaaagaaagaagaacaccggggtattcaagttgaaaaatgccccttaanncaantgggtttncagngaatttttttttttttta

SEQ ID NO: 172632 - DNA, 560 bp, Zea mays
  Clone ID: MRT4577_89023C.1
gtgttctttcctactccccccccagcccgctccgcgcttgctcactaccgatcccacggggagggcccggcggccaatctccgcctccagcatcgtggagcctcgcgcctccgcctcccactcccgagccggcaaccgcggcagcaggagcggcgagaggaggacaaggcgaaggcccgagaggacgcaatggagtacagaagagtgaaggatcaggagagttatgacgccatatctcagaaggacatagaaagccctgatgggaggtctctttctagcactgcagcaacttccccccttggcaccgcaggaggttcgaagggcaagaatagttggaagcaaaagtctattgtaacaattgcgttgacattactaacaagttcccaggcaatactgattgtgtggtcaaaaagagctggaaagtatgaatatagtgtcacaacagcaaacttttcggtggaagctttaaaatgtctattatcacttctagccctgtacagaacatggaacagtcaaggtgttacagaagataataggttaagtacatcattttgacgaag

SEQ ID NO: 172633 - DNA, 670 bp, Zea mays
  unsure (1)..(670): unsure at all n locations
  Clone ID: MRT4577_89024C.1
ggtacccccgggtcggccgggactccgtcctgcctntaataacatagcagcagccgccatggaaggcagagcagaagctcagccgttcctcctcacgctgctgctggtgctctccaccgccgtgacgcccatcctctcgctgtcagtgccagacgacgagggagcccgggaccgggacaaacccaaggggcccaagccggcggacccggccaagaccaagcccttccacccggcggcgaagcccaagaaccccaagccacccaagggcgggaccgggtacccggcgcccgggcaccaaccggccaagagccccttctaccccccgggcggcgggccttccaagggccccggcacgcgcccggcagtcacgcgttcggcggtcggcgggccttccaagggccccggcacgcgcccggcggtcacgcgttcggcggttggcgggccaccggtgacctacccggcgatcaccgggccttcgacgacgccggctggtggcgggccaccggtgacctacccggcggtcaccgggccttcaacaacgccggctggtggcgggccaccggtggcctatccaccggtcactggcccgcccgcgacgacgccaccggtcaccgggccggccgtgacctacccacccgggggtggcgggggcaggttgacgccgggcccg

SEQ ID NO: 172634 - DNA, 5588 bp, Zea mays
  Clone ID: MRT4577_89025C.1
caccaaatgtggccgttggggagccagtctggtgaatggcgcaccggacagtccggtgcacaccggacatgtccggtgcccctgccacgtcatcagtgccgttggaatatgaccgttggagttctgacttgtgggccacccctgatgtccggtggcgcaccggacagctcctgttcattgtccggtgcgccagtatgggcaaacctgacgtctgcgcgcgctgcggcgcatttaatgcctctgcaggtggggatggacctccgcccgtttttgatggtgacgattttccttattggaaaattcgtatggaagcatacttagaggctatagacattggtgtctacaaagccgccacacaagggttccccgaacctagagatctcacaaatcttgtaggtgatgagttcaattatgagaaatggaatgctaaggccaaaaataccctttttagaggcctttgcaaagatgtgttcaatagagtaaggaatcataaaaatgctcatgatttgtggatggacatttgtgctctacatgaaggaactagaagtgaacgtgaggaaagatatcacatagccatgcgaaagttaaattccattgaaatgcttactaatgaaaatgcaaatgctatgtactcacgacttaatattcttgtagaggaagtcaatggattggggcttactcaaatctcacaaccggatgttgtgaggaagattctcagtgtcctcccaatagacaaatatggacacattgtcactgtgctacatcaaatggatctttcagttaccacacctacacaaattttgggaaagatcaatgcccatgaaatgtacatgcacatcaacgacaaagaagaatcatcttccaaaagaaaggatttggctctcaaagcaaatcatgaaagaaaaggaaaagcaaaaatacaagttgaggaagaatcctcaagtgatgatgaccttgatgcaaacattgccttgatggtaaggaagaccaccaagatgttgaagaagctaaatagagaaggcatcaaatttgattcaagaaagaagaagttcttttccaacaaaagaaagcccatttctgagatggactgctacaactgtggtgagcttggtcatcttgctcatcaatgcaacaagcccaagaagaacaagttcaagggcaagaaggaagatgacagcgatgatgaaaagaaggaaaagaaattcttcaagaggaaggatgggaagcaaaatagattccacaagaagaagaatggaaaggcctatattgttggcgactggctcaccgacatcgaatcatcaagtgggtcttcttcaagtgaagaagagaatgatgaaaaagttgcggccatcgccggggacttctcttcaccaccaccatcgccatcatccactgctcacctatgcctcatggctaggggtgaacgaaaggtacaaaatgatattaatattgatgatgatagtgatagtgatagtgatgaagaatttgcttcaccttcatatgatgagttagctgacttacttaaagaatatactcaaatcattagaaagtcaaaagctaaatgtgataggttgaaaaatgaaaatgaatctttaaatgccaagtatgacatagttataaaggctagtgatgaaataaaagaagaaaataaaactatgtcatcaactgtaaatgagctcacaaactccctaaaagatgctaaggaaaaatatgacaaattaaatgaagctaatagggagttgcaaaatagactagtaaagatcaaggaagactatactcaaattaaatttgatcatgacaatcttcttgttgaaaatgaacttttatcttgcaaaacacatgaggctattaaccctgttgttaagcttgatgtagcaacctcatgtgatgatttgattcaagaagagcaaactagtctacatgctgaattgactgaaaaagttgaagtcctgactttagacaaccaaaaattgaagaattacttgactgatgcaactactagaggaaaagttgctattgagaacaatgatttcaacaatgagttggcagtggataatcaaaggcttaagaatgaggtcaagaaactaaaaagtgaaaatgaacatcttgcaacaagtgtgcaaaagttcaacaagggtcaatacctccaaaatgagctgcttatgaacactgttatgaaaaataacaagagtggtattggatacaatgcttttgtgcaaaagaaagctatcactcaatacaagccaaagcagactcacaagcctatcaaatgctttgagtgtggaaatgaaggtcattttgcccacaactgcaaagctaaaccaccaactcccttgcctaagcactcaagaccatttgctttcaatgctcactatgttctaagaaaggttgtaaatggaaagattaaggtgaactacaagaccggtgggagccattgggttattgacagtggatgcacacaacatatgacaggcaacccacggatgttcacctcactagatgagaatgttgatggtcaagataaaatcacatttggagacaattcaaaaggaaaagtgcaaggacttggcaaggtggcaatctcaaatgatttatcaatatcaaatgttcttctagttgcacccttgagcttcaatttattatcagtgggacaactctgtgatcttggacttaaatgcttattcactccatcagagggatttagatacaacaacctctacttagtggatttcacttcagaagatgcagacttaagaacttgcctcttcaccaaagcttctcttggatggctttggcataggaggcttgcacatgttgggatgagcacactcaagaaggtattaaagaaagatatggttagaggtttaaaggatgtggtgtttgaaaaagacaagccatgcagtgcatgtcaagctggaaagcaagttgctaatacacatcctactaaagctttcatgtcaacatcaaggccactggaacttcttcacatggatttatttggacctacaaattatgtcagtgccggtggcaacctctactgtctagtgattgttgatgacttctcaagatacacttgggtgttctttctccatgacaaatctgaagttgcatctatattcaagaagtttgccaagaaagcacaaaatgaatttgattgcaagattaagaagattagaagtgacaatggcaaagaatttgacaacaccaacattcatgagtactgtgatgaaattgggatcaagcatgaagtatctgccacatatacacctcaacaaaatggagttgttgaaaggaaaaataggaccttgatcacccttgcaagaacaatgattgatgagtataacacaccggagaggttttgggccgaagctgtcaacactgcttgctatgcatcaaacaggctatttcctcaccggctacttgcgaagactccttatgaactgctaaatgggaaaaagccagacgtctctttcttccgggtgtttgggtgcaaatgctacatctacaaaaaacgccatcatctagggaagtttcaaagacgttgtgatattggttttcttttgggttattcattaaagtccaaagcatatcgagtattcaaccatgccactggcgtggtagaagaaacatatgatgtggaatttgatgagactaatggctcccaaggagcacttgaaaatcttgatgatgtaggtgatgagccacttagggaagcaatgaagaacatgcctattggagctatcaaaccaaaagaagatgaagaagaggtgcaaatcattgacaggccttcttcatcaaatgtaccacaagatgatgaaaaagatgagaggcatgcaaatgaagatacatttgtctctcatgaacaagcaagggtacaagccgaagatgttgatgctccaggatcttcttcccaagtggttgacaggagaaactcatcactacttcaagctcatcctcaaaaccaaatcatcgggagtccttcacaaggggttattactcgatcacataaacatgctaattttattgaacatcactcttttgtttcttgtgttgagcctacttgtatagatgacgcgctacaggatccggactgggtgaatgccatgcatgaagaacttaacaacttcacccgtaacgaagtttggaccctggagaagcccccacaagatgcaagaatcattggaacaaagtgggtgttcagaaacaaacaagatgatcaaggtgtgattgtaagaaacaaggcaagacttgtcgcaaagggattctctcaagttgaaggcttagattttggagagacctttgcaccggttgctcgactggaagccatccgtatcctacttgcatatgcatcatgctatgatataaaactttatcaaatggatgtaaaaagtgcatttttaaatggcttcataaatgaacttgtatatgttgagcaaccgcctggatttgaagaccctagatatcctaaccatgcttacaggttgtccaaggcgctttatgggctaaagcaagctccaagggcttggtatgagcgtcttcgcgacttcctcatcgaaaagggcttcaagatcgggaccgtcgacacaactctcttcacaaagaaacataacggtgatattttcatttgtcaagtatatgttgatgatataatctttggctcgacaaatgactatcattgcaaggaatttggtgagttgatgtcgaaggagtttgagatgtcaatgattggtgagctaacatacttcctcggctttcaagtcaagcaaatgaaagatggtaactttctctctcaagagaagtataccaaagacttgttgaaaagattcaacatggagaagtgcaaaccaatcaagacccccatgcctacaaatggacatctcgacttagatgagggaggtaacccggttaatcaaactctctaccgttctatgattggtagtttattgtaccttaccgcatctaggcccgatattatgtttagtgtctgcatgtgtgctagatttcaatctaatcctaagaaagctcaccttcgcgctgttaagagaattctgaggtatctcaggcacaccacaagcgttggtctgtggtatcccaaaggagctacttttgatttaattggctattccgattcggattatgccggttgcaaaattgataggaaaagtacttctagaggatgccatctgcttggtacatcactagtttcatggacatccaaaaagcaaaatagtgttgccttgtcaactgccgaagcggaatacattgccgcaggtgcttgttgcacacagattttatatatgaaacaaactcttctagactatggcgtagttctagaaaaagtacctttgttgtgtgataatgagagtgctgttaaaattgctaataatcctgtacaacactctcgcaccaagcacattgatatccgtcatcacttccttagagatcatgttgctaaaggagatatcattttagaaggagtgaggtcggaagatcaattcgcggatattttcactaagccacttgataagacccgcttttgcatgttgaggaatgaactaaatattcttgatctcagaaattttatgtga

SEQ ID NO: 172635 - DNA, 4042 bp, Zea mays
  Clone ID: MRT4577_89026C.1
atgttcggtggggatggacctcctcccgttttttatggtgacaattttccatattggaaaattcgtatggaagcatatttagagtctatagacattggtgtctacaaagccgctacacaaggattctcctcacctagagatcccacaaatcctgtaggtgatgagtttaattatgagaaatggaatgctaaggccaaaaacaccctttttagaggcctttgcaaagatgtgtttaatagagttagaaatcataaaaatgctcatgatttgtggatggacatttgtgctctacatgaaggaactagaagtgagcgtgaggagagatatcacattgctatgagaaagttaaattcttttgaaatgcttgctaatgaaaatgccaatgctatgtactcacgtctcaatattcttgtagaggaagtaaatggattggggcttacacaaatttcacaaccagatgttgtgaggaagattctcagtgtcctcccaattgacaaatatggacacattgtcactgtactgcatcaaatggatctttcagttaccacacctacacagatattgggaaagatcaatgctcatgaaatgtacatgcacatcaatgacaaagatgagtcatcttccaagagaaaggatttggctctcaaagcaaatcaagaaagaaaaggaaaagctaaagtacaaattgaggaagaatcctcaagtgatgatgaccttgatgctaacatttccttgatggtgaggaataccaccaagatgttaaagaagctcaatagagaaggcatcaaatttgattcaagaaagaagaaattcttttctagcaaaagaaagcccatttctgagatggattgctacaactgtggagagcttggtcatcttgctcatcaacgtaacaagcccaaaaagaacaagttcaagggcaagaaagaagattacagcgatgatgagaaaaaggaaaagagattcttcaagaagaaggatgggaagcacaagaggttccacaaaaagaaaatggaaaggcatatattgttggtgactggctcactgacattgagtcatcaagtggatcttcttcaagtgaagaagagaatgatgaaaaagttgtcgccatcgctggggacttctcttcaccaccaccatcgccatcatcgacttctcacctatgcctcatggctagaggtgaacggaagtgatagtgatactgatgaggaatttgcttcaccttcctatgataaactagctgacttgctaaaagaatacactcaaatcattaggaagtcaaaagctaaatgtgataagttgaaaaatgaaaatgaatctttgaatgccaaatatgacatagttatgaaagctagtgatgaaatgaaagaagaaaacaaaactatgtcatccactgtaaatgagctcacatcctccctaaaagatgctaaggacaaatgtgacaagttaaatgaagctgatagggagttgaaagatagactagtgaaaatcaaggaagactatactaagattaaatttgatcatgataatcttcttattgaaaatgaacttttatcttgcaatacacatgaggctattaaccctgttgttaagattgatgtagcaacctcatgtgatgatttgagtcaaggagagcaaactagtctacatgatgaattgaccgaaaaagttgaagtcttgactttagacaaccaaaaattaaagagatacttgactgatgcaactactagaggaaaggttgccattgagaacaatgatttcaacaatgagttggcaatggataatgaaaggcttaaaaatgagagtggtattggatacaatgcttttgtgcaaaagaaagctactactcaatacaagccaaagcagactcataagcctatcaaatgctttgaatgtggaaaagaaggtcactttgcccacaactgcaaagccaaaccaccaactcccttgcctaagcactcaagaatatttgctttcaatgctcattatgttctaagaaaagttgcaaatggaaaggtgaactacaagaccggtgggagccattgggttattgacagtggatgcacacaacatatgacaggcaacccatggatgttcacctcacttgatgagaatgttgatggacaagacaaaatcacatttggggacaattcaaaagggaaagttcaaggacttggcaaggtggcaatttcaaatgatctatcaatttcaaattttctcttggttgcacctttgagcttcaatttattatcagtgggtcaactctgtgatcttggacttcaatgcttatttactccaatagaggttattatatcaaaaatggatgatgaatcaatggtgttcaaaggatttagatacaacaatctctacttagtggatttcacctcagaagatgtagacttaagaacttgcctcttcaccaaagcttcacttggatggctttggcataggaggcttgcacatgttgggatgagcacactcaagaaggtattaaagaaggacatggttagaggattaaaggatgttgtatttgaaaaggagaagccttgtagtgcatgtcaagctgggaagcaagttgctaacacacatcctacaaaagctttcatgtcaacatcaaggccactggaactacttcatatggatttatttggacctacaaactatgtaagtgttggtggcaacctctactgtctagtgattgttgatgatttctcaagatacacttgggtgttctttctccatgataaatctgaagttacatctatattcaagaagtttgccaagaaagctcaaactgaatttgattgcaagatcaagaagattagaagtgataatggtaaagaatttgacaacaccaacattcatgagtactgtgatgagattgggatcaagcatgaagtatctgcaacatatacacctcaacaaaatggagttgttgaaaggaaaaataggaccttgatcactcttgcaagaacaatgattgatgagtataacacaccggagaggttttggtccaaagcatatcgagtattcaatcatgccactgtcatggtagaagaaacatatgatgtggaatttgatgagactaatggctcccaaggagcacttgaaaatcttgatgatgtaggtgatgagccacttagggaagcaatgaagaacatgccaattggagctatcaaaccaaaagaagatgaagaagagcctacatgtatagatgaggcgctacaggatccggacttggtgaacgccatgcatgaagaactaaacaacttcacccgtaaccaagtttggaccctggagaagcctccacaaggtacaagaatcattggaacaaagtgggtgttcaggaacaaacaagatcatcatggcgtgattgtaaggaacaaggcaagacttgttgcaaaaggattctctcaagttgaaggcttatattttggagagacctttgcatcggttgttcgactggaagccatctgtatcctactcgcatatgcatcatgctatgatataaagctttatcaaatggatgtaaaaagttcaattttaaatggcttcataaatgaacttgtatatgttgagcaaccacctggatttgaagaccctagatatcctaaccatgcttacaggttgtccaaggcgctatatgggctaaagcaagctccaagggcttggtatgagcgtcttcgtgacttcctgatcgaaaagggcttcaagatcgggaccgtcaacacaactctattcacaaagaaacataacagtgatattttcatttgtcaagtatatgttgatgacataatctttggctcgacaaatgactatcattgcaaggaatttggtgagttgatgtcgaaggagttcgagatgtcaatgattggtgagctgacatacttcctcggctttcaagtcaagcaaatgaaagatggtaactttctctcacaagagaagtataccaaagacttgttgaaaaggttcaacgtggagaagtgcaaaccaatcaagacacctatgccaacaaatggacatctcgacctagatgagggag

SEQ ID NO: 172636 - DNA, 291 bp, Zea mays
  Clone ID: MRT4577_89027C.1
acctaaacgcattcaacgatcattttttattggatcatcctgaacacttcttaaacaatcaatccttcaattatgaccccgatagccaacgcgcctgggcctgggccccgccttttttggctggaaccgatgccgccataaccaccaccgggggcgctaagggtgagggcccccccacattatccaacgggggcacatttaccacgacgaccgggctcgcctgtgatgttattggccgccggaaacccaatccccgggatcgccgaggaaaacaccgtcactacaacctaa

SEQ ID NO: 172637 - DNA, 274 bp, Zea mays
  unsure (1)..(274): unsure at all n locations
  Clone ID: MRT4577_89028C.1
gccgctcgagacggncgggncggctcttcaccaaggaaactctcaaatcctagtcgttcccctgcaagtttcagagatcaggaatctgcgccatggcgagtgagacggagaccttcccacttcaggatgagatcaaccagctgttctcactcatcatcaacaccttctactccaacaaggagatcttcctccgcgagcttatctcctactcttccgatgctatggtactaatctggttcgagagtatccctgacaagagcaagctcgatgcgca

SEQ ID NO: 172638 - DNA, 1686 bp, Zea mays
  Clone ID: MRT4577_89029C.1
ctaaagtagctgctgctgaagtgcatcctgcctgtcctgcatgttctgaaacatcgagagcatcctctcggataaccgggcctgctcggccgccaggtgagccagaatcgaagcaagagcagggtccatagcctgaggaggagcaagggcagcactagaactcccagcctcatgatcatgtgagcggggaggcataggaggtggaggcggaggaagaaccccaaaatcatcatcatcatcatcatcagctgctgtaccctgagtgtcaaactgtcgaagagctgcatcctcggcctgagagtcaaaaacaggagcagaagctggcacaggaatctcaggcgcaggacggtaggatccaaaaactaggcgagaggcctcaagggtgccctgaaaccgagggggctgaatcagctgcgcaaagatgtggcacaagtagtgagcatagggcaactgacgacgagcacgaatcccatccaaaacggtgtcctcgatctcacaaatcaggaagtccacaacgtcaaactcagagtgggagaccagggcaccaaggagccaaagctgaatatgagtggtagcctccctgtatcccatcctcggcagaagagttcgtctgataagctcatagagaaacttggctgctgtagtaaaatctgccggtgaacgtcgcgacccatatgaaaagggcgggcggaacagagccgcgacgtgagctgtacccggagccacaccgccgtgagggcgacgaggggggtcagaggtgccatagcataagctgtgaagacgagtcgtcgactcgtgaaatccaaaaagctggcggatctgactggcagtaatggcgacatcctcgcgctcaaagcgaaaccgcatccagtgatgatccgggtcaatccaaacagaggcgtaaaagactcgtacccactcctcaacatacctgccgctgatagtcagaagggtctgaaggccaggcagataggtgaggtgcgcctcagagtcagcaccggctgcaagcagaaaggctggaagatccaaaagccggtgcactcgtagagctatctgagcagatatctgagctctgaaaaacgattcctgaatacgtgtgctgaaaaggtcacctgctgcagggtctctctgagctggtagccaagactccacgggtacgtatctgaacctacgtacccgtgccgctatagcacgctgaaggtcaaacagtcgaggatccgaagccaaaggacgaacctcagtctcatcgcgctcccggaatcgaggtggagggacaggaggagctgaagcgggagcgggaggaggaggaggagcagtggaagctggcgtagtggaggtagcgggtatggctgtggaggtggatggagcaataggagtgacgggagcaggcagagtgggtggcggagtggaagcggaggtgtgagtggaggagcgaggccgggaggcgaaacaacgaacacggtatgcaatctgatcggatggagcctgcagctgatctccaagctcggcctgcgcagcggctgctgcagccgctgccgctgcacgggctgctctgtccgtacgccgcttcttgcggccttcctgctgctccaagtaaacagtcttgcccttgacctgcctgaaggggcgacgaggatcctcatcatcgcctccccctggcgccgacacattcttcgtgcgcggcat

SEQ ID NO: 172639 - DNA, 282 bp, Zea mays
  Clone ID: MRT4577_8902C.1
ggacacgaaagctattggccatttaaacgaaggaacaaagcctttgggggggggggcaaaaaatgacagaaaaacacgcttggggggggaaaacaggatgggatatcccgggtaaagccgccaggggtgaagttggatcccagggggctatatcactggcaaaagcagacaaggaacaaaggttgatccatgcctaaaggaatggttgggcacgacccaagggcttagcttcgacagcaactcacaaagggggaacaaaaaggaatttatcaccgaaaaatc

SEQ ID NO: 172640 - DNA, 636 bp, Zea mays
  Clone ID: MRT4577_89030C.1
ttgggaccctcgaggccggccgggcagcgcggtgccgggcgcagcggggagcgggaggagcggaaggagcgcgagcggggaggccgggatggcggtcctcggcttcatccttttgtccccgttctggtccctcgctggcgccgctgccgtggtcgaatcggccacaggcttcacgccgctccgccggagcttccagctcctctctaccgcccgcctcgcagcgctctcctcgttcctggtattcgccgccgggattggggtcacgctctggggcttcggcggtgtggctgccgagaggtacgacgctggggctgggtgggctgggatggcgcctgtggtggtcaaggcaggggctggtttagtgctgctccccgcccccgatgctgtacgggatggtggacaacgatgtgctctacatgcactgtctgcgcgatgcacgcgagagctcgcaggtctagatctacacatgagatcgccaacatgtatgttctcctgacctatgacaatggtacagatccccctgtcgtgtcatggagcacggcgaggtcatgatagctttgagaggaagcgacccaggggatgatctgccgtgcatgccagccctgggtttccttgcgcgaaaaagagctgaaatgt

SEQ ID NO: 172641 - DNA, 5341 bp, Zea mays
  Clone ID: MRT4577_89031C.1
taagtgcagtacgtcatgcaatatttcaagaaccaacaattgcatagcaagtaagaatttaagtgctaaaagcttaaaactaagacttgtcaagtttgacccgagttaagctttttcactcgctttgttggcggttatctcaactaggttagacaagccctagatgcaatacaagaaatttaaacatgcaatgcaagcttgacaacaccatttgacattttacattaaatttctgagatcaagaatatttagttcattcctcaacatgcaaaagcgggtcttatcaagaggcttagtgaaaatatccgctaattgatcttccgacctcactccttctaaaatgatacctcctttagcaacatgatctctaaggaagtgatgacggatatcaatgtgcttggtgtgagagtgttgtacaggattattagcaattttaacagcactctcattatcacacaacaaaggtaccttttctagaactacgccatagtctagaagagtttgtttcatatataaaatttgtgtgcaacaagcacctgcggcaatgtattccgcttcggcagttgacaaggcaacactattttgctttttggatgtccatgaaactagtgatctaccaagcagatggcatcccctagaagtacttttcctatcaattttgcaaccggcataatccgaatcggaatagccaattaaatcaaaagtagctcctttgggataccacagaccaacgcttgtggtgtgcctgagatacctaagaattttcttaacagcgcgaagataagctttcttaggattagattgaaatctagcacacatgcagacactaaacatgatatcgggcctagatgcggtaaggtataataaactaccaatcatagaacggtagagagtttgattaaccgggttacctccctcatctaagtcgagatgtccatttgtaggcatgggggtcttgattggtttgcacttctccccatgtgaaccttttccacaagtctttggtatactcttcttgtgagagaaagttaccatctttcatttgcttgacttgaaagccgaggaagtatgttagctcaccaatcattgacatctcgaactccttcaacatcaactcaccaaattccttgcaatgatagtcatttgtcgagccaaagattatatcatcaacatatacttgacaaatgaaaatatcaccgttatgtttctttgtgaagagagttgtgtcgacggtcccgattttgaagcccttttcgatgaggaagtcgcgaagacgctcataccaagcccttggagcttgctttagcccataaagcgccttggacaacctgtaagcatggttaggatatctagggtcttcaaatccaggcggttgctcaacatatacaagttcatttatgaagccatttaaaaatgcactttttacatccatttgataaagttttatatcatagcatgatgcatatgcaagtaggatacggatggcttccagtcgagcaaccggtgcaaaggtctctccaaaatctaagccttcaacttgagagaatccctttgcgacaagtcttgccttgtttcttacaatcacaccttgatcatcttgtttgtttctgaacacccactttgttccaatgattcttgcatcttgtgggggcttctccagggtccaaacttcgttacgggtgaagttgttaagttcttcatgcatggcattcacccagtccggatcctgtagcgcctcatctatacaagtaggctcaacacaagaaacaaaagagtgatgttcaataaaagaagcatgtctatgtgatcgagtgataaccccttgtgaaggactcccgatgatttggttttgaggatgagcttgaagtagtgatgagtttctcctgtcaaccacttgggaagaagatcctggagcatcaacatcttcggcttgtacccttgcttgttcatgagagacaaatgtatcttcatttgcatgcctctcatctttttcatcatcttgtggtacatttgatgaagaaggcctgtcaatgatttgcacctcttcttcatcttcttttggtttgatagctccaataggcatgttcttcattgcttccctaagtggctcatcacccaaaagaaaaccaatatcacaacgtctttgaaacttccctagatgatggcgttttttgtagatgtagcatttgcacccaaacacccggaagaaagagacgtctggctttttcccatttagcagttcataaggagtcttcgcaagtagccggtgaggaaatagcctgtttgatgcatagcaagcagtgttgacagcttcggcccaaaacctctccggtgtgttatactcatcaatcattgttcttgcaagggtgatcaaggtcctgtttttcctttcaacaactccattttgttgaggtgtatatgtggcagatacttcatgcttgatcccaatttcatcacagtactcatgaatgttggtgttgtcaaattctttgccattgtcacttctaatcttcttaatcttgcagtcaaattcattttgtgccttcttggcaaacttcttgaatatagatgcaacttcagacttatcatgaagaaagaacacccaagtgtatcttgaaaagtcatcaacaatcactagacagtagaggttgccaccggcactgacataatttgtaggtccaaataaatccatgtgaagtagttccagtggccttgatgttgacatgaaagctttagtaggatgtgtattagcaacttgctttccagcttgacatgcactgcatggcttgtctttttcaaacaccacatcctttaatcctctaaccatatccttttttaatactttcttgagagtgctcattccaacatgtgcaagcctcctatgccaaagccatccaagagaagctttggtgaagaggcaagttcttaagtctgcatcttctgaagtgaaatccactaagtagaggttgttgtatctaaatcccttgaataccattgattcatcatctatttttgttacaataacctctgatggagtgaataagcattgaagtccaagatcacagagttgtcccactgataataaattgaagctcaagggagcaactaagagaacatttgatattgataagtcatttgagattgccaccttgccaagtccttgcacttttccttttgagttgtctccaaatgtgattttatcttgaccatcaacattctcatctagtgaggtgaacatccgtgggttgcctgtcatatgttgtgtgcatccactgtcaataacccaatggctcccaccggtcttgtagttcaccttaatctttccatttgccacctttcttagaacatagtgagcattgaaagcaaatggtcttgagtgcttaggcaagggagttggtggtttagctttgcagttgtgggcaaaatgaccttcatttccacactcaaagcatttgataggcttgtgagtctgctttggcttgtattgagtgatagctttcttttgcacaaaagcattgtatccaataccactcttgttatttttcataacagtgttcataagcagctcattttggaggtattgacccttgttgaacttttgcacacttgttgcaagatgttcattttcactttttagtttcttgacctcattcttaagcctttggttatccactgccaactcattgttgaaatcattgttctcaatagcaacttttcctctagtagttgcatcagtcaagtaattcttcaatttttggttgtctaaagtcaggacttcaactttttcagtcaattcagcatgtagactagtttgctcttcttgaatcaaatcatcacatgaggttgctacatcaagcttaacaacagggttaatagcctcatgtgttttgcaagataaaagttcattttcaacaagaagattgtcatgatcaaatttaatttgagtatagtcttccttgatctttactagtctagtttgcaactccctattagcttcatttaatttgtcatatttttccttaacatcttttagggagtttgtgagctcatttacagttgatgacatagttttattttcttcttttatttcatcactagcctttataactatgtcatacttggcatttaaagattcattttcattttcaacctttcgttcacccctagccatgaggcataggtgagaagtggatgatggcgatggtggtggtgaagagaagtccccggcgatggccgcaactttttcatcattctcttcttcacttgaagaagacccacttgatgattcgatgccggtgagccaatcgccaacaatatatgcctttccattcttcttcttgtggaacctcttttgcttcccatccttcctcttgaagaatttcttttccttcttttcatcatcgctgtcatcttccttcttgcccttgaacttgttcttcttgggcttgttgcattgatgagcaagatgaccaagctcaccacagttgtagcagtccatctcagaaatgggctttcttttgttggaaaagaacttcttctttcttgaatcaaatttgatgccttctctatttagcttcttcaacatcttggtggtcttccttaccatcaaggcaatgtttgcatcaaggtcatcatcacttgaggattcttcctcaacttgtatttttgcttttccttttctttcatgatttgctttgagagccaaatcctttcttttggaagatgattcttctttgtcgttgatgtgcatgtacatttcatgggcattgatctttcccaaaatttgtgtaggtgtggtaactgaaagatccatttgatgtagcacagtgataatgtgtccatatttgtctattgggaggacactgagaatcttcctcacaacatccggttgtgagatttgagtaagccccaatccattgacttcctctacaagaatattaagtcgtgagtacatagcatttgcattttcattagtaagcatttcaaaggaatttaattttcgcatggctatgtgatatctttcctcacgttcacttctagttccttcatgtagagcacaaatgtccatccacaaatcatgagcatttttatgattccttactctattgaacacatctttgcaaaggcctctaaaaagggtgtttttggccttagcattccatttctcataattgaactcatcacctacaagatttgtgggatctctaggttcggggaacccttgtgtggcggctttatagacaccaatgtctatagcctctaagtatgcttccatacgaattttccaataaggaaaatcgtcaccatcaaaaacgggaggaggtccatccccaccggacat

SEQ ID NO: 172642 - DNA, 3381 bp, Zea mays
  Clone ID: MRT4577_89032C.1
atgtccggtggggatggacctcctcccgttttttatggtgacgattttccatattggaaaatttgtatggaagcatatttagaggctatagacattggtgtctacaaaaacgccacacaaggattccccgaacctagagatcccacaaatcttgtaggtgaagagtttaattatgagaaatggaatgtgaaggccaaaaacaccctttttagaggcctttgcaaagatgtgttcaatagagttagaaatcataaaaatgctcatgatttgtggatggacatttgtgctctacatgaaggaactaggagtgagcgtgaggagagatatcatattgctatgagaaagttaaattcttttgaaatgcttgctaatgaaaattccaatgctatttactcacgtctcaatattcttatagaggaagtgaatggcttggggcttactcaaatctcacaaccggatgttgtgaggaagattcttagtgtcctcccaattgacaaatatggacacattgtcactgttctgcatcaaatggatatttcagttaccacacctacacagatattgggaaagatcaatgctcatgagatgtacatgcacatcaatgacaaggaagagtcatcttccaagataaaggatttagctctcaaagcaaatcaagaaagaaaaggaaaagctaaagtacaaattgaggaagaatcatcaagtgatgatgaccttgatgctaacattaccttgatgcctaagaagaacaagttcaagggcaagaaagaagatgacatcgatgatgagaaaaaggaaaagagattcttcaagaggaaggatgggaagcacaagaggttccataaaaagaaaaatggaaaggcatatattgttggtgactggctcactgacattgagtcatcaagtggatcttcttcaagtgaagaagagaatgatgaaaaagttgccgccatcgccggggacttctcttcaccaccaccatcgccatcatcgacttctcacctatgcctcatggctagaggtgaatggaaggtacaaaatgatattcatataactgatgatagtgatagtgatagtgatgaggaatttgcttcaccttcctatgatgaactagctgacttgcttgaagaatacaatcaaatcattaggaagtcaaaagctaaatgtgataagttgaaaaatgaaaatgaatctttgaatgccaaatatgacatagttatgaaagctaatgctaaggataaatgtgacaagttaaatgaagctaatagggagttaaaagatagactagtgaaaatcaaggaagactatactaagattaaatttgatcatgataatcttcttgttgaaaatgaacttttatcttgtaatacacatgaggctattaaccctgttgttaagattgatgtagcaacctcatgtgatgatttgagtcaaggagagcaaactagtctacatgatgaattgaccgaaaaagttgaagtcttgactttagacaaccaaaaattgaagagatacttgactgatgcaactactagaggaaaggttgccattgagaacaatgatttcaataatgagttggcagtggataatgaaaggcttaaaaatgaggtcaagaaacttaagagtgaaaatgaacatcttgcaacaagtgtgcaaaagttcaacaagggccaatacctccaaaatgaattgctcatgaacactgtcatgaaaaacaacaatagtggtattggatacaatgcttttgtgcaaaagaaagttactactcaatacaagccaaagcagactcataggcctatcaaatgctttgagtgtggaaaagaaggtcactttgcccacaactgcaaatccaaaccaccaactcccttgcctaagcactcaagaccatttgctttcaatgctcattatgttctaagaaaagttgcaaatggaaaggtgaactacaagaccggtgggagccattgggttattgacagtggatgcacacaacatatgacaggcaacccacggatgttcacctcacttgatgagaatgttgatggacaagacaaaatcacatttggggacaattcaaaagagaaagttcaaggacttggcaaggtggcaatttcaaatgatctatcaatttcaaatgttctcttggttgcacctttgagcttcaatttattatcagtgggtcaactctgtgatcttggacttcaatgtttattcactccaatagaggttattgtatcaaaaatggatgatgaatcaatggtgttcaaagggtttagatacaacaatctctacttagtggatttcacctcagaagatgcagacttaagaacttgcctcttcaccaaagcatcacttggatggctttggcataggaggcttgcacatgttgggatgagcacactcaagaaggtattaaagaaggacatggttagaggattaaaggatgttgtatttgaaaaggacaagccttgtagtgcatgtcaagctgggaagcaagttgctaacacacatcttacaaaagctttcatgccaacatcaaggccactagaactacttcatttagatttatttggacctacaaattataagtttgccaagaaagctcaaaatgaatttgattgcaagatcaagaagattagaactgataatggtaaagaatttgacaacaccaacattcatgagtactgtgatgagattgggatcaagcatgaagtatctgcaacatatacacctcaacaaaatggagttgttgaaaggaaaaacaggaccttgttcacacttgcaagaacaatgattgatgagtataacacaccggagaggttttgggccgaagctgtcaacactgcatgttttgcatcaaacaggttatttcctcaccggctacttgcgaagactccctatgaactgctaaatgggaaaaagccagacgtctccttccgggtgttcagatgcaaatgctacatctacaagaaacgccatcacctagggaagtttcaaagatgttgtgatattggttttctattgggttattcattaaagtccaaagcatatcgagtattcaatcatgccactggcgtggtagaagaaacatatgatgtggaatttgatgagactaatggctcccaaggagcacttgaaaatcttgatgatgtaggtgatgagccacttagggaagcaatgaagaacatgccaattggagctatcaaaccaaaagaagatgaagaagaggtgcaaaacattgacatgccttcttcatcaaatgtaccacaagacgatgaaaaagatgagaggcatgcaaatgaagatacatttgtctctcatgaacaagcaagggtactgtcacacccgggttttaggggcaccaagacccaggcgcgaacataa

SEQ ID NO: 172643 - DNA, 7482 bp, Zea mays
  Clone ID: MRT4577_89033C.1
ctaaacacctgaagcaggaggaggcggcgggggcgcatccggtcgaggtcgaggtagcagagcgaacgccgacggagggtcagagtcagtctcggatccaggatctgtggtagaggctggagctggtactgactcggacgcaggcagcgctgcaggagctaccggaacagaagcagtcacagatactgccacaacggtagtggtaacagcagatgctggtggcactagcggctgtgggcagacagagctgaggaccggagacgtgaacgccaaggtgaccggccggagcggagaggtaacagcagggggtgcagacaagatcgaaggcaccactggagcgtaaagcgaagaaggcggagcagactgaactggaggtgctgagatacccgaatgctgaagcatgagggccatgaatgccctactctctgccctatcctgaataagctgctgctgaagtgcatcctgcctgtcctgcatgctctgaaacatcgagagcatcctgtcggataaacgggcctgctcggctgccagaagagcctgctgctgggtgagagtctgctgctgctgagtgagagtctgctgctgctgggtgagagtctgaagaatcgaagcaagggcagggtccaaagctggaggaggagcaggggcagcacgggaactcccagcctcatgatcatgtgagcgtggaggcataggaggcggaggcggaagaggaaccccaaaatcatcatcatcatcatcatcatcagcagctgtaccctgagtgtcaaactgatgtagagctgcgtcctcggcctgagagtcaaacacagaagcagaagctggcactggaatctcaggagcagggcggtaagatccaaacacaaggcgtgaggcctcaagagtgctctgaaatcgaggtggctgaatcagctgcgcaaagatgtggcataagtagtgagcatacggtagctgccgtcgagcacgaatcccatccagaacagtatcctcaatctcacagatcagaaagtcaacaacatcaaactcagagtgggataccagggcaccaaggagccaaagctgaatgtgagtggtagcctccctgtatcccatcctaggcaggagtgtccgcctgacgagctcatacaagtacttcgctgcagtagtgaagtctgctggagaacgtcgcgacccatctgtgaaaggcgggcggaacagagccgcgacgtgagctgtccctggagccacaccgccgtgagggcgacgtggaggatctgaagtgccatagcagagactgtgcaggcgagtcgtcgactcagggaagccaaatagctgtcggatctgatcggcagtgatcgtgacatcctcgcgctcaaagcggaacctcatccaatgatgatccgggtcaatccaaacagaggcatagaagacgcggacccactcctcaacatatctgccgctgatagtcagaaatgacagaaggcctggcaaataggtgagatgcgcttcagactcagcacctgctgctagcaagaaggctggaagatccaataggcggtgaactcgtagcgcaatctgagcagacatctgagccctgaagaaagactcctgaatccgagtgctgaaaagaactcctgctgctgggtctctctgagctggcagccaagactccacgggtacgtacctgaaccgacgtacccgggctgcagtggcacgctgaagatcaaacagacgaggatccgaaaccagtggacggacctcagtctcgtcacgctcccggaagcgaggagggggtacaggtggagcagaagcgggagcgggagcaggggtagcagtggaagctggcgtggaactggtagtgggtatggcggtggaggtggatggagcaataggggtgactggggcaggcagagtgggtggcggagtggaagcggaggtgtgagtggaggagcgagaccgggaggcgagacgacgagcacggaaagcaatctgatctgaaggaatatccggctgatctccaagtgctgcctgtgcagcggctgctgcagctgctgctgctgcacgagcctctctgtccgaacgccgcttcttgcggccttcctgctgttccaaaaagacagtcttccccttcacctgcctgaaggggcgacgagggtcctcgtcatcgccaccccctgatgccgacgcattcttcgtgcgcggcatcctgaactgaagtctcactccttctaaaataatatctcctttagcaacatgatctctaaggaagtgatgacggatatcaatgtgcttggtgcgagagtgttgtacaggattattagcaattttaacagcactctcattatcacacaacaaaggtactttttctagaactacgccatagtctagaagagtttgtttcatatataaaatctgtgtgcaacaagcacctgcggcaatgtattccgcttcggcagttgacaaggcaacactattttgctttttggatgtccatgaaactagtgatctaccaagcagatggcatcccccagaagtacttttcctatcaatcttgcaaccggcataatccgaatcggaatagccaattaaatcaaaagtagctcctttgggataccacagaccaacgcttgtggtgtgcttgagatacctaagaattctcttaacagcgcgaagatgagctttcttaggattagattgaaatctggcacacatgcagacactaaacataatatcgggcctagatgcggtaaggtataataaactaccaatcatagaacggtagagagtttgattaaccgggttacctccctcatctaagtcgagatgtccatttgtaggcatgggggtcttgattggtttgcacttctccatgttgaaccttttcaacaagtctttggtatacttctcttgtgagagaaagttaccgtctttcaattgcttgacttgaaagccgaggaagtatgttagctcaccaatcattgacatctcgaactccttcgacatcaactcaccaaattccttgcaatgacagtcatttgtcgagccaaagattatatcatcaacatatacttgacaaatgaaaatatcaccgttatgtttctttgtgaagagagttgtgtcgacggtcccgattttgaagcccttttcgatgaggaagtcgcgaagacgctcgtaccaagcccttggagcttgctttagcccataaagcgccttggacaacctgtaagcatggttaggatatctagggtcttcaaatccaggcggttgctcaacatatacaagttcatttatgaagccatttaaaaatgcactttttacatccatttggtaaagttttatatcataacatgatgcatatgcaagtaggatacggatggcttccagtcgagcaaccggtgcaaaggtctctccaaaatctaagccttcaacctgagagaatccctttgcgacaagtcttgccttgtttcttacaatcacaccttgatcatcttgtttgtttctgaatacccactttgttccaatgattcttgcatcttgtgggggcttctccagggtccaaacttcgttacgggtgaagttgttaagttcttcatgcatggcattcacccagtccggatcctgtagcgcctcatctatacaagtaggctcaacacaagaaacaaaagagtgatgttcaataaaattagcatgtttatgtgatcgagtaataaccccttgtgaaggactcccgatgatttggttttgaggatgagcttgaagtagtgatgagttcctcctgtcaaccacttgggaagaagatcctggagcatcaacatcttcggcttgtacccttgcttgttcatgagagacaaatgtatcttcatttgcatgcctctcatctttttcatcatcttgtggtacatttgatgaagaaggcttgtcaatgatttgcacttcttcttcatcttcttttggtttgatagctccaataggcatgttcttcattgcttccctaagtggctcatcacctacatcatcaagattttcaagtgctccttgggagccattagtctcatcaaattccacatcatatgtttcttctaccacgccagtggcatggttgaatactcgatatgctttggactttaatgaataacccaaaagaaaaccaatatcacaacgtctttgaaacttccctagatgatggcgttttttgtagatgtagcatttgcacccaaacaccctgaagaaagagacgtctggctttttcccatttagcagttcataaggagtcttcgcaagtagccggtgaggaaatagcctgtttgatgcatagcaagcagtgttgacagcttcggcccaaaacctctccggtgtgttatactcatcgatcattgttcttgcaagagtgatcaaggtcctatttttcctttcaacaactccattttgttgaggtgtgtatgtggcagatacttcatgtttgatcccaatttcatcacagtactcatgaatgttggtgttgtcaaattctttgccattgtcacttctaatcttcttaatcttgcaatcaaattcattttgtgctttcttggcaaacttcttgaatatagatgcaacttcagatttgtcatggagaaagaacacccaagtgtatcttgagaagtcatcaacaatcactagacagtagaggttgccaccggcactgacataatttgtaggtccaaataaatccatgtgaagtagttccagtggccttgatgttgacatgaaagctttagtgggatgtgtattagcaacttgctttccagcttgacatgcactgcatggcttgtctttttcaaacaccacatcctttaatcctctaaccatatctttctttaataccttcttgagtgtgctcattccaacatgtgcaagcctcctatgccaaagccatccaagagaagctttggtgaagaggcaagttcttaagtctgcatcttctgaagtgaagtccactaagtagaggttgttgtatctaaaacccttgaataccattgattcatcatccatttttgttacaataacctctgatggagtgaataagcattgaagtccaagatcacagagttgtcccactgataataaattgaagctcaaaggtgcaactaagagaacatttgatattgataagtcatttgagattgccaccttgccaagtccttgtacttttccttttgagttgtctccaaatgtgattttatcttgaccatcaacattctcatctaatgaggtgaacatccgtgggttgcctgtcatatgttgtgtgcatccactgtcaataacccaatggctcccaccggtcttgtagttcaccttaatctttccatttgcaacctttcttagaacatagtgagcattgaaagcaaatggtcttgagtgcttaggcaagggagttggtggtttagctttgcagttgtgggcaaaatgaccttcatttccacactcaaagcatttgataggcttgtgagtctgctttggcttgtattgagtgatagctttcttttgcacaaaagcattgtatccaataccactcttgttatttttcataacagtgttcataagcagctcattttggaggtattgacccttgttgaacttttgcacacttgttgcaagatgttcattttcactttttagtttcttgacctcattcttaagcctttgattatccactgccaactcattgttgaaatcattgttctcaataacaacttttcctctagtagttgcatcagtcaaataattcttcaatttttggttgtctaaagtcaggacttcaactttttcagtcaattcagcatgtagactagtttgctcttcttgaatcaaatcatcacatgaggttgctacatcaagcttaacaacggggttaatagcctcatgtgttttgcaagataaaagttcattttcaacaagaagattgtcatgatcaaatttaatttgagtatagtcttccttgatcttaactagtccattttgcaactccctattagcttcatttaatttgtcatacttctccttagcatcttttagggagtttgtgagctcatttatggttgatgacatagttttattttcttcttttatttcatcactagcctttataactatgtcatacttggcatttaaagattcattttcatttttcaacctatcacatttagcttttgactttctaatgatttgagtatattctttaagtaagtcagctaactcatcatatgaaggtgaagcaaattcttcatcactatcactatcactatcatcatcaatattaatatcattttgtaccttccgttcacccctagcaatgaggcataggtgagaggtggatgatggcgatggtggtggtgaagagaagtccccggcgatggcagcaaccttttcatcattttcttcttcacttgaagaagacccacttgatgattcgatgtcggtgagccagtcgccaacaatatatgcctttccattcttcttcttgtggaacctcttttgcttcccatcctttctcttgaagaatttcttttccttcttttcatcatcgctgtcatcttccttcttgcccttgaacttgttcttcttgggcttgttgcattgatgagcaagatgaccaagctcaccacagttgtagcagtccatctcagaaatgggctttcttttgttggaaaagaacttcttctttcttgaatcaaatttgatgccttctctatttagcttcttcaacatcttggtggtcttccttaccatcaaggcaatgtttgcatcaaggtcatcatcacttgaggattcttcctcaacttgcattttcgcttttccctttctttcatgatttgctttgagagccaaatcctttcttttggaagatgattcttctttgtcgttgatgtgcatgtacatttcatgggcattgatctttcccaaaatttgtgtaggtgtggtaaccgaaagatccatttgatgtagcacagtgacaatgtgtccatatttgtctattgggaggacactgagaatcttcctcacaacatccggttgtgagatttgagtaagccccaatccattgacttcctctacaagaatattaagtcgtgagtacatagcgtttgcattttcattagcaagcatttcaaaagaatttaattttcgcatagctatgtgatatctttcctcacgttcacttctagttccttcgtgtagagcacaaatgtccatccacaaatcatgagcatttttatgattccgaactctattgaacacatctttgcaaaggcctctaaaaagggtgtttttggccttcgcattccatttctcataattgaactcatcacctacaagatttgtgggatctctaggttggggaaacccttgtgtggcggctttatagacaccaatgtctatagcctctaggtatgcttccatacgaattttccaataaggaaaatcgtcaccataaaaaacgggaggaggtccatccccaccggacat

SEQ ID NO: 172644 - DNA, 7536 bp, Zea mays
  Clone ID: MRT4577_89034C.1
ctaaacacctgatgtaggaggaggcggcgggggcgcatccggtcgaggtcgaggtagcagagcaaacgccgacggagggtcagagtcagtctcggatccaggatctgcggtagaagctggagctggtactgactcggacgcaggcagcgctgcaggagctaccggaacagaagcagtcacagatactgccacagcggtagtggtaacagcagatgctggtggcactagcggctgtgggcagacagagctgaggaccggagacgtgaacgccaaggtgaccggccggagcggagaggtaacagcagggggtgcagacaagatcgaaggcaccactggagcgtaaagcgaagaaggcggagcagactgaactggaggtgctgagatacccgaatgctgaagcatgagggccatgaatgccctattctctgccctatcctgaataagctgctgctgaagtgaatcctgcctgtcctgcatagtctgaaacattgagagcatcctctcggacatacgggcctgctcggctgccagctgagcctgctgctgagtgagagtctgaagaatcgaagctagagcagggtccatagcctgaggggtagcaggagcagcactagagctcccagcctcatgatcatgtgagcgtggaggcataggaggcggaggcggaggaggaatcccaaaatcatcatcatcatcatcatcagctgctgcaccctgggtgtcaaactgtcgaagtgctgcatcctcggcctgagtgtcaaacacaggagcataagctggtactggaatctctggagcaggacggtaagatccaaacacaaggcgtgaggcctcaagggtgctctgaaaacgaggtggctggatcagctgcgcaaatatgtggcataagtagtgagcatagggtagctgccgccgagcacgaatcccatccagaacagtgtcctcaatctcacagatcagaaagtccacaacatcaaactcagagtgggataccagggcaccaaggagccatagctgaatatgagtagtagcctccctgtatcccatccgaggcaggagagtccgtctgataagctcatataagtactttgctgctgtggtgaaatctgcaggagaacgtcgcgacccatctgagaaaggcgggcggaacagagccgcgacgtgagctgtccctggagctataccgccgtgagggcgacgtggaggatctgaagtgccatagcagagactgtgcaggcgagtcgtcgactcaaggaagccaaatagctgtcggatctgatcggcagtgatcgtgacatcctcgcgctcaaagcggaacctcatccaatgatgatccgggtcaatccaaacagaggcatagaagacgcggacccactcctcaacatatctgccgctgatagtcagaaaggacagaagccctggcaaataggtgagatgtgcctcagactcagcaccggctgctagcaagaaggctggaagatccaataggcggtgaactcgtagcgcaatctgagcagacatctgagccctgaagaaagactcctgaatccgtgtgctgaagagaactcctgctgctgggtctctctgagcaggcaaccaagactccacgggtatgtacctgaaccgacgtacccgggctgcagtagcacgctgaagatcaaacagacgaggatccgaagccagaggacgaacctcagtctcatcacgctcccggaagcgaggtggagggacaggtggagctgaagcgggagcgggggcaggagaagcagtggaagctggcgtggtgctggtagtgggtatggcggtggaggtggatggagcaataggagtgactggggcaggcagagtgggtggtggagtggaagcggaggtatgagtggaggagcgagaccgggaggcgagacgacgagcacggaaagcaatctgatctgaaggaacatccggctgatctccaagtgctgcctgcgcagcggctgctgcagctgctgctgctgcacgagcctctctgtccgaacgccgcttcttgcggccttcctgctgctccagatacacagtcttgcccttcacctgcctgaaggggcgacgagggtcctcatcgtcgccaccccctgatgccgacgcattcttcgtgcgcggcatcttgacctgacgaataaaatttctgagatcaagaatatttagttcattcctcaacatgcaaaagcgggtcttatcaagtggcttagtgaaaatatccgctaattgatcttccgatctcactccttctaaaatgatatctcctttagcaacatgatctctaaggaaataatgacggatatcaatgtgcttggtgcgagagtgttgtacaggattattagcaattttaacaacactctcattatcacacaacaaaggtaccttttctagaactacgccatagtctagaagagtttgtttcatatatagaatttgtgtgcaacaagcacctgcggcaatgtattccgcttcggcagttgacaaggcaacactattttcctttttggatgtccataaaactagtgatctaccaagcagatggcatcccccagaagtactcttcctatcaattttgcaaccggcataatccgaatcggaatagccaattaaatcaaaagtagctcctttgggataccacagaccaacgcttgtgctgtgcctgagatacctaagaattcttttaacagcgcgaagatgagctttcttaggattagattgaaatctagcacacatgcagacactaaacatgatatcgggcctagatgcggtaaggtacaataaactaccaatcatagaacggtagagagtttgattaaccgggttacctccctcatctaggtcgagatgtccatttgttggcataggtgtcttgattggtttgcacttctccatgttgaaccttttcaacaagtctttggtatacttctcttgtgagagaaagttaccatctttcatttgcttgacttgaaagccgaggaagtacgtcagctcaccaatcattgacatcttgaattccttcgacatcaactcaccaaattccttgtaatgatagtcatttgtcgagccaaagattatatcatcaacatatacttgacaaatgaaaatatcaccgttatgtttctttgtgaatagagttgtgtcgacggtcccgatcttgaagcccttttcgatgaggaagtcacgaaggcgctcataccaagcccttggagcttgctttagcccatatagcgccttggacaacctgtaagcatggttaggatatctagggtcttcgaatccaggtggttgctcaacatatacaagttcatttatgaagccatttaaaaatgcactttttacatccatttgataaagttttatatcatagcatgatgcatatgccagtaggatatggatggcttccagtcgagcaactggtgcaaaggtctctccaaaatctaagccttcaacttgagagaatccctttgcaacaagtcttgccttgttccttacaatcacaccttgatcatcttgtttgtttctgaacacccactttgttccaatgattcttgcatcttgtgggggcttctccagggtccaaacttgattatgggtgaagttgttaagttcttcatgcatggcgttcacccagtccggatcctgtagcgcctcatctatacaagtaggttcaacacaagaaacaaaggagtgatgttcaataaaagaagcatgtctatgtgatcgagtaataaccccttgtgaaggactcccgatgatttggttttgaggatgagcttgaagtagtgatgagtttctcctgtcaaccacttgggaagaagatcctggagcatcaacatctttggcttgtacccttgcttgttcatgagagacaaatgtatcttcatttgcatgcctctcatctttttcatcatcttgtggtacatttgataaagaaggcctgtcaatgttttgcacctcttcttcatcttcttttggtttgatagctccaattggcatgttcttcattgcttccctaagtggctcatcacctacatcatcaagattttcaagtgctccttgggagccattagtctcatcaaattccacatcatatgtttcttctaccacgccagtggcatggttgaatactcgatatgctttggaatttaatgaataacccaaaagaaaaccaatatcacaacgtctttgaaacttccctaagtgatggcgtttcttgtagatgtagcatttgcacccaaacacccggaagaaggagacgtctggctttttcccatttagtagttcatagggagtcttcgcaagtagccggtgaggaaatagcctgtttgatgcataacatgcagtgttgacagcttcggcccaataactctccggtgtgttatactcatcaatcattgttcttgcaagtgtgatcaaggtcctgtttttcctttcaacaactccattttgttgaggtgtgtatgttgcagatacttcatgcttgatcccaatttcatcacagtactcatgaatgttggtgttgtcaaattctttgccattatcacttctaatcttcttgatcttgcaatcaaattcattttgtgctttcttggcaaacttcttgaatatagatgcaacttcagatttgtcatggaaaaagaacacccaagtgtatcttgagaagtcatcaacaatcactagacaatagaggttgccaccagcacttacataatttgtaggtccaaataaatccatatgaagtagttctagtggccttgatgttgacatgaaagctttagtaggatgtgtattagcaacttgcttcccagcttgacatgcactacatggcttgtccttttcaaataccacatcctttaatcctataaccatgtctttctttaatacctccttgagtgtgctcatcccaacatgtgcaagcctcctatgccaaagccatccaagtgaagctttggtgaagaggcaagttcttaagtctgcatcttctgaagtgaaatccactaagtagagattgttgtatctaaatcccttgaacaccattgattcatcatccatctttgatacaataacctctgttggagtgaataagcattgaagtccaagatcacagagttgacccactgataataaattgaagctcaaaggtgcaaccaagagaacatttgatattgataaatcatttgaaattgccaccttgccaagtccttgcacttccccttttgaattgtctccaaatgtaattttgtcttgtccatcaacattctcatcaagtgaggtgaacatccgtgggttgcttgtcatatgttgtgtgcatccactgtcaataacccaatggctcccaccggtcttgtagttcaccttaatctttccatttgcaacctttcttagaacatagtgagcattgaaggcaaatggtcttgagtgcttaggcaagggagttggtggtttagctttgcagttgtgggcaaaatgaccttcatttccacactcaaagcatttgataggcttgtgagtctgcattggcttgtattgagtgatagctttcttttgcacaaaagcattgtatccaataccactcttgttatttttcataacagtgttcataagcagctcattttggaggtattggcccttgttgaacttttgcacacttgttgcaagatgttcattttcactttttagtttcttgacctcattcttaagcctttgattatccactgccaactcattgttgaaatcattgttctcaatagcaacttttcctctagtagttgcatcagtcagataattcttcaatttttggttgtctaaagtcaggacttcaactttttcagtcaattcagcatgtagactagtttgctcttcttgaatcaaatcatcacatgaggttgctacatcaagcttaacaacagggttaatagcctcatgtgttttgcaagataaaagttcattttcaacaagaagattgtcatgatcaaatttaatttgagtatagtcttccttgatcttaactagtctattttgcaactccctattagcttcatttaatttgtcatatttttccttagcatcctttagggagtttgtgagctcatttacagttgatgacatagttttattttcttcttttatttcatcactagcctttataactatgtcatacttggcatttaaagattcattttcatttttcaacctatcacatttagcttttgactttctaatgatttgagtatattctttaagtaagtcagctaactcatcatatgaaggtgaagcaaattcttcatcactatcactatcactatcatcatcaatattaatatcattttgtacctttcgttcacccttagccataaggcacaggtgagaagtggatgatggcgatggtggtggtgacgagaagtccgcggcgatggccgcaactttttcatcatcctcttcttcacttgaagaagatccacttgatgattcgacgtcggtgagccagtcgccaacaatataggcctttccattcttcttcttgtggaacctcttttgcttcccatccttcctcttgaagaatttcttttccttcttttcatcatcgctgtcatcttccttcttgcccttgaacttgttcttcttgggcttgttgcattgatgagcaagatgaccaagctcaccacagttgtagcagtccatctcagaaatgggctttcttttgttggaaaagaacttcttctttcttgaatcaaatttgatgccttctctatttagctttttcaacatcttggtggtcttccttaccatcaaggcaatgtttgcatcaaggtcatcatcacttgaggattcttcctcaacttgtatttttgcttttccctttttttcatgatttgctttgagagccaagtcctttcttttggaagatgattcttctttgttgatgtgcatgtacatctcatgagcattgatctttcccaaaatttgtgtaggtgtggtaactgaaagatccatttgatgtagcacagtgacaatgtgtccatatttgtctattggaaggacactgagaatcttcctcacaacatccggttgtgagatttgagtaagccccaatccattgacttcctctacaagaatattaagtcgtgagtacatagcgtttgcattttcattagtaagcatttcaaaagaatttaactttcgcatagctatgtgatatctttcctcacgttcacttctagttccttcgtgtagagcacaaatgtccatccacaaatcatgagcatttttatgattcctgactctattgaacacatctttgcaaaggcctctaaaaagggtgtttttggccttagcattccatttctcataattgaactcatcacctacaagatttgtggcgtctctaggttcggggaacccttgtgtggcggctttatagacaccaatgtctatagcctctaagtatgcttccatacgaattttccaataaggaaaatcgtcaccatcaaaaacgggaggaggtccatccccaccggacat

SEQ ID NO: 172645 - DNA, 4704 bp, Zea mays
  Clone ID: MRT4577_89035C.1
atgtccgatggggatggacctcctcccgttttttatggtgacgattttccatattggaaaattcgtatggaagcatatttagaggctatagacattggtgtctacaaagccgccactcaaggattccccgaacctagagatcccacaaatcttgtaggtgaagagtttaactatgagaaatggaatgctaaggccaaaaacaccctttttagaggcatttgcaaagatgtgtttaatagagttagaaaccataaaaatgttcaagatttgtggatggacatatgtgctctacatgaaggaactagaagtgagcgtgaggatagatatcacattgatatgagaaagttaaattcttttgaaatgcttgctaatgaaaatgtaaatgctatgtactcatgtctcaatattcttgtagaggaagtaaatggcttggggcttacacaaatttcacaaccggatgttgtgaggaagattctcagtgtcctcccaattgacaaatatggacacattgtcacaatgctgcatcaaatggatctttcagttaccacacctacaccgatattgggaaagatcaacgctcatgagatatacatgcacatcaatgacaaggatgagtcatcttccaagagaaaggatttggctctcaaagcaaatcaagaaagaaaaggaaaagctaaagtacaaattgaggaagaatcctcaagtgatgatgaccttgatgctaacattgccttgatggtgaggaagaccaccaagatgttaaagaagctcaacagagaaggcatcaaatttgattcaaggaagaagaaattcttttccagcaaaagaaagcccatttctgaaatggattgctataactgtggagagcttggtcatcttgctcatcaatgtaacaagcccaagaagaacaagctcaagggcaagaaagaagatgacagcgatgatgagaaaaaggaaaagagattcttcaagagcaaggatgggaagcacaagaggttccacaaaaagaaaaatggaaaggcatatattgttggtgactggctcactgacattgagtcatcaagtggatcttcttcaagtaaagaagaaaatgatgaaaaagttgcctccatcgctagggacttctcttcaccaccaccgtcgccatcatcgacttctcacctatgcctcatggctagaggtgaacggaaggtacaaaatgaaaatgatcttactgatgatagtgatagtgatgatgaatttgcttcaccttcctatgatgaactagctgacttgcttaaagaatacactcaaatcgttaggaagtcaaaagctaaatgtgataagttgaaaattgaaaatgaatctttgaatgccaaatatgacatagttatgaaagctaatgctaaggataaatgtgacaagttaaatgaagctaatagggagttgaaagatagactagtgaaaatcaaggaagactatactaagattaaatttgatcatgataatcatcttgttgaaaatgaacttttatcttgcaatacacatgaggctattaaccctgttgttaatattgatgtagcaacctcatgtgatgatttgagtcaaggagatcaaactagtctacatgatgaactgacagaaaaagttgaagtcttgacattagacaaccaaaaattgaagagatacttgactgatgcaactactagaggaacggttgccattgagaacaatgatttcaacaatgagttggcagtggataatgaaaggcttaaaaatgaggtcaagaaacttaagactgaaaatgcacatcttgcaacaagtgtgcaaaagttcaataagggccaatatctccaaaatgaattgctcatgaacactgtcatgaaaaataacaagagtgatattggatacaattctcttgtgcaaaagaaagctaccactcaatacaagccaaagcagacatataagcctatcaaatgctttgagtgtggaaaagaaggtcactttgcccacaactgcaaagccaaaccaccaactcccttgcctaagcactcaagaccatttgccttcaatgctcattatgttctaagaaaagtagcaaatggaaaagtcaaggttacatttcgaggcaacccacgtatgttcacctcacttgatgagaatgttgatggacaagacaaaatcacatttggggataattcaaaagggaaagttcaaggacttggcaaggtggcaatttcaaatgacctatcaatttcaaatgttctcttggttgcacctttgagcttcaacttattatcagtgggccatctctgtgatcttagacttcaatgcttattcactccaacagaggttattgtatcaaaaatggatgatgaatcaatggtgttcaaaggttttagatacaacaatctctacttagtggacttcacctctgaagatgcatacttaagaatttgcctctttaccaaagcatcacttggatggctatggcataggaggcttgcacatgttggaatgagcacactcaagaaagtattaaaaaaggacatggttagaggattaaaagatgttgtgtttgaaaaggacaaaccttgtagtgcatgtcaagatgggaagcaagttgctaacatacatcctacaaaagctttcatgtcaacatcaaggccactggaactacttcatatggatttatttggacctacaaattatgtaagtgcttgtggcaacctctactgtctagtgatagttgatgatttctcaagatacacttgggtgttctttctccataataaatctgaagttgcatctatatttaagaagtttgccaagaaagctcaaaatgaatttgattgcaagatcaagaagattagaagtgataatggtaaagaatttgacaacaccaacattcatgaatactgtgatgagattgggatcaagcatgaagtatctgcaacatatacacctcaacaaaatggagttgttgaaaggaaaaataggacctttatcacacttgcaagaacaatgattgatgagtataacacaccggagaggttttgggccgaagctgtcaacactgcatatgtctccttctgggtgtttggatgcaaatgctacatttacaagaagcgccatcacctagggaagtttcaaagatgttgtgatattggttttctattgtgttattcatcgaagtctaaagcatatcaagtattcaatcatgccactggcgtggtagaagaaacatatgatgtggaatttaatgagactaatggctcccaaggagcacttgaaaatcttgatgatgtaggtgatgagccacttagggaagccatgaagaacatgccaattgtagctatcaaaccaaaagaagatgaagaagaggtgcaaaacattgacaggccttcttcatcaagtgtaccacaagatgatgaaaaagatgagaggcatgcaaatgaagatacctttgtctctcatgaacaagcaagggtacaagccaaagatgttgatgctccaggatcttcttcccaagtggttgacaggagaaactcatctctacttcatgctaacccaaaagaccaaatcattgggagtccttcacaaggggatccggactcggtgaacgctatgcacaaagaactaaacaacttcacccataaccaagtttggaccctggagaagcccccacaagatgcaagaatcattggagcaaagtgggtgttcagaaacaaacaagatgatcaaggcgtgatggttaggaacaaggcaagacttgttgcaaagggattctctcaagttgaaggcttagattttggagagacctttgcaccggttgctcgactggaagacatctgtatcctactcgcatatgcttcatgctatgatataaagctttatcaaatggatgtaaaaagtgcatttttaaatggcttcaaaaatgaactcgtatatgttgagcaaccacccgggtttgaagaccctagatatcctaaccatgcttacaggttgtccaaggcgctatatggattaaagcaagctccaagggcttggtatgagcgtctttgcgacttcctcatcgaaaagggcttcaagatcgggaccgtcgacacaactctattcacaaagaaacataatggtgatattttcatttgtcaagtatatgttgatgacataatctttggctcgacaaatgactatcattgcaaggaatttggtgagttgatgtcgaaggagttcgagatgtcaatgattggtgagctgacgtacttcctcggctttcaagtcaagcaaatgaaagatggtaactttctctcacaagagaagtataccaaagacgtgttcaaaaggttcaacatggagaagtgcaaaccaatcaagacacctatgccaacaaatggacatctcgacctagatgagggaggtaacccggttaatcaaactctctaccgttctatgattggtagtttattgtatcttaccgtatctaggcccgatatcatgtttagtgtctgcatgtgtgctagatttcaatcaaatcctaagaaagctcatcttcgcgctgttaaaagaattattaggtatctcaagcacaccccaagcattggcctttggtatcccaaaggagctacttttgacttgattggctattccgattcggattataccggttgcaaaattgatagaaaaagtacttctgggggtgccatttgcttgggagatcactag

SEQ ID NO: 172646 - DNA, 1742 bp, Zea mays
  Clone ID: MRT4577_89036C.1
ccggccgggaaaaaaaaaaatcttctcttcttcgcctcttcggtttccctttcactttttttaatctccgcttccactgttccaccaaaccaagccgagaaatttctcctaaatttcagatcaaatcctcctcctcctcctccccctccccctctccgaggattctgcccagcagcgcggcgatccgcctcgatccggaatggagcgcgtcttctccatggaggagatccccaacccctactgggccccgccgcaccctcaaccggcggccggcggcgctgttgctgcaccaggtggagtaggaggagcgggggacgcggcgggcgcgatgaaccggtgcccatctgagtggtacttccagaagttcctcgaggaggccgtgctcgacagtccgggtcccgtcgccggcgtgggtagaagcagcggacaagctggagttgaggcggcggagagcaagccgctgggcgccgcggcgccggcgtccgtctcgagctcggtcgttgaccccgtcgagtacaacgcgatgctcaagcagaagctggagaaggacctcgctgccatcgctatgtggagggcttctggtgcagcacctccagatctttctgcgactgctgcttccttgccaagtgtcggtgttccgcatgcagctcctcttaaacccgtcggaggtactgaaagtctagttcaaaacatgctagctggtgctccagtaggggggtcaggtccacatgtagtacaaattgctgatatccctgttaagcaaaccactagctcttcctcacgagagcagtcagatgatgatgacatggaaggcgatgctgagacaaatggaaatggaaaccctgttcaacaaagacaacagagaaggaagcaatccaatcgggaatcagccaggcgttcgagaagcagaaaggcagctcacttgaatgaactggaggcacaggtagcacagttaagagtcgaaaactcttcgctgctaaggcgacttgctgatgttaaccagaagttcaatgaggctgctgttgacaatagggtgctaaaggcagacgtcgaaaccttaagagcaaaggtgaagatggcagaggactcggtgaagcgggtaacaggcatgaacgcattgtaccctgccgtgtcggatatgtcttccctcagcatgccattcaatggctccccttccgactccgcctctgatggcaccgtccccatccaagatgacctgaacagttacttcgccaacccaagcgaaatcggaggcaacaacggttacatgccagatatagcctcctcggttcaacaggacgacaattttgtcaacgggtatcaggctgctggcaagatgggcagaacagactcgctgcagcgggtggcaagcctggagcacctccagaaaagaatgtgcggaggcccggcttcatccggctcgacctcctaggtttcatatgaaaaagtccctggtgcctaacggcaagaatgctaaattaacaatttcaacatgctttgtactggacattgataatcctgcgatgcgcattagtgcgttatggacttgtgggtcaattgctatttggcgtgtgctggctgctcactgtagtgagcagaacaagttccagtttctatcgaagagcaccctctccttttcgctagtgacttatgaatggtcgatggtttattagcaacattgtgtctttcgcaagttcagtaatgaatggtcgaccagggatgaaaataaataacttataaag

SEQ ID NO: 172647 - DNA, 178 bp, Zea mays
  Clone ID: MRT4577_89037C.1
ccacacacatgagatctgggtatcgttcctaaggagcaatcagaagcgccactacaacgaacatagaccgccatgcctctcaagacgcggctcgggctcacctcacagccactatgtccactacacctatctgtcctgtgcatgaatcatttgctcatgagctgaatgcatggatctt

SEQ ID NO: 172648 - DNA, 587 bp, Zea mays
  Clone ID: MRT4577_89038C.1
cagcagcagcagcagcagcagcagcctggaactgcactaataatgggaccggaacctgtattaccgttgttctgttgtcgcgtgctaggtttattctgaagtgggattcctttactacgcataccgaactgctacgatatgtctgttgtacatcatgccggtcgtttggtctgtctgactttgttacattgatcgtctactagtaatggaggaatgcagtaccacgtaaaaaaaaaaaaaaaaaaaaaaaaaaaaaaaaaaaaaaaaaaaaaaaaaaaaaaaaaaaaaaaaaaaaaaaaaaaaaaaaaaaaaaaaaaaaaaaaaaaaaaaaaaaaaaaaaaaaaaaaaaaaaaaaaaaaaaaggggggggccgtttttaaaaaaccaaatttttggccccggggtttcaaaataaaaattttttttaagggggccctaaaataaattaaatggcccggggttaaaaaccctttggccgggaaaaaccttgggttaaccaaattaaatggttttgaaaaaaatccctttttcccaagtgggggaaaaagaaaaaagcccccaccgattgccctttcaaaaaagtgggg

SEQ ID NO: 172649 - DNA, 320 bp, Zea mays
  unsure (1)..(320): unsure at all n locations
  Clone ID: MRT4577_89039C.1
cagaatcgncgaactcggaatcgtcaggtcagttacatagcttaatcggtctgcatagcagtacctagattagcgtttcattgattaaccaggggatagcatacaccaacctgtctttagaattctgcctaccactagcagatactctgtgttcttcttttttatatagagtgttctattctcacatttagggaatgcatcctcttaggttcttaatcatttaaaatatttatcttataatatgtatttgccatttctattttcgaagtgtcttggagggcagtctagatgtatgtatctgttgatttgtcatcgtgggg

SEQ ID NO: 172650 - DNA, 314 bp, Zea mays
  Clone ID: MRT4577_8903C.1
ctgtttgtcacgctttcacttgaagacatatcgctggcacattaagttttatggcctatgcatatggggattactgtgagggcacgggaaatacatgctaaaatactatgtatgttcctttaccgcaattgctgctaaggaagccatcatctcgtctttggttatttataagaatgatgtctcttttgtgtagccttgccaccgttacatatgcacatatgcttgtctgcgtcctttatgctgcctgtatatattacctgtacccggggggcataattttttggtggaaccctcaaacaatttttttttaaatt

SEQ ID NO: 172651 - DNA, 2719 bp, Zea mays
  Clone ID: MRT4577_89040C.1
gggtacctcgaggccggccgggccggggcgccggccagtcgtcttgtccccctcgccgcctccgcgctcgtcttgctcctcttcggctcccctccccgccacctcgtcccaccccgccccttgggttgagttgagctactcgaccgtcagtcaattcctgcaccaggcgttgggcgggttttcatgggggcagcataaaagcctcttcggttcttcccctagctctgcctcgcggcaagtccccctccgctacgttcgccatggctcgcaacagggaagtggtgattttgctgttggatgttgggccttcgatgcatggagtgctgctagaggtgaagaacgtatgcttgactcttgtgcataagaagctagtttataacaggagcgatgaagttggtattgtcctctttggtactaaaggaacatgcaatgagcttgcaaaggacattgggggctataagcatgtgacggtcatacatgatattaaagttgtagatgaaggaacggcacaggctctgcaaaaccttccattaggatctgcccctggtgattttctggattctattgttgttggcttggatatggtgattaggaaatttggtattaccaaagggaagcggcggctctgtctaatcactagtgcacaagaactgttaagagatccgcctgaggggaccaaagaagatcaagtggacaccattgcagacatgttgaaaaaacacaatatcaagatggagtgcattattttcagagaaccgggagtgcatcataatgatataatggaagaaaatgaccgactattgcatcagttcagaaatcgatcagtagcaaaggtagttcaggttgacaacccaacatcactgttgggtgctctcaagacaagaaatgtgctcccagttaccgttttcaggggagatctggaagtgaactccaattttaaaataaaggtgtgggtttataagaaaacagctgaggaaaaattccccactttgaagaagtattcggacaaagctcctccaaatgataaatttgcttctcatgaagtcaaagttgattatgagtacaagagtgttgttgagccagacaaagttgttccaccagaccaaaggattaaggggtatctctatggtcctcaagttattcctgtatcaaatgctgaatgggaggcagtcaagttcaagccagagaaaggtgtgaagcttctaggatttacagatagatccagcgtaccacggcaccaatttatgaaagatgtatgcctgtttatacctgagccaggtaacatgaaagcaagtcttgcagtttctgcgatagccagagcaatgcatcgggtgaacaaggttgctatagtgcgatgtgtgtggaggcaaggtcaagggaatgttgctattggtgtattgacgccaaacatttcatcagtgaacaatatccaagattccttttacttcaatgtgctcccatttgctgaggacatcagagagtttcagtttcggtccttcagcagcctgccatcatcatctcagcccactgaagaacaacaagaagctgcagataacctagtgaagatgttagacctagcaccacctggaagagaggtcctcaagcctgagtttacgccaaatcccatcttggagagattttacagttaccttgatctcaagtcaaagcagccagatgcaaatgtcccaccgcttgaaagatctctaaggaggataaccgaacctgatcctgatgtggttggccaacaaacacaattaatccagaatttaagcaaagcttttgtgctgaaggagaaccccaagaaaaagaaagcacgaacacaggacatgttggcatatactggtgcaggtgatcaagctaaatctgtagaggacagagttctggaaaatacacatccttcaacagagaatgttgtggcaatcagagattcaaatccagttcaagattttgaggccatgctggctaagagatctagctcaacatggactcagaaggctattggagatatgcagaattacatagcagctttgttacagaactccagtgatgggggcaactatcaaaaagcacttgaatgttttgcttctctgcggaaggcctgtattattgaacaggaaccacaggaattcaaccagttcctaacggggatttacgagagattgaaggaaggtgatgctgccaagttctttcaacttctctcctcaaaaaacatttcacttatcaacaaagaggaagcgcctgacagtgatgtgactgaagagatggcaagaagtttctacctgaaacgagaaaaggcgtctcagtaggagctggaagaagccggtaactcgaagcgccttgggtttggagggtatctgcatgttttgaaactgggtatctgggtggaactggaactaatactcaaactctctgggttgagtcactgttttgctgcacaatctgctgcctactacgtttcgactagattcagctttgggtactactgtatgttgtttgactggagtagcatgtccatagatcacatacttctgcagtgttcattggagtgaatgcatgcatgcggtgaaatgcagcatggataggtctaggaagaaacattaccatcatttcctaatgttggagcgctgcctagaaaaggatctttttctgtaagtggtctggtgcgtcaaaccctccaaagtccaaaataatcctttctacaaaaaaaaaaaaaaaaaaa

SEQ ID NO: 172652 - DNA, 1384 bp, Zea mays
  Clone ID: MRT4577_89041C.1
cactatccaagattccttttacttcaatgtgctcccatttgctgaggacatcagagagtttcagtttcggtccttcagcagcctgccatcatcatctcagcccactgaagaacaacaagaagctgcagataacctagtgaagatgttagacctagcaccacctggaagagaggtcctcaagcctgagtttacgccaaatcccatcttggagagattttacagttaccttgatctcaagtcaaagcagccagatgcaaatgtcccaccgcttgaaagatctctaaggaggataaccgaacctgatcctgatgtggttggccacaaacacaattaatccagaatttaagcaaagcttttgtgctgaaggagaaccccaagaaaaagaaagcacgaacacaggaattgttggcatatactggtgcaggtgatcaagctaaatctgtagaggacagagttctggaaaatacacatccttcaacagagaatgttgtggcaatcagagattcaaatccagttcaagattttgaggccatgctggctaagagatctagctcaacatggactcagaaggctattggagatatgcagaattacatagcagctttgttacagaactccagtgatgggggcaactatcaaaaagcacttgaatgttttgcttctctgcggaaggcctgtattattgaacaggaaccacaggaattcaaccagttcctaacgaacatttacgagagattgaaggaaggtgatgctgccaagttctttcaacttctctcctcaaaaaacatttcacttatcaacaaagaggaagcgcctgacagtgatgtgactgaagagatggcaagaagtttctacctgaaacgagaaaaggcgtctcagtaggagctggaagaagccggtaactcgaagcgccttgggtttggagatcatcggaggactggattgtgaaactgggtatctggtggggcatgttttgaaactgggtatctgggtggaactggaactaatactcaaactctctgggttgagtcactgttttgctgcacaatctgctgcctactacgtttcgactagattcagctttgggtactactgtatgttgtttgactggagtagcatgtccatagatcacatacttctgcagtgttcattcgagtggatgcatgcatgcggtgaaatgcagcatggataggtctaggaagaaacattaccatcatttcctaatgttggagcgctgcctagaaaaggatctttttctgtaagtggtctcgtgcgtcaaaccctccaaagcccaaaataatcctttcaacataacaggtccgatgtgtcattggactgtacgatgagccaggttcggtgcaccatggtacaacagactaattct

SEQ ID NO: 172653 - DNA, 615 bp, Zea mays
  Clone ID: MRT4577_89042C.1
cccacgcgtccgcacaaattggtcactgatggcatctgtaatgaatgtagcttgtcacatcatgctcaggttcaaaagattatttggataagagaaatttgacctcaaggctaactaaccttgcacaaagcatacatctgtcactgctagcacaacaaataattcgagtaggtttctttcagatgacgtgatcttctgttagggagaaggatattggccgctctggtggaagccatctcgacaaaatgggcatgcatttgtggagctccagtttggatccagctattactgatgaaattgtaagtgttctttctcttgttaattcccctgagaggccggactttatgcttttaattagcacaacaaatattcgactcgactagcatattctttgaaatgatgagttgcatctttatgaaattcctttctagttcttagctaagtgtgtggattatctgtcatgcaacgtatttatcctaaaagtgtgttatttaattcgtattgttgtatcaactatctgagttgtccctcgaaattgtgaaatgacagttcccttatattttgtcagtcaatgtaccagttatgatgcatgcccattactacttttatttagct

SEQ ID NO: 172654 - DNA, 225 bp, Zea mays
  Clone ID: MRT4577_89043C.1
agccgccggacaagagaaataataccactctacactcgaatacacagcagcttgcttaacagaaaaagcgagccgaggatgggtcaccgaagccctcgtcggcggccctgctcctcctggcggggggcggcggctggcgctgcgcgcgcggacctgaccacaaactggtgaagaaaagaagggacgggagaacctggcagccaaacggacgctgacgctgaaccg

SEQ ID NO: 172655 - DNA, 421 bp, Zea mays
  Clone ID: MRT4577_89044C.1
tcgtggaaatgatacgcagtgtgttcgaaggagctaatgcactgtcacaggcgtggaatgaagcaccatgaaagttgtggttttttgccattttaatgaactattttttttgtaacctattcttgttcattaaggtttggtgtgttttttttttttactgactcatgaccttcattaataaggtgtttttttttacttattctgtaatatttttaaatttttatctgtttgtaaacatatattcatattcatggttgtcattttcattttttatttatctattctttttggtgggtttcttctttgtattatagttttttttattttttttttcgtttttattcttctatattattattttactttttttcttttttttttctttctgtttttttttttattattattgtttatttaattt

SEQ ID NO: 172656 - DNA, 1822 bp, Zea mays
  Clone ID: MRT4577_89045C.1
aatcacctcagcagcacagctcagcttccacccactctcaacccctcccgccggagcccaagcaaggaagcgacgatggacggcagcaaggcgaagaaggtggcggcgaagaagttcggcgggccgaggaagaagtcggtgaccaagtccatcaaggccgggctccagttccccgtcggccgcatcgggcgctacctcaagaagggccaccacaccccctcctcccccacccgtccgctcccctctcgccgccgattgttctgcctgcgggaaccatctcatatctcggcgaagatgagggaaatcctgcacatccagggtgggcaatgcggcaaccagatcggtgccaagttctgggaggtggtgtgtgatgagcatggcattgacccaactgggcgctacaccggtacctctgacctgcagttggagcgtgtcaatgtctactacaatgaggcctcctgtggtcgctttgtgccccgggctgttcttatggaccttgagcctggtaccatggacagtgtccgcactggcccttatgggcagatcttccgccctgacaacttcgtctttgggcaatctggtgcgggtaacaactgggccaagggccactacaccgagggtgctgagcttatcgattctgttttggatgttgtgaggaaggaggctgagaactgtgactgtctgcaaggattccaagtatgccactctcttggtggtggtaccggatctggcatgggtaccctcttgatatctaaaatcagggaggagtaccctgaccgcatgatgctgacgttctcagtgttcccctcaccaaaagtatctgatactgtggttgagccatacaatgcaactctctcagtccatcagctggttgagaatgctgatgagtgcatggttcttgacaacgaggctctctatgacatctgtttcaggactcttaagctgaccacacctagctttggggacttgaaccatctaatctctgctaccatgagtggagtcacctgctgcctaaggttccctggtcagctgaattccgacctccggaagctggcagtgaaccttatcccgttccctcgcctccacttccttcatggtgggcttcgctccattgacatcccgtgggtctcagcagtaccgtgccctcacggtcccagagctcacacagcaaatgtgggatgccaagaacatgatgtgcgccgctgatcctcgccatggccgttacctcaccgcctctgccatgttccgtggcaagatgagcacaaaggaagttgacgagcagatgatcaacgtccagaacaagaactcgtcctactttgtggagtggatccccaacaacgtgaaatcaacagtctgtgatatcccacctactggtctgaagatggcttccactttcattggaaactcaacatcgatccaagagatgttcaggcgagtgagtgagcagttcacagctatgttcaggaggaaggctttcttgcattggtacacaggtgagggaatggacgagatggagttcacagaagcagagagcaacatgaacgatcttgtgtcagagtaccagcaataccaagatgcaacggctgatgaagaaggtgactacgaggatgaggaagaaggtgaataccaacaggaagaagagtactgagagtaatttagttataaaaaccgcttgaaaaaatcaatttagtcgtttgctactttttttcttaaaaaaaaaaatgagaacctcaactaccagttgcaggtttatttctatgcttgtatttgacttatctggatgatgtttatgtactttgtttttaaatttggttcggtcttt

SEQ ID NO: 172657 - DNA, 216 bp, Zea mays
  Clone ID: MRT4577_89046C.1
tacctcgcattcgatactaacgtacgctcttcggttcggctctaagaacaatcggaaagctaagcttgctcgcattgctacagaaagagggacatttgatggaaatcatggtgataagcatctaccccttcacccggcgagtcttccgaaagtgctggggaggacaactatataccccctgcaagttcattcactggtccttccaaaggcagactg

SEQ ID NO: 172658 - DNA, 182 bp, Zea mays
  Clone ID: MRT4577_89047C.1
aaaacattcaattcgagctttgatgagatgcatcgcaggcaatcgtcgtgggttataccagacaaggatctgcgggagaggacatgtaatcttgtggtgcagactatcgtccctacctaccggagctacatgcagaactatggggcacttgtggagcaagagggaaatgccagcaagtatgt

SEQ ID NO: 172659 - DNA, 167 bp, Zea mays
  Clone ID: MRT4577_89048C.1
attatatataaaagcaaggcggaccggtgcccttctcttgttttgaccacaactgtttgatcccattattctatggaccatggatacttcaatgtttgtactaagaccgtgaacgtgggattcttttactaaaaaaaaaaaaaaagatcaataaaaaaatctaaaaa

SEQ ID NO: 172660 - DNA, 342 bp, Zea mays
  unsure (1)..(342): unsure at all n locations
  Clone ID: MRT4577_89049C.1
cggggcggattcgagcaacagtgcttttctgcttacctgccggcaacgagtacgctgcaaaagaaattgcatgcctccaaacgcggcgggcatcaagaccaagtcggactaagaggatgccggggatcgcccagaacgggtcgagaccacacagcagacaaaattatgcgccagaggagtatgatctctcccaggctcagaggaggaactatgatgaatttgcacacaagcactcgcaaaaaccagagagcgccgagctgatgctgaggctggccgccctcggtgatggaaggcacgaccaaaggccactgccacangacgagngggagggcncctatctcc

SEQ ID NO: 172661 - DNA, 380 bp, Zea mays
  unsure (1)..(380): unsure at all n locations
  Clone ID: MRT4577_8904C.1
attttcctgggtcgacagtacctagtcggcggccgcccttnntttntgtttttttttttagcagtttccctcttttcccaccaccattgtataaacattggttcattctttgtgtctaaaaaaaacccaaaacggggggtttgtctgccattaattttttaaaacaaaattctcccgccccccggggaataagccttttataaggagaacatttttcaaataccaaaaagttttacaaaacctgggatctttatttggccaattaaccaacgggggggttttaaaaaggaaaacccccaattttttcaaatgggggaggggtggggccccccaggttacaaacctggtttctttacccaaaaaacgagcactttgaaaaa

SEQ ID NO: 172662 - DNA, 409 bp, Zea mays
  Clone ID: MRT4577_89050C.1
gggaaaccccgggaaattggctaaaacccccacaaaaatgggtaaaaaaaaggttggggggcaaaggagcaaaaacgggcccatttttacataaaaggggcccaaaaatttttggccaaaggaaaaatttccaaaaaaaggagggggcggggggggtcaggacccggggaaaaaaaaatccggggggcaaacaagtaagccccgtgagggaaacccgcctataatttttgaaagattggggggtttgggcccccccaaaaaataaaaaaaattttaaaaaaattcccccctccaaaaacgtaatgggcaggggtggggccttaaattacgggccctaaaaaggggaaatttttttttggttttggcagaggggaaaaagggggaccccgggggtttaattttttaacgg

SEQ ID NO: 172663 - DNA, 1961 bp, Zea mays
  Clone ID: MRT4577_89051C.1
tacctcgaggccggccggggccaccctcgagagacctgtccgaatcgcgtccaggtccctcgctgggagtttcgccgagcgtcatcactccttgctctagtctgcgactttgatctcgaggcgggggtcttcctctcgtctccccccgtccgcaactccgtcgccaagctgcagcgccgcgagatcgggggccgccagctcgccgcgcgcggcggcatggaaaacattgggtacctcgaggccggccgggggacgcagacacacacacttcatcgtggagatatggtggggaacaatactgttgcttccctcttctactattctttgctcatcatctgcgccgctgcttggcacgcggatgcgtcccaagcggatcgactgagagaattcatcaggtctaggaggaacagtcctagtgaggctgataagggcacgtttgaggttgccaacatggggcacagcgtagctagcagcctcctgagcacaagctactccgacagtgaacagagcgccctgaaggcagccgacaagatcactgcgctgccggggcaaccggacggcggcgtcgacttcgaccagtacgccgggtacgtgactgtcgacgagaagaatggccgggcactcttctactacttggtggaggcaccacaggatgcctcggcaaagccgctcctcctgtggcttaacggagggcccggatgctcatcgcttggctacggagcaatgcaagagctcggtccgttccgcgtaaacagcgacaacaaaacgctgagcagaaacaaggcggcttggaataacgtggctaatgtgatcttcttggagtcgccggcgggtgttggattctcctactccaacacatcctccgactacggcctcagcggagaccgaaggacagctgctgatgcgtacttgtttttggctaactggctggagcgctttcctgaatacaaaagccgtccgttctacatctccggggagagctacgccggacactacgtacccgaacttgctgccaccatcttaacccagaattcctacaacagcaggacggccataaacctccggggcatcttggttggaaatccacttctggattcgtatatgaacttgaagggtgcagttgcctactactggagccatgggttgatgtcggacgaggtctttgacaacataaccaggcactgcaagtatgacagttcagatggtgtggcatgcagtggcgctttggaggcggtagatcctggacagattgatccttacaacgtatatgctccgatctgtgttgatgcggccaacggagcatactaccccactggctacctacctggatatgatccatgcagcgattactacacctattcctacctcaatgacccagcagtgcagaatgctttccacgctaggatgacaagttggtcagcgtgcgcgaacttgaactggacggacgcaccgatttccatggtgccaacagtcgcagggctgattgagaagaagctgcctgtttggatttttagtggcgattttgattccgtgtgcccacttcctgctacgaggttttccatccatgatcttaacctgcacgtcaccactccatggcgcccgtggacagtaaacatggaggtcggaggatatgttcaacaataccagggaggattcacgtttgcctctgtcagaggagctggtcatatggttccgtcttcccaggctgatagagcattagtattattggactcctttctgaaaggggtgctcccaccatacgtacaggagcagtaataattcctaaatatgtagagtgtcttgtcaatggcaaactcaataaaaactatccgtttttgtattacttgaattgatgttggttttgcattagctggtttgtggttataattaaaaggtccatctttccccttagggaccgtttgtatccgaaaaaaaaaaaaaaaatggcggccatacttaac

SEQ ID NO: 172664 - DNA, 494 bp, Zea mays
  Clone ID: MRT4577_89052C.1
aaaaaaaaaaatggggggggaaattgctttttgggggggggaaaatttactcggggggtgaataaaaaagggtttttttctccggaagttttggggggggggcatcaatttttttttttgaaaactaaaaaatgggggggccttaaaaaattttcttttcacccccattgtttttttcggggaaaaaaaaaaagggcccaaaaggaaccccgtttgaacctttagagtccccccccggggaaaaaaatgtccccttaggggttccaaaaacccaatcccaattggggccaaaagcaaattttgcccccaaaaaaaccctggaaaactttttcgtttaaaagaaggcaccacccccctttgggaaaggtgggaaaaattcaccattaagcccctttttttaaaaaaaaagttaaaaaaagggtttttcccaaggggaagttttacttggggcggggtaaaaataggggtcctgaaaggacaaggggttcccccaa

SEQ ID NO: 172665 - DNA, 520 bp, Zea mays
  unsure (1)..(520): unsure at all n locations
  Clone ID: MRT4577_89053C.1
gagagagagagagagaggtcctcgcctcctttggccccctcgaatcacacgcgcccccgcctcattcgtccattccccagccttccagaagcccgccgccgccggccgctgctcccccgacgcgggggaagccaccggcggtagcgctcgcttcgccgcgccaaaaacctagtggctccgagttccccgccgcctccgtggcttctatggcgaacccgggcctagggcttggactcgcgccaccgggcgccgagccctccgccggagcgccgccctcttcacgtcgcgcgccgcgcttggccaaacggcgccacgtgcccgcctcctcccgctcccgcgcgccgcaggcctcagccggaatatggaacccgtttggtggtggcggaggtacggatagacagaccggaggctntgtgtttggtgctgcttcggcagtgagccaacagcctttggagccagcagtgtcgggagcttcacccactgaggcgcccttcgtgtttgggagcatgagggagagcct

SEQ ID NO: 172666 - DNA, 345 bp, Zea mays
  unsure (1)..(345): unsure at all n locations
  Clone ID: MRT4577_89054C.1
ttntttttttttttttnnnnaacgccgacgactatacttattggtgtatttataaaaagaacaatttgactttcacaaaccccactttgaagcatccagagaccgagtctatcaggtacacctccttcggtacacaacacttggaccattttaaaaatgtattaccaaaggctgtttcaaaaggctcttgtactaaggaaaagccagcttcaccgacagcgagggtctttttgcctacgaccaaaagccccgaacggggagatatacgaaccgagcacaattcctttttggggggcgcctaaattacccggcctttttacggggggggtttttaaacattctggt

SEQ ID NO: 172667 - DNA, 327 bp, Zea mays
  Clone ID: MRT4577_89055C.1
ctaccctcttccttcacatcgtcatggaacttttcccccgccgcgaacttttcgagcggatcttgggcgagggccactaccattagccccccacttctaatctcatcaacgaccacttgtcgtgggtccaaagaaggatttcacttgctctgcgttattcacacgggacctcaagccccataattttctctttgtcaacaccgccgcggaagccccactcaaggccactgactttgggctatacatgttctacaaaccccgtgataaatactctgatgtcctcggaagtccatactatgttgcaccagaggtgctctagaaatgcta

SEQ ID NO: 172668 - DNA, 364 bp, Zea mays
  unsure (1)..(364): unsure at all n locations
  Clone ID: MRT4577_89056C.1
cacaacacggaccgcttctgggacatcaagttcgacaagggcgtgctccacatcccgcggatcctcgtccacganggctccaagctgctcttcctcaacctcatcgccttcgagcagtgccacatggacatcgccancccgggcggcaacaacatcacctcctacgccatcttcatggacaacctcatcaactcggcggaggacgtcaagtacctgcacgaccgcggcatcatagagcactggctcggcagcgacgcagaggtggccgatctcttcaaccgcctctgccaggaggtcgtgttcgacatcaangacagctacctctccggcctgtcgggaccaggtcaacaggtactaagaccac

SEQ ID NO: 172669 - DNA, 250 bp, Zea mays
  Clone ID: MRT4577_89057C.1
cattctgcttcgagccttcttttccttcacgcctatttggggggcgcgggtgggtcgttatttgctgctggttccgagatcaccggagccagccagtcagccagaggcagagatgaggtggtcggcgctcctgtgggaggccgagctcgtccgccgcgcgggggttgacaaactcctcctccaggacgcagccggcagggggggcggtctcacctggtacaccacctccaggtcagatgctgctgtcgag

SEQ ID NO: 172670 - DNA, 230 bp, Zea mays
  Clone ID: MRT4577_89058C.1
tcgtcgctagtcacagtgtacgtaagctaagtgttcgcctctagcagcgattcacgactggcagttatgatgactggaactcttactatgggtgcactgcactgtcggtgcttcccggacacgtttccgtcaagaagtcctgtagcgtctctataataacatcatcctctctactctcgaggacttgtcattcaatcgttcattctgttatctattatctggaattactg

SEQ ID NO: 172671 - DNA, 545 bp, Zea mays
  unsure (1)..(545): unsure at all n locations
  Clone ID: MRT4577_89059C.1
ttgggtacctcgaggccgggggggaactcattgttggtgttagctcttatcggtcatccatcatggcgagatgcctcaagtcctgcagtgtacatggactctggctgctctccatgatccttcttgcatcgtgtgtcgttcatgctcacattattaatgggcggcaaagcaacaccgggagcctcactatgaccacgacgggggaagcaagcatgataattggagatgagaaagatgcaatttgctatataaaagccgcattgtattgctgcaaaaggactatacagtgctatcaggacatagcgcaatgcttgaggaactgccgtaaaaatgtctaacaagaggctatgctttctccaactcgtagatggagatcataaagatgttacgttagacctaatcatgcatagaccggaggagaaatataagctaattagcccatccataattaataacttcgtattgtttcnnnnnnnnnnnnnnnnnnnnnnnnnnnnnnnnnnnnnnnnnnnnnnnnnnnnnnnnnnnnnnnnnnnnnnnnnnnn

SEQ ID NO: 172672 - DNA, 440 bp, Zea mays
  Clone ID: MRT4577_8905C.1
gccacgcgtgcgattaggtcatcgacttcagattggttaacttttcaccatgaatgtgctgttcgtgggccttgctctcctggcgctcgctgcgagcgccgcctccagttcaagcggcggttgtggctgtcagacaccaccgttgtatttgccgcctacgatctatatgccgcctccgttctatctgccgccgcagcagcaggcgtagccatggttataccccactcaaccaccgcttcttatcccgtgccagcagttcggatcctgtggcgtctgcagcgtcggcagcccgttcctgggccagtgcgtctagttcctgaggcaccagtgcagcccggcggagacgccctactgctcggcacagtgccaggcgctgcagcagctgtgctgccaccagatcatgcaggtggagccgctgctccggttccaggcgacatacg

SEQ ID NO: 172673 - DNA, 694 bp, Zea mays
  Clone ID: MRT4577_89060C.1
cctcgaggccggccgggatacggtccgaggactccaactccatcgccagatcccacgcccacatacccctccaccaccaccgacgaacccccaccgccgtcgacatcatgtcgcaagtccatgccctctccgacgaccaggtcggcggagaaatcaaaaagatgacggccttcatccgccaggaggccatggaaaaggtaaacgagatccgtgtcaaggacgacgacgagctcgccattgaaaagtccaagctggcgcaccaggagcaggtctccatcgacgcttccgactacaagaaggtcaagcgggtcatcatgtgacagcaaatcgcccgctccaccgtctccaacaagagccgattacgcattctgtccgctcgccaggagctgctcaaccgcctattctaggacaccgaaaagaagctgtgcgatatttccgaggacaagaacaagaaccactctatcctgaagaacctcattctcgagggagcgtatgatctgaacgaggacaagctgcaggtcaaggcgcgcaaggcagatattgatctgaccgataacgccatcgaagaggctcataccgagatcgagaagaatctgagcagggacgttgccattaccattggcgagagcgacccactgcccgaggcatccgctggcggagccattaatgtcggtactaacggcaagatcgacat

SEQ ID NO: 172674 - DNA, 268 bp, Zea mays
  Clone ID: MRT4577_89061C.1
ggtaaggtgtttttttttgttttgttttttttgcaaagaggaacactattttaattttatttccggagatctgtacaccttcatttaacaatcctacataaaagtaaacccctttctcttttacaaagtactgacaccctttttctgccgataaacccctttctgcaaacatttttttgtctatgtattagacacacaatgccttattaatattaataccacactgcttttattaacttataattggagaaccttctccactacctac

SEQ ID NO: 172675 - DNA, 387 bp, Zea mays
  Clone ID: MRT4577_89062C.1
ccacgcgttcttcgacgctggcgcgggctcgaggaccttcccgaattagcgtccgctctgacttcagttgaccctgccttagccacatggctgcagccccatcgaattctgtttctggcgtgatggctgttcatgttcaccgacaccgtatcaaggtccgctatgtccaaactatcatgtgtgcaatgtcaactggaagagagcactgtgcaatctcgactggcattagcggtgatcaatccaagggcgtttcgcgtggatcatcatacaaagttatttgagcttacaacgccggttcggatacatccgttatcgttccatggctcagggagatctattgctgtaaagtcttctgtttcactgctgaagctggcagaggtgccattg

SEQ ID NO: 172676 - DNA, 489 bp, Zea mays
  Clone ID: MRT4577_89063C.1
actcaccttcctctcccccctcccccgcccgctccctctcctcgcccgggtgcttcctccctccctccctcctggtgtccactccactcgccactggctccgttcagttcttgaatcttgaccgacccgcctgggccggtggcctgctgccgcttctcgctccggtggtggctacgagctgcggacggacggacggagggggtccgggatggagcggtacgaggtgatcaaggacatagggtcgggcaacttcggggtggccaagctggtccgggacgtcaggaccaaggagctcttcgccgtcaagttcatcgagagggggaacaagattgatgagaatgttaagagggagattatgaactacagatctctgaggtattcgaatattgttaaattaaaagaggttgtgataaatactaaaaatattaacatatttatgaaatacaatgatgaagatgagttatttgaaaggatctgaggttctggaaa

SEQ ID NO: 172677 - DNA, 209 bp, Zea mays
  Clone ID: MRT4577_89064C.1
ccgagttcctcgagtcgaacacggcgtcgctgagcgtgcagcaggagaagcggctgaagcagatgggcgccacggtgcggaacgcgtcagggtacctcaacagcctcaacgtgaagggcgtacgcgatgcggccgcgcgggcactcatggcggagatgaccgtcaaccagatctccgacctcgtcaccttctagcagacaatgggcaag

SEQ ID NO: 172678 - DNA, 351 bp, Zea mays
  Clone ID: MRT4577_89065C.1
tttttttttttttttttttttttttttttttttttttttttttttttttttttgggcacctttgaactgttatttcccttaatacgagtgggttaatacaaccaacactgctttctcaatacggcatattccacactgccaaaaaacacaaggctgttgaagattttttttaaaacaaaaaaaatgtgggggggattcatattggctgaaattgcaaataaataagcatctggcagtatccattggggcactttaagctataccgatggtatataaattaccaatccaaaccttgggtgctggggaggaaaaataagacaagtgttcttaaccgaggccggggtccaagct

SEQ ID NO: 172679 - DNA, 143 bp, Zea mays
  Clone ID: MRT4577_89066C.1
gaaagggttgaaatccttaataaaaatagtactggtttatggcaaagcgagccatcacgtctatgtgtctggagagggtcaatcgtgtgttgttagacaaagccaatggtctccgcatatgccacaccaggacttgggagata

SEQ ID NO: 172680 - DNA, 233 bp, Zea mays
  unsure (1)..(233): unsure at all n locations
  Clone ID: MRT4577_89067C.1
agaacatcgaactacgtccgtgaacacaaaaaacgcngacggttccgtgctgccgctacttttgacgatcctaccgctttgctctccgccacacatgccactcagctacgtgtcaacagtcggcatagctctacacttttccagacaacaagcattggccctctttagatcacattggcagataatccagcttgcttcaagtaaagtgcctggctcattctttgcgcgggctg

SEQ ID NO: 172681 - DNA, 362 bp, Zea mays
  Clone ID: MRT4577_89068C.1
acggacgcgtgcgcagacgcatcaccctactcgccgtctctcgtttagctttgattcctacctcctcgcctaggggtctggggctattttatcggcggactggaatcgcatagaggcccgtctcatccgatttaaggaagccatggaccacaaggaggctgggttccaggcccacgaggtacccatcctctgcatcaataactgtggcttcttcggcagcgcggcgaccatgaacatgtgctccaagttccacacggagatgataacgaatcatgatcaggccaagctggctgccttctctatcgacagcatcatgaacggcagctacgccgtcatggtaccagttgttgcttgcatcaaca

SEQ ID NO: 172682 - DNA, 1092 bp, Zea mays
  Clone ID: MRT4577_89069C.1
cattttattttgtttttaacattcctgtcttctgtttcaagccagtaagaatcttttttgttattattatctgaatagttcatggtttttttttttgcacagaaacccttctcactcttatttttattcctgaatccataacagtctactgatttgacacacagttcagcccaaagcatcaaaagcaaaccgaaacaaagtttctctaccaggacccaagataccaaactgacaaaagaaaaagacaccaaatccttctgggttcattttatttgtggcaatgcaggctgctgtgccactccatgcattcactccgttcagtttatagaggagaggcgctggacgagcatgtcgaacacgttgtccctgtccagcatgttgatcctgacgcaccgcgcgtctcctccgaactgctccccgccgctacccacgatattgtggccggcgagcaactcggcgcagtcctcgacgccctccttctcacaccgcagccacgcgaacgcagggcaagctgtcacggtttgcttggcgaagttgcagtagccggaggtctcctccggcaggctgaaggcgccggtggcagccacggtggcgcgcaggatgcgccagcgctcctccaggcgccgcagcgcgaagtcgaagaggcggggcaccgcgccgctggccctggccctggccggcgggacgacctcgtaggcgtcggagacgaccccgaggatcttggtggcgcgcatctgcgactccttgcatacgccggtggtgctgcggtcgacgaagtagaccatattcctggccacttcgcggtccttcaccagcgcccacccgagcctcgtgccggcatggccggtgagcttggacacgctgaagagcatgatgtcgtgggcggcggccccggtgatgggcgtgtactgtggccagtagtacaccaggtcatggatcgccttggcgccggcggacctcacgacggcctcgcggatggcgccgtcggggttgttcggcgagcagaccagctcgatgcattcatcgccggtgaacgtgttggcatcgccggcccagcggtaggcgccgctcagcaggaggtctgtctgcggc

SEQ ID NO: 172683 - DNA, 354 bp, Zea mays
  Clone ID: MRT4577_8906C.1
acacgtgtacgttcaccggtgcgtcaatgcgtctggagaagagtaccggtccgtttgaccaaggcgtccatgcggatcagcttcaggtgaggtggcgcgtgcacgctgaggccgcgctcagtgtgagtgaccatggaggtgtccacaacggagaccagataggcagcatcgggaaagaagctaaaataaagtgtccaataagtatgaggcaggggctcttcactaacatgctcaagcaacaaggaaggcggacgatctaaggctccttgctgaacatctaggaggaggggctactaaacgtgctgctagacgcggaacatggggtgctgcacataatgctaggccctgctacag

SEQ ID NO: 172684 - DNA, 252 bp, Zea mays
  Clone ID: MRT4577_89070C.1
gaagtactgctaggtagcctgcaggcacgaggcctatcggctctcgacgctccgccgcgccttcatcttcgccgtcgccccacagagccagtggatctagccaagatgaccttgtctattatttaattacctaccgcacccggcttggacgcaatgatagagagggtactacgaagcctggattcttgagtaagagtgggtgctggaggggcgggagagcccatttttattttcctcacatacagagggagc

SEQ ID NO: 172685 - DNA, 182 bp, Zea mays
  Clone ID: MRT4577_89071C.1
ctcgagccggccggcggaggttactacagatatataactacacctccatcactctacgcctctagatctactcctctccccgaggcctctcctgtccgcccgattgagttcaaaccaaaaaatcaaaacaactcacgcgagtcgattcgcaggcgagtcaagtgggcatgccgccgacgcac

SEQ ID NO: 172686 - DNA, 209 bp, Zea mays
  Clone ID: MRT4577_89072C.1
gggacacgttggttgaatatcggagggaccctgtggaaactgcacttgtgatgaaagagggagcaagacacactctgaaatgatttcacgacgaagcccggcattctataattagcatccttgaaaggatgatggctatcattatcgatggaagattcctgatgtacgcaatcgaccgaactatattggacagactatgtgcactgagg

SEQ ID NO: 172687 - DNA, 824 bp, Zea mays
  unsure (1)..(824): unsure at all n locations
  Clone ID: MRT4577_89073C.1
ctctcttacactactttcaaccatgagtcaatcgaaagtaagcgttagcgccgtcagggatactgtcaagaccattcgtgctggcagtgaagagaagaagcgtaacttcgtcgagaccgtcgaacttcagattggtctcaagaactacgatccccaacgtgacaagcgtttctctggtactatcaagcttcccaacatcccccgtcccaacatgtccgtctgtgttctcggtgatgctttccactgcgatcaagccaaggctgctggtatggagttccaatctgttgaggatttgaagaagctcaacaagaacaagaagctcatcaagaagctcgccaagaagtacgatgctttccttgcctctgaggctttgatcaagcaaatccctagattgttgggtcccggtttgcacaaagctggtaaattccctacccctatctctcactctgatgagattactgccaaggccgatgagcttcgcagcatggtcaagttccaacttaagaaagtaccctgtctaggctgtgctatcggaaacattggaatggacgacgaacaactagtcgcaaatatcatgttggccatcaacttccttgtctctcttcttaagaagaactggcaaaacgtcaagtctttgtacctcaagacctccatgggcaagccctgagcgtttgtactagagatctagtttgacttttctgatgtcaaagctggtgtttcgtgtatcatacatcatcctgacggcgtaccagatcttggnactaggtgccagaatcattgggagctcggagcaccgactcttcagataaannnaagtacaagca

SEQ ID NO: 172688 - DNA, 148 bp, Zea mays
  Clone ID: MRT4577_89074C.1
gcgatagctttcaagatgagacagcacatgaagaataaccaccgctagttaaacgacactctcgtcgtgccccctgggagaacaccgagctagcacacatgccccactcaatagctagccctgttctgaacaatcaccattctagtgc

SEQ ID NO: 172689 - DNA, 2829 bp, Zea mays
  Clone ID: MRT4577_89075C.1
ggtatcctggaggtgatcccggggcaagcgttagtgcgactgtccccactgcaagttcggctggaaaccccactactcgcgccgctcgctcggtcatccatggcgacctcctccactccgccacctgctgcttcccacgcctccctctccccccgtctctaggttcgttcgttccacgtcgccggccacccctgtccacagccgcgacaaactcttcctcagacccacgccacgtacgatgcctctctccccttccctttcccctccgcccaacgccaccgccgccgccgccctgcccctcctcctgctgctcgtctgcgccagcagcattgccgcgcagccgctggcgtcgtcgcaggccaaggcgctcctccgggtgcgccgcctgctgttctacccgccggcgctcgagccgctgcgcggggcgccggacccctgcgcgctgccgcccgcgccggccctcgccgtcgcctgcgagggcggccaggtcacggcgctctccgtcctgggcgaccgcgacccggacgcggcctggcgcgccgcgctgccggccagcttctcctccgaggcgctgttcaccacgctcaccaggctcccggcgctcgcgcgcctctcgctcgtcggcctcggcgcctggggcccgctcccgggcgccaagctccgccggctccaggcgctgcagcagctcaacctcagctccaactacttctacggcgccgtccccgatggcctcgcccggctctactcgctgcagagcctcgtgctgtcctggaactggctcaacggcaccgtgccgtccctgtccgggctccagttcctggaggagctcgacctgtcgcacaaccggctcggcccggcgttcccggacgtggggaggtcggtcgcgcggctggtcctggacgacaacaacttcaccgggggtatcccggcgggggtgagctcgctgggcctgctccagtacttcgacgtgtccgggaaccagctgcagggttggatcccctcctccgtcttcgcgctcccggcgctgcggtacatcaacctctcccgcaaccggctggcgggccagcttcccgccaccacggcttgcgcggaggcgctggcgttcgtggacgtctcggcgaacctgctcactggggcgcgcccgccgtgcatgcggggcaattcctcggcgcgcacggtcctcgtcgcgggtaactgcttcgccgacgccaagcagcagcgggccagctcgtactgcaaccccggcgcgctggccgccgtgctgccgccgccgcagggcaacggaggaggaggagggcaggggacggggaagggccgcgagatcgggatggttcttgcgattgccggcagcgtcgttggtgccgcattgctgattgcgctggccatggtggtggtcctgaggagggcgaggaggcagcgtccggaggcgaccatcctgccgaagtcgcccgcggcgacaccgaccaacaaggcggatggatggaaggctccggctaaggcaacccagaagattattactcctgctgataagagacatgcatcacaagctgcaagggtgaatacactggaagtaccagcctaccgagtgtgtacactggaggagctccaagaagcaaccgacaatttcagttcctccaacctaatcaagactagtcctcttgcacaggattataatggtcagcttcaagatggttcacgagtactggttagatgtttgaggctgaagccgaagtactcctcccagagccttgtccaatacatggagattatttctaaacttcggcaccgtcatttggtcagcatcattggtcattgcattgtcagtgatgaggagaatcctaataatgcgagctcagtctaccttgtttctgaatgcgtgacaaatggatctttaagaagtcaccttactgagtggaggaagcgtgaaatgctcaagtggccccaacgggtttgcgctgccattggcattgcgagaggggttcagtttctgcataatctgactgctcctgggttcgtacagaacaatctcaacatagaacatattctgctggacaagaccctcacgtctaagatcagcaacttcagtcttccaatgatatcaactagcaagaacggcaagattctctcagagaccccatttgctgtccatgaagacaatgatatcggcagtgctcagaacgcggcacaaggtgacaaggaagacatctaccagattggcctaattctcctggaggtgatcacaggcaaaccaacagagtcccaaagccaactggagtccctgaaagctcagctaagtgaggcgctgactgaagacccagacaggctgaaagacatggcagacccggcgatacacggtacttttgcagtggactcactgagcacagtcgccgagatagccctcaagtgcacggctggcgacccaagcgaccgaccttccatcgacgacgtgctctggaacctgcagtactccatgcaggtgcaggatgggtgggcgagcagcgagagcttaggcttgagcgtcaaatctcaggtttagataaaggcgcagtgattcggttcctatgcaaatgatgattatgaagctctatgcgccatcactctgcctctagttttctggggtttttttttgggaggaagagaggtcgttggtatagtctctactgtatatatgtggaccttacctttttcagaactgttgtttatggtacctgtaaaactcaggttctattaagcgtttgtccactcaacagatatgtgctgccatttatggagcagcacacaagcagtagttaaaatgggacttacagcctaaaaaaaaaaaaaaaaaaa

SEQ ID NO: 172690 - DNA, 399 bp, Zea mays
  Clone ID: MRT4577_89076C.1
ccaactcctcctgccactcgtgcggttgaggttgccaacaacgctgactggataataggtcagcacatgtgacgtggcggatctggcgactcacagtcagtatctggacctcagggtggcggagaccatccccctgaagcacaacatgaacacgctaaaacgtgaggctgcggaacgtcgaggccaaattgtattgacctgcatagaagtatctactatttactggaaacacagatacccaaatgacatgataaacctgtggtgcaacaatccgatgatttgcccccacttactttactgtctgggggagggatgtaacacgacacttgcattgctttttacgcatatgatgttaacatctgccattgatgcatgctcacagggcacaccattaacgag

SEQ ID NO: 172691 - DNA, 288 bp, Zea mays
  Clone ID: MRT4577_89077C.1
cacgcgtgcgtgccgccagccagacccgatcccctccctcgctagggttttcgtccccgcgccgccgcgctaccggattccaccgaaacaaccatggtcggcggtcccgcggcagtgtcggtcctgaccaacatcgccaaagaggctgggggctcgagccctgtctgtcgatccgtgcggttactccgggacggtggtcagcgccccgttatcttcgaccgtttttcggggggtggttccacgtagaccgactggcgagggcacccatttgctctcgccctggttgat

SEQ ID NO: 172692 - DNA, 722 bp, Zea mays
  Clone ID: MRT4577_89078C.1
aaactgccactaagtttttaagttagtatataatgggtggctgttgttgctgttcgtcgagaacatctgaagccgatagagcaccaattgatatatataatacgatgaagaaaatccccgctctgtaactaagtgtgagcaccatttccatctttgctgcattcttgaatggatggagcgaaaagatacttgcccagtttgtgaccagacaattttggtggatgagatgtccgaatagacttggtaatcctggtggatcatcacttgaagctgtttgttactgaggaagtgcaggcaacaactactacactcttgatattcgtccattctgggtggctctcagagtaatgaattgatggggcaaaaattgaaaggatgaacgacatgaaatgtatttacgccccctcctttaccctgcattctgtgtcatgcttttgctgttcatagcaacaggtggactaggaaactgcttggttgaattatatatagagagagatatgtcggcttgcaggttgattcagttaaaagtgcaaaactatgccatttcgcttttctgaattcagagtttcagacatctgctggttcttccaggaatccagtcagctttttacatggtatattaggtggttgcaggtaaaaatggtctagatggaggtgggggtttctttgtataatccacatgctattcaagcttcctgtatataatatttcctgttttcttc

SEQ ID NO: 172693 - DNA, 170 bp, Zea mays
  Clone ID: MRT4577_89079C.1
ggcagaccgcctctgcaccgttaccctgaacccacgcggactccggttgacacgaatcgtgagcggactaccagtttcagtccaggaaattggtggcgctgctgcgcgcatggcgactctggattgcggtctgccccacccacgaacaatccatggctccatcttcgcct

SEQ ID NO: 172694 - DNA, 452 bp, Zea mays
  unsure (1)..(452): unsure at all n locations
  Clone ID: MRT4577_8907C.1
aacttaantcttccttttttttttttttttttggttgtttttttttttttttttttttttttttttttttttaaccccgctcaaatgggactagagctcaatcgcttttaaaaaacagggtacaaatcagggctgaaaatatgggataacgctctgaacttgggacgactaaccaaaaaagggtcctcatcaggacacacatttgggggcaagacaatccatgagaatgctctaagctacagggctcttgccctttttcctttggagcttcttcatggagaattcaagctctttaccctcaagggtgtacccatcagctgggccacactgtccaggacgggaagaaatgcatgccagcaaccgtccactggcaaattggtcctcaatggggggggcaaggggacctccctccttgcgcttttcaagctttctcgggacatgggtggtctttt

SEQ ID NO: 172695 - DNA, 204 bp, Zea mays
  Clone ID: MRT4577_89081C.1
cggaaaaaccgaggcgacccacgcgaacggctgcacaacatcgcgggcgcgctgaaccgccacccgcacccggccaaggcccgcacgccggcgccgccgaccaccccaggggacgccacagacgccgcgcccgacagcccggacaaaaagcgcgcgcgcgagcaccacggcaagcacgcggccagacgagacgggcaggagcac

SEQ ID NO: 172696 - DNA, 469 bp, Zea mays
  Clone ID: MRT4577_89082C.1
gtcccacacccgctatcgtgaactctccacactatctcacctccaggacatcttttatgcgtgagcctccacgaaggcgactatgaggcgctggacatctatctcgctcgtgactaccttgtggatgaaccgctatctagaggcctacctccaaggaggctgattgcgatgtgtatgcatcttcacgactcgtctggggtgcaagttgtcgatgcatgtgagatactggagagaggacatatctatacctcgccctgcctgactcctgtttgatcctgattctagacttgaaatgctatgcttcactaatgctatctcccgttggttgcaagctatttcgcgaatactctgctcatacatgtatgtgacgtgcgacgacgaccctgtctctcgtgagcttatgttctggtgatgtctgccttccggtatccatggatgctttatgcatatagtatgcttatgatctaat

SEQ ID NO: 172697 - DNA, 738 bp, Zea mays
  Clone ID: MRT4577_89083C.1
gggccgcgaagaacacctcaatcggacatcagatcagaaagttattgcagtttgattatagcagttttttagtctcataattctgtgcataacctgttctcttatgagttaggcaattttatcaacagaattaaactatgggttggtaaaagcagttgtagataatttcataaactttccagattgttaaagagttcattcatatgatttgtgaaactccagttatgtttgttttactttggctgttcctgtttgccagacaaaaatgagcaggtctattcactggtaggtttcatcaggtaaatggccgaattggctcttccaactatggagacttctgtagagggataaaagttcttactgccagtggaattccacgatttttggtggagtagtttgtgagatatcgaattttgaagttaactacgctgttggctgaaacagattcagccagttatcttgacagaggttttagtatttgtagatggcagaatttaattatcctttgaataccgaagttgtagagtattttgtgtagatactcctagattatttgtttgatatcaccactgttataattttaaagatacaaaattaacaaatagtgttgctgctgtatgatatgtggttcagggtgggaggctttccaacaggtcttggtttcaagtgtaggagcgatttgttgattgttggcaaatgtttgtgaaatatttgtactaagttttatgcccgctagca

SEQ ID NO: 172698 - DNA, 700 bp, Zea mays
  unsure (1)..(700): unsure at all n locations
  Clone ID: MRT4577_89084C.1
cacgacctgcacgcgtcggactgcctggaggagctgcgcccgggcgaccatttcgagatccagtggcgcaagancaaggacttcccttatggctggtggtatggcgtcgtgggtcaccaggagtcgtgcaacgggaacgagcatttgtgtcgctgccaccaagacgacacggtcgtcctggagttccagcactacgcccccggctcccggtggaggcagaccactgtgggcaggaaagatcacagggagaagggggacgagacggacggcttctacggaggcatcaggaagctgcacaccaaagacgagatatcaacgtggcgacgattctggcccgtcgatgtcctcaactgaagtgaagatcgtattcgttatgcatctgcagactgcagccggtctgagcgcctccgttccaaatcccccgccccgtgtacagttacggagagctctctgcacacgcgtctgaaataactccggaacccttgtggggggtctgaaggatctattttttgctaggattcatggtgcacgagttttgctctgtccaagtttggtttagaagaacaggctgctacggatgatgtacaggtctatccagttttcgatctgaatttatgctgttgccgtatcctggtctatgtgcatcataattttcggaatccatcgcaatccgcccaaaaaaaaaaaaaaaaaagcggcc

SEQ ID NO: 172699 - DNA, 665 bp, Zea mays
  Clone ID: MRT4577_89085C.1
ataccaaaaaataatcctgttgacggagcaccattgccatcatttgttgagtttcttgcgcctagtgaggcttcacataatcacatccacccaaatgaatgttggatatttatgtgagcagactaatttaaatttgaacctgtctactgtgctgtgagatgaaacgagtttttggacaaggttacgttgaaatcataatagggtatttggtttaaggattgaactagtccatcattttctcactccttactttttttatttggtttgtgtaatgaaatgtgttgatccatcaccaccctattccttatagttagttacttagtactaatatatggtgtgtttggtttgtagagtcactctatactccatgagatgatgcatcataggttcattccattaattttggtagaatcaactcactcctcatttatatactaattattagtttatggggaatgaggtgatgatgaatcaacccactctattctacaaaccaaataaaaaagtgaggagtaagaagaagatgaatcactttattcctcaaaccaaacacactaataaagaatgaggtcatccaccaattttgaggaatggatccatactgcaccaccttattttggacggagcgattcctcacaccaaacaccccttaatagtttaccccc

SEQ ID NO: 172700 - DNA, 702 bp, Zea mays
  unsure (1)..(702): unsure at all n locations
  Clone ID: MRT4577_89086C.1
cggacggtgggcaaaaagaggcatctgatcttgttaaagtttgcacctctgttttggagtttgaagcatccagagatggactttacttcgttcctgaggataacgcttccgaacaatcttcggacaaaggcagggcctggcatcaaactttcttgaatctcctggcacgtctagatgcggcatttcattcttttacatgtgcagaacaagaatggaaacttggccagctcagtctggaagctgctggaaaaggcctgttttcagctaataaccaggtttcagtagtctctgtgaaagcaaactctgctttagttaatctccaggatgttcttggtgccatgtatggtcatgcttgtgaagcaagtgcattgctatctggattcaaacatgtatcacaagactgcactgctttgacttctgaatgtggttcgttgctcgaggaggttttagctatagcagatgggttgcatgatgtatacactctggggaaggaagctgctgctgctcacagttcccttatgaccaatctttccaaggcaaatacaattttgtttccacttgaggtttgtctatgtgctgatgtaactgttatgtctgaagcgatttcaaacgaaagagagaagacaatgctagtatgcctcttattcatggaaaggcattataccaatcttataatattaaagntagggaagcttgcaaaac

SEQ ID NO: 172701 - DNA, 204 bp, Zea mays
  Clone ID: MRT4577_89087C.1
tcgccttttctcccgacgccgcgccggttgtgtgtccgtgggctgctactactccaggtgaaggctactgtgcatccataaaatgggtccataggcctatgctttgtccatagacccatctaagtctgctgctatggtgaagccctgcatgcctgtactggcggccttgctctactgcctggtcttgaacagacataacgatga

SEQ ID NO: 172702 - DNA, 637 bp, Zea mays
  Clone ID: MRT4577_89088C.1
actttctccgagctcgtagatgaggccgtcaccgagaccgccttcccttccccttatccggtcgtctaggtatcagccatggattcgagcagccactggggcacctcgctaaacgacccactgtgcttcataggataacggccacgttcgacatgtgctcctgcttctctgagcgctctcggcgccgtaacatctgcacttgtttcacaccttataaaagtggatgttgcacccggcactacgtgacacaaaggatttgtacgcgttcctcggctgcatcggcggcaatcgctgtatgctcggtggcgactcgtgttgttgccactgctctttccgactcatcgggctccccatccttgtactgcatattcctagtatcgcgcacaagaatccagtgctgccgccaacacagcagctgatccatgtgctgcacagagggttcctcttcttaattgcgctgaaatgctcacacctgcccaggtatcatggcctcacgaggcgattgatgtctgctctgaacgaaccatccgagatcaaggactctcttgctggtctcggcggaacactagctacaaggctgtcgataatttcctactccagttctcaatgttcttctcaatgactactgctgagatgt

SEQ ID NO: 172703 - DNA, 583 bp, Zea mays
  Clone ID: MRT4577_89089C.1
ctgtagccacaagtacgcggtagcggtgtcagtcaccactgagttatggcgcacctaccatacgttaccccccccccccaccagacctgtacgccagctctcattgacaggagtaggaggcttgggaggattatttggtgatcacctataataggatgaagatagtgactcagataaagattattaagatgattttcaagatggattctacggtttaagttatcgtgtggaaggtcttcaataacgtagaggagaaggacaatgttaactagtagaatcactttgcaattcagattctggtcgctgtccatcggattcgaagcttcaacttaggtaggggcagagaatcaacttcagctcatcataatactacaagttagttaacgaacgatagtatgggaaacctgtgttgttccatcctcctcactgtcgtttattcctcatcactttcattattaaaaatctgctcgttcttactctcctcatcattaaaaatctgttcctcactattattctgatctacccgaaaagtggttggttttgcctataccccaactggccaataaagcggagagatagtccg

SEQ ID NO: 172704 - DNA, 159 bp, Zea mays
  Clone ID: MRT4577_8908C.1
ctctagacaccctaaacaacatactatactctctcaccaccataacttatccattggctagtcttcactttacctttctcatcactcattacaaattctacccttactatacaacccataccattacaatatttaaaaccatacttataacataacaca

SEQ ID NO: 172705 - DNA, 554 bp, Zea mays
  Clone ID: MRT4577_89090C.1
ggagggagagaatttctacctgggctttatttaaaataaaagactgctgcaggctgacccgaaaagaccagtacacagatggcacacaacaaggcacagcagctttggcttatttgatctcacatgagtcaaaaagaagaaaaacaatctaccaagctagaatctggtaaataccctgatgacatgagctctctccgcacagcatagctaggaacagaatcatgctggaggcagatccaatctgctataaatctaatcaatggctcatcgttatatcagatcattcgctgaccttcttcggcttatcttcctcttcgtggatctcctcaagcgctgcccatagcttatgatctttatattccttgacgagcaacgcgggtcctgctttcaccaaggacttgtgcgggttcctcatcgccacaccgacgacaggcgtgcatgccgcgactcctaccctgataccgacaggcgaatcctctaagaccaaagtgtgctcttcggacacctgcagctccttgagggccctgacataaggggacggcgcgggctttggc

SEQ ID NO: 172706 - DNA, 751 bp, Zea mays
  unsure (1)..(751): unsure at all n locations
  Clone ID: MRT4577_89091C.1
cattgggtacctcgaggccggccggggttgcctcgtccatgcgcctcatagacttcccgagcttcatccgcaccacggacccggacgacgcggtgctcgccctcgtcctgcgctcaatggagtgccaccgcaccgtcccatccgccgtcatattccacacactggaggagatggagagccaggtcatgagcgcgttgtcggccatcctgccacctgcctacgccatcgggccgctaccgctgctcctctccggcgccggcggaggcggtgatccggccatccacgtgtcaggctcgtccaccagcctttccaaggagaaccgcgcttgcctagagtggatcgacggcaagcggcataactcggtgctgttcgcgagcttcgggagcctagcgaagctggcgcacgagcagttggtagagctcgcgtgggggctggccaacagcggctacgagttcctgtgggtgatcaggagcgaccagcagggngctggtcgnacggcggagccgtcctggcctccggagttcttggcggagacggaggggagaggctgcgtgacgagctggtgcccgcaggaggcggtgctccgncatgacgcggtcggggccttcctgacgcactgcgggtggaactcgatgctgcagagcgtctggcgccggggtgcccatgctgtgctggccggtcgcggccgatcagcaaactaacancaggctcgcgtgcacagaatgggcgcgtcggcgtggagctcggcgag

SEQ ID NO: 172707 - DNA, 333 bp, Zea mays
  Clone ID: MRT4577_89092C.1
cgcagcatgacccatactttattagcaacacatgggtcaattagaccttattattcctcctaaaatagtatcataccaaccactaactaaagtaacatttaggtcttacaaatattagtaatatatatgtttatgtaccttggtggagctggtggtgggggtagaaatagggggcgttgttgttgtttttccaactgggcttgccttattgtttggcgcatttccagtcggtcctggcgtatttcctggcgttcgggtcttatctgattttggatttaataaaccacttttgccatttgttgtattaccggcatttgggcagcaaccacttga

SEQ ID NO: 172708 - DNA, 276 bp, Zea mays
  Clone ID: MRT4577_89093C.1
ggcgagcaaagcaaaagggccgcttgactttcacatagttccggcccacaatgatttgtgagccttttcgtgacgggcaagtctcatggcaaaaacaaaaaaggggcgaaatttggttgggtcgatttcccataatgacccgagattcccacaactaaaacattacaactttgaccccaaaacgggaattttgagctgacacgagcaaaacggcccttgattggcaagggagtggccacttaaaccttgaaacccctggtgttcctccttcctttc

SEQ ID NO: 172709 - DNA, 817 bp, Zea mays
  unsure (1)..(817): unsure at all n locations
  Clone ID: MRT4577_89094C.1
cattgggtacctcgaggccggccggggccgcatttcctagacccagctagtagatcattgcgcacatatcgaaacagctctctagctagagcgctcgacgtctaaactgccttccgggatggcttccaaacatatcgaagtcatgacctgcttcattgccatcaccgctctcgccttccgtccctgcgcatccgccgtggccatgtacggaggctgttctaacggtgttgccacctgatacggccccgccaagggcgctggatccgacggagatgcgatgtgggtaccacgatgtcgtcgaccaacctccgattctcgtcaatgatcaccgccgttagacaatccatcttccagcacggaaagggctgcgtcacctgctaccaggtgaagtgcaccggacacaagccttgctccggcagcccggtgacaatgatcatcaccgacctgtgcaccgacgctaccagccaggcggagaccgtccacttccaactgaccgtgacggcgttcggtgccatggcgaacaccggccaggccgacaatgtccggaaacgtcgaccgcttacaattccaggacactcgcagggcgtgcaactgaaacgttttggacatcgtcttcaggatggacatcgtctcatacgccaactacctggccatggtcatccagtacgatgccggctacggggacctgcgtgtcgtggatatgaaccatagcggtgcggcaactagcacgcccatgcaacgctcctgacgcgctgtgtgtgagtacaagtacggctccaccaatctgcagncccccctgtctgaccgtctcacctcg

SEQ ID NO: 172710 - DNA, 115 bp, Zea mays
  Clone ID: MRT4577_89095C.1
tggctagcataaggatgcgaggcagagcctcgagatgccgaccaccatttgcactcaggccgacgctgagcgatcgcttcactggcagcgaagaagatgggttccgtcgcggagg

SEQ ID NO: 172711 - DNA, 534 bp, Zea mays
  Clone ID: MRT4577_89096C.1
atacccccactggggctacagaccatagatatatcgactcagagcgcagaacaacccgatcgacaccatgagggagatgttcgccgtccttactctcctggctctcgctgcgagcgccagcctacacgcactacaggcgcgtggatgcggatgacatccaatggcgtcggttcatctaccagacgccggcagtatatgacagcttcagtttaccagacacctgcggtgcatctctaaccgccggaacacgtgacggcgccgggccacatgccaccatcaggcctatgtgcaaccgtcggcacatctatcgtcggcgccatgacagtaccatactaaaacggcacagcctcagcctcatcccgagccacactgataccaacgaaaacagtctgatacaagttcgtgcctactgtcaggaacaacgatgtgttgcatgcaaccaaatgctgacacagaaccgtgctgctcatatgcatcaacagctatcagcattgacgcagctatgtactgcctactgtcagtaacaacaacttc

SEQ ID NO: 172712 - DNA, 469 bp, Zea mays
  Clone ID: MRT4577_89097C.1
aaaccgaagcccccacaaagttgttttgaattgaaaaggggtggcatacacaggcttgacaaaaggggggtgacaaatgggcctgggttgttaatttgcattggtccatacaggggccaagtaaccaggggggtgcaggggccaaaacaaacacaaatggaagctgggctcaatcctcaagccaagagcgggttttgatcgaacaccttgggggcgtaacatttaaagggggccgtttgtaaaggccttgagccccacccccactttccccgggttgatcgagttcttggggaggacccatttggagtgggtttaggccccgcggaggagggcccccaaatcttcttcgggggggagggcccgatagttgacaaaattttggcgggccttcctggcgtaaaaggggtggtttttccccgggaggccgcgcaccaggcgcaaaaccttggggtttgcacccagccccccg

SEQ ID NO: 172713 - DNA, 269 bp, Zea mays
  Clone ID: MRT4577_89098C.1
cctctccccccgactcctggcctgccaccccaccccagcgtttaccccaaagcacaatgccctggtcacttggcaagcggctgggcctgacggaggccgaggggcagaccggggctccagccagacccctgaaaggaagcaggtgctcccccacttccaggccttagttagggtgggggggccagctcctgggcctggggtcttctcacccccagccccttgtcctgggtaggcccctgcctgcccctctctgccttttcctcgggtgt

SEQ ID NO: 172714 - DNA, 221 bp, Zea mays
  Clone ID: MRT4577_89099C.1
gtgagtgactgctctgtgtggttacacataagaagaaccgcgtgcttttccccaacatcgaccctgttacaaactgcttgaaaaacattaatattcgaaccgcccaccaaggatgcagggggacttgctattgctattgcagccaggaacatctggggacaaaaagacccgttataactgtttccaagaaagcctgcatttacaaccactttttggggtca

SEQ ID NO: 172715 - DNA, 489 bp, Zea mays
  Clone ID: MRT4577_8909C.1
aacaaataatcatcccccgctcaaatggggccagggcccaatcgcttttaaaaaacaggggccaaatcagggctgaaaacatgggataacgccctgaacttgggacccctaaccaaaaaaaagggccccatcagaacacacatttgggggcaagacaatccatgagaatgctctaagctacagggctcttgccctttttcctttggagcttcttcatggggaattcaagctctttaccctcaagggtgtacccatcagctcggccacactggccaggacgggaagaaatgcatgccagcaaccggccactggcaaattgctcctcaatggggggggcaaggggacctccctccttgggcttttaaagcttcctcgggacatgggtgctctttttcggttcctcaggtggtgcctcaaccttttggccctcagcattatccttttttgcagcagggggtttttttttcctaccaatggcaactccatagg

SEQ ID NO: 172716 - DNA, 550 bp, Zea mays
  Clone ID: MRT4577_890C.1
aaaaaaaccccattttttgggtttttagggtttaacaaccccctggggggctttaaaaacaaccccggttccccccttttacaaaaaaaacttccaacattttccgggggaaaaaggggggttttaaccggggttttaaaaaaaaaaattttttttgcgggggtttttttaaaggggagcaaccccggttgctaaaaaaaaaaaaacccccagtttttttacagttccgggggggggaaaaaaaaaggggtttaaacttgggaactggcccttaaaaatataagggggggcctttccccccaaggggggattttgggaaacccaattttggtttccggaggggccccaccccttgacccttccaaaaaaaaactttccttctttgaatctggggcttttcaaaagaccacccttttttttccttccacgggggggcccccccccaccccaaaaaatttaaaaaacggtttgctttcctgtaataaaaagggagatttttttttactccaaaagtcactttggcacccttttggaaaaggccccccttccc

SEQ ID NO: 172717 - DNA, 1243 bp, Zea mays
  unsure (1)..(1243): unsure at all n locations
  Clone ID: MRT4577_89100C.1
gatgttgttctgtttttgatgggtngtatattttgttttaagactanaagatataaantaaaagtgttggttctgcgcctcggtctccgtgcggtttgtctcgttttctctttttctttttattttctctcgttcgtncgtttctttcttcttcttgtttgctcgttctttcttatgtggtataattgtttcttgtttttatttttatttgttcttttttctagaatacttagttctttatccttctatatttttattttacttgctctttggttgttctctttgaactcctcttatttttatatttttttttttttttgtttttgtttatttatagatgtattattgttttttttgatttaatttttcctttttaatttgttgttgctaattttttgttttttttttggtgtattatattgtattatattgtttctttctcaatttgtaatgttcttttttttaaggtttttgttctctttattttgtttttgttatntattatttattatttaatntaatatttttttttattttataagtgtatttctttttttttaatttttttcttgtttctttttttttttaattcctttttttttattnttccttttttttatttatatatagaattcttttntttttttcttttttttttttattttttttttntattatttttaattnatttttttgttttttttntttaattttttttattttttttcttgtttctttatttttttaattttttttttatttttacttttttttttttttttttttattttatttttatatttattttttttctatattttttatttttatttttttttattttttatttttaatttttttttttttttatttttttttttttatttttatttttttttttttttttttttatttttttttttttttttttttttttttattttttatttttttttttgtttttttttatttttttttttttttttttattttttttatttgtttttttttttttttttttttttttttttttttttttttattttttattttattttttttttttttttttttttttttttnttttgttntttttttttttttttttttttntttttttttttttttnntttttttttttgttttttttttttgtttttgttttgttttttttttttttttttttttnttttttttntttttttgtttttttnnttttttttttttnttttttttttttttt

SEQ ID NO: 172718 - DNA, 347 bp, Zea mays
  Clone ID: MRT4577_89101C.1
ttccggcaggcgggggaatgggccggggccaactgggaggcgccagtcattgaggggggtttgcgggggggggggccgacaggcgcaagcaacaacggtggcggcaaacaataggtgcaacgggtgcaggggttctgatatggccccgggccagggctcctccaagggcttggacggcccggttggggacaaaaagaaccctgcacgggatggcttcctctggggaaggcccaaggtctcttccggggcgtgggagccccaactcccaatcgaaaagccccatgtttggcttcaacccctccttggtaaagctcctggccgcaaagcacaccccttggggggggaag

SEQ ID NO: 172719 - DNA, 330 bp, Zea mays
  Clone ID: MRT4577_89102C.1
actcgggtggagctcctgccaagatctatttcttgacggaacatcacaggatcatgcactcggggactgcggacacatgctgaatgaattgtcttgctaaggtggcggtgcaggcgaacaagcgacagttgttgctaaattcgacaagctaatgaaccactcaaagattctcatgaggaaacagtggctgcatggaatagttgacgaagctcacacaaagcggcttccacacactcgcagcgtggtgtcacagcctctggtatgctttgaagcacaacgctgacagagctttaacctactctcacggagagccagtgacatgctgtgcag

SEQ ID NO: 172720 - DNA, 660 bp, Zea mays
  unsure (1)..(660): unsure at all n locations
  Clone ID: MRT4577_89103C.1
gggcttttcccgcgcaacggccaccgcgttttctccgagattgaccagctaacgcccacttcccggacccctcggccacactcgtgcccttattagcatccctaggacccgtccgcgccgccacgatcccaatttccctaaccatagcgccatcggctcgccgtcaaccactggatagagagagggagagcggggatcttacatcgcaaaaatgcccgctcattgtcggccacatttgggttcaattagagtacctggagattcgcccagccctactgtgggtgcgtgaaccgtgggcgggcagagcgactggctgtggtgggcgaaatttctcgccgtagttgaagaaccgccgcgaacccgcaccacctcatggaccggaggtttctcgctgcgaactgagaagagcttgtgaccgaggatcctggtgaccagcagatagaagtagctgagcaggagttcattgaaggagaagatcaggtggttcaagaggagcctcaaagcgaggagtttgatctaatctaggtggcgtttccctaggtgacttttgcgccaaggatgatccttagttcattttatatttatcttttattttggaataagacttccgctttgtaataaatactctgatgttattgggacttttatctctaantnnat

SEQ ID NO: 172721 - DNA, 778 bp, Zea mays
  Clone ID: MRT4577_89104C.1
ttgggtacctcgaggccggccggggtgaatctctaaatggaaggggacgaaatgctcagggtgaagctcggcaggcagggccttgaggtgtccaagcttggcttcgggtgcatgggcctcactggagtgtacaacgccccagttcctgaccaagctgggatcgacataatcaagcacgcgtttgaggccggcatcaccttcttcgacaccgctgatgcctatgggccacacaccaacgaggtcctgctcggaaagatgggagagctcaagaagttggttgaagaagggaaagtgaggtatgttggcttatcagaggctagtgccgataccattcgacgggcacatgctgtccatccaattactgcggtgcagttggagtggtcactatggaccagagatatagaggaagatataattccagtctgcagggagcttggtattggaatagttccatatagcccacttggccgtggcttctttgctggcagggcagctgtagaacgtgttccatcagaaagtctattgtctaaacatccaagatattctggggaaaacttggagaagaataaagttctgtatacacgacttgaaatgttgtccaagaagtatgggtgcacccctgctcaactcgctctctcctgggttcttcatcaagggagaagatgtggtccccatccctggaacaacaaaagccaagaaccttgacgaaaatatcggtgctgtaaaggtaaggctgagcaaggaagacctcgaaagaatctcaggcgcattccctgct

SEQ ID NO: 172722 - DNA, 658 bp, Zea mays
  Clone ID: MRT4577_89105C.1
caagcttggcttcgggtgcatgggcctcactggagtgtacaacgcccctgttcctgatcaagctgggatcgacataatcaagcacgcgtttgaggccggcatcaccttcttcgacaccgctgatgcctatgggccacacaccaacgaggtcctgctcggaaagtctaaacatccaagatattctggggaaaacttggagaagaataaagttctgtatacacgacttgaaatgttgtccaagaagtatgggtgcacacctgctcaactcgctctctcctgggttcttcatcaaggagaagatgtggtccccatccctggaacaacaaaagccaagaaccttgacgaaaatatcggtgctgtaaaggtaaggctgagcaaggaagacctcgaagaaatctcaggcgcattccctgctggtgaggtggctgggtctagactccttggagtcttggagcctttttcctggaggctcgcaaataccccgcctccaaaatagcgagttcagatgcaaattcttggccatcctaccatttaggtcatgttatgttagatcatatctacatgatgcaaatgattgttcctgtgctcgcgcgtgaaaatgctgtacctgaaacaaagagagtaacagttggttctctgtgtggaacgtgctgattgc

SEQ ID NO: 172723 - DNA, 1296 bp, Zea mays
  Clone ID: MRT4577_89106C.1
cctcgaggccggccagcactctctccgtccgcgaatccgtaaatggaaggggacgaaatgctcagggtgaagctcggcaggcagggccttgaggtgtccaagcttggcttcgggtgcatgggcctcactggagtgtacaacgcccctgttcctgaccaagctgggatcgacataatcaagcacgcgtttgaggccggcatcaccttcttcgacaccgctgatgcctatgggccacacaccaacgaggtcctgctcggaaaggcattgaaacattttcctcgtgagaaggtgcaaattgccaccaaatgtggcattgcaggatttgatgcaagtggcatgcgtgtgaagggcactccagattatgttcgagcttgttgtgaagcaagccttcagcgccttgctactgactacattgatatatactaccaacatcgcattgatcagtcagtgcctatagaggaaactatgggagagctcaagaagttggttgaagaagggaaagtgaggtatgttggcttatcagaggctagtgccgataccattcgacgggcacatgctgtccatccaattactgcggtgcagttggagtggtcactatggaccagagatatagaggaagatataattccagtctgcagggagcttggtattggaatagttccatatagcccacttggccgtggcttctttgctggcagggcagctgtagaacgtgttccatcagaaagtctattgtctaaacatccaagatattctggggaaaacttggagaagaataaagttctgtatacacgacttgaaatgttgtccaagaagtatgggtgcacacctgctcaactcgctctctcctgggttcttcatcaaggagaagatgtggtccccatccctggaacaacaaaagccaagaaccttgacgaaaatatcggtgctgtaaaggtaaggctgagcaaggaagacctcgaagaaatctcaggcgcattccctgctggtgaggtggctgggtctagactccttggagtcttggagcctttttcctggaggctcgcaaataccccgcctccaaaatagcgagttcagatgcaaattcttggccatcctaccatttaggtcatgttatgttagatcatatctacatgatgcaaatgattgttcctgtgctcgcgcgtgaaaatgcatgtacctgaaacaaagagatgtaacagttggttctctgtgtggaacgtgctgattgctatagttgatcaaagaaatacgttggaattaagctaaatgtccttcatggtgcactttgatgcc

SEQ ID NO: 172724 - DNA, 349 bp, Zea mays
  Clone ID: MRT4577_89107C.1
ggggggtaaaaccccaaattttttaaaaggccgccccccgaaaaataaaaggggtttactccttttacacaaaggggggggaaatccaatccctttttaaaccccttttgggttgggcttaaatcccttgggctgggagtacaggaaaactccgggaagggcaattgcattacccaaagagttgttaggaaaaacaggggtcctgaaaaaaaacactggtgttacaatgaccccaaaacggttaaaacaggtgcccccaaaatgggggacagggaacaccctcgccaaaaatatgtaaaaaacctgtggggttgcatgggaacccagtccaaggaaaaaaccccttggg

SEQ ID NO: 172725 - DNA, 402 bp, Zea mays
  Clone ID: MRT4577_89108C.1
aatatacgtggcaaccttgacaacatgggagaagataacaactcggcaaatacaacagtatgtatagccacatttggagcagggaacagaaatctacaccgttccaaaggatttgctcattggccatattattaaaaagagttgcagcgaaggagagggtagcgtacagaattgaacttgcatcttttatactcgtatatgacgatgtgcatgcatagggcgtgagtagtgggtggtggtttgctgatgcagtggctttctagaacaggaagtaattccgagacagtggcagtgtgggtgctggttggcatgtcaaaacctctccatcagcggtcactgtgtaggtctccgggtcgacctctattttcgggagggccgtcgtgagcttcatgtaagctttgt

SEQ ID NO: 172726 - DNA, 231 bp, Zea mays
  Clone ID: MRT4577_89109C.1
atcgtatgtgatattctatgcatatttacttcatttgttctcttgtatggtgtactttttgttccctaatttgaatggatggatgtatgtatgcttgcaatcgcatagagaacgatccgatcgaagaacccgaggaactcgcaagagaagcccctgagcagcagtcggttggtggatgttgtcagcattgcaaccactgctcaggagaagataaagctgtggaaggagact

SEQ ID NO: 172727 - DNA, 252 bp, Zea mays
  unsure (1)..(252): unsure at all n locations
  Clone ID: MRT4577_8910C.1
ctggcagcngaactcaccggcagccattttacactagctctactacgaggggacagaggcatctagatagaagtcatcgccgtgctgtccatccttcgatcgttaaccgctaccggaccgccgtcggcgctgccgcccgacccgtcgctgctgtcactgatcatcccgctcctctacctcggccgaacgaacttcggaatagggatgaggggtccgacggcggacccgatacggccacgtctgacactctac

SEQ ID NO: 172728 - DNA, 1390 bp, Zea mays
  Clone ID: MRT4577_89110C.1
gaagaaaattgtttatctgttgcagaagattttgatattcaggtcaatatacacacagataccttaaatgaatcaggctgcgtggagcatacaatcgcagcttttaaaggtagagccatacatacatatcacagtgaaggtgctggtggcggtcatgctccagacatcatcaaagtttgtggggtaaaaaagtgttgccctcttcaacaaatcctacccggccatttacttcgaacactgtagacgagcaccttgatatgctgatggtttgtcaccaccttgataaaaacattccagaagatgtagcatttgccgagtctagaattcgagctgaaacaattgctgctgaggacatattgcatgacatgggagccataagtattatatcatctgattcacaggccatggggcgcgttggagaggtgataacacgaacatggcaaactgcaaacaagatgaaggtacaaagaggtagtttacctggatctggtgacgctaatgccgccccggacagtgacaacctccgtataagaagatacatagcaaaatacacaataaatccagcaatagtgaacgggttttcagactttgttggttctgttgaggtgggaaaattagctgaccttgttctttggaaaccatctttcttcggcgctaaaccagaactggttgtaaagggaggtgcaattgcatgggctaacatgggtgatcccaatgctagcattccaacacctgaacctgttgtgatgcgacctatgtttggtgcatttggaaaggctggaagttccaattcaattgcatttgtgagcaaggctgctaaagaagctggtgtcgcaacggagtacagactagaaaagagggtggaagctgtaggccgtgttcgaggcctgacaaagcttgacatgaagctcaacgacgccctcccgaaaatagaggtcgacccggagacctacacagtgaccgctgatggagaggttttgacatgccaaccagcacccacactgccactgtctcggaattacttcctgttctagaaagccactgcatcagcaaaccaccaccaccactcacgccctatgcatgcacatcgtcatatacgagtataaaagatgcaagttcaattctgtacgctaccctctccttcgctgcaactctttttaataatatggccaatgagcagtagaacacttttgccctctgctatctgcagatgctcgcatatttgtgcggaataaaacttggaacggtatagatttctgttccctgctccaaatgtggctatacatactgttgtatttgccgagttgttatcttctcccatgttgtcaaggttgccacgtatattataaagaaaaaaagcccacttggcagcctagaaaagagggtggaa

SEQ ID NO: 172729 - DNA, 184 bp, Zea mays
  Clone ID: MRT4577_89111C.1
taacaagacaaaaaataatttgcccaaaaaattactagaataacagctcctatcctacgatgtcttcatcagcattcggcgacttctgtccgctcaccgagctccgtctctcccaaaaggcacggcatcagctcactcacatcatgatcgccgactcgactatctccatcatcatcatactcat

SEQ ID NO: 172730 - DNA, 412 bp, Zea mays
  unsure (1)..(412): unsure at all n locations
  Clone ID: MRT4577_89112C.1
acaccccaggcactctcacgcaagcgcgcaaaactcctctagcacccaaccccagagggtaatgaaacnacggcggagaccataaacagtaaggggctaacacaacacccatccnccccaacacataacaactaagatactcaaacgccaaaatcaccaccctagatagaaccaaacaaaccacaacaataaattaccgctacaccacggactcctggataaaagcagttgtccaaaaaactctacgaaagcaataaacctcactctaccctttaactcaaaaaagctcacacacacaataggggacggatatgcaccactctaaagaagaaacattcacgactaaggatatgataacaaataattaacaatcccattatgaagacgaccctgaacataaccaaaaaaccaa

SEQ ID NO: 172731 - DNA, 288 bp, Zea mays
  Clone ID: MRT4577_89113C.1
tttctactctacggctagggtacattcacacgggatggggcgatcacacacacagaacaccatcaggatcaggacagatgacaccaaaaaacggttgcaacaaccattcatgaacggattggatggcctctaccgcgtgccacttaatggttcctggaatccagctcaaacccacggacgagcttggtcactaccacatgcttatgaacagcaccacaagccttgggcttgtgatacaggaaaggcaccagatatgttttaaaaccccaacctgtaggactacaaacc

SEQ ID NO: 172732 - DNA, 481 bp, Zea mays
  Clone ID: MRT4577_89114C.1
gcacgcttttctttctcgctcatcccctcttctacctcgatccatgacctttgcatagcatatatagcgcaggaggtcactgcaggcagactaggcaccatcttatcacatcacatcggagcagagcagaggatagcaaaacccgatcccgatcccggtattcccagcctgcatcagcaagagtagaagcgccgcccatgaccatcgatccatctggctatcatacctgtcagacacggaaagcagactgatcacctaacgtactcaggcggctgatccggtgcggacatggtggacccccaagcgggagcagatactaatactctaggccatctgcaccagctgcatgggaaaccctcccaaggacaagacgggccggatacgcaatgtgcttgagcgcttcggcgccactggcgacgccaacgtcttgtactggatacagaaccggagttcctgctcccgcccgagacggggccaattg

SEQ ID NO: 172733 - DNA, 419 bp, Zea mays
  unsure (1)..(419): unsure at all n locations
  Clone ID: MRT4577_89115C.1
atgataaggaagatattaaagntagattgttngnataggttggaatttatgggnaattgagagaatgggaattttntggtggagaattatatgngaggngtttaagnntttgagagntgttngtnaanaagaaggtgtggggggagnntttnagaggtttaagntaannnaggtttgnngtatggnggnggnggnggnangagttttgggttgtnagnnatttgnntttttgaaatnnagtgnnaagttgtgatgganaanatgtggtntaannaagtgnnnagnatgagtgntgtgnntnntgtttngaaggttanaattganatgggtattnntgaattntnagntntggnagaattggtgaatgaaggntnngtngatatnnntggaggggnntttgagatgnntggtnntgagtt

SEQ ID NO: 172734 - DNA, 114 bp, Zea mays
  Clone ID: MRT4577_89116C.1
ttttcgcgtccgcttacatgtgagcatttactcggcatttggaagttgcgaacaatttgacacaaacatgtggtaaaatctcccttcatatatacgaggtcgagcaccaactaa

SEQ ID NO: 172735 - DNA, 946 bp, Zea mays
  unsure (1)..(946): unsure at all n locations
  Clone ID: MRT4577_89117C.1
cctcgaggccggccgggccgggactcactggttcatgcgatcgtgtcctttcaatactacatgaccagcctgcatgtgtgtggaaaccacaaaattcgaaggctatagcaaccagccaaccataaaagtctcgagcctaccgtttttctttcgatctccaatctcgacccacaaactgactacgtacgtaccatccgttggccatgtcagacctgctacagcagtccatgcgcgagctgatggttccacgagcatggtgcctgctgctgctccctatcttcgtcttgcttctgcgctactcggtgtgtagcaagagggcaaggaagaggcagcggcagctagacgaagacgacgacgacgacgaccatctgcctctgccgccttcgcctccgccgctgccgctcttggggcacctccacctcatcggctcgctccctcacgtctccctccggaacctggccacgaagcacggctccgacctcatgctgctccgcctcggcgccatgccggtgctcgtcgtgtcgtcgccccgcgccgccgaggcggtgctgcgcacgcacgaccacgtgttcgcgtcccggccgcgctctctggccgccgaggtcgtcctgtacggctcgtccgacatcggcttcgcgccgtacggggaccactggcggaaggcgaggaagctcgtcaccacccacctgctcaccgtcagaagggtgaggtcgttccgccacgcccgcgaggaagaggtgagcatggtgatggctcagatcgccgaggcggccgctgccggcgcggcggtggacgtgggcgagctgctgggctcgttcatgaatgatctggcgtgccgcgcagtgatgggcaagtcatccgngcgaacgaccaagcagttgcggcagctggttggcgacacgtcgcccctcttggggagcttcaacgtcgaggagttcttcccgtc

SEQ ID NO: 172736 - DNA, 809 bp, Zea mays
  Clone ID: MRT4577_89118C.1
accacgcgttcgcagtgctcgcatggccgcctgccaagtccctccaatactccctgtggccgcgtcgagctcgcccaatcctcccagcttctccctgtgctcgcgtcctgactttgcccagcacctcgtcaagctcctccatgccggcgtccctgcttctcttctctgcgcccatggccgagcggctcctcccacggcgcgccgagctccagctcggattcgagccgtcttcaccgtccacgcgacccctgtttctccttggctgaaactctttcccatggccgtggttctccaagcttccctgccggtgcccattttcttggtcgcgagcaagctctcgcgcacgcctggcttgttcgtgcgctcgctccagcggattcctctacgccagggccctgctcgaccgtgcgccctccttcctgctcggccccctgtttttctctcttccctatggtcgtcactgctcactggtccaagttgctgcgcgcgtcggctcctagctcggacctccctcacatggcggcttcctctacctcttcccatggccggcgtacggcttcacggtcgcccaatgttacacgtccagctccggcgaaccgtacagcatcagcagatacaaattctgaagcggaggcccaacttccacgccgtagcacgcggcccatgaagcccaacccaagatatgccggcggactgaagtagagtatatgtaatctgttagctgggagagagatttttatgcattttgtaaaacctgaactgagaagtaaactcctgaactgagaagtaaactccagcttcgctgtccg

SEQ ID NO: 172737 - DNA, 730 bp, Zea mays
  Clone ID: MRT4577_89119C.1
cctcgagccggcgggatttattgctcaacgagcgtcagatagtcaagctacttgtaccatcagatataacgctttttttcctgtccactaactaatggttgcaaatcattcatccttctcccaatttcttcttccgcttgtcgctcctctgggactaggagagcactacgcagctcatcttcaccgacattgacatgacatgcatccaggactcaaacgcgtgctaggagctggactgccatgagcatgtgatcccgggtgacatgcagatgcccgcggacaagatcaatgccaaaaatgaggatgctttccacatcttcttctgctagattggggttgtcaactacgtgtccctcgctgagctctgtctgaacttaaacccactgtcatcgatgatgtgacaactggtacctacctgcaagcatctataaccctgagcagatcatcagcgagaaggacgaggcagacaacaacattgtccgggcgcactacaccattggcaaggagattgacgacctgtgtcttgatcatatgaggaaggttgccaacaactgcacatgagctccagggtgttcctcgtcttccacactgttgatgaaataacgggctctggccatgattccctcctgctagagagcctggctgatgactacgataagaaatccaagcttgcgtttactgagtacccttcgccacaagttacgacttcggtagctgagccatacaacag

SEQ ID NO: 172738 - DNA, 329 bp, Zea mays
  Clone ID: MRT4577_8911C.1
caaagacactccacaagaaaagaagcggacccagtctccatctctcagaagagaaactgggaaagaaagcaggaagtctcaatcaccatctcctaagaatgagtcagccagaggccggaaaaaatcccgttctcagtccccaaaaaaggatattgcaagagaaaggaggcaatctcagtctcggtctccaaaaagggatactactagggaaagcagaagatctgaatcactgtccccaagaagagaaacttctagagagaacaaaagatctcagccaagagtgaaagattcttccccaggagaaaaatccaggtcccagagcagagaac

SEQ ID NO: 172739 - DNA, 560 bp, Zea mays
  Clone ID: MRT4577_89120C.1
taaggccatcagaacatcaatcaaatatgttgaacatacataacctcatcgtcaccaacccataccttttacaaaaagaatacaagctagtcgccaaaactgctgcagcataaataaaataaccaaaacttcatttaatctagtgtgatctctgttaagcaaagtacagcaattaaacagaccaacaagcaaatcatgcgatggcgcttctggtgctgctgataacttccgtcattcacatcgcatgccataatgtgacatgatactcttctcactgtcaaattgctggacctttgcgaccagactataaatgctataagttaccacttgctaacatgtgtgtactttgggagtgtattcgtgaatctgtcgtactcctttggtcctttcctccgtttgctgcttcctgcttcccgcttggatgatctatcctttctgaacccatttgcaacatcactactgcctgaggcagtagccttcggcttctttcgcgatttccgtcttgattttggggacttcccgttttttagaatggtgacgaactagcagacgcgtgggtc

SEQ ID NO: 172740 - DNA, 231 bp, Zea mays
  Clone ID: MRT4577_89121C.1
cagttctttcatgttccatctgattagatgtagattggtgtggcggactaaccgatcctgggaaccctgcagggcaagcaaggactggatggcaccacacactgaaggagccgacggaactaacgagcagccgtggacagcgtgcacaccctcagccctaacaaacaccgagcatggaacaacaacgacaacaacaatgaagctgagggacggacgaggacctcacttttt

SEQ ID NO: 172741 - DNA, 605 bp, Zea mays
  Clone ID: MRT4577_89122C.1
ctcatagagatcacgctgcaggaacagagaagccaaattttgagaaagttggcagtggtgcaataccatcagcggatttgtgcatcaaggatgattttgataaaaggtttcaagaagatcttgatgaagcagtgcgccaaagccttggtaccctttttattatgacttcttccattctctataaatatgctcgtatcataggctcttgaacatccatggatatttatattcaacacctctgtattatcataaatatatctgtcggtgttaaggcttgtacagtctccaaatattctgatttgcatgaaatgtgattttcttatgttacatgcatgctagtttgaagagttatttatttttatgctggttgtttccacatctatatcctgttgccatagttattaaggttgtaaagcaaccgaccccctttttaccttttaagcggtaaaacgttaggtgaggcgacaccttattatattatatagtaatataaaatattagaccgaatattattcatataacagtataacactaattcaaatttaataagtaagctagcacaactataaggcctagtaggcccatttcaatctagtagaagagag

SEQ ID NO: 172742 - DNA, 373 bp, Zea mays
  Clone ID: MRT4577_89123C.1
gaaacagtgcatgtttttttatctagatcacatacatgcttacagcttatatacccattgtttgcattgtaaaacaagaatatgtaagccatatagactcgtgatgagattcactcgctattgtctgctcttcagatttcttcatggcttttcagtcctagacacagcaacccctatacttttcttgaactaagtttggaaggtattctacaaaagtagtaagaggattaggttccttaataccttcagattcatgcaccgcactcatatttcatgttcgaaagtggaaactgctcctttggctggtcttgtaacatattctgacaaagaaatgttcctacattgtatgaggttatatatgctaggctgctag

SEQ ID NO: 172743 - DNA, 284 bp, Zea mays
  Clone ID: MRT4577_89124C.1
gcgatacttgtgttgggtggcaaggtccttgtgtatggcggggaggactcacaaaggcgacgaaaggatgacttttggatcttggatacaccagctctacttcaatacgagtcaggttccaagaaaatgaccagaaagatgtggaagaaactaagaattgatggtcagtgcccaaactaccgatccttccatggggcatgtgtagatgcttctggttgctgtgtgtatatttttggtggaatggttgatggccttgtacaccttcagaagcttgggcatgaggt

SEQ ID NO: 172744 - DNA, 242 bp, Zea mays
  unsure (1)..(242): unsure at all n locations
  Clone ID: MRT4577_89125C.1
gggnnacggtgtgtgtatatgttcagattcataaantgangncaatanagcgtttgccncagtggtcntcgccctgtgcngggagggcctgctgatcagagatcaagagggaaagcagaanacacnttgtgccnggangacaacacacnacgaantagaanacttagaaanccataagctaaaatntttagacaactttnattcnaaacactccaanaggtgtcncanaacaaactggntaa

SEQ ID NO: 172745 - DNA, 385 bp, Zea mays
  unsure (1)..(385): unsure at all n locations
  Clone ID: MRT4577_89126C.1
cggccggctttttttttttttttttttcaaatttatatacttaaaanngttagtaatggcgatacaaataaatattgggggtgtaattgtagaaaaacaatgctaattgataaaatgacagacccaatttatacagcccagacaggtagcccatgaggcccatctcgacgagtccatatgaacaaacagttagggtttgaaccctaaccgttcgtctctccttcctggtggcggtcgcccaaggccctggcggcgcggtcgagcgggcaaccggccctggcgtgtgggcagcggcctcagtgcgtggcccatacggcttggcccctcgacggtgcgcaccctggcggtgcggggcgcggtcccacaagtgtgaggcttcgccatg

SEQ ID NO: 172746 - DNA, 290 bp, Zea mays
  Clone ID: MRT4577_89127C.1
aattccggggtcgacaagctcatatgtcgggggccgcccttttttttttttttgggcacgattagggaatgcgttgtcacctgggtgatcgttcaagaatgcgcccaaaggtatcctacaggggcgcataaaaagattataggattgttcccaaatcacttagtccatcggtatatttaatatatcaacaccgtcctaattttacctggaggtacaccgacagaaccttttccactcatgcgatcgggcctccggcattaccgatcagaacatccccactgtcaagaagc

SEQ ID NO: 172747 - DNA, 625 bp, Zea mays
  unsure (1)..(625): unsure at all n locations
  Clone ID: MRT4577_89128C.1
atgcatgcgatgcaactatttggaatccctaatggattctcgcgcgttggtactctttcatacacagnaatattcactgagaaattctatcctaaaagagcagcaaatacctgtccatcgaaacttagcgctctaaagtatntgcatcaggaggcaagaagtatgtttgatcacagtctaaatagacatacttacagttagtttggatagagaaacatatgataatncaacagtattctggaatacaatttgaacatcgtncacatncacattttggatggacacatctgattcgtgaagggataagtatgactatgatacacaggtgaaaggacaataccgtggaagactaataataggacttatagggaatctgggtgccagtctgaagcagcaaaaatacatacgtggaaattagacatgtgaacctggagaatgaagaaaaggaaatccaatatgacttgtaaaaactaatgaacaactttaattgaacaaccagcctcatcatataataataaaaaagctataggaggaagcatataaaaaggtatactggacaaattaaatatttaagcatgttccaacaaaattgttagtttcttacaaaatcgagggggggaaatct

SEQ ID NO: 172748 - DNA, 860 bp, Zea mays
  Clone ID: MRT4577_89129C.1
gtgtcgaggccggccggggtcgccgttctcatctcccaggattcattttgtcccacgcacgtctccctcccctgcttccatggctgccgtaccctttgctcctcccagccagccgaggtctcttcccaagcaccgccggccatctcgagggagatctggcgcccggccaccctcacctcatccccttcctggcgttcgtccttggctccctcacgtcgtttgctcctccctggtactcgagatcgcccatggagcccagccccatgcggcgctccgctcgctcttgtctggtggctggtgcgcgcaggcgccgggctcagggagccccggcaagagctggcgttgtggcgggccaccaacagtgatggaggtgcttgctgccactccttgtaggcgtcgccttccttgtcgagatcacctccctttgccgcctcgacatggcgaagaacgccgaggtggtcgagagctagaccagctccttttaccactgctcctcccattggggtgaagccgtgggtcggggcgtggtcccgaggtcaggcagcgatggcgaggatgaagagatccgatggtgcgagcagcggttcgagagggaggatgtcgtgccctacgaccgcgacgttgacagggatcccgtgcttgtcggtggcgcagccaaggactggagtaaatgctacgtaggttgtgaatttgttttttttctgccagtaagacacttgatgctacttttgaaattgcaccagattcttctgtagagggtatcctcggatcaatggaatcatctcaatattattcaaagaatagtattgatgtgccgtttggttcacatatttgcaaaaaaaaaaaaaaaaagggcccta

SEQ ID NO: 172749 - DNA, 274 bp, Zea mays
  Clone ID: MRT4577_8912C.1
cccacgcgtccgccgattcagatctcgcgcacagcacgcgagccgagggggacaaatagtaggatttccagagagacagaaacagacggagacgcagagaaaccctttccacccagattcggtcgggtctgttcggttccgaccacgcgggcgcggtagagagtggggagatgagcgctgctgcggaggacgcggctgcggccgaagggggatcctgatgcgggagcagcggcgctgggtcgtcggaagggggcgcgcggcgccggttcgacga

SEQ ID NO: 172750 - DNA, 701 bp, Zea mays
  Clone ID: MRT4577_89130C.1
atcccgtgaatgcactccaccactccttaccttttcgtctctttttccttgattctctaataccttcttcttctgcagctacgacttcttcgttctgcgctcctcaccgtccagaacacatctcctcttcgccaccaaaagacactgcaggcagatcagcatgggggtgcgaactctctcctagcactcttacctgttccagatggggctcatcgctgacagagaagatggaaagtccaatatcgtctctcgcttcacacgcaaccacttctccctcgactccaagtccaccatcgatgccaagtatcaccacattgtccctgcgaagtgatgatatgcactctataggctcagatctgagacactattgttaaggaaaggtaccgtgagattaccagcggctactaccggggcgccgtgggcgccctgtattagaaccatatcacaaagatgcctagctacgacacacttccgcagggggtgttctgatttctcctgacactctgactcgcagaatcgagagtcatgatggcgtgaaatccatgctagctgatccacttgagagctatctctgaggtacaagagctataatgaggctgacatgggatcgcttgcataatcactatgcttatcatatggatgatatacttaatccccatgccatgcagaagttgtcacattatgttgatgggatccatgac

SEQ ID NO: 172751 - DNA, 601 bp, Zea mays
  Clone ID: MRT4577_89131C.1
aagaacctagacgccgacctgccgccgctgttatcgcctcgtacgttcatggtgatcaatctcgtagacgacaaccgcaacaacagtaccgagctcacccacgaccaagaccgacaattcctaccgcaagctcctcgacaagatctaccgcttccttgcgaccagaacgacgagcaactccaacgccgtgatcctcaagagcctcttcataaggaagaccaaccgcccgacgatctcatcgcgccgactatccaggaccatatcaccggaaaggagatcaaatagccctgattgcgcgaaccgagaacgacgacaaaagatcgataggagacgcacatgaagggccgcgagctcaagttcactgacacaaccaggagcagcatcatcaacggtgatctggagtgcctcaacttctaccacatcacgatgcttgctgcacgtaggattcataccagccggctgtgatgtactgatacactgagggaatgtgtgcatgaatcctgctcttgtactcgagtgcactcacagaacacaccgtcccttatggtctgtctaacatgaggaattgtacaatcctaataagattatggatgatgaacgg

SEQ ID NO: 172752 - DNA, 860 bp, Zea mays
  unsure (1)..(860): unsure at all n locations
  Clone ID: MRT4577_89132C.1
ttgggtacctcgaagccggccgggagcccacttcagatagatagatactaccattgccatcgcgtcaattaagagctactgttcttgctcggaatcttgacccgcttccgaatccaattaaagcccccacatctcggaatgtcggagaaaccaaactgctacttcgatgtcactgccaacggccaacctcttggtcgtattgagttcaagctctacgatcaagttacccccttgacctgtgataacttccgtcaactttgcttgaagccgcaaggacaaggctacaagggctcccagttccaccgggttattcctaaattcatgatccagggaggcgacttcaccaagaacaacggcactggcggccgttccatttacggagaaaaatttaaagacgagaactttaaacttctacacaacaagccagggctcctatccatggccaatgctggtccaaacacgaacggctcccagttcttcatcaccaccgtggagaccagctggctcgatggcaaacacgtagttttcggagaagtagtcaacggcttcaacgaggttgtcaaggtcatggagtcgaaaggatccgcaaacggcacgcccagcgccaccttaatgattgctgactgcggcactctctgaacgcagcttcagcgctcccagaacccaatcaacacaatatccnttctattttgcggtgtagagcaaaacggcagcttccgaaattgaatggattaacgttgtaattcacaaagttgatcaggccctcaaccatgcccccggtcgcatgcttgaagccagctggtccttactgggtcaggtggcagttactgaataaatccgaaaaaatgcgtcttccttgc

SEQ ID NO: 172753 - DNA, 249 bp, Zea mays
  Clone ID: MRT4577_89133C.1
gcgggcctataaataactccgaggatgaagatacttactatggattcccctaggatcaggagagcgaaccgggatcagcccatctcgagaatcgggcggcctccccgcccgatttgtattctggagaggcgtcctccccgacggaccggtcccaaggtctctggaaagggacgcctggcacggtgtgtgccccgtgcggcccgtgccctgtcgcgcgccgaggccccgcccgcccctgtggttgcttgg

SEQ ID NO: 172754 - DNA, 391 bp, Zea mays
  Clone ID: MRT4577_89134C.1
ggtgaagcgaatgtgctccgttgcagagagctgcgacagagtctgtcaagcaatggcgtaacctcgttgcgaaattcatttggtttccctaggatgagttgggatcacatcgtgatctactctggagcaaagcagctagtgcatggctctcttatgggcagcttggactacagcgtccgcatgctttttcactggtctcggatagtacattaagcctcgctggtgcgctggaaaggcccaggagtttcctttaccttttgggctatgctctatgtctatctgactccttgatgccatgggagtgactggcgggaagcaatccttgaaatgctcaacaggagatcgtgtgctacagtgctttggttcaggaactgcaacgctgggggtcata

SEQ ID NO: 172755 - DNA, 153 bp, Zea mays
  Clone ID: MRT4577_89135C.1
acatgcgggcccccgacggtgacgcccggtccgaacatcaccatcacggaggcaggtgtctgggtcaacgctaaggggagttgtttgcgtgagcccaaccagtgcccgagatctgagactgttggggatcgtgcagggtccacaacttgatcc

SEQ ID NO: 172756 - DNA, 388 bp, Zea mays
  Clone ID: MRT4577_89136C.1
agctaacaatgctcacttagacgtaggggtggtaatggattgtgatccatatggttcttcacaaaatgtcaaggcacttaataaattatagttcaaaaatgactaaaaatagagcctaatcttaacccgattcgatacttaaattttatagtgcaaaatttatagcccattgtcagccagttggacgttgatggttggcacttgcagagctagcaaaatataatagtactactagtgtgaaaggagggccttgtggcactggcagctccggcactgcttctccggtgcgttgcagctatcgccgttcttggcgtcgaagtaccatccggagagcgtgtcgaagaggatgcccgcgccaacgccaacagccaggtcaatggtgtagtgt

SEQ ID NO: 172757 - DNA, 218 bp, Zea mays
  Clone ID: MRT4577_89137C.1
cggacgcgtgggccgcttcacctccgtagcgctcgaccacagggactactctggcgcgctgggagcgactcttcggggctcactcaccatgctcgcgtccttatccctcgccgacaaccggttacacggtgcgctccccgcgggggtcccgctgccgtcaaccctccgcatcctctacctctcaggcaactcattctccggcaccataccggcgtctc

SEQ ID NO: 172758 - DNA, 335 bp, Zea mays
  Clone ID: MRT4577_89138C.1
attcatttagcgcacgagctcggaatcggtcgaggaatcctgatgtggagaaggattgcccaaccattatccactttgttctggccaacatcaacttcagaaagtacaaggccccaggtgttctgagggaaaccaaggaagagaaagaaatagctgactttgacattttcgatgaccccgaatcgccattttcaaccttcaacttccagtatccaaatcaagcattcaaaaggctacatgatctgatgtacttcaacacactgaacaacattgatgtgataaaggatgccattgttgagagcattgaatacagaagacagaacccatctcgttgc

SEQ ID NO: 172759 - DNA, 366 bp, Zea mays
  unsure (1)..(366): unsure at all n locations
  Clone ID: MRT4577_89139C.1
ggggggacgcgtccgcccacgcgtccggcagaatttgagtgccttgacaaatcaccatttagatactttcttggggaactatatggtggcaattcactgggaagcacaattgcagtgggcaatgagaagaagcggcagcgggtgtacaacactatgtttcatgtcccatggagatgtgaacggggaaattcagagtcgtgttcgcctcaattcctgcacccatctttgcagctctatattgttcaacaaaagatttggttagtgccttcatgcttccatttttccttttaatacttaatactnatgggttcatattggaatggtttctaaaagttaactactttgttaattcaagtagacatcaca

SEQ ID NO: 172760 - DNA, 450 bp, Zea mays
  Clone ID: MRT4577_8913C.1
gggttgaaccacccggcgcggggacccggcgcaaaaaaaaccaaacaaaaaaaaaaaaaacccttcagatccaacccacgcacgcaaaaccaaaagacggggtaaaaacaaaaaaaccccaccgcaagccgccgccaacagacgaacagcgcgccggaagcacgcgccagatggacaacgccaccaaggagctgaccgcgagccaaaacaaagcggcgcggcaaccacaaggaccaccgcgaaccgcgcccccgctcccagaacaacaacacgggcacagaagcccgccccgcgacaccaccgggaccagcacccggaccaagagaacccccacacacagaagctgaagcaaacgcaagaacaaaaggtacgacccgccgggccaaatcaactggaccgaccaccgggcgggcctagcgtacccaaaccaacaaaaaaccacagccacga

SEQ ID NO: 172761 - DNA, 773 bp, Zea mays
  Clone ID: MRT4577_89140C.1
gccggccggttcggggatttcgattctttctttttccccctcgtgcgccgccgcgaccttcctcgatcccatctcccaacgcccccgcctcgcctcgggatcccgccgccgctccatctgcctttgctcccccacccgcaggcagcgagcgacagcgacggcgagggatggccaaggccaggtcgttggcgaagcagaagcaggcgcagcaatcaaacggcggcggcggccacgcgctgtcctccaagctcgcccggtacctcgacccggaggcctccttggacaagatttatggccatctcgactggcattatctattggtactacacctacttgctgaaggttgacgaggaggaatatggaggccatggggcgcttcttcaggagggtcttttcgcttcattcacccttttcctgctttcgtggactctagtatacagtctggctcacttctgagaagctcctttggcgcacatacctttgttcactgtgccagacagaaaagactcaccaggacagtgtagactaaggagcattttagaacgagcgttgtatcaaaacggttctgagctgtaatgctatttcccaacccccagtgtaatcttggtgctatgggattagttcggtgctaagcagaacaaaaatgttgcatactacgcgttttcagtcaaacgacatcctcttgcattaggaactgaattccatcctcttgcattaggatctgaattccatggacaacttttaacgcacggaagacctatttggttcgctac

SEQ ID NO: 172762 - DNA, 736 bp, Zea mays
  unsure (1)..(736): unsure at all n locations
  Clone ID: MRT4577_89141C.1
aaaacaaagcaaagttctctgtcttgctcctgccccaaggtacgaaggtaaacgacgagcacgatttggtcgcccgagctagcggcctcagccctcacatgacgaagacgaactagccgcacctgctgcgctgacttccgcagccactacaccccacgcgaagcacagcaagatttcactagcagaagccagatcgagtagaggcgggatccggcggaggcgcgaggcatggagatcgcgacggttgacctccgcggggtggtgccggggggcgccgggtgggaggccgcccgcgcggcggtgaccgcgtccatggtggcgcacggctgcgtcgtcgtggcgcacgacgcggtcggcgcggacctccggcaggcgctgttctcccgcgcgctgccggagctcttcgcgctccctctcgaggccaagcagcggacggtgtcgcccaatggggagttcaggggctacatcggccagcgccccggcatggactgggagagcctccgcgtcggaaagcccacggacgccgccagcgtcagcggcttcgctgagacgctctggccggagggaaacccagagttctgtgacacgatcgtggcgttcgccgagaacatgatggagctggaggggacggtggagacgctggtnctggaaggccttngcgccccgcggcagagcatccgcgcccacttnggctcgctagaccacgccgtaccgctgtcggacttcggggtgccgc

SEQ ID NO: 172763 - DNA, 1172 bp, Zea mays
  unsure (1)..(1172): unsure at all n locations
  Clone ID: MRT4577_89142C.1
atccatctccaacgcccccgcctcgcctcgggatcccgccgccgctccatctgcctttgctcccccacccgcaggcagcgagcgacagcgacggcgagggatggccaaggccaggtcgttggcgaagcagaagcaggcgcagcaatcaaacggcggcggcggccacgcgctgtcctccaagctcgcccggtacctcgacccggaggcctccttggacaaggaccaactgctggacgcggtgcactggatccgccaggcggtggggctcatatgcggcctgctctggggagccgtccccctcgtcggcgccgnctggatcgcactgttgacgaggaggaatatggaggccatggggcgcttcttcccggccgggtcctgtgctgacgctcccgtctcggcctggctcttgcaggaccaactgctggacgcggtgcactggatccgccaggcggtggggctcatatgcggcctgctctggggagccgtccccctcgtcggcgccgtctggatcgcactatttatggccatctcgactggcattatctattggtactacacctacttgctgaaggttgacgaggaggaatatggaggccatggggcgcttcttcaggagggtcttttcgcttcattcacccttttcctgctttcgtggactctagtatacagtctggctcacttctgagaagctcctttggcgcacatacctttgttcactgtgccagacagaaaagactcaccaggacagtgtagactaaggagcattttagaacgagcgttgtatcaaaacggttttgagctgtaatgttatttcccaacccccagtgtaatcttggtgctatgggattagttcggtgctaagcagaacaaaaatgttgcatactacgcgtttttcagtcaaacgacatcctcttgcattaggaactgaattccatcctcttgcattaggaactgaattccatggacaacttttaacgcacggaagacctatttggttcgctgcctaaaaaaaaaaaaaaaaaaaaaaaaaaaaaaaaaaaaaaaaaaaaaaaaaaaaagctcgagactagttctctctctctctctctcgtgcctcccatcttctcgccctccctcggacttggcttgtagatctgtagcttccccttcgcgcgcataagcgagatccagct

SEQ ID NO: 172764 - DNA, 1586 bp, Zea mays
  unsure (1)..(1586): unsure at all n locations
  Clone ID: MRT4577_89143C.1
ggtaccctncgcgagctggccggattctaggcgcaaacccaagcgcggagacaaagcacgcaagcaagggccccccgccgctgtaactaaccgaacgaggaggacaagaaagcctcctcgttaagattggaatccacgagacaggggcagtctccagtctccacccaccgttccctcccctcccctcccctcctctcccctcccctgtcgagtccggctgtccccacgacccccacgccacgcgctctctcccgctcctcgcaacggcaaaaccccagcgaattccccacgcgcccgccagctcggcggcggcccagggatccatggagaagtacgagctgctcaaggacatcggctccggcaacttcggcgtggcgcggctcatgcggaacaaggacaccaaggagctcgtcgccatgaagtacatcccgagggggctcaagattgacgagaatgtggcgagggagatcataaaccaccgctcgctgcggcaccacaacatcatccgcttcaaggaggtcgtgctcacgcccacgcacctcgccatcgtcatggagtacgccgccggcggcgagctcttcgaccggatctgcagcgccggcaggttcagcgaggacgaggcgaggtatttcttccagcagctcatctgcggtgtcagctactgccacttcatgcaaatttgtcaccgggacttgaagctggagaacacgctattggatggcagcccggcgccgcggctaaagatctgcgactttggctactctaagatggcagacgtttggtcttgtggagtgactctttacgtgatgctggtcggtgcgtacccttttgaggaccccgatgatccaaagaatttcagaaaaacgattgggagaatagtgtcaattcagtaccagataccagagtatgtccacatatcccaagactgcagacagctcctggctcggatcttcgtcgcaaatcctgcaaagagaatcacaatcagggagattaggaatcacccctggttcctgaagaatttgcccagagagcttacagaagctgcgcaagcgaagtactacaagaaggacaacagtgcccccaccttctccgatcaaaccgttgaagagatcatgaagattgtagaggaggcccgcacgccaccccagtcatctactccggtggctggttttggttgggctgaggaagaagagcaggaagatggcaagaggtctgatgatgacgagcagtatggggaggatgaggactacgatggcgaggacgagtatgataaacaggtgaagcatgtacatgccagcggggattttcaacacctcctaaaatgaagctcctggcagcgatcaagtccgcaactggtgagatactgtctggatttgttgtagtttgtggtgctgagatgctgcaccctcggcgcgtacttgtagtttccttctgtctggatccccctttttttcgcatattgtgtgctatactctgtaaattatcaaactggcttcctcaatgcctatgtaatgaaccgttgagtgattaagatagaaggcgaaatataatttctatggaacaaaaaaaaaaaaaaaaaagcggcc

SEQ ID NO: 172765 - DNA, 445 bp, Zea mays
  unsure (1)..(445): unsure at all n locations
  Clone ID: MRT4577_89144C.1
aatcccctccccctccccaaatcctaccccaataatctctcaatcaggggattcttatgtgtgatcaggtcttatgattcggcagggctcatccattaactacaaggcgtccgtctccaaggagctcaacgccaagcacaagaagatattggaaggtcttctacggcatcctgagaatagataatgcgcagactgcaagtcaaagtgagtggaactgtgccatttggttgtttcaaacgtggaaaatggtgcattaggcatagctacatgtcaaatagctgtgttacaagtgccaccannctctgcttgatgacattacattttgatatttggtncnnagggatcactattttaagtctcaaaacatctaccatttgtttaggcatatatgttacatgtacaaatagacctttaatttcatgagaagggcttaaaatggattttt

SEQ ID NO: 172766 - DNA, 598 bp, Zea mays
  Clone ID: MRT4577_89145C.1
cattgggtacctcgagggccggccgggaacaatatccagagacatccaacttgcgcttcgatatccactggtgttgcgcacagacacgccaaatggcggcaccaatggtttactaccacgacgcggactactgctctgaggacgtgaacgcggctgtccccggccgccttctggcggcaccgcggagacgtgcaccagaacgtcgtcaaggagaagtccgaggaggtcaacacgatctcacgggacagcgccgaccagccaccaccaccatggccaccacgtccgacacggcttcgaggtagctgagaccaaagtcgaagaggacctacacacgtgcaccggcgagttccacgagggcacggagagcttcctcgccaacagctaaatgtgccgtccggcgaccggcatccacgcccgttcgtgcttgcctgcgggccttatgcatgtctgtgggtgactggctgtgcaaggtcctcctacttgcttatcttacgggtacgctctcagatcctgtacgaattacgacagtaatatcgtgacctcaataagactacctcctaatagaagatccattaataactgcgctgacagcagtgcc

SEQ ID NO: 172767 - DNA, 1831 bp, Zea mays
  Clone ID: MRT4577_89146C.1
gctatgacgtcgcatgcacgcgtacgtaagctcggaattcggctcgagcgcttatgtgagcggatcaaacaagcgaacgggtgccctccggccgggcgcggggccattgacgggaccctcgaggccggccggggcgcccggccggggcaatcacgcgcaaacccaatcgcggagacaaagcacacaagcaaaagcaaccccgcgggccgcgctagcagtagtagccgaacgaggaggagcctcgaatccagccaggccaggctcctcccattcctcctctcccacgagctctcaccgctcctcgcggcggcaaaaacccccttgaattccctacgcgcccgcctccaatcccgccagtccggcggcgacccagggatccatggagaggtacgaactgctcaaggacatcggttccggcaacttcggggtggcgcggctgatgcggaacaaggacaccaaggagctcgtcgctatgaagtacatcccgagggggctcaagattgacgagaatgtggcgagggagatcataaaccaccgctcgttgcggcaccccaacatcatccgcttcaaggaggtcgtgctcacgcccacgcacctcgctatcgtcatggagtacgccgccggcggcgagcttttcgacaggatctgcagcgccgggaggttcagcgaggacgaggcgaggtatttcttccagcagcttatctgcggtgtcagctactgccacttcatgcaaatttgtcaccgggacttgaagctggagaacacgctgttggatggcagcccggcgccgcgcctaaagatctgcgactttggctactctaagtcatcgctgctgcactcaaagcctaaatccacggttggaactccggcgtacattgctccggaggtactctctcgccgggaatacgacggcaagatggcagacgtttggtcttgtggagtgactctttacgtgatgctggttggtgcatacccttttgaggaccccgatgatcccaagaatttcagaaaaacgattgggagaatagtgtcaattcaataccagataccagagtatgtccacatatcccaggattgcagacagctccttgctaggatcttcgtcgcaaatcctgcaaagagaataacaattagggagattaggaatcacccctggttcctgaagaatttgcccagagagcttacagaagctgcgcaagcgaagtactacaagaaggacaacggtgcccccaccttctctgatcaaacagtcgaagagatcatgaagatcgtagaggaggcccgcacgccgccccagtcgcctgctccagtggctggttttggttgggcagaggaagaagagcaggaagatgggaagaaacctgaggatgacgagcaggatggggaggatgagcaatacgacggcgaggacgagtatgacaaacaggtgaagcaagtacatgccagcggggactttcgacacctaataaaatgaagctcctagcaagaccgagttctcaactgatgagatactgtctggttttgctgtagtttgtggtgctaagatgatgcaccctcggtgcttacgtagtatacttctgtctggattcacctttttttcgcatattgtgttaatactctgtaaattatcaaactggcttcctcaatgctcgtgtaattaaatgaaccgttgagtgattaagctagaaggcaaaatatactttctatggagtaaattctgaaagtatcaatatgtgttgaactagactaatttaaattttattttcgcaaccattacatactattgaatagtctatttcattctgtgtaaaaaaaaaaaaaaaaagcggcc

SEQ ID NO: 172768 - DNA, 2216 bp, Zea mays
  unsure (1)..(2216): unsure at all n locations
  Clone ID: MRT4577_89147C.1
tcgagccgccgggttacattgggtacctcgagccggcgggagtctccagtctccacccaccgttccctcccctcccctcccctcctctcccctcccctgtcgagtccggctgtccccacgacccccacgccacgcgctctctcccgctcctcgcaacggcaaaaccccagcgaattccccacgcgcccgccagctcggcggcggcccagggatccatggagaagtacgagctgctcaaggacatcggctccggcaacttcggcgtggcgcggctcatgcggaacaaggacaccaaggagctcgtcgccatgaagtacatcccgagggggctcaagattgacgagaatgtggcgagggagatcataaaccaccgctcgctgcggcaccacaacatcatccgcttcaaggaggtcgtgctcacgcccacgcacctcgccatcgtcatggagtacgccgccggcggcgagctcttcgaccggatctgcagcgccggcaggttcagcgaggacgaggcgaggtatttcttccagcagctcatctgcggtgtcagctactgccacttcatgcaaatttgtcaccgggacttgaagctggagaacacgctattggatggcagcccggcgccgcggctaaagatctgcgactttggctactctaagtcatcgctgctgcattcaaagcctaaatccaccgttggaactccggcgtacatagctccggaggtgctctcccgccgggaatatgacggcaagatggcagacgtttggtcttgtggagtgactctttacgtgatgctggtcggtgcgtacccttttgaggaccccgatgatcccaagaatttcagaaaaacgattggggtaacagttcactcgttcaacagacactgaatcctgggctcttgcaccttgaaatcatttttctaaacttttatgcactcgtatccttctacagagaatagtgtcaattcagtaccagataccagagtatgtccacatatcccaagactgcagacagctcctggctcggatcttcgtcgcaaatcctgcaaaggtacttttgggcagtgaatcctgcaaagcctccatcattttactatggtctaccaccaccttaattccatatcatcacgtttcttcagagaatcactattagggagattaggaatcacccctggttcctgaagaatttgcccagagagcttacagaagctgcgcaagcgaagtactacaagaaggacaacagtgcccccaccttctccgatcaaaccgttgaagagatcatgaagattgtagaggaggcccgcacgccaccccagtcatctactccggtggctggttntggttgggctgaggaagaagagcaggaagatggcaagggagccgatgatgacgagcagtatgggtactatgatggctacgatggcgtggactagtatgataaacctgtgaagcgggtagatgtctgattataaccagcacaccgtatggatgaggactatggtagcgagcaagtgtatgatagacaagtgactcatgtacatgccatcggcgattctcaacacctcctagaatgaagctcctgtcagcgctcaagtgctcaactggtgagatactgtctgaatctgttgtactttgtggagctgagatgctgcaccctcggcagctacttgtagttaacttctgtctgtatccacctcccgcttcgcatattgtgtgctatactctgtttttggttggaactggctaaaaaaacaggaaggtgataaaccgttgtaggattacgagcaggatggggaggatgagcaatacgacggcgaggacgagtatgacaaacaggtgaagcaagttcatgccagcggggactttcgacccctaataaaatgaagctcctagcaagaccgagttttcaactgatgagaaactgtctggttttgctgtagtttgtggtgctaaaatgatgcaccctcggtgcttacgtagtatacttctgtctggattccccttttttttcgcatattgtgttaatactctgtaaattatcaaactggcttcctcaatgctcgtgtaattaaatgaaccgttgagtgattaagctaaaaggcaagaaatcctttttatggagtaaattctgaaaggatccaaaaaaaaaaaaaaaaaaaaaaaaaaaaaaaaaaaaaaaaaaaaaaaaaaaaccaaaaaaaaaaaaaaaaagcggcc

SEQ ID NO: 172769 - DNA, 432 bp, Zea mays
  unsure (1)..(432): unsure at all n locations
  Clone ID: MRT4577_89148C.1
cggacgcgtgggtgagaataagctgagctcggtaaactctaccaaggatcgttcttcgagagaatatacatattcagaaaggacttatgtgtcagatatgcaagtgaaaagtgtttcttcttcagacattcgaatcagtgtttccagtgcccttagcacatccagccatggctctatgaacaagagccatcaagcttctagttctggtcgttcgctctcctatttttctgctcaatatgcataaatgtgatctgatttgtgtagcttgctcgtcttgctaagatggaggttgagtatcgatgtatccagatcatagagattggtcttccaatgggtaaacatattangatgagagacaccccgggggtctaaaatctaatgttgagtccgcattgcaagttctgaattttgcaatataagttgactgatatg

SEQ ID NO: 172770 - DNA, 1173 bp, Zea mays
  Clone ID: MRT4577_89149C.1
ccggccgggactgccacttcatggtgagaacaccaaccaagtaaaaagcgaagtgttctctttatgcaacaaaaaggtacccacaaaaaaaaatccatgctgatgaggtgtgcgaatgcaaattttgtttggattcactctcagcaaatttgtcaccgggacttgaagctggagaacacgctgttggatggcagcccggcgccgcgcctaaagatctgcgactttggctactctaagtcatcgctgctgcactcaaagcctaaatccacggttggaactccggcgtacattgctccggaggtactctctcgccgggaatacgacggcaagatggcagacgtttggtcttgtggagtgactctttacgtgatgctggttggtgcatacccttttgaggaccccgatgatcccaagaatttcagaaaaacgattgggagaatagtgtcaattcaataccagataccagagtatgtccacatatcccaggattgcagacagctccttgctaggatcttcgtcgcaaatcctgcaaagagaataacaattagggagattaggaatcacccctggttcctgaagaatttgcccagagagcttacagaagctgcacaagcgaagtattacaagaaggacaacggtgcccccaccttctctgatcaaacagtcgaagagatcatgaagatcgtagaggaggcccgcacgccaccccagtcatctgctccggtggctggttttggttgggctgaggaagaagagcaggaagatggcaagaggtctgatgatgacgagcagtatggggaggatgaggactccgatggcgaggacgagtatgataaacaggtgaagcatgtacatgccagcggcgattttcaacccctcctaaaatgaagctcctggcagcgatcaagtccgcaactggtgagatactgtctggatttgttgtagtttgtggtgctgagatgctgcaccctcggcggggacttgtagtttccttctgtcgggacccccctttttttccgcatattgtgggcaaaactctgtaaattatcaaactggcttccccaatgcctatgtaatgacccgttgagtgattaagatagaaggcgaaatataatttctaaaaaaaaaaaaaaaaaaaaaaaaaaaaaaaaaaaaaaaaaaaacccccacccc

SEQ ID NO: 172771 - DNA, 267 bp, Zea mays
  Clone ID: MRT4577_8914C.1
gctcaagaagatggctggcgctgtacgcaccggatcgaagggcagcatgcgcaggtacctcctcctttctcttacctgcagtacccgtagatacatgtatgctgctctgcagtaaccttagcttctgtctctcttttttttgtgacaagttgagttgtagatatccaagcacctaagcctgttgggtttgtgatctgttcatagagtcaacttctggacccatagtcccgtgctaactaatttatgagggacaaaatgctgacagga

SEQ ID NO: 172772 - DNA, 1421 bp, Zea mays
  unsure (1)..(1421): unsure at all n locations
  Clone ID: MRT4577_89150C.1
aaaaaaaaaaaaaaaaaaaaaaaacgcgacctaacgaatcgaatcaaattcgccgtccacctcgtcagcgtcggcgcaccggcctcgagcccagccccccgtccgagtccgatcagccaccagagatgcagcacgggagcggcgactacgcctcctccgccccctccggccactactaccagcaccagtacgcggcccccggctcgaacccctatccaatcgccacggacgccacggcgccgggggcagtgtcggggggctacgcccccgcgccgtcctactctctcggcggcggctaccctgaccagccgccctccgccccggtctactcgcaggcaccctctgccccggcctactcgcaggcaccctccgctccggcctacacgcagccgccgccccagccccagcacgcccccggatactcgccttacaacaccaatctcaacacctacccgacagaggcgtattatacctacacgccgccgtccacccagaccgcggccccaccgcctgcggaggccaactccccggcgctgccctacgacgccccgtactacgggggtgggtaccagccgtcggccgttttgttcttcaacgatgattacctgaacgagggtgcctacgcctacagngncggnggtggttcggagccgtacggtgcgcgcggcatgaggcactgtgcgatgatgttcatttatgtaatcgctgtgtacgtgagttctgatcctggcacgtacatagttcgcattcggtttaccttccaaaaccagatggctcgtcttagacacattgcacgtaagtcggtgattcctttcctgccgtctcgacttgcggagcgtcctctgcgccgctccgtgtccggtcagtcgagtcacctggagagactgcaccatcgcctgcgtgaggagcaggaacgccggtgtcagcatagagagcagcagggctcttcctccccaccccagcaggaggtggagtccgtgaggcgccgctcctctgctccccagctggaggcgccccctgcaccaccgcgggatgccccggctgttggaggaggtcctggaggagaccccgacgacgacgactcagaccacaacacgaagtcctctgagccgcaggaggcggaaggatgggtcgcccgacccatcacccgtgacaccgctcgcggttgtcacttccacgacgcactcgacaccttgctgcgccaggctttcgaccggcacacctggtcgatcgagtatcgttgtgtagtctaccagcacagtcgcgggaggtacccggaccgctgggaggctacctacctagttcgccgtccggaggatgacctccggggtgcagaggccatttcgaagcattactccatctccgagagggacactgcagaggcagctatgcaggatgcagcacggcgtgcactctcctag

SEQ ID NO: 172773 - DNA, 129 bp, Zea mays
  Clone ID: MRT4577_89151C.1
tatttttggaagttggaacaggagatgcaactttgtgtccaaaccattaactgtacaatgcagtggcagcggtcacacactgcatgttcagcgcacccgcccatgggagtacaaaaagaatgtgcccaa

SEQ ID NO: 172774 - DNA, 1207 bp, Zea mays
  Clone ID: MRT4577_89152C.1
gtctccctccccgatcaaatcgccccagatccaaatcgctcagatgctgacgtccctgcacatggtggttttcagatcgcgattcatttccgagcttcgaggaatcgacggtcaagcattggtgaccaagtgagcaagctcttcaagtcctacgagattgaagaccctgagcatatatttggtgaagatggctcgtcttagacacactgctcgtaagtcggtgatccctttcctgccgtctcgccttgcggagcgtcctctgcgccgcaccgtgtccggtcagtcgagtcacctggagaggctgcaccaccgcctgcgtgaggagcaggagtgccagcgtcagcacagggagcagcagggctcttcctctccacctgagcaggaggtggagtccgtgaggcgccgttcccctgttcctcagctggaggcgccccctgcaccaccgcaggacgtcccggctattggaggagctactggaggaggtcttggaggagaccccgacgacgacggctcagaccacagcaccgagtcctctgagccgcaggaggcggaaggatgggtcgcccgacccatcacccgtgacgtcgctcacggttgtcacttccacgacacactcgacaccttgttgcgccaggctttcgaccgacacacctggtcgatcgagtattgttgtgtagtctaccagcacagtcgcgggaggtacccggaccgctgggaggctacctgcctagttcgccgtccggaggatgatctccggggtgcagaggccttttcggagcattactccatctccgagagggacactgcagaggcggccatgcaggacacagcacgacgtgcactctcccagtactgttccttattcggtggggtggccgacggtcttaaccttaggtactacccccgccgtcctactggtagcacagagagtgtggttgtctcgcctattggtgaggataaccctaggttgagcagcacagtcaacctagtcgatgtgcttaacattgagttggaccactctctggacgagctgagcagggctcgaacggagattgctgagttgcgtgctgagctggcagagcgccgccaccaggagggtggttctcccgctcctgttgggactcagcacccttaccgctcgccgccacgtggtcaccacacttatggttcccctgcctgtaagaccaggatagatctggatccttag

SEQ ID NO: 172775 - DNA, 1945 bp, Zea mays
  unsure (1)..(1945): unsure at all n locations
  Clone ID: MRT4577_89153C.1
atggcggtcgtcagcccacccgccggcggcggaatcgacgacgtcttccccacattcagcagcgacccgccaagcgaccccgcttcggtggacgctttcataaaggcatgtccaaaccctccggggtatcatatgcggtcaccctgggaccgactgacggccgtctcgacctacgggcccctgggctccgaggaagatgacgagcccgactctggctgggatttctccgggctcgataaccccagtgccatgcgggactttatgaccgcatgtgactactgcctctccgattgctccgatagtagccacaacctcggtgacgaggactgtggcccaagtcgcgaatgctttcacgtcgatctagggggtctcgacgaaggcaaccatcttggtatgccggaggacggtgatccccctaggcccatgccttgcgttgacatccttcgggagctagctgtggtcccagttcctgcggggggtcaggacgcacagctcgagcaaatccgcgagccgcggaggtccgccaccgtcaccccgagccaccgtcgcgccactgccgccaccgaagagtccccggaacccgccttgagggggctcaggttgtttcctgagtacctctccatggctcgtcttagacacactgcacgtaagtcggtgattcctttcctgccatctcgacttgcggagcgtcctctgcaccgcaccgtgtccggtcagtcgagtcacctggagagactgcaccaccgcctgcgtgaggagcaggaacgccggcgccagcacagagagcagcagggctcttcctccccaccccagcgagaggtggagtccgtgaggccccgttcctctgttgcccagctggaggcgccccctgcaccaccgcgggacgccccggctgttggaggagctactggaggagatcctggaggagaccccgacgacgacgactcagaccacagcacggagtcttctgagccgcaggaggcggaaggatgggtcgcccgacccatcacccgtgacgccgctcgcggttgtcacttccacgacgcactcgacaccttgctgcgccaggctttcgaccggcacacctggtcgatcgagtatcgttgtgtagtctaccagcacagtcgcgggaggtacccggaccgctgggaggctacctgcctagttcgccgtccggaggatgacctccggggtgcggaggccgtttcggagcactactctatctccgagagggacactgcagaggcggctatgcaggatgcagcacggcgtgcactctcccagtactgttctttattcggtggggtggccgacggtcttaaccttcggtactacccccgccgccctactggcagcacagagagtgtggttgtctcacctgttggtgaggctaaccctaggttgagcagcacagtcaacctagtcgcagtgcttaacactgagctggattactctctggacgagctaagcagggctcgaacggagattgcggagttgcgtgctgagctggcagagcgccatcaccaggagggtggttcccccgctcctgttgggactcagcacccttaccgctcgccgccacgtggtcaccacacttatggttcccctgtctgtaagaccaggatagatctggatccttagtactcacccttgctttcacaaaacaccaggttgcctttgttcaatctatgctcaggtaaagaagaaggagaaaggcatcgaggcggatctccaggagttctaggattttgatgagttcgaggattaggctagcgacctttcccagttagttgcttgtggtgggttcatttacgttgactatgttttgattctgtgtactttgatttatattatgtgaatgactctagtctttgatatcattacttattctttattgttattcgccgccttgtgctatgatgagtcntttatgaaaacactaagt

SEQ ID NO: 172776 - DNA, 1353 bp, Zea mays
  Clone ID: MRT4577_89154C.1
atgcaggaatcccttgcaggaccgccatcgcagcaaaatcctcccgagggcctccctacactgaccactcccctactgcccttgcccctttcgggtaaggagaactacccaagtgattcaggggtaaacaagggttttcttccctacctgggctgcgcgcactatttacagagaacccaggggtctcggggaaagattcccaagacacaaaaattcctggactggaccgcggccgccaccgtcgacccgagtctccgtcgcgtccccgtcgccgccgaggagtccccggagcccgccttgagggggctcaggctgtttcctgagtacctctccatggctcgtcttagacacactgcacgtaagtcggtgattcctttcctgccgtctcgacttgcggagcgtcctctgcaccgcaccgtgtccggacagtcgagtcacctggagaggctgcaccaccgcctgcgtgaggagcaggaacgccggcgccagcacggagagcagcagggctcttcctcctcaccccagcaggaggtggagaccgtgaggccccgttcctctgttgcccagctggaggcgccccttgttccaccgcgggacgtcccggctgttggaggagctgttggaggagctactggaggagaccccgacgacgacgactcagcccacagcacggagtcttctgagccgcaggaggcggaaggatgggtcgcccgacccatcacccgtgacgccgctcgcggttgtcacttccacgacgcgctcgacaccttgctgcgccaggctttcgaccggcacacctggtcgatcgagtatcgttgtgtagtctaccagcacagtcgcgggaggtacccggaccgctgggaggctacctgcctagttcgccgtccggaggatgacctccgaggtgcggaggccgtttcggagcactattccatctccgagagggatactgcagaggcggctatgcaggatgcagcacgacgtgcactctctcagtactgttctttgttcggtggcgtggccgacggtcttaaccttcggtactacccccgccgccctactggcagcacagagagtgtggttgtttcacctgttggtgaggctaaccctaggttgagcagcacagtcaacctagtcgcagtgcttaacacggagctggatcactctctggacgagctaagcagggctcgaacggagattgcggagttgcgtgctgagttggcagagcgccatcaccaggagggtggttctcccgctcctgtcgggactcagcacccataccgctcaccgccacgtggtcaccacacttatggttcccctgtctgtaagaccaggatagatttggatccttag

SEQ ID NO: 172777 - DNA, 613 bp, Zea mays
  unsure (1)..(613): unsure at all n locations
  Clone ID: MRT4577_89155C.1
ccgggtcgacctcgcgtccgcgccgcatgtacatgtacgacaaccgttccagccgtatacggcgtagccagagcagggagatcgtcgacagccgcggcagcctcctgctcctgaccagcacgccgtggtgggagtccatagacccaaggcgctggtcacctgacttcatcgtgtgcgagcccgtgttactgcgatatcaggggatcgcgcgcccggccgacctcagccattttccgttacttggcgccttcctgctagatggtgtcggaacctgcgccggcgacgccatgtcaaacttcagggtgctatccgtgctctacgagcgcagcaggtggcgctaccagttctgcacgccacgggcgtgcgtgtttactccaagtagcgacggcgggtggcgcatatgttggcacgccatgaacgacgacgacgttgaagtcccagatatagagaggagccattttgctggacgagccgccaggaaggtctactgggggatggagaccagtagtctgctcgtgctcgacgagagcacgctcaagttctcgctcctcgcctttccggcgcctatgcagctgccgaatcggaggatcagcttccgtgtcattgntggcgt

SEQ ID NO: 172778 - DNA, 384 bp, Zea mays
  Clone ID: MRT4577_89156C.1
aattggaacacgggccccccctcgggcggccgctataatctctttattttttttttagttttctcttttttctaaaaactaaattggttatttggaatgttatatgtttttcgtacacactacataataaaaatgaataacgtctacacatttttaatcataaacaaaaagagaaaaccagcgcaaaatgctttatacaccacatctctaacatattgcaaacgctgataccataacaacactacttcataaaggtgccagcaaaatcatgaatttattaaaacaaagaaaaatattgacactatagggctcataaagaccaccataaactgacagaccccattcatcttttcacccagaatacactcagagaataatttaacc

SEQ ID NO: 172779 - DNA, 1268 bp, Zea mays
  Clone ID: MRT4577_89157C.1
cctcgaggcggcgggactttccccgtcggcggttctttacctcctcaatcctggcttgaacctgtgacccgtcgaggcggcgaagggccgaatcgcaccgcagaccgcactgtagggagaagctcctgcaaggttttggagcgggcgatggaggcggcgagcaacggcgggctgctctaccacgaggtacaggaagggaagctctgcgccgtgcattgcgtcaacaccgccctgcagggccccttcttctccgagttcgacctcgccgcgctcgccgccgacctcgaccagcgggagcgcctggtgatgctcgagggctcccgaagccccggtgcgggcaacgctgctgcaggggacttcttcgccgagggcgagggatctcacaacgtctcccttggcggcgatttcagcatccaggttttgcagaaggcgctggaggtttgggatctccaagttataccccttgattccccagctgcagggtcgtccctatttgaccctgagcaggaggttgctttcatttgccacctgcaggaccactggttctgcatgaggaaggggtcaggctggagtatatttgcagttagaggcaatttccccaaggagtgccctatggcaaccgaaggctctaacggtttcggtcaatggtttacccctgatgacgcccggaggataacagcctcctgtaaccaggtgcaaacaccacctaatcagcaggtacaatcccctctacttgctgaacaaccagaagggatgagtgaaatggacatgatcgcagcgcagcaagaagaggctgatctgaatgctgctatagctgccagcttgatggacactggggttccatttgccagctatgccgcagctcgagaacatagcgattcacaagattctcctgctcgtgaagcagctccgagcaaagataataaccaggaagaagctggtaaagctgaaccgagcgcacctccctgtgaggaggacatccaggagttggcttcaggaagcgacaccagaagggaggttccttctgtagaggagaaagggtcagcgaaagaagaataggatggcactttctgatcattctgtaactgagttagacccgtacaaacagaaactgcccaccatttcagtggagttatgccttcttctttttttttccccggttctgaacgccgtatacgaaatgcatagtctgaactgaatgggcttaaaaactttaactggtgtaactgctatgtgcgaactgcatagagactagagtggccgttttg

SEQ ID NO: 172780 - DNA, 466 bp, Zea mays
  Clone ID: MRT4577_89158C.1
cagcggcatcctcgaggtctgcgacgtgccgctcgtgtccgtcgacttcaggtgctccgacgtctcctccaccatcgacgcctccctcaccatggtcatgggagacgacatggtcaaggtcatctcctggtacgacaacgagtgggggtactcgcagagggttgtcgacctcgctgacatttgcgccatcaagtggaagtgaggcgttgcattgtaatattttgtaactcaccctcgagagggctctgggattcgccccgaaatgaccgaatttcggtgaaattcacccatttcggtgaggtccgaaacaacattataccggccaaaaatctcgattaagttcgaatttttagtcaactttagagttgaaacaaacctacaagttcttcattcaatataggaatgtatacctatcaagccataattcatttgtttcctcttggtgcctcttgatcaaattatgacc

SEQ ID NO: 172781 - DNA, 1479 bp, Zea mays
  Clone ID: MRT4577_89159C.1
acctcgaggccggccgggggggcgatcgcgtcaccagtcaccactgagacggaaccgagtaaccgacccacgcaaaaagcgctcagcagctcctgcgcgccccctttcccccgtcggccgatttcgtttatctcctcaatcctggcttgaatccgtgatacgtcgaggcggcgaagagccgaatcgtgccgcaccgtagaggaggctcaggcttctgcagggttttggagcggggcgatggaggcggcgagcaacggtgggctgctgtaccacgaggtgcaggaggggaagctctgcgccgtgcactgcgtcaacaccactctgcagggccccttcttctccgagttcgacctcgccgcgctcgccgccgacctcgaccagcgggagcgcctggtgatgctcgagggctcccgaagccccggcgcgggcaacgctgccgcaggggacttcttcgccgagggcgaggggtcccacaacgtctccctcggcggcgatttcagcatccaggttttgcagaaggcgctggaggtttgggacctccaagttatcccccttgattccccagctgcagggtcgtcccaatttgaccctgagcaggaggttgctttcatttgccaccttcaggaccactggttttgcatcaggaaggtgaatggggagtggtataacttcaatagtctgtacccagctcctgagcacctgtcaaagttttacctctcagctttcattgacaccctgaaggggtcaggctggagtatctttgcagtcagaggcaattttcccaaggagtgccctatggcaactgaaggctctaacggttttggtcaatggctcacccctgatgacgcccggaggataacagcctcctgtaaccaggttcaagcacctactcagcaggtacaaccccctctacttggtgaccgatcaggagggatgagtgaaatggacatgattgtagcgcagcaagaagaggctgatctgaatgctgctatagctgctagcttgatggacactgggggtccatttgccagctatgatgcagatcaagaatacagcaactcacaagatgctcctgccgctggaccagctcggagcaaagaagaagctgataaatctgagccgagcgcacctccctgtgaggaggaaactcaggagttggcttcaggaagcgacaccaaaagggaggtttcttctgtagaggagaaaggaacagcgagagaagaataggatggcacttttgatcagtctgtaactgagttagactatacacagagaaactgccctccatttcagtggagttatgccttttttggttccgaacgccgtacgtatacaaaatgcatagtctgaactagatgggcttgaatgggcttaaaaactttttaaaaaactggtgtaaaaaaaaaaaaaaaaaaaaaaaaaaaaaaaaaaaaaaaaaaaaaaaaagcggaaaaaactcgaggggaaagccgcggtacc

SEQ ID NO: 172782 - DNA, 394 bp, Zea mays
  Clone ID: MRT4577_8915C.1
tttcttgtctgacattgccacgctcctatctgagaaccatatacctaacgcggagcggggcgtaccaagcgccgggcgaggtgcgcgtacctgccagcaatcgttgcctgatccatccaccatgggcggtggcagcggccagaaatgcaagatggactgcaagcgcagctagcagaagaacacggggcccagagggagccagctagagaccaacaatatggccatgaccatccagcacgtagagggcatgcaaacattcatgtgtaccacaactggagagaagtgcccagagcacgccgaggccaaacatcccaagacagacgtgaaccagtgcttcccccatgttaagaactgaaaggccttgactctgctgccagtgctggtttggtcacta

SEQ ID NO: 172783 - DNA, 336 bp, Zea mays
  Clone ID: MRT4577_89160C.1
ttcttttttttatttttcttttttcctttctttctgggggggttttttaaattttggggggtttttccaaactaaattgaaactttgttccaggacaatttaaaggaggggcaaagcccgtttaccccaaacggccctgggaagtttttgggacaactataggggcctataactggttcctatcaaactaaaatacagtccaaaacaaaaggggccggactggacccctattgttgggaaacaaaggcggcggacggaataaatatcgacacggagggcccccaaaaaagcaagcttgtccggaggggtggccttgccgaagggcgggcccccccg

SEQ ID NO: 172784 - DNA, 1411 bp, Zea mays
  Clone ID: MRT4577_89161C.1
ccggccgggagacacgacacgacccacgcaaaaagcacccacacaggtagtcaggcacacagctcctctgcgttacctttccccgtcggccggtttcatttacctcctcaatcctggcttgaacctgtgacccgtcgaggcggcgaagggccgaatcgcaccgcacactgtagggagaagcttctgcaaggttttggagcggggcgatggaggcggcgagcaacggcgggctgctctaccacgaggtgcaggaagggaagctctgcgccgtgcactgcgtcaacaccgccctgcagggccccttcttctccgagttcgacctcgccgcgctcgccgccgacctcgaccagcgggagcgcctggtgatgctcgagggctcccgaagccccggtgcgggcaacgctgctgcaggggacttcttcgccgagggcgagggatctcacaacgtctcccttggcggcgatttcagcatccaggttttgcagaaggcgctggaggtttgggatctccaagttataccccttgattccccagctgcagggtcgtccctatttgaccctgagcaggaggttgctttcatttgccacctgcaggaccactggttctgcatgaggaaggtgagcggggagtggtacaactttaatagtctctacccagctcccgagcacctgtcgaagttttacctctcagctttcattgacaccctgaaggggtcaggctggagtatatttgcagttagaggcaatttccccaaggagtgccctatggcaaccgaaggctctaacggtttcggtcaatggtttacacctgatgacgcccgggagataacagcctcatgtaaccaggtgcaaacaccacctaatcagcaggtacaatcccctctacttgctgaacaaccagaagggatgagtgaaatggacatgatcgcagcgcagcaagaagaggctgatctgaatgctgctatagctgccagcttgatggacactgggggtccatttgccagctatgatgcagatcgagaatacagcgactcacaagatgctcctgccgctgaaccagctcggagcaaagaagaagctgataaatctgagccgagcgcacctccctgtgaggaggaaactcaggagttggcttcaggaatcgacaccaaaagggaggtttcttctgtagaggagaaaggaacagcgagagaagaataggatggcacttttgatcagtctgtaactgagttagactatacacagagaaactgccctccatttcagtggagttatgccttttttggttccgaacgccgtacgtatacaaaatgcatagtctgaactgaatgggcttaaaaactttaactggtgtaactgctatgtgcgaactgcatagagactagagtggccgttttgaacccccaaaaaca

SEQ ID NO: 172785 - DNA, 792 bp, Zea mays
  Clone ID: MRT4577_89162C.1
atgggagccatacgagttgcaagccttctactcctcgctggggtaatctggctgtcgcgggcgatgttcggcgcggaggccgccggcacgacggtgttcacgctgcacaacaactgcacccacacggtctggccggccacactgtccgggaacagcgcggcggccgtcgggggcgggggcttcgagctgtcgcccggcgccaccgtctcgttcccggcgccggcgggctggtcgggccgcctgtgggcgcgcacgggctgcgtcgcgtcgtcgtcgtcccccgccggccgcctctcgtgcgccacgggcgactgcagcggcgccgcgagctgctccctgggcggggcgccgcccgtcacgctggcggagttcaccctgggcggcgccgacggcaaggacttctacgacgtgagcctggtggacgggtacaacgtcggcatcggcgtggcggcggcgggcgccagggtcaaccgcgccacgtgcgggtacgccggctgcgtcggggacgtgaacgcgctgtgcccgcccgagctgcggacggccgcggcggcgggcggcgagggggcgccggcggtggcgtgccggagcgcgtgcgaggcgttcgggtcgcccgagtactgctgcacgggggcgcacggtgggccgaacacctgcgggcccaccaagtactcgaggctgttcaaggcggcctgccccgcggcctacagctacgcgtacgacgaccccaccagcaccttcacgtgcggcaccggcgcgcagtacctcgtcaccttctgcccgggtcgccagtag

SEQ ID NO: 172786 - DNA, 754 bp, Zea mays
  unsure (1)..(754): unsure at all n locations
  Clone ID: MRT4577_89163C.1
cattgggtacctcgaggccggccgggatcccgcctacgcgcgagccaccggtccccgctcctccccgcgcggcgccgccagcctgctcctccaccgcgcccaccgctagctcgctcctccaccgcgcccgctgccagcccgctcctccaccgcgcccccgctcctctgccatcatcgctggttgagatgggtgggtagggtttgggcttgggcgtggccgcttgggatctgaatagggtgaggtcgtgaacaatggatctgtcgagtcgatgggcggaaccgctgaaggaagcagaaggcgaggtggatcagtggatggcgtattggtgtcgcgtctcgcgtaagcaagtggggaagacttcatcgccgtgcgcgcccgccataccgcgcaccgccacctccatcgcgcgccggccagcccccgctcctccacctccactacacgcgccggccagcccccactcctccacctccactgcacgcgccggccagcccccacttctccacctccaccgcgcgccggaagcccccgctcctccacctccactgtgcgcgccggncagcccgctcctccaccgcatcaggaaggcgagccagagatcgagcggcccgagaaaaggaggaaacacaagcttaatcagaagccgaagcccagggagctcagtccaatggagtggatcgctgaagcccggcaccagacacattcagtgaaagattgntctcaggntgatctgtgcaatttttgagggactca

SEQ ID NO: 172787 - DNA, 529 bp, Zea mays
  Clone ID: MRT4577_89164C.1
tctgactcgcgctcttccctctctgtccctctggctcccaaccaagaaatagccacgacggcgacacgtctaggtagacggaacggaaccggttgcgtgctgtacggagcatggggctcctcgaccagctctgggacgagactgtcgccggcccgcggccggaccacggcctcggcaggctccgcaagtactcctccttctcgccctcgaccgcggcggccgcggacgtcgcgccggcggtgacccgcagcatcactatcgcccggccgccatctctctcggtgccatccggcgaatcaagctccgtgccgccgtccccggccagcgcgccggactccccgttcgcagcagtgttgatcgaccgtgatcgcttctgttggatcggcgatgcgtcgcttgtccctcgagcgcgatgcagccacataatcagatccgtgaccactgtcccagtcgcagaaatgtcgggaaatttgctgatgaacctgaaattcccctcagtaaattgatgttctatctgaatctttatgct

SEQ ID NO: 172788 - DNA, 650 bp, Zea mays
  Clone ID: MRT4577_89165C.1
ccttacgtcctcaaacacaggcggaccgtgacgagacgaacaagatccttaaccaggccatagagcccttgaccgagtgcgcaaacgaacacgaaggctagcttctacccaatgggctaccatcctcctcctgcggagccgaatactaagtaaaacaaggggcagagcgagcacgaggagatccacgaatcctcgggcggcggtctgggttacaccgacgacgatgactgcaagagcaggcgccccttgctgttgaagactaccgcctccgtcgagagctactccgactccgccgccgacattccgttgataatttgcagctttggaaggccttatgtaaggctatgacaatggggcaacatgcggtgcaaccatattgttcaagccgtgaacattcaggggcactacttggaacaaatggtcaactgtgcgaacgggacttgaggtcagagcatcactgtatcggtgccaagaacgggtccgagttggcatatacaatccgcagattgtttaggactgacgtaaagagcctatccttgctgcctatctgataatggtattgaagcctccatgacagcgatagcacccaagtgcactatgatggtgaaaggccgctttttatatggaatacgaaaaggagtgggtatgca

SEQ ID NO: 172789 - DNA, 164 bp, Zea mays
  Clone ID: MRT4577_89166C.1
atttgcaaaaacgcacaacacaagtttagaagcgagaaaaaaacagagtgagaaatgttttctcttttgaagatctcggagaacaacatgattgcagaaaaggggtagggcaggtgattctagagaacagttttagttgcaaaggctgcagttaattctgctgc

SEQ ID NO: 172790 - DNA, 943 bp, Zea mays
  Clone ID: MRT4577_89167C.1
gcctccgacaagcaggacctgatgaggctttcagcggcggcgctcctgctggcgctggccgcggctggcagcgtctgctcggcgcagcagctccgtcgcaactactacgcgagcgtgtgcccgaacgtggagtccatcgtgcgcgacgcggtggcgaagaagtaccgggagacgttcatcacggtgggcgcgacggtgcacctcttcttccacgactgcttcgtggagggctgcgacgcctccgtggtggtggcgtccacgccaaacgccaccgcggagaaggaccaccccatcaacctgtccctggcgggcgatggcttcgacaccgtgatccgggccaaggccgccgtggacgccgtgccgcggtgccggaacagggtgtcctgcgccgacatcctggccatggccacccgggacgccatcgcgctggccggcgggcccgcgtacgcggtggagctgggccgcctggacgggctgtcctccacggcgaccagcgtgaacgggaagctggcgccgccgtcgtttggcctggaccagctcaccgcgctgttcgcgcgcaacgggctctcgcaggccgacatggtggcgctatcggcggggcacacggtggggttcgcgcactgcggaaccttctccgggcgggtccgcgcggcggacccgacgctgaaccggagcctggcggagaagctggcggcgtggtgccccgacggcgtggacccgcgggtggcggtgaccatggacgtggtcacgcccagggtgttcgacaaccagtacttccggaacctgcagagcgggatgggcctcctggcgtcggaccaggtgctgttaggggtggtaatggatcgtgatccaaatagttcttcacaaaatgtcaaagccctaaataaattatagttcaaaaatgactataaatagagcccgatcctaacccgcttcgatcctt

SEQ ID NO: 172791 - DNA, 285 bp, Zea mays
  Clone ID: MRT4577_89168C.1
cccacgaggaagcagggccaaaaaccccaaccaaaagggcaagccaaagacaaacaaaaggcccaagaggaaaaggcggcccgcacctagaagcgtaaccaaagaccccaacccaagacagaaaaacgcaaggacccacccaagagcgaccaccgaagaccaaccccatcccaacaaacaaacaccagctggaggcagccgcgcagacaaatggagagacaacaacgaccagccacatgggaccaaaaaccggcaccaaggccaaacagacgcgacggaccaaga

SEQ ID NO: 172792 - DNA, 236 bp, Zea mays
  Clone ID: MRT4577_89169C.1
cgcttcttaataacccagcttctgccccactcgattccttatcctgctgctcctgtagggtcaagggctctccgtctacacccgcttcttctcctccatcctttattcagagtcatctcgtacttccccatgggtgggggaacctgtgtttgattgtgtgcacatgtagatcttaaatattgtaagtcgtgagtccttacctcctgtaacatatcaataaagtacgatcattgtga

SEQ ID NO: 172793 - DNA, 284 bp, Zea mays
  unsure (1)..(284): unsure at all n locations
  Clone ID: MRT4577_8916C.1
ttttaaggcgggagagngcaccaaaangaggcggtgtcatttaagaggagggacggtgctgccccagataccggagagggaagggacaacgagggggaaccacgggcagcgagacaccaaggagggagggcccggacgcgaaggcaggaggaggcgagaaagcggcaaggggcggggaagaccgagaacgagaaacgcggggcaaccaggaacgcggacccgcgactcaagaacagaaacagggcggccgagacaccacacacgagggtataccaaaacacgaa

SEQ ID NO: 172794 - DNA, 484 bp, Zea mays
  Clone ID: MRT4577_89170C.1
tttctttcgcgtccgcccacgcgtccgcggacgcgtgggtctttgtaaacaaagagggacgtgtcggagaccgaagcgatgaactcgaggcggtgtaagtatgtgtcaaagcactggaaccatgcccaagagcctgctttggctcatagagggaattctgcaactgacaaacatgattagggccgaaggagtcgataaagccaaatagctgctgacaatagaccatctcctcgaggtggccatgaaggaacacattcttgacgttcaactattagatgggccaggcacgagaggtcgcaatgttgaggatgacacgaatggtgggaggttcgaccaccatgttgaaggcctcattatagtcgatgttgtgttgttgtgagaagccccggaccatccaacgtgtcttgtgatgagcaagtgtaccatcctagtggaacttgggcttgaagttccacttgcctgtaaccacattggtgccaggatg

SEQ ID NO: 172795 - DNA, 273 bp, Zea mays
  Clone ID: MRT4577_89171C.1
cctcaaggcgggcgggccggaaaaacctagaagatcggtagtccctctcctctcgaggaggaggtgctccccccgtcttcctcttcttcttcttcctgtactatatagcctcccctcgcagatcgtcactgaggttcattccgcttgcttgaatgttacaagtattagaaatccaccgcctcctcacagcacgatgaaggttgttgttgcctacctgcttgttgtcctcgatgggaacagccagccccatccgctgacgatttgactgccatt

SEQ ID NO: 172796 - DNA, 248 bp, Zea mays
  unsure (1)..(248): unsure at all n locations
  Clone ID: MRT4577_89172C.1
ctatgttattattttttttttcttatgcccttggtttttcggtggtggtacgatgcccttcaagtaactgctaagagcatagtgcatgttttatgagcttgtagctagctcatggcttattgggggggggggggggaatattaatgcatgtntaggattttttatgcggggggggggtaaataaataaaggggatccggctttgttctaaaaaacagaataaatttctttttgttgtatttggggggg

SEQ ID NO: 172797 - DNA, 267 bp, Zea mays
  unsure (1)..(267): unsure at all n locations
  Clone ID: MRT4577_89173C.1
cccatcnttttttattaatgacagntacacccagggggttcttaacataggtcttcaactgtagccaaccacctcaccgggccccagcgccatacagcaaagcacagacagaactagcaacgacgtctgtatacaaacgtcacacggccattttcgctacaaccccccctcagcttcccctaaattacgtaacgtaacgtaccgtacccgtgtatcgacagagagaccagaccaccagcaagtgacgacgccgccccggacgcgtgg

SEQ ID NO: 172798 - DNA, 667 bp, Zea mays
  Clone ID: MRT4577_89174C.1
atctcttacacagaatgtatcaccgagcgcgagtttacacgctaaagaatcctccacctcccggatctctctcccatccacgcctccgccgagcctccatctgctgcagctactgcgctcccccacacctgatgcatctcttctgagaatagctgctctcaatctgggacccctaccagagagccttcttgatgatgaacatcccagtgctccattgcgacgccgcctgttgagcatcactgcatcagaattccggatcatacatcggccgctcgtcttcctaccacttgtggatcgctgaccatggagtcctccagccgctacctcgctggatgccctgaaagtgctccctctataccacaatgaaggatgggaaggcgttatctccagtctccaagaatggatgagtgatccctgaaatgaaagcaaacctggtctgcattggagtggtggaattggatttatgcatgaccgcccactacactgaatgatctcaagcacgcactctctgaaggaacactaggactgcgtgcattgaatgaacagatcttcttctctatgcatcggtcacactatgctgacaagcctttgcatatcctggaacgatctgatgaagaccttacacttacatcatcttgcaacagatggctgggcattgatggtggag

SEQ ID NO: 172799 - DNA, 192 bp, Zea mays
  Clone ID: MRT4577_89175C.1
aaccgggaacggtccacaaagtgggcgcggtggagacttactgttcggaccgaacctggtactgccaaagtacatttacacaccatgcaacacatattttgccaaaaaacaaccgcggcttgaattcccccccaccatccccttttttaatttttgcccccaatttttaaaccataaattttgtgcccccat

SEQ ID NO: 172800 - DNA, 270 bp, Zea mays
  Clone ID: MRT4577_89176C.1
ggccgtctcccatcgtcttgacccatgcatgagcggacagctcatctctatataccccggaaatgtagaggacacggtgcagcttgccttaaacacgcattactccatcatttcacgctaccaccactttagacatggctagctacacatagcaagaaacagatagactgctggtggtgctagcagactgcacggagggcgcctaactcccattagatcgttgcatttccttgccggccgtctgggtcaagacacaccaggaccacatca

SEQ ID NO: 172801 - DNA, 261 bp, Zea mays
  Clone ID: MRT4577_89177C.1
cccactcgtccggtctactctaggagaggaggctgttctgtggtggcctcacctgccctgcgatgagtatacaaaataacggagctctactcgggtagaaacctgatggcccgccgcttcccaccacttattcctttcagttccacacactcctccattctacgtctacgcctatacgctgccttacctcctgcttcgagctgctcgcgctaactgcgcgaccatcaatgctcactatgcagtatctacgttcggtggcat

SEQ ID NO: 172802 - DNA, 215 bp, Zea mays
  Clone ID: MRT4577_89178C.1
attcggctcgagctccacagcatgattttggtatgaggtacctccggaggatggcatggatgggcaagtgaaagaagaactcatgcaactggtgggagcgaaacatgctggggtggcatacatcatgggcccttactgtatctaagctaggacgagctcaagcactctgcagaaggtagatatggctggcggctactctttacggcggaagaact

SEQ ID NO: 172803 - DNA, 631 bp, Zea mays
  Clone ID: MRT4577_89179C.1
gactcggttccattctagacactccttccctatttcctggttagtctcgacaactgcgatggaagtcgaggtggcacgggttctcgaggcgatggtacacatggagctccgcttgaccgcggcactggctggcagtggtggcgagcaggaccccgaatccttctcctacgccaccgcttcctccgccatcgcgccacggtacgacgacagcgtgttcggctcttcggcagtccctgcatacgacgacgttcccgtcgacgacgagctgtaccgtgatgagatcgccaaggtgctcgcgctactggagtacaacgggatgacttcgtcggccacaatcctcgccgattataccaccgctaccacctcagctgtgctggttggctgtgatggcgagcaggccgctcgcggatgcactaccttcttcgacgacgactacatcgatgagctcgatgtgtgggacaaggacgccatgtgcaccgacgcagatggctccagcgaacaacccgcaccccagtgtgccaggaaggagatccggcttccccaaagagtgtgcttcgcacccgacaactccttctctgggaccggcagctgcctgtgctgggtggatctggttcaagcatcatcgtctgca

SEQ ID NO: 172804 - DNA, 1419 bp, Zea mays
  Clone ID: MRT4577_8917C.1
ctcgaggccggccgggaattgagagattggacgaatgagtatcctgtgacggcctcggcaactcgctagctccatctcgccatctatctgttcatgaaacaaagcactatcttcttctagagctggtcacccaatctccctcgcttccacagtcactgaggccagaactcctttttttttctggtggaatgtaggggcaacgcggaaaacacgctgcaaaccttgcgtgcaaagtaggcttttaccaccaaaacctagcaacaatccatgttcttgcgagaatggcaggcaccagcactccagcagagtccactacatgtattgcatcagtcagttccggcgcaaaaagtgcaacggcgatcaaaagcgagtgtatacgtacggtcactgaattcatttcagaatcaggtttttgctatcacccgaaaatgacacatcacctccttgagcagttcagtcggactggactgtagggatacacatcctgtgcatcgatcgagatttctgcggagggcggacgtccaagtcgcttgctttgcttcacccggtggagaaaccagagcacagcgcatgacttttataaatatatggatcggtcgatctctctaggcatctatatatactcctgttgcgtagaatcggcacaagggtgcacgttcaggaggagctctcgtggcgtcctagtctgtggaaggtccaaagaagaagatggacggcgagatggacgaggacgtgctcacggagatcctcgcgaggctgccgtgcaggtcgctggcgcggttccagtgcgtgtccacgtcgtggcggcgcatcatctccagcgactacctccgccgccggctgccgctcatcacgtcgggcgtgctctaccacgatggtggcaggaggcagcagtcgtacacgtacgcgtgcgcgtcaggcggcggcggcggcggcggcgccatggcggaggccgcggacatgcgcttcttcccgcgccacgagacgtccaccatcatcgacggctgcaacggcctgctgctctactacgcgtcccgcccggcggcgttccacgtcgtgagcccgaccacgcggcggtgggcggagctgccggcgccgcgcgccatgacgctgctctccgtgctggcgttcgacccccgcgcctcgccgcgctaccgggtggtgtgcttcaccggctggctgccccggggcgccaccgtcgaggtgttcgactccgagcgcggcgcgtggcggggccacgagctcgacttcggcctcggcaccgacgccatgtccgcctccatgcactacgccgccggcgcgctccacgtgctggcctactcgggccacgtcgtccgcgtcgacctggacaccatggcgtgcgcggtcaccccgctcccggcgcccgtcagctgccgcgcgcgccccgcgccactccca

SEQ ID NO: 172805 - DNA, 952 bp, Zea mays
  Clone ID: MRT4577_89180C.1
tctagtttgatttacaagtgatgctcgaccaatttaaacaatacttgagtcagtgaactgtaagttccaaagaaaatttcgtagattaaaggtccaacatagtgtctactgtctattttttatcagtaagcggtccaaaacctaccaggattcatgggccagtggaaggctcctacttgattagatatattataaacgaattaatgatttcagaaaataaatattagcatagaaaggttaggaacttgcatgatagttctaagtagtaatgattagcatgcctttcagagacctctcaggaaataaattgcataacggacctgtcacaactcacaataacaattgttagcaagacggcatatattttagaatcttggtatctacgatgtttcgttttctcacacctcacgaaataatgtatcttcatctaaagcttcgaactacaggaaaaggatattcttgactatgcaagacagacattagagaggaaaccatccgtactatggcttctacctccagttcttaccgccgcagcaattccaccgcagtcaagcttgttccagatatacctagctcaaatcgataagcaaattcatgaagctgctcctgcagatcgaaagtgtagttgcagaggagatgaaatagatcggcatggtaactgtgagattactgaaaggattcaatgtctctacgcattccatattcagcaactttcatataacggttccattatggcatagttatagttcaagattacactgaatgtttagcagtttgcacggtctgacatttcacttttaattgagtgactggtcgtctatgcatggcttccctggtcatattacttttcatttaacgtttgtcactggtggggggtgcgtacatctttgactttgtactcttctttaatgaaatgaaatggcactaactctggtgcatccttcgagaaggg

SEQ ID NO: 172806 - DNA, 201 bp, Zea mays
  unsure (1)..(201): unsure at all n locations
  Clone ID: MRT4577_89181C.1
attncgggaaacaaatgaacccacagcttgttgtcggaaatttacatgacaaagttttttgcccgaaagaccttttcttaacatgtaccataagggattgggcgaagaccctagggtttcagtatagtttttttttgttcaggagagtggttaaacaaaaaccttgggtgaggataactgttatttggatccatgactggg

SEQ ID NO: 172807 - DNA, 362 bp, Zea mays
  unsure (1)..(362): unsure at all n locations
  Clone ID: MRT4577_89182C.1
gttngaacaagcgtatgatcaatttctggtgttgaagggatcttgggagcaaattgttctgaatgatgctcacgaccgttggaggtacatttgggggtcggacaaattctcaccccaaaaagcttacagattttccatgggccggatgcagattcaccctatctacagactagtttggaaaagcaaatgtcagcctaagcatagagtcttttactggttggggctcaaaattaggctaaataccagaaatatactgagaaggagaaacatggagctggactcttattcttgtgaaaactgcctttggcaaagagagaanaccctctatcatttattcctcagatgcaactttgcgaaagcct

SEQ ID NO: 172808 - DNA, 833 bp, Zea mays
  Clone ID: MRT4577_89183C.1
cattgggtacctcgaggccggccgggaaaacaccgcgccggccgagaccacagttcgatcgcctctccctccggttcagtactcctctcttatttcgactcaagctagtccagccgctcgcccactgcccgccggccgagatcgtctcctcccaactgcaaacgaccaagttcgtgacatacattttttgctcgctgaatcctaatggcggcggagatggtcggctccgtggttgcccaggagacggtgagccagatcctctccggcctggttcagaggtacgcggaatcaagcgacgcaaaccgaaacctcgagaggctagagatggcgcacatcaggctggaggccgccctggacgcgtccgacaggtggcagatcgccgacgcgtccctgcttcgctggcgcaagaagctgaggcgcgtcgctcaggagtgcgacgacgtgctgcacaggtgcaggcagcaaggcgtggcgcaagcgcaagagccggcgacgccgagctcctccctctcccccctggccgccctgcccacccgcatcgcgcgcgcgaccaagtcgctcatcttctccgccttcgtcggcgacgcaggcgcgccgagcaggtccacggtgcaacggttcgagtggttcgcggacggggccggcgagttcctgcgctacgtggaggtcggcggcggcgcggcgccgcgctgccacgtgccgctcagacggtctctcaccaggcacctcttcgcgggcatggagctgctgctgcagcacaagatcgtctggggaagaggacgagaccagtgcccgtcctacctgctgtgggtggtcccttccgtcacgcccga

SEQ ID NO: 172809 - DNA, 349 bp, Zea mays
  Clone ID: MRT4577_89184C.1
agaaaagaaggagcaaaaggggcctcagcaatgcaacatcccccttataatcatttacccccgacccggaactttgcaaattcaacatatgagatggtccggggcccggaaccttccgataagccaatttttacagattccaaaacgtccggaaaaaccaagcatgccccgcttccccaaaaggaaaccaccctttttgaccaggcttgggtgcttggggctgaaaagaggggaaccatattttaacacgactccctccggggcctataacccgattagtcctttggggggatatcacccccaggacgcatccattttccccaaggagctcacgggcgaccgttaatcc

SEQ ID NO: 172810 - DNA, 647 bp, Zea mays
  Clone ID: MRT4577_89185C.1
gggtacctcgaggccggccggggatcaggagtcttggcgtcttgctccttgacttgggactgatatatacaccatgcatcttaattctccggccatcaccgcaccggccgagatccacatttcgcctctccatccggttcagtacttatctcctctcttatttcgactcaagtccggccgcgcgcccgcccgctgcccgccggccgagatcgtctcctcccaactgcaaacgaccaagttcgtggcatacatttttttgctcgctgaatcctaatggcggcggagatggtcggctccgtggttgcccaggagacggtgagccaggtcctccccggcctggttcagaggtacgcggaatcgagcgacgcaacccgaaacctcgagaggctagagatggcgcacatcaggctggaggccgccctggacgcgtccgacaggtggcagatcgccgacgcgtccctgcttcgctggcgcaagaagctgaggcgcgtcgctcaggagtgccacgacgtgctgcacaggtgcaggcagcagcaaggcgtggcgcaagcgcaagcgcaagagccggcgacgccgagctccttccctctcccccctggcgcgccctgcccacccgcatcgcgcgcgcgaccaagtcgctcatcttc

SEQ ID NO: 172811 - DNA, 300 bp, Zea mays
  Clone ID: MRT4577_89186C.1
gccgccgagtcgcgcggaggcggaggcttgggtgcgttcaagattcaacttcacccgtaacccaccgccatggccgaggaaggcattgctgctggaggtgtaatggacgttaatactgctttacaagaggttctgaagactgccctcatccacgatggcctagcacgtggaattcgcgaactgccaaagccttagacaagcgccaagcccatctttgtgtgcttgcatccaactgtgatgagcctatgtatgtcaagttggtggaggccctttgtgctgaacaccaaatcaacctaatta

SEQ ID NO: 172812 - DNA, 185 bp, Zea mays
  Clone ID: MRT4577_89187C.1
gacccactcttccgacagcaaaacgccagcaaccacctgtaatttatccacccaaaatccaatgactgttacatgtcactttaaacaagtatagacatcctcatatatattaacaagacatatattatcactaataaaaaatcacctatcttctatcatataatacaaccttataaggataccat

SEQ ID NO: 172813 - DNA, 218 bp, Zea mays
  Clone ID: MRT4577_89188C.1
gtcatacataaccatggcgcttgcccacctctccttaccccttctctgggtagtcgggggtggccgttttaaccgtcgccgacgacggcctcactgacatcgatgtttacccgctcgagaccttcaccgtggcgatcaccacggccggcggcttgatgcattccccgctatgcgccaactctttggtcgggagccagcacatagttctcgactatatc

SEQ ID NO: 172814 - DNA, 421 bp, Zea mays
  Clone ID: MRT4577_89189C.1
atttgctcttaacgaggcacagaaatcccttctgtcggatcacatatccctagagacttgagtaaggctcgcactgatatccatatattctgtacttaccaccacatcgcactattgttttgcttgctactagcgcacatgtaaaaaatattaaataaacaaagaagcttgcctgaactatttacatacactgtaaatacagtttttagtggtgtattttaattacttacacaaaccagtattcatctcaaaagccatgaacagctattcttatcccttccatttcattgaaaaatgaaggctttcgtagggatgaagaaacgcttcaaccttcaatatacctgaacaacctgccagacaagattccagagggtactcgtgtgctaagttgtgacccaatgctggccactggtgggacaat

SEQ ID NO: 172815 - DNA, 506 bp, Zea mays
  Clone ID: MRT4577_8918C.1
ttgggtacctcgaggccggccggggtctcactctctcactctgccctttgctagctattattctcctcagcctctgcattgcatccacgtcatgaccgtctgacgaatgcaaataggagaacgtgtacactgcgaaccaaaaccatcccgaccacacaattttccaattgcatttacatgacaggtgtacacgcacagagcatgcttcactcgggacccagtgccaaccgcattgactaaatcatggtgtggcgcaagatcccagaaccaaactcctgtatcgattgctctcccacgtctctaaggaacacgccctactccatctgctcaactccgacacggtacgtctccatgtcgaatgctccttcaccgagagaaccccgccgctcgctttcattctgcgacggactcttgacaaccagctctctgtcgccaacttgcgccgcgatcatgcactgcgtatagacatgaatatgcacctcaaaggcggtgcatgcacatggacc

SEQ ID NO: 172816 - DNA, 1161 bp, Zea mays
  Clone ID: MRT4577_89190C.1
cccatgcttccgcaaattaatgctcgttattcttgattagatgcatgcatctttgcggtcagatgaataaggtttgaactaatatccatatattctgtacttaccaccacatcgcactattgttttgcttgctactagtgcacatgtaaaaaatattaaataaacaaagaagcttgcctgatctatttacatacactgtaaatacagtttttagtggtgtattttaattacttacacaaaccagtattcatctcaaaagccatgaacagctattcttatcccttccatttcattgaaaaatgaaggcaccccaaccgtatccccctccctcgccccctcactgctctcgctttcgctcgccatccgccgtcccgctccgcacaccggccctgcccgatgccttcgcccgccgcggccgcggcggcgcctttccaccgcatcgcatgcgcgcgtcagcacctccctcaaacccgtctcttcttcctcccatcccgcgcgctgctcaaatccggctgcctcaccgtcccggctccgctgcgcgtccacgcgctgaggctgcctccgacggtgccacgggcggcaagccacgacgccgccacgggcgtgagatcgcccacatctggcggccagatgctggtgttcgtcccgccacacccgctcataaagcattgggtctccgtgctgcgcaacgaacagacaccctgcgtcatcttcaagagtgccatggcagagcttggtcggctgctcatatacgaagcatccagagattggttgcctacaatcacaggagagattgagacacctgtagctgtagctagtgtagaatttattgatccaagagagcctgttatctgctagttcttattttcagtttctggttattccaatactgagagctggtcttgcactagctgaacttgcttcatcagttctgccagccaccaagacttaccacctcggcttttcgtagggatgaagaaacgcttcaaccttcaatatacctgaacaacctgccagacaagatttcagagggtactcgtgtgctagttgttgacccaatgctggccactggaggaacaatggctgctgttattgacttgataattgagtgcggtgttactagcatgcagataaaagttatatttgatattgcattacctc

SEQ ID NO: 172817 - DNA, 2281 bp, Zea mays
  Clone ID: MRT4577_89191C.1
ggccgggggctctagctctcactctctcaggcccatttctgacgggttatttcgcggcgcggagacgccgaggctcccgagacccgattccccgtcccagagacgagagacggcacaacccttgctgccgtcctggtcgccacacggccacaccaacccaacacctcttcttcctccgctctcagcttaccccaccacaggcgagggaggcgactccttcctcgcggctacccgctccggccccgatcgcatctcctttgcacgccacggcccgcgcgcagtgtccaccggcacggccgtcctccgtgtgtgggggcgcatctggtgctagcttgccgggctagggtttggcttggcctcgtctaccgccccgtctcgtctgataggcacaggttccgtgcacgcgatcgtcgtctctccatccgttgtgactgcttgccgtcccccgcttgcttcgtcctgctacgggagggccactgctgccatcgcgtccaccgacgaatttccccacagagcattagagcaattatcttggagttgcagatctgcacctgaagattcatattgaaatctggaagcttctgctgttgagtacagagaaatatttcttgccttttgaggaagactgcagagcccctaaatgtgaaacttgtttcttttcttgtctactcctgaatgctgacgaactcagcctctcacgttacttagctgaaggtcgtactggtacagacaccgaggatggagcaagcaacaggtgtaagtggtcctgaacacataattgatattccaagggaaattggtcctcctgcttcggtttctcgtagtgctggtagagagaaccatgaagaatcgaatcctgtggacaggccttcaacaagagctctagtacctgccttgcaggcaccatcagcaataggtgctgtacctattacagggcatacttcaggcactaggagaaatgacaactatgttcgtcggcacagaagcccattgaattctggactgtggatttcaattgaagttattgttaactttagccagattgttgctgccattgttgttctttgtgtgtcaagaaaggaacacccacaagctccattacttgagtgggtcataggttacactgttggttgttttgcaacgttaccccatctctattggcgctatatacaccgtaatattgtaaatggtgagcatgagtcatcacatacacctcaagggtccgctcataacaactcaaatgaagcgactcatgctgcaagtgcatcagaacgccgtagaaatgctgcccgaaatgctgtgcttgctaatcctaggatcaatgcgctgtttgaccacttcaagatggccctggattgtttctttgctgtctggtttgttgttggaaacgtgtggatatttggtggccgttcttctgctgctgatgcaccgaacttgtacaggttgtgcattgtgttcctcacttttagttgcattgggtatgccatgccattcatcctatgtgcaatgatatgctgttgccttccctgcattatatctgttatgggttttagagaagatacaaacaatacaaggggtgcttcctcagaatctatcaatgctttgcctacatataaattcaaaatcaagaaacgtcgccatggttcaggcagtgaaactgaaggccaggaaggagggatattggctgcaggaactgacaaggagcgatcactctctgctgaagacgcagtttgctgcatctgtcttgcaaaatatgcgcacaatgatgagctccgtgaacttccatgtgcacactgtttccacaaggactgtgttgataaatggctcaagataaatgcactttgccctctgtgcaaatctgagatagtgagctcgtctggtacttctgatgcccgccaatcagaccagaacaccgttcctgtgcaggagatcgaaatgcattaggttggtctgttcccgcagcttatcacataaggatacatctgatttgtggctctcaatcttcatgtataaagttggagattgatgtatggattgtagagacgcgtaggttttttttttgtatttaacactgctatcttggagaagttacagctattctcgctgtcacccaactatggcaagccaatactacccaggttttcccccatagcgtgggctgcacctaatgttctgctcttgatggcattgcatgacttctttcgagtttctagagcgaaataggcaggcgagtttctttaagcgtgtatgtggacgtgtaaagtaacgttttgcattgtag

SEQ ID NO: 172818 - DNA, 323 bp, Zea mays
  Clone ID: MRT4577_89192C.1
caggacccggcccggaagacccgggccgacccacccgactaaggcggcggagccagcgccgcgcggggttggcggggtgagggcacggcggccggaaggacgcttacaacacctgcaacatagcatgaccgcactgaatgaacaggagaacaacatgtccctcaccgccttcagcggcggctccaacctgctcaccgagcccgtctacgaccgcctcgtggagcccgccgcgcgccgcgacagcggaaacccgcacggccaaaccccgctgcagcggaacgcccgacggccgcgcgcacaacgacgacgccatggcgggcgcc

SEQ ID NO: 172819 - DNA, 766 bp, Zea mays
  Clone ID: MRT4577_89193C.1
ccggccgggcggcccaccaacccacacctcttcttcctccgctctcagcttaccccaccacaggcgagggaggcgactccttcctcgcggctacccgctccggccccgatcgcatctcctttgcacgccacggcccgcgcgcagtgtccaccggcacggccgtcctccgtgtgtgggggcgcatctggtgctagcttgccgggctagggtttggcttggcctcgtctaccgccccgtctcgtctgataggcacaggttccgtgcacgcgatcgtcgtctctccatccgttgtgactgcttgccgtcccccgcttgcttcgtcctgctacgggagggccactgctgccatcgcgtccaccgacgaatttccccacagatttatgtcgcgcgttcttgcggatgcctccggagatagaaaattggactattcagagttgtgaatcgtgatacagttggatagaagcttcacgcttcagttagtgtggttcacttctcgactgccaatatggcagtcatttagattggggagcattagagcaattatcttggagttgcagatctgcacctgaagattcatattgaaatctggaagcttctgctgttgagtacagagaaatatttcttgccttttgaggaagactgcagagcccctaaatgtgaaacttgtttcttttcttgtctactcctgaatgctgacgaactcagcctctcacgttacttagctgaaggtcgtactggtacagacaccggagatggagcaagcaca

SEQ ID NO: 172820 - DNA, 507 bp, Zea mays
  Clone ID: MRT4577_89194C.1
aaattaatatttgtttttttgttatattttttggttattttttatgtgcatgctttttatattaaatttataaagaaaccaaactacttactgttgaaaactttttttttttttgagggagcaaccctaaaacgaaagctgcggccagggggatatactggtagagaggaagaaaccttccatgtgggccaaagggtcctgataaagggccggtcagtgaacttagagaggctggtggattaccctaggagagttgaacttggggaaaacttttttactaaggtagaatgtttggagtgcttgggtttcttgcggaaaatttgaaggcatggttgttgtaaagggaatttaataaagaccctggagcaaacattttgggtatagggcggaagaggcaagggggctgctattcgtaaaaaagtactcatcctgattggaggaaaggagggacaccaaatggagatgaaaagttaaaaagcccaggtgggaggggtcaagggaccagaa

SEQ ID NO: 172821 - DNA, 609 bp, Zea mays
  Clone ID: MRT4577_89195C.1
gttccatgcatctcatataataataactaatctagatcgatcgagagaatggcgtttccgaagcctactaatctagccgagctagctgccttcgctgcggagatgatggccgccaccggctcagagcagaacacgccgcaggacttcgtgaacctgcacaaccgcgcgcgcacggaggacggcgtgggcccggtgccgtgtgacgccagggtggtcaggtactcagcaggactacgcgccgaaccgcgccggggactgccgcgtggtgcactcgtacgtcccgttcggcgagaacatcttctgcggctcggcgctgcggtcgtgtgagcgccgctcgacgcgctgcggacgagagtggactaaaacaggaactaccacctgatgagcaacacctgcgaccccgacaaggtgagcgtgcactacatgcaggaccatgtgctcgcaggtccaccgcgtcatccaattagcaagcgtgttgtgtgggccaacaacagcggcggacaacgtcgcctgcgtgtacgacccccgcggcaacgtccacgaacagcgcccgttcttcaccctcaacgcatatgctgagtatatgcagagatcccatgtgcatgcaga

SEQ ID NO: 172822 - DNA, 178 bp, Zea mays
  Clone ID: MRT4577_89196C.1
tcgcgatctagaggcgagatccaggacattttccgcgcgctccaaaacgggttccagaagatgggccagaacaagggactccaacaggcagtccaagcagctggaaggatctcacccggcaaatgagaaaatgccaacccttgatcaaagaatttgaccctattcttcagggtgaagg

SEQ ID NO: 172823 - DNA, 157 bp, Zea mays
  Clone ID: MRT4577_89197C.1
gcctcttttttgtgtgtgttctattgctgtggtatgatttaccacagtgtgttcatatggaggttgggggccttgtcatggtaacgaggagtttttcatgtaagaggactatggtatacacactactgacaccatgcagggggcatgctatgaccag

SEQ ID NO: 172824 - DNA, 257 bp, Zea mays
  Clone ID: MRT4577_89198C.1
gcgttcatcctttccccctccatttcatttcagcgtcgcgaaaaatggtagtcgttgatccgaaagccgtcgcctcggcgcaccagttcaccgtggtcatcgacggcgtcgagacgaccgtccacgagggcgtgctccggcgcaacggcggcacggtggccgtggtcggcccgggcgtcctcgaggtgagccgtctccagcacgtggtggtgcgcggcgggggcgggggcgacgtgcgcttctcccggtgcctgtac

SEQ ID NO: 172825 - DNA, 479 bp, Zea mays
  Clone ID: MRT4577_89199C.1
aacctgacgacgaccgacagcaccgaacttccatccgccccgagatatgcctccgacgacgccgcgccatgagggctctcaaagagaatgagacgactcacgtattcgagaagctgatcaagttcacggagatccaacctgaagcacctcctggagaggcccgcaatggatggtcccgacacgcagaccggccgctactgcctccggattcaacggaatcgcggctactacacctccaaggagctcgtgcggcgcgtcaccgtcgagtcacaaccgtgcctcgccgatgggaaggctgccatcgggaaaatgaaccaccacaagagcgatcgatctgactgtacaaaagatcaaacatcatcgctgctcacagctcgccgtcgtgtttgcttgaaggacgacaacgagcgcgcctgtctcattgatgactccatgtgcaagcctgtgtctcactcgtatcacctagaaaatccacgccg

SEQ ID NO: 172826 - DNA, 730 bp, Zea mays
  unsure (1)..(730): unsure at all n locations
  Clone ID: MRT4577_8919C.1
nccgtccgaacctgtccatnntgtagttgtagnaagacgtgatgtgaaaatttttatatataaaaaaattggctcgaccaatggttttccagtttgttttggattaatatgcattcatacttgtaccaatttctttagaatcaataatgtttccttggtgccatgcttagtgagcaataaccttgttggcatatgcagctcaccggagacattgacagaatggttagattgcaaaagatgctagagcagtatggcatctgtgaggttgcacggacaggccggattgctctgctccgagagtctggagttgactccaagtacctccgcgggttttccctcccgctgtaattctccatttccagacattacactgcgcgatttcaggtcgccacggtcattttgacttctgagaatggagctggaggaatcattcaaaaatccaagggtgagaactgtagaaataatagctgttaagtttcttgcttctgcaagtatcacgcagcacatggggagagatgaagtatcatacacaacaatatgtctgcagtcagaaacgatcgatgaggggtccaatatttttttcactacacatgttgtatacgtacactggtagtatcctagttgaaggaaacgcaatatatatatattcactacacatgttgctcaaccaaaaaaaaaaaaagtggcagcgtcacgagtccttgtcaattcgcaacgtgaacagatttcc

SEQ ID NO: 172827 - DNA, 231 bp, Zea mays
  unsure (1)..(231): unsure at all n locations
  Clone ID: MRT4577_891C.1
ctagactctcccattaaatgaatacctgattattattgtctcattaatgttcagttattaatatgtatactgccattttaatgtttacctatgaatgtcttttgtgttatataactgacagagtgctataaaatatataatatatacaaatgcaggaaatttattctagttaaaatatattcaaatacaactattaaatatatgaaatacgttaanaaaaaaaaaaacaaa

SEQ ID NO: 172828 - DNA, 551 bp, Zea mays
  Clone ID: MRT4577_89200C.1
ttctttttttttttttttttttttttttttttttttttttttttttttttttttttttttttttttttttttttttttttttttttttttttttttttgaattgaactgccaaaaaaaaaattggcaaactgtttttacagtcccgcaaaaaagcagtaagtttaagtaaacctgggggggccgtttttaaacagtcaaaaggggaaagtaaccaatcgggccgtccaaggggggcaaaatcagttccattagcatcacctttttaaccaaggggttccaaaaatttccacacagccccgatccaagcacaccataacgggtcagttccccattagggtagccacaattgaagcgccccataatttcggttgatgaataggggaatccattatacttgggaatcgggtcgaaactccatttttttgttggaaatttccgggctcaaagaaaaaatccggggtgcgtaggggaccaacaggggcggaagcaacccttacaggaacccggaacaagatggagggaggaaaacccggggccaaaaaattaaccc

SEQ ID NO: 172829 - DNA, 340 bp, Zea mays
  Clone ID: MRT4577_89201C.1
tttttgggggtatttaccctacgacggggtgcattatcacagccataaatattttgtttaaaagcacggagacaaaatcccagggattatttactggatcagcagtttacagggaccgacattttctcttccacctccaacaccccctcaccattttcccaggtgaaatggcaaaaattttcccaaccaaaaaacgcttagttagaaccaatcggttaaatgatcttgctaccgatctaatggacatggaacatgggtgtgtggtctatggtacttttcaagctttcaatgtcgtgtgcttacacatggggtacacccttttcaccaccaaccattgctt

SEQ ID NO: 172830 - DNA, 763 bp, Zea mays
  unsure (1)..(763): unsure at all n locations
  Clone ID: MRT4577_89202C.1
atccggacttgatcttcacctgccatcatttaccgatctgaacgcacaacaggctgagaatcactactttgacaacgagcccccgccaaaggacctcaaggcaaacataacccttgcgagagaattcatcacacgccataacgatgaccaccgccgcgtggtgctggtcacttccggcggcaccacggtgccactagaacaacaaactgtgcgctacatcgacaacttttctgctggtacacgcggagctactagtgccgagtatttcctccaaaatggatatgctgtcatcttcttgcacaggcagttctcgctcttgccctactcaagacactattcacataacacgcgttcttttctggactacatgaaggaagagaacggccaggtcgtggtggacgaacaacatcaagatcagatgctgcgcgtcttgcgccagtataccgaggtcaaacgcggaaacaagttgttgatcctgtcctacgtaacaatcaccgagtacctgtggaatttgcgcgaggttgcgcaactcatgcgtccactcggtccaaaagccatgttctatctggctgctgctgtgtccgatttctttgtaccccaggaccgcatggtcgagcacaagatacaatcgaatgaagagttccatcaaggcgcagacggcgtgactgaaagcaaagcaaaacctccagcggnacgcactcaagggcaaagtctcatcattgatctcgagccggttcccaagtttctaaacaactcgtggacg

SEQ ID NO: 172831 - DNA, 219 bp, Zea mays
  Clone ID: MRT4577_89203C.1
ttttatatttataattattgttttcttgtttactcaaataatgggcaggtctgacagactttatcctaatcgagaggcaatttacaaaaccttcaggatccaaccgaaagtttcctgtgtagacaggccaagtcctactttaacacctgagaaaactaaacgataagattcgagaaactcacattaatctaaaattgcaacactattaacagccctttt

SEQ ID NO: 172832 - DNA, 173 bp, Zea mays
  Clone ID: MRT4577_89204C.1
ggacgctgactccctgcccaacaacatcaaggatttgctacacgagcacactgttgcagactatgtctgatgaaaccagtgcctggtggtgccccggtgggcgctacacgtggccatactggcccatactgccagtgacaggttcatggcgctctgtggatggggctccactc

SEQ ID NO: 172833 - DNA, 158 bp, Zea mays
  unsure (1)..(158): unsure at all n locations
  Clone ID: MRT4577_89205C.1
atagctgtagctggacgtgtgtaggcgagagactccattatattatattggtcgatctctccatctgaacgtacaccccgcccaacacagacgggcgccgccatcgncctggtgagcagcagcagcctttacgcgccggcgggcttctccggtcgtcg

SEQ ID NO: 172834 - DNA, 657 bp, Zea mays
  unsure (1)..(657): unsure at all n locations
  Clone ID: MRT4577_89206C.1
ccggccgggccgggatctacgaggagctccattaaccaataaactaaaccctactcttctcatatgagagaacacaagaacgataggtgaactgagagatgatcctgcacaagcatcatcccgtgctgcaatgacgccgccgtcgatggcgtcgatctccgtgggcgacgatgccgccatcttgcgccgagagtcgtattccattgcggcggcaccttcttctacagtcctcacacctccgccgtccgcagcgctcgcactccatcagacgactatcccgctcctctctattccgactggatatccgatgcacgtgccattgctgggctccggacggtacaacgctagttggagaacaccacgaggagaagaagggacaaaggaagctgtcgcgaacagctaactcccatgaggctctaccgagacgatgaactcgattatctgctgcgcattgaagctggcatggccagtcacagagcgtacctgcgtgcgacattatgngaccttgcgatgtagcaatgtcttcgtccagatgcggtgagctcatagaagggacgcgtcaccaaccccgacaaagtccgtatggggaagcattaatggctccacgatgagacctcgctccccaactacttactccggaactatgatcgagaacgt

SEQ ID NO: 172835 - DNA, 794 bp, Zea mays
  Clone ID: MRT4577_89207C.1
actgttgtgttgtcattgcaagaagcaaagatggcagtgttgagaggccgcttaacactagtgctcatcctcagcctcagctgctgcttctccttccccacagtactatcctcagttacctccgatggcttcctccaatgcctgtccgacaacatacctgtcgggctcatctacacccagggctcgaccaacttcaccgacgagctggtgtcctccgtccggaacccccggctgttcaccagcgccacggtgaggccgctctgcatcgtcacgcccgtcgacgcatcccacgtgcaggctgccgtgcggtgcggtcgcgccagtggcgttcgcctccgcgtgcgcagcggcgggcacgactacgagggcctctcgtaccggtcggagcggcccgaggtgttcagcgtcgtcgacctgtccaacctccgcgccatcaccgtgagcgccgacgacgacgagcggccggtgccccccacggcatcggcatgggtcgactccggcgccacgctcggggagctctactacaccgtcgccaagaacaacccggagctggcgttcccggccggcatctgcccgaccataggcgtcggcgggcacttgagcggcggcggcatcggcatgatgatgcgcaggttcggcctgtccgtagacaacgtcctcgacgccaagctcgtcaacgccagcggcgacctcgtcgacagggccgccatgggggaggaccacttctgggccatcccgggaggcggcggcgagagctttcgcgttcggggtgtcgtgggaaagtgagccccgtc

SEQ ID NO: 172836 - DNA, 291 bp, Zea mays
  Clone ID: MRT4577_89208C.1
atattttgattcctgtactttatatctttttcctctcttcactatgttaattttttctattctaatgcttgttcacaccatttgagcagtagcattatctatacgattagtaatttcaaatgattttgtgatatattccttgccatattcatgcctccctttgtattcaaagtaaagaatgattaagttttcttttgtctgtttcaatcttctgtgttattcatctgttttggtactattatctgtatatactgttcctgttatgtttttctgtgatggttgttgttggtg

SEQ ID NO: 172837 - DNA, 888 bp, Zea mays
  Clone ID: MRT4577_89209C.1
gggggtagatggagctgcactcgccgccaacatcatgcagaatctcctcgcaggagccagccaattccagcatcagtttcagaacctgaacttcagtggcgcaggagccaaccaattcccgcagcagtttcagaaccagaacttcagtggcggcgcaggagccaaccagttcccgcagcagtttcagaaccagaacttgagtggcccagggaccaaccaattccagcagcagtttccgaaccagaacttcagtggcttcccaaaccaaatgcccatgccctttcttcagaccatgcaccagaccggaatgcctgcaaatccaatgccgttcggtggcagaccaccagcgaaccctccatctggtccagcgtctattgcccctatggggcaaggcaactttggtcagcctccaaatccacaaggatttacgattccggcgccacccggtgaagatgggaaacaaggctcgcctccgcagttcagttccaggcagtttcatcaagggagctcgtcatcctttggccggggaaggacgcagcaccgcggtggccggcattcctatggcagaggtggcagaggcggccggcaccccagataggtatctggagcgttgcccccggtgtagattcagtatgagtgttccagtcataatcgagacactaaagattatgtaataccagaagtatgtttcttgtaatgttgcttgctgagtggattggacatcccgtcgaatgacagcgtgttgtaatacacttcctgcgcccagtatgcgtatctctggctccatgtcaccatgatctagtggaaagaggataatttttcttctcatgcaaaggaaattggagtgcaaaaaaaaaaaaaaaaaaaaaaaaaaaaaaaaaaaaaaaa

SEQ ID NO: 172838 - DNA, 594 bp, Zea mays
  unsure (1)..(594): unsure at all n locations
  Clone ID: MRT4577_8920C.1
gtagtgaatatatatatanttgcgtttccttcaactaggatactaccagtgtacgtatacaacatgtgtagtgaaaaaaatattggacccctcatcgatcgtttctgactgcagacatattgttgtgtatgatacttcatctctccccatgtgctgcgtgatacttgcagaagcaagaaacttaacagctattatttctacagttctcacccttggatttttgaatgattcctccagctccattctcagaagtcaaaatgaccgtggcgacctgaaatcgcgcagtgtaatgtctggaaatggagaattacagcgggagggaaaacccgcggaggtacttggagtcaactccagactctcggagcagagcaatccggcctgtccgtgcaacctgcagaagaattattgcaatataactctagcaactgatccactcctccagacataaataatttgggcaaatttgctcatggatcatgcatgtaatgggctaaatcgacataaatgtgaattcgaagctcaatagtcaatacaaacctcacagatgccatactgctctagcatcttttgcaatctaaccattctgtcaatgtc

SEQ ID NO: 172839 - DNA, 812 bp, Zea mays
  Clone ID: MRT4577_89210C.1
tccgaatacgtctccaatctcgcctctctctctcccagaatctcaccttcccccgcgtgctccggttgcttttggccaccgatacgctactggcgctccaaagttccgagggtttaggtcgctccttctccaccacctggccgcccaccctccacctctcgtgcttcccggacgccgcggccgccgagacgacgtccaggagcaggagccaccgagcagtcgtcgccaccgccatgacccaagctaactaaggcagttagaatctctgctttgagttcttcccctgtccccgcatgggctgcgatctctgctttttttgggttccccaatcccattccgcgtcctcatgctgccattttggggttcaaggttcgtcgtcaggttcatgtgctttaatgtcaatattggtatggtggcgatactgaagttaatgccagcagttattgtccaatgagctcggcgagatgataaggaaataagtgcagatcttttttaagcgagattcctatttttataatagttgacagtgacaaataatgcttgctggaaaacaagttcactgtggtataacttcagaggttattgccagaagttacggatcgcaggtttggttagatccatggattgtggaaattttgtcgttgtactgtgctttttcatgataggctgttgaactagaactggtttgttgtgtctttgtaacttagttagcagagtattattgttcagtcaggtcaagtgatgggataaagtggtgtagtctactgtacaggacttttaaatgacagctgctgggacaaatgatgttgtgc

SEQ ID NO: 172840 - DNA, 320 bp, Zea mays
  unsure (1)..(320): unsure at all n locations
  Clone ID: MRT4577_89211C.1
ccggccgggcagactgtttgagataccggagcgagatggatacaatcctccacgactgtaggttggccgagatcaaccactatacaccgtactctagagtcgtccaagtgacatcagaccgtccacatagtcatgcgcatagatacatcgacctgtgtcgatacgccagatgcacagacctcacacaagagtcatgctactgtcttgaaaaatcgcagagagacttatttattcagactacagaacatccaccagcgtactacacagaaccacctaacattgcgattatccgccagatcatagactcagactcaantttt

SEQ ID NO: 172841 - DNA, 240 bp, Zea mays
  unsure (1)..(240): unsure at all n locations
  Clone ID: MRT4577_89212C.1
aagccaagcaatttattaatttgctgactggcaagctctgcacgtcaagaacagctcacggtttttgcttatacctttgactgtgtacagttgctgccatcgatcagtaatatgtttatnnatatgtatttacagattcaatttcttactcttgatatatgcactacatatgattcataacatangtgactcttgctaccatacgcattttattccggccccgttttttgtttcgagcaa

SEQ ID NO: 172842 - DNA, 2228 bp, Zea mays
  Clone ID: MRT4577_89213C.1
ggttttgactttgcttgcacggatacttaaagcttgattcttcttgtgcttcctcccttttttttttttttttttttttttttttttttttttttttttttttactatggaactgatttattgaaggggggaaaactacgactagggcataattacatctttgggaatatacacatccgatgcttgagggactcaatgatgcaatcggacctgtgccaattagcacaagagaatgcggtcagccagaatatcactttgacgcaacagtagcagccaaggcattgcgccagactagcagttcagaacttttcacgacaggacaggacaaaaaaccggacttatcgaacatcatttcactcttgagacccattttgagaatcttcttggcaaatatttgatgatgatttgcttggattgattattgcaggcatccattgctcaggaatgacaataaaataagcagacatggctttcctgaaccgcttcttatattgcataggtgaaatgacagttggagaagcgttcttcggcccacctagaatgccagaagattttacccatgtttcaaggtgcttgtcccatgtatactgcctcataaaatcaataattcctaagaccagttcatgtttctcctcgtcgactcccacaagcaaggaatagtccatcacatcgattccagctaggaaagatgtatcgttccaaacagctctttccagtagccgctttgccttgttcccaacaaaaatcggtgaagttggcattgcttcaattaagttctggtcaagaagaaccttgttgctaccatttgaatctgcattataccttgaccttgaagatccctttagatcatagagcctggtaatattccgtccaaacaaaagattttccatcacaagcaaatccatctttgactccttgccaccctttacatgcttactagtaacctgatagatccccaaaatttttgctaagcatgtagggcttccagtgcttatggactctgacagatatttaaaatattcagtgccaaacttaaggaatgattcaagctctgtctttgtaacttgttttattataaatctatcatccaaagattttgcaaaaaacacattgcttttaccaccctgtgctccccattttttacatcgactaatggatctaaaaaaatcaagctcagatggacagcaagaccttcttagtgcttcaaacttttttgcatagtagcatgtgacattatatttgactttcccaagtggcccaccatcttcaaaagaaacactcaagtgcacctgatcaggagcaaaggatcctctaactccagacactgatgaagtaacatcgtagtgggatccaaattcctcaaacaaatgaaatggattaaaatttcctgaatcatatacaggcaatggaagtgaagactccttgtctctatttttgctgctgtcatcagacaactggaagcagtacatgggtgaaacaagtgcgtacgaaataacacttgttggctcatcatcaaatacaggaataacaatgtcattagctccagtaggtaagaaaagtcttgctccacctttctgtgatagatcacaaaacaactcgacgtatttaggaatgtactctgccaaggaagtgaatctcagtggtgaactagaagttgtgtttaaggaactgtttgatgtcatgtatggcatcttaatccatctaagtaattcctctgctgcatctccagaacgaacagtgaaagtaaaagtatgcacagccttggcttgatttttaacatcaactgttgtgtcttcgactgaaagtggtggttttgccaagtttgaatcaggagcaggttcattctgacctctccattttgcatccaatgtgtctggaatgtcagtagcaactggaaattgtccatcagaaacaactctgcgtacaccagttctggattcttggttgtccagtcgatccttaacatctgcactggtagcatgattgatttttgcaatggaatcttcagtgccgctcaattctgcagcattccttgagatattttcattatattcattggcttggttgaacccctcatcttcaccacgagatggacaagagctctgacgcgacttgtaacgacccttccttagcaattgaaagaactgtagcctttgagcccttctctagctttggggctgcaccaactggtttaccattaaacccggccggcctcgaggtacccaatg

SEQ ID NO: 172843 - DNA, 313 bp, Zea mays
  Clone ID: MRT4577_89214C.1
ggcaaaaatgggggttacatttgaaccatcaactggaaacctgggcgtacaaacccataactgattttttttgcaaacaagaaaaatgggggggggcagctttggtacaagcaaggcctttttgaaacaaagggcaaactcagttcggggttaattttttttcagctttactgatgacctttagttgctccaacaaaggggggggcttcctcagggcctcctcctgggccctttggggagccttcttgcgaaagccaaaggcgttcattttttgggccagggcatttgggaacttttgaatcccatctttttt

SEQ ID NO: 172844 - DNA, 498 bp, Zea mays
  Clone ID: MRT4577_89215C.1
cggacgcgtggggacgaataagccaggcaaaggacgcgcgcgcacgaacggctcgctctctctccgacacccagatccctcccgtttcaggaaacgcgaagattccgccgtccaaccccgagccgctccgctccgtcgattcgggcatggcgccgaaggagagccagcagcagcagagtccggccgaggtggcggcgccggccgcgcggagcatcccggacgaggcgcggcggctgctgcacgagctggccgcggcgtgggaggacgtggccgggtgcgggccgcgcgagcccgaggtggtgccgctcaagggcgccatgaccaacgaggtgtaccgggcgcggtgggccaccggcagcggggactcgtcggcgccggggcagagtgacgcgcggacggttctggtgcgggtctacggggagggcgtcgacctgttcttcgacagggaggacgaggtgcgcacgttcgagttcatgtcgcgggatggccacggacccc

SEQ ID NO: 172845 - DNA, 342 bp, Zea mays
  Clone ID: MRT4577_89216C.1
aggcaaacctataatataagggacaaatcgggggggaagtaatcccccctttgccggaaaaccttttaatggcccgaacccccgaaaacccccaggcacatttttacaggaccaaaaaaaaaacctttttgggggagaacacttgaaacctttggtggggaaactttacaggggggattttctggggggcctcaaccaaattttgggacgggcataaaaaaacctttttggtggggcaggaacatggacatacgggttggggtctatcccacaaggcaaaatttttttgggagggtggaaggttttttggggaactttgggggtgtcttattattacggggg

SEQ ID NO: 172846 - DNA, 1338 bp, Zea mays
  Clone ID: MRT4577_89217C.1
agagtatccaaataaggcccctgactgttgactggctagctgcgggttaccgcttcatctgaacctgtaagctctacgcatatctcgtgttctagacacaaaaactggtcacgttgggtcaataatggactatacatgcatatttggatatatattctagctgcatatacaaagtaagttttgatctgtgctatatatatacctgaaataaatggagatttagcgtcgtcactcttgtctacacccggccacaaacgttatcctcctaggccattttgcagccagccggccgaccgccccccaccccccgtattaacaaaacgcctcccgaagcagacagagcctcactccgcgcgcccgcgcagcgaagctggagggagcatggagctgaggccgccgcgcctgcgaccgtgagcacgctctgtagccagccgggtccggctgggcggccatggcagccaccgttctcttcactccggcgcagtgccaccgcgccaccgcgacgacgagcgggcggggagccccctcgcattgcgccctggcccctgggcaccggcgcccggggcggggatcggtgagggcggtgcctcccgagcagagcagcttgcctcaggcggcggcggctgctgtctacgggactgctggcgacgtcaaggccgcgctgtaccgagcgctggacggcgccaacagggggatattcgggatgacgtccgccaagcgctcggagatccatggcctggtggagctgctcgagtccaggaaccccacgccggagcccaccgccaagctgcaggacaaggtggatggatgctggaagctcatctacagcacgatctccatactggggaagaagaggaccaagttagggctgcgagatttcatcagcctaggggacttcctccagataattgacgtcaaacaggaaaaggcggtgaatgtggtagagttcagcgcgagagcactgaagatactgacggggaagctcaccatcgaggcttcgtacagagttaccagccaaacaagagtggatatcaagctcgagagctcaaccatcacccctgagcagctgatgaacatatttcagaagaactacgacatgctcctggacatattcaatccagagggctggctggagataacatatgttgatgaatcgctacggattggacgagacgacaaagaaaacatattcgtgctggagagagcagacctgccagacgtctgatgacgcgcagttcatgcgcacaggcgatccgtaattttgtgacgaggagcgagtgtatgtaacacgcagaaaacatagcctgcaaatatataaatatggtatatccgacagct

SEQ ID NO: 172847 - DNA, 262 bp, Zea mays
  Clone ID: MRT4577_89218C.1
ccgtccagtactaccttaagcccaccgactaaacgttagcggagatacactcgtatccggcaacattgcgcatggtaacgggcaggacgctctatgctatcgacggtgtatggatcaagcctgcactagtagcttgcgctatgtatcctctactagacaagacacgtgatcacgctcgggctccttgaaccagaccatatcataatccgagcagacaccacgaacatgcatgtgatcggatacataatcatcctgatcgaac

SEQ ID NO: 172848 - DNA, 430 bp, Zea mays
  Clone ID: MRT4577_89219C.1
cgtgggtcgacccaagcctctaaaattagtcatattatgcccctgactgttgactggctagctgcgggttaccgcttcatctgaacctgtaagctctacgcatatctcgtgttctagacacaaaaactggtcacgttgggtcaataatggactatacatgcatatttggatatatattctagctgcatatacaaagtaagttttgatctgtgctatatatatacctgaaataaatggagatttagcgtcgtcactcttgtctacacccgaaggaaaaggcggtgaatgtggtagagttcagcgcgagagcactgaagatactgacggggaagctcaccatcgaggcttcgtacagagttaccagccaaacaagagtggacatcaagctcgagagctcaaccatcacccctgagcagctgatgaacatatt

SEQ ID NO: 172849 - DNA, 560 bp, Zea mays
  unsure (1)..(560): unsure at all n locations
  Clone ID: MRT4577_8921C.1
tgctctgttgatatccccttgggtgggggggggggaagagtggaaaggaaggggggggctctcagctgttccctcgagttactgtngtggacagttngatccattgaaggtccttcaggctgaaaatccttacttttttttttttttncanaannncattgcccttttggggggggtgggctagcgtctacgccgcatcgnccttttgccgtggggaccacccgctatatctctggtcctttttgtttctagagtcttgagtgataggttgattcccaataacantctgggctttgngcttagccttgggtcttctcatcnntgaatgctgnntggtccannntcctggccttcgtgncagctnttttanttctttctgggccgcccagattctttaaanncnnnncccncccccnnntnnncctnntccccccccccccccccccnnnncccccccncccccccccccnttcctcccccccccccctcccccggncccccctttttcttcccccttcccttcccccngcnnnncccctcccttttttctctcccccccc

SEQ ID NO: 172850 - DNA, 703 bp, Zea mays
  Clone ID: MRT4577_89220C.1
ggaccaagttagggctgcgagatttcatcagcctaggggacttcctccagataattgacgtcaaacaggaaaaggcggtgaatgtggtagagttcagcgcgagagcactgaagatactgacggggaagctcaccatcgaggcttcgtacagagttaccagccaaacaagagtggacatcaagctcgagagctcaaccatcacccctgagcagctgatgaacatatttcagaagaactacgacatgctcctggacatattcaatccggagggctggctggaaataacgtatcctctgatttcgtttttatcactgtggtctactagctggatgtttggtttctatggactaattttttgtctatcaattttagttccctgaactaacaaatacggaaactctgtattttagtttccatgtgtatttgttaatttaggtatcactaaaacgaggggactagtttggtgtcggcatgtcttcctcaattttgatggattaattaacagatatgttgatgaatcgctacggattggacgagacgacaaagaaaacatattcgtgctggagagagcagacctgccagacgtctgatgacgcgcagttcatgcgcacagaggcgatccgtaattttgtgacgaggagcgagtgtatgtaacacgcagaaaacatagcctgcaaatatataaatatggtatatccgacaa

SEQ ID NO: 172851 - DNA, 398 bp, Zea mays
  Clone ID: MRT4577_89221C.1
acctcgtcggcaatgtcgggacctccaaacactaccaccgtgaaacctgcgccccggaagttctctccacatggcaggtcgcacttcctctcaagtctaccatatccctccatctacagctcacgacaaaacgtccacctaaacaatcttacctatagtgaaaatccaatcatctacatgacgatccacggatatatactctactgtgcactaaccagtgtgcctaagagacattagctcatcctgagcatttacctgtctatagccactcggattagccatcgccacagctttgcttgcatttagtaatcttaccaatggctatgcaaactgcttatgcgtactctacagcctgcttccagccttaaccctcttcctggccttcgatccgactttta

SEQ ID NO: 172852 - DNA, 175 bp, Zea mays
  Clone ID: MRT4577_89222C.1
catccaactttcaataccgtttcttctatatctatctccactgacccacctactaccactacctcaacaacatccttcatacctacttctaggtcctcgattctaagatcatcctatatccggagactcttatgtcccacatcttcggcttcttcaccttctccacttattactc

SEQ ID NO: 172853 - DNA, 437 bp, Zea mays
  Clone ID: MRT4577_89223C.1
tggcttggaacctttgggctgatttatgtgcttgagtagggtggtgttactgatgatcttgccactgttaaggctattgattattatactcggtggctgctgctaatgttggacgtagggataaggattctgtttatactgaggtgtatacggaggttcctaataagaagggtggggatgctaagcggtatacttatgatgattgactgtcgtctgtaccgtagggcttctccgtcgtattcatctcgtagccgtcgatgaaagaagacccgagtaaaacgcatcctagcgatcctaagacgaccgatactaacggacacgtacgtccctcgatgagaatcggtcatattggtgaagacggccccgagactctcgccttgctagaaaacgtagcggactccgtagaagttacttcaaagagactggaaagtaaggcg

SEQ ID NO: 172854 - DNA, 302 bp, Zea mays
  Clone ID: MRT4577_89224C.1
gtataatggaattattttttttgtttggtttcatttaattatttttaaagtacaatcctggtaggaaaaacacgggggggggggggggcaagctacttccctggggggatccaaaaaaaaaagaaggggccaaaggacccgccgttcccgctgaaaaagctctaaagttcctagggagaagctggggccccaaaaggcgcggtaaggggggcaagcacccaaccggggccccctggtggaacaaaaagggcgaaaaaaaaaatgccccaacaagattctctgcagggaagaaatacgggcaa

SEQ ID NO: 172855 - DNA, 386 bp, Zea mays
  unsure (1)..(386): unsure at all n locations
  Clone ID: MRT4577_89225C.1
agaaacacacgaagcgaagcgcactagcggggggcaagcaacagcggctaccaagacacgagccctccgtgcgctnggggccctnggcgcgagcgcagcacgcgcggccatcgngccacaaggctgacttgctcctagtgccattattgcacagttcctcccaccagttactggaatgggcttggggggcgcagctgtgcaagccaacaggctacaacaagcgcttggcgcgagcgtcttacacgcccaattgcccaatggcagcaacgcgctttggcacatctagcggtcgagttgtgacaggggagcagcgtcggcgggtgctgccggctctgaggcaccgagccgtggtgaaccctgccggctactggctcggcagctggttg

SEQ ID NO: 172856 - DNA, 311 bp, Zea mays
  Clone ID: MRT4577_89226C.1
agtaaattcttttcatatacactattatagaggttttagaagcgccttccacaaggacgaacaccacccctaatgacgccccggcaaaaacaacaaccctagaaaccgaccaaccattaggagaagcaaaaacaagggaaacactaataacacaatccgaggaagaaaacattcatgcaaaacccgcttacgggaaagcaaacacagtaccaaaaacccccaaacaaccttaaagtaaagtggactacacacccctctgagagccctccgcaagaaaaactacttgaaaacactcgacttaagaggggaag

SEQ ID NO: 172857 - DNA, 552 bp, Zea mays
  Clone ID: MRT4577_89227C.1
cacaaacaagtctgtatttttcataataaaaaaacaaatatgtaaaattacatataacatcagggggtctaataatttaaatatagactcataacactgatgcagaattacgaaaaacgcagtgtttaaaaacgtaaaactacagaaaataataaacaggccatctaaggaccaatttggccacatgggggcggcccaggcgccaccaggccgaggcggcccacgcggccagcctctaggccggggcgagccaggtgccaccaggccggggcggcccacgcagccggccaaaacaggcggcccacaggccaagccaggcggcccacgagccgaccagagccagcgcgcccaaagggagaggcggaaaccctagccgccccatgttgtttggctgccgccgtcagggcagttgcccagccgccgcctgggggcccgttcggccgccgccgccgccagtggaacgtcccagccgccgccgtttccccgggtccagcggagcccacgccggggccgaccgtgcccgcgccgaggcttgcagtgcccgcgttgggg

SEQ ID NO: 172858 - DNA, 675 bp, Zea mays
  Clone ID: MRT4577_89228C.1
ggaccctcgaggccggccgggtgtatgcatgcctagccggcctgatctgggctctgatcagcttcaggtggcgaatacagttaccatcgatcgtcaacaactccataagaatactttcagatggagggctagggatggcgatgttcagcttaggtgtcttcactgccctgcaaacgaaaatcgtggcctgtggaaccaaaaggatgctgctatcactaggcatcaggttcttcctcgggccaggcctgatggtgatctcttcctatctaatcggtatgcgtggaactttgctgaaggtggccataatacaggcagctctacctcaaggaatagtgccgtttgtgttcgccaaagagtataacgtgcatgcggatattctgagcactgcgataattctgggaatgatggttgcggttccggtggccctgggttattacttcgtcatggatcatcccagactctaaccatgccccatttgcggaaaggattatcctctagattcatattgcggacgtgcttgtgatattatatctttgtggaggctgtatatatctggattcgtgctagttgacccaagctaatgataacaaccagcttggtttcggtgaattgttcggccagtacttgattagtaaataattgatgcaaaagaaaaaaaaaaaaaaaaaagcggcc

SEQ ID NO: 172859 - DNA, 667 bp, Zea mays
  Clone ID: MRT4577_89229C.1
gccccccctcgagtttttttttttttttttttttttttttttttttttttttttttttttttttttttttttttttttttttttaaagaaaaaaaaacttgttgggaaaaaaattttgggggttaccaaaaaaaattggcggaaaggatccgaacagttttaacgggccgggggggcccccgaacaccctggacccccccacccttaaggttttaccaaacacccacccaaaaaaaccccgttcccggggggggaaacaaaaaaccagggggaccaaaccccgttggggggggtttaaacctcccaccccaaaaattgggttaaatcggcaaccattttgttttttaaaacccacccccccccgtttgcttttgttccgcccaaaaaatttgtgggggggggaaccccccttgggggccaccaaaaaaagttgggaaggggaccccccccccccaagggaattttttgaagttgaaacgttgttaaaacaaaaagggcctttttccccccccccccctctttttggggcccgggggggttttttttaacaaaaacggacaagggggccagggacactcccgctttggccccaacgaacaaggcccctttgttccgttgaaatggaaatggaaattgttgttgtttcccccggttgttggccccctgc

SEQ ID NO: 172860 - DNA, 182 bp, Zea mays
  Clone ID: MRT4577_8922C.1
tttcttgacgaattggaatacggaaagcgagaggtgatggatctcgccgaggcccggcagcatcagcggctcatcgtcggcgcggcgctgctgctggcaaccgcggccttcctcaggctcctcctgggctcccgctcccggggcggcatgcgcctgccgtccaccattcctgtggcgcctgt

SEQ ID NO: 172861 - DNA, 270 bp, Zea mays
  Clone ID: MRT4577_89230C.1
ggcgatattgggggcgtttgctgcaccaccacccacaccccatgcccagcacacaacaagcgggcggggggacggtagctgctggcaaaacaatggggaaccctgctccgagcatcgtagtggcgcatcgccgcacccgtggggggggaggtcgtgaaactcaccttccgtgccctgtgtatgcagccatgctgcgcctggcaaaagaaagatgactgggcctggaaggccatacggccaggtgggcaggagagtattaagtgacaggcc

SEQ ID NO: 172862 - DNA, 462 bp, Zea mays
  Clone ID: MRT4577_89231C.1
actggggcggccgcgctgttcgttttttcttccccttctcatcggtttcagattccggaggtcttttcgggaaaaccaaaaacccttcttttttcttcagggttaaccctaaaaaaaaagttcaacggggtaaaccccccccttaaatccgacccccttgctgtttaatgcaggggtccgatggaacccaaggtgaaacccctccttaccaccgtcctcctagctcgctttattcaaaaactcaattggttaacaccaatccccttaataactaaaaaaacccctttgaattagataaaacaacacgattgaaaccagattaactgggcccgcaggcccccaccggaaaatacttccagttcccgccgaaattgccgcaccccccgccccttttgcacccgcctattccgccgccaccaccaccttagccgccgcccccacccccaaacccgcccccacccc

SEQ ID NO: 172863 - DNA, 299 bp, Zea mays
  Clone ID: MRT4577_89232C.1
tttggggtttttttaaattttttgggggtttttaatgccaaaacaaagtttctcattaaacagagttacaaagcaatgtttaaaggagccggcaaatttatggcgaggagttccatccatttccacacttaaaagaggcaacacatccaaggagaaaaagatgatccagactatgagaactcaagagttcaccttagaacaacttaaaacacccaagggacaactctctggtcaagttcaaaacttatgatcctttttactcaatcagaacaagattgttattaggaagaggttgggca

SEQ ID NO: 172864 - DNA, 257 bp, Zea mays
  Clone ID: MRT4577_89233C.1
gctcgcccttatttttttccaataatttacaatttttccaagcgacacacaaataaaagggacgggttatatttttcatactatccaccccacacccaaaatacaaaccaaaaaattatatattttgaacacactaaacaccatctcaaaaataaatattatacaaacacccactatatatataatacaaccatttaacttaattagatcacaaacagatactcccactttcttattatacccacatatctacatcc

SEQ ID NO: 172865 - DNA, 1035 bp, Zea mays
  unsure (1)..(1035): unsure at all n locations
  Clone ID: MRT4577_89234C.1
gaaaagatgacaaagttcgggtttgaggacaaaggtgatgcatatgaagattttcaagagggagatatggatcaggttgctggatctgctgaagaggaaggttatgttacttcaggaagtggtattgctaatgaaagcgaatatgaagaagcagaagatgatatatttgtaggagacatggaatcaaatgtaagaacatgtggtagttttgacaaagatccatatcagcgccaagaatcacaaggatcatggggaccccaagatttggataatagaatggacaaaatcagtgatacaatatctcatggaaaggaaagggagactaaagaatccttgctggagaatgttgaaaagacagcggcagaagaagtactaaaccatgactgcagggaagggcagaaatccatggaaaccgttgactacatatggcccaaatatgtatgtgcagaatttaatgtaagtagtgacaaagatggtaatgtgtttgattctgctgatgaacttatcagcgacaatggcagtgattatgccatgaacatgagcacaatgtcaaataatctgcaagcttcattttcagaagcatgcagtagcattcaacatctttctcaaaaacctcagtctatttctgctgagaaggctgatgaaagcactcctgttcttggaaatcttgaagtggactgcggagaagcaggtagaaaaattccaagtgaaaattgtgaagtctcagaagaagggcaaaatattggaatcgaaatggaagaaagaaaaagagaagacaatatatcaaatataaggttcatggatcagcaaccattttacttggacagtgacattagacctaatgctgcagggggggctgcatcagaaactattctaaaatgcagagaagaggatcttaatgttgagagaactaaagtgaggaatgacataaaagagggtgaaggagaactgnagaaggaggtaaaagatggggaagagaaagaaaaagaatgcagaatggtaaaagagaacgaacaacatgaataaatacaaaaa

SEQ ID NO: 172866 - DNA, 354 bp, Zea mays
  Clone ID: MRT4577_89235C.1
cccacgcgtccgctactatactattctttatgaagcatggtctccaccgagaagggagccaagatggttgtgttgttctctctcctagctctttgagcaagcgccactagtgcgacccatattccaggtttcttgccatcagtcatgccattgggtaccatgaacccatgcatgcagtactgcatgatgcaacaggggcttgccagcttgatggcatgtccggccctgaggctgcagcaactgttggccttaccgctatagacgatgccagtgatgatgccactgatgatgacgcctatacatgatgtcaccattgatgatgccggacatgatgtcaccaatggtcttgccgag

SEQ ID NO: 172867 - DNA, 362 bp, Zea mays
  Clone ID: MRT4577_89236C.1
gttgatatatatagcgagcgggcccccctttgttttttttttttggggggggggggttttggaagcaactgacaattttgcaggggttcattaccacatgatatttttattccccttggggcttttttaatggcagggattttacaaggcgcatggaggacattgggagaatcattgataggttaatattagggggaatttatgtcatgtgatttggggattaaattaccacaacaggcacttagaggacacacatttggggggccaaatattttcagcttgggaaactttgagaggaactggttcgacttccgcaaaaagcagcaggtttagcttgattgttaggaaagagcacctgcacc

SEQ ID NO: 172868 - DNA, 631 bp, Zea mays
  unsure (1)..(631): unsure at all n locations
  Clone ID: MRT4577_89237C.1
ggtttttgtgttttttggaaatataacaaatctttaacattgtaaactcttttccgattgtcaggggctaagcaaccagtttattcgatattggggagggatgccatnncgaagctaacagggaaacgggtccagnncagcacaaacatttcatccgggnaaaaaacattctttagggggccatggaagagaggctcgtgctaactttaaaaacttcnnncttcccaatnntcgcaaccacaaaacacaatnngtttatttgannagtaaatnnttcgatccaactggagttccacttagnacacatcgctattttgcccgcggctggcgaatcccttaggccacagnnatcagcacaccctcctttccgatggggtccaggtgatgggcagagnccctttcatctctcccttttgggnttcacaantcaccctccagcattgtgcttcaaagtgacatgtgagacaccccatcctttcggcgccccatggcttgcgcctgtcctcacaantgaccagctggcattcaccttcattccttaaggtcagngcgtttccctttcttcaacagttgccataaccattgtgcaccaacaccaggcagnaaaggaaagcctgttaagggcgcccct

SEQ ID NO: 172869 - DNA, 113 bp, Zea mays
  Clone ID: MRT4577_89238C.1
cggacgcgtgggcatataaacaagcgcacactaacaaatatcctttcgccaataaggggcgatagatccttgattgggctcgctacggcaatgcttgctactagtacccgtgg

SEQ ID NO: 172870 - DNA, 1225 bp, Zea mays
  Clone ID: MRT4577_89239C.1
aaaaaaaaaaaaaaaaaaaaaaaaaaaaaaaaaaaaaaaaaaaaaaaaaaaaaaaaaaaaaaaaaaaaaaaaaaaaaaaaaaaaaaaaaaaaaaaaaaaaaaaaaaaaaagttgggtacctcgaggccggccgggacccaccgtcaaaataaaaacaaaagaagcaaacctcgtcgtcacgccatccctctccacctctcgtcttccagacgcctccaatccgggctcccagcgtctcggaaaagaggagcagcacggcacggcggcgatggcgaggaacgctccaataatatgctaacccgttctacccagtccaattagcagcctcccaaggagaaggagatccaatcctgcgggcgggcgtccccgtatcccatccatcgatccgaatctcggaatctgcaggtgaggagactcatcggttccctttttgaggagcgactcatcggtttctcaccatcacttccacttggggatttcaatcgaatggaccctgcggcgcggcttcttcgtggagaagaggttgctgccgaagccaccgccaggtagccatgtcgtcctccgtgctgagggctgcggccgacagggccattcgcaggcaggccctcacgctgacgaactccgcggcgtccaggatccggcagctcctcagcctaaggcaacggccatacctgcggctgggtgtcaaagcgcgaggttgcaacggcctctcctacaccctcaactatgccgatgaaaaggggaagttcgatgagcttgtcgaggagaaaggagttaaagtactgatcgaccccaaggctttgatgcatgttataggcaccaagatggactatgttgatgatccattaaagtccgagtttgtgttcataaacccaaattccaaagggcagtgtggctgcggtgagtctttcatgactacaggcagcaaagggtcgacgtcatgaggcgtttttcagtgtaaatgcttagccaagtgtctgcaggctccagctacagattttcttgtgtctgttgcgtcgcagttcattcatatatataataacacagcagtgggtttgtactggatatgcaactaactcgcatttacttgtaagttcacctcaaatgttgttattacatggtctgactctgattatccatgttgtgtatatttgatcgctcgcgatttaagacctcgaaatttgcacgctgcagttcgtttaaaaaaaaaaaaaaaaaagcggcc

SEQ ID NO: 172871 - DNA, 677 bp, Zea mays
  Clone ID: MRT4577_8923C.1
ggccgcgggttttttttttttttttttcctcaaatatctcacagttgagtttgtattcacccccacaggaggctacccagaactaaatatctacatcaaatgaataaacatcccctctttccaaacccaaagtttgaagtcaagatgtacacaacccaatactaacgatacgcttagtagtcatcagcagggcactcctcatcctcatcaccagcatcctggtcatcctcctcatcacagtcctcatcctcatcagcgatgggctcctcgtcatcacagtcctcgtcatcgtcagagccaggggcggaggtgggctgggcagaaccagagtcggcggcggagctgatagcgacggcctggagagtggtggcagcgggcttctcagcgacggcggtggtggaagcggcgggctcctcctcatcgtcacagtcctcatcgtcagcctcggcggcagcggaagtagcagcgggctgctcagcggcaggggcagaggtagcaggcttctcggcaccggagccggaagaaggagcaggggcagagccggagccagcgccgacgacaaagtcaacgcaagactcgtaggtctggttgatatcgggagcgtcccagaccactggagacacacttgccagccttggtgcagtcaccacccaggctagtaggaagggtaacactga

SEQ ID NO: 172872 - DNA, 152 bp, Zea mays
  Clone ID: MRT4577_89240C.1
agtcgtcgttcgtgtattgcagccatcgcacggcaaattggccagcagcggcgggaggtggtgtttttagcctgcctggtttccttcctgcgcttgatattttgtctcctcgaattccccctattatacttaaattttctattattctgata

SEQ ID NO: 172873 - DNA, 343 bp, Zea mays
  Clone ID: MRT4577_89241C.1
gacgacttgtttcattgattcttgaagagatcgagcttcttttgcaccacaggggcgaggatgtcttgcaactgcggatcaagctgctgctgcggctcaagctgcaagtgcgggtaatatatatgataatatataagtgcaccgagcatgattaatttctccagccttctttttgggtagttaattttcatttatttattttttccattgcaaaacatacaaacatacagtcatgaacaaagtctattttggtcgagttgtgtcaattcattctcgctctatgcctttcaggaagaagtaccctgtccctgttaggagacgagtaaatatctttctatgtcat

SEQ ID NO: 172874 - DNA, 435 bp, Zea mays
  Clone ID: MRT4577_89242C.1
ctagttctactctctctctctctctctttctcacgatgatcgggacacacgtacacgttctctcgtacgttcagccactgacgaagctgcccccgtacgatccatgcaccgccttctactccaccagctacatgaacctacccgacgtgcagaaggccatgcatgccaacaccagcggcttcatagaatacccatggcaactatgcaggtatggcttcatttaatttcctttcgtcgataacatacgtatagtagtatactcagtactactgggcttagcttctttgccgagttctctaaacacttggcaaatacccttttaaacttgctcgacaaaggatttaccgagtgttgcacccggcaaattaaagatccctctgaaaaattattagcaaagacatatttaccgagtgtgctgaacgcccgacacttgac

SEQ ID NO: 172875 - DNA, 498 bp, Zea mays
  Clone ID: MRT4577_89243C.1
cataccatcttttaagacacattcatgctaaatggtttaattacttgaacacctaaaatatagaggtccctcagtgtctcgcacaagttctgacaagaaaactatggtgcgacacccaggaccccctggcccactttaaccattgcccgttgaagccaaaagaatagccaggtcccaccccttagcagatacactattgtttccttttaacgggggattactggcgtttgcaaacacaaagccatgttaatacttgggggcaacacgctttattgaaccaatctgtgtgtaaagaatcagacattggaaacctacaacacgatccttccccctattaaaccctttcttactgcgccacactggagggaatcctatccctagggtacgatcatacttagggcagacttgcgaacatgcatggggcgctaatccccctgatgattgtaaagcagacaaccctgagcccggcacatatgctgaatgtgacatccgggggaa

SEQ ID NO: 172876 - DNA, 410 bp, Zea mays
  Clone ID: MRT4577_89244C.1
tagcaacaaagcccagagcttgtagtaggttttcatggcgtggaagatggggcctgcttctggcgagctcttgcgcgcgagcgtccggtccggcacagccactccttcccggccacagccaccagccgcacgcaacagcccatcgcccaccgtccacaggcacgcccctcccgcggcacggcttggcagcgcggagacggtgctggtggtcgacgtcgacggcgccctgctcctgtcgcgttccctcttcccctactttatgctggtcgcgctcgaggccggcagcttcctccgcggtctcgttctggagctcctataccccgccatccgatgctgctactgctgcctcggcggaggcgacctgaccgtgctggccgtggccgcggtcgtcttatagggtctgggcgcgc

SEQ ID NO: 172877 - DNA, 281 bp, Zea mays
  Clone ID: MRT4577_89245C.1
tttacccaaatcttggtgcttccatatgttggcaaggaactgaatatgatcatcatgcttccggacgagaccactgacttgagaacggtggagaaagaactcacttacgagaagttcgtagaatggacgaggctggacatgatggatgaagaggaggtggaagtgtccctcccgcggtttaaactagaggaaagctacgacatggagagtgtcctgcgcaacctgggcatgactgatgccttcgagctgggcaaggcagacttctctggaatgtcccagac

SEQ ID NO: 172878 - DNA, 531 bp, Zea mays
  unsure (1)..(531): unsure at all n locations
  Clone ID: MRT4577_89246C.1
gacgcccgcggtatcggtccggaattcccgggtcgacccacgcgtccggtggatgagaccctcatgtgttccttccagatcctcaagcccgctgataagaataagggcaagtatgggcagttcagcggcctgaaccccggaggccggcccatcactccaccccgcaattctgccaaagccaagaaatagcctccatgtgctgcccttctgccccagatcgtttgtacagaaatcatgctgccatgggtcacactggcctctcaggcccacccgtcacggggaacacacagcgttaagtgtctttcctttattttttaaagaatcaatagcagcatctaatctcccagggctccctcccaccagcacctgtggtggctgcaagtggaatcctggggccaaggctgcagctcagggcaatggcagaccagattgtgggtctccagccttgcatggctggcagccagatcctggggcaacccatctggtctcttgaataaaggtcaaagctggattctcaaaanaaacananna

SEQ ID NO: 172879 - DNA, 167 bp, Zea mays
  Clone ID: MRT4577_89247C.1
tctctgacctacatctagtacctgacctccagcgggatttttatagtcactcgggcacacaagtattaatatccgaccgccctattttgcatattacggaatatttgtttccatctagggacgcaccatcaataaggcaatatattgctaaaccctagaagaataat

SEQ ID NO: 172880 - DNA, 149 bp, Zea mays
  Clone ID: MRT4577_89248C.1
cccacgcgtgcgcgaagctccagtggagccggcccgggtcctgccttctcgtcgcctgggggttcctggcgttcgtcgtcgtgattgtcgtttgacgtctacagttcgacgaccacttgcacaagcggaaggagctcgtcgaggcgtct

SEQ ID NO: 172881 - DNA, 144 bp, Zea mays
  Clone ID: MRT4577_89249C.1
gcggcaagacgttgctgccataatccttttacctttataaggataaccctggcactttgggcacgtataaaatacaatatgtacttggcgacatatacgatagatacccacatgtggaattgtatcttacattccaccaaatga

SEQ ID NO: 172882 - DNA, 362 bp, Zea mays
  Clone ID: MRT4577_8924C.1
aacaacatgactagttcggggccatgtggtttggcttgaggaatgcgttaacatcattctagtccccttgagaattgaatagcactactagctgacaccatggactcatcgcactcttcatgggttgcttggcctcacgggcttctaccgcttcttcatcaacaactacgacatcatcaccacaccatgaacatccctcaagcgtgttgccttccagtgtgctgacgtggcgactacatcctttgaggccttcaaggcggccctcacctatggactggtgctgcagttgttgagcatcacggcttcgtccatcatcgattgcgcttcttcgggcattggttttggcgtgctcttcccgatcg

SEQ ID NO: 172883 - DNA, 494 bp, Zea mays
  Clone ID: MRT4577_89250C.1
agacccccagcagctagcatccgactcctcgtgagcgccctacctacttcaccctggccaaacccgactcctacgagccgaactgccgatgcttcatccgagcgtgcgaaaggacagaacacagcggagaggaccatgatggcgatagtgcggaaggaggcagaggacacgtgcatcacaccaacggagagcgcgctgcgaccgtccaaaaccatggacatcaccgatcaggccatgagcgctgcggcaggcctgcgtgccggatatcggactagccgcggcggagccagacttctacacgccgacagcgatcgcggatgccgggatggatgcaattaggaatgggtatacaagatacactgctaatgctggcactttgtagctgaagaaggctatggggactaaactccatgacgagaacggggcatcctacctcccagatgaggtgctgcagagcaatggatctaagcaatgcataacacaagctgtgcttg

SEQ ID NO: 172884 - DNA, 629 bp, Zea mays
  unsure (1)..(629): unsure at all n locations
  Clone ID: MRT4577_89251C.1
ccgtccggggggaccaaaccaactcgagtcatcgagttcccagctctcgcgtcgcgcgcagccaatccctctccctccggcctacacagcccacaactcccttctccatctctctctctctctctcgcccgtgtcgccccctgtttgtgtacaaccccatggcgacccacgccggcgagaacggcagcgggcacgagaacggcggcgggcacgtggcaagttcaactgctaccccgccggcgtcggcctccccgaagcccgccgtgctctggcggagcacctgtcgagcgaccttccatacaagctgacgaccgacgacatcttcgtcaccgccggaggcacgcaagccatcgaggtggtggtctcagtcctcgcgcagccgggcaccaacatactgctcccgaggccgggctatccgaactacgaggcgcgcgcagggctgcacaacctggaagtccgccggttcaatctgatccccgagagagggtgggagattgacatcgacggtctggagtcgatcgccgacaagaacaccaccgccatggtcatcatanacccccacaacccttgcgggagtgtctacacccgtgagcattttgccaaggtcgcgggaggtggcaagggaagct

SEQ ID NO: 172885 - DNA, 1741 bp, Zea mays
  unsure (1)..(1741): unsure at all n locations
  Clone ID: MRT4577_89252C.1
cattgggcattgggtacctcggcggggggcgggcaaccaactcgagtcatcgagttccacagctctcgcgtcgcgcgcagccaatccctctccctccggcctacacagcccacaactcccttctccatctctctctctctctctcgcccgtgtcgccccctgtttgtgtacaaccccatggcgacccacgccggcgagaacggcagcgggcacgagaacggcggcgggcacgcggagtggcggttcgcgcgggcggcgaaggagggcgcgctggccgttgcgggggacaagatgagcatccgggcggtgcggttcaagatcagcgcgagcctggacgcgcgcgacccgcggcccgtgctgccgctggcgcacggggacccctcggtgttcccggccttccgcaccgccgccgaggccgaggacgccgtggccgccgcgctccggaccggcaagttcaactgctaccccgccggcgtcggcctccccgaagcccgccgtgctctggcggagcacctgtcgagcgaccttccatacaagctgtcgagcgacgacatcttcgtcaccgccggaggcacgcaagccatcgaggtggtggtctcagtcctcgcgcagccgggcaccaacatactgctcccgaggccgggctatccgaactacgaggcgcgcgcagggctgcacaacctggaagttcgccggttcaatctgatccccgagagagggtgggagattgacatcgacggtctggagtcgatcgccgacaagaacaccaccgccatggtcatcataaaccccaacaacccttgcgggagtgtctacacccgtgagcatttggccaaggtcgcggaggtggcaaggaagcttggaatactggtcatcgctgatgaggtgtatggaaatctggtgtttggggacacccctttcgtccccatgggtgtctttggccacattgcccctgtgttgaccataggatcactgtccaagagatggatagtgcctgggtggcgacttggttgggtggccgtatgtgatcccaacaaggttctgcaagaaaccaagatcattgcatcgatcacaaacttccttaacgtttcaacagatccggcaacttttgttcagggagcgcttccccatattcttaagaacacaaaggaagattttttcaagaggatcattggtctgctagcggaaacatcagagatatgtttcagcggaataaaggacatcaagtgcatcacatgccctcacaagccagaaggttccatgtttgtcatggtgaaactaaatttgtatcttttggagagcatccatgatgatattgatttttgttgcaagctggcaaaagaagagtccgtgattttgtgtccagggagtgttttgggaatggaaaactggatccgtatcactttcgccattgattcatcttctcttcttgatggtcttgagaggctgaaatctttctgccaaaggcataagaagaagaatttgcttaatggccattaactatattcgacttcaaagttgttacccacttccatcgttttccactgtatcatcaacaaaagtgtaacattgaaatccctcagaagtaataaagttaatgtttacatatgaaaaaaaaaaaaaaaaaaaaaaccgggggggggccccggccccaattcccctatatagggtntttaaaaaaaaacaaaaaaaaaaggagggcggccgccgactaaacagctcgtcgacccagagaattatg

SEQ ID NO: 172886 - DNA, 1017 bp, Zea mays
  Clone ID: MRT4577_89253C.1
cccagcgtccgcccagcgtccggctccccacgaagcaattctaaatcctcgcgcagaagatcggatcctccgtcagatccgcatcggtgcttgccctccctgctcggatttctggcagccctttcctaccccctgaattcctgtgcggattccctcccctgccctggcggttgctcctgttgcctggtgggaacttgagagttgagaggaggggttggtgggggtggaaggcgctcgtgacccggcccgtggagatggctggcgtgaaggagccgatcgaggtgaagttccggctgtccgacggcaccgacatcgggcccagcaaataaagaaatagctccaaaaactgtcaatgatgtgaagctcatcaatgttggaaggatactggagaatagcaaaactcttgctgaatctcgtgtcccagttggagaagttcctggaagtgtgattacaatgcatgttattgtgcggcctccccaatctaaaaacagtgagaagcaacagtcaaactctccgaagccaaacagatgtggatgcacgatattgtgacgttgatgcaagtagcaatgtgtatatcggtgtccacagagatcaatcacaagttcatttagcaattgattcaatctattcttcacaaccctgaagttcatttagagatggtgttacggccagtcacatatctggcttgagaaattgatgcttgcggtcgtgttcgagtgtgcaaggagttcacagggtcctggtaaaaccctgaaatcggtgtggactcaaggaattggatgtttgctattctgtaatgtgtggagacagtgataccagaagtgagttgctgcatagttacatcggagacaattcttttttcgtaactcggttgcgtgtatcagtatttctgttttgtaatagaaaaaggttgaccggctattgttggcataaagtggtaaggaatgggggtcccctaaggaatgctgtggtttgacatgggaagatgaaagtgaataatgagtaccattctggttc

SEQ ID NO: 172887 - DNA, 529 bp, Zea mays
  unsure (1)..(529): unsure at all n locations
  Clone ID: MRT4577_89254C.1
gtaagttcggaatttggctcttgggtttaccagagggccttacttcttgtgttgcaagaactcacaggggaggggaatttttttcggagggttcctcatggcatcaggagcagcggaggaccttgtcggacaccctgaggtggagaggggcgccatcctgtggaatgtctgtggaactacagcctttatcgtggttacggctatggcagacgctcatgacggaggagaggacccatttcatgaggaggggactgggtctgagacagtattcaccctcacgcatgtcaagaggggaatcaagcccctctcgaagggagcatatggatattatgaccaccacaacgagagcattgagcccaggactgaagccgcgctgcctgctaagccattgggtgatagagcagccactatagtgngtatcatgcatttggaccatgtgggtctggcttcttcaacggcgaggtcaaaaggcagaacaggaaacccatcaatctagatcagacccaccagaagcccaagacaccagatc

SEQ ID NO: 172888 - DNA, 248 bp, Zea mays
  Clone ID: MRT4577_89255C.1
tggaaacatacaaatcgtatttgcataacgtacgaaggtaggccgaaagcaagtcacgcaaacaacaaaagaatcaagaacttggcccgtacaaggttacccattaacaattagaggaaggggggcgtattccgaaggaccaccgtcccggggaatcggggagcgaacatttacttaatgttccgcagccaacttcaggaacctttggtattaagctacaatattaggggcctgcgcctgggcctttg

SEQ ID NO: 172889 - DNA, 1151 bp, Zea mays
  Clone ID: MRT4577_89256C.1
gggtacctcgaggccggccgggattaaatcgcccacaattccctgtcctccgcggctccgcctcgatacggccgtctcctccccgctttgctccccacgaagcaattctaaatcctcgcgcagaagatcgtatcctccgtcggatccgcatcggtgcttgccctccctgctcggatttctggcagccctttcctaccccctgaattcctgtgcggattccctcccctgccctggcggttgctcctgttgcctggtgggaacttgagaggagaggaggggttggtgggggtggaaggcgctcgtgacccggcccgtggagatggctggcgtgaaggagccgatcgaggtgaagttccggctgtccgacggcaccgacatcgggcccagcaagtacgatcccaacaccaccgtcgccgcgctcaaggagttcgtcctcgcccggtggccgcaggataaagaaatagctccaaaaactgtcaatgatgtgaagctcatcaatgttggaaggatactggagaatagcaaaactcttgctgaatctcgtgtcccagttggagaagttcctggaagtgtgattacaatgcatgttattgtgcggcctccccaatctaaaaacagtgagaagcaacagtcaaactctccgaagccaaacagatgtggatgcacgatattgtgacgttgatgcaagtagcaatgtgtatatcggtgtccacagagatcaatcacaagttcatttagcaattgattcaatctattcttcacaaccctgaagttcatttagagatggtgttacggccagtcacatatctggcttgagaaattgatgcttgcggtcgtgttcgagtgtgcaaggagttcacagggtcctggtaaaaccctgaaatcggtgtggactcaaggaattggatgtttgctattctgtaatgtgtggagacagtgataccagaagtgagttgctgcatagttacatcggagacaattcttttttcgtaactcggttgcgtgtatcagtatttctgttttgtaatagaaaaaggttgaccggctattgttggcataaagtggtaaggaatgggggtcccctaaggaatgctgtggtttgacatgggaagatgaaagtgaataatgagtaccattctggttcacctttt

SEQ ID NO: 172890 - DNA, 361 bp, Zea mays
  Clone ID: MRT4577_89257C.1
gcgttttcctgagctactcctactggggccgatacattacgggcgccgtcttccatatcatctacatgatgggcctggaggtcctgtcgctcgcgtcatggttcttgctggtgaagccgtccggctgtggcggcgtcaaggcgcactgtgacggaccgtcggcgcccggcgtcgcgctgatctacctgtccacctacatgatcgcgttcggcaacggaggctaccagtcttacatcgcgacgtgcgcatcggaccagttcgacgagacggactatgaggaggcacgctccaaggtggcctactttagctacgtatacctggcgctcaacgtcggttgcttgctctacaacacggtgctagt

SEQ ID NO: 172891 - DNA, 282 bp, Zea mays
  Clone ID: MRT4577_89258C.1
ggcgggggcgctgctgctgcggctccacaaggggaggtacctcccaggcccctacctctggtgggtgccgaacgctgtcttaaccgacgccgtcaagaccgccggcctgtggctccggcatgaccaccatcccgtatccaaatggctgtcatgcaatgatttaaagaagcttgccttgtttgggtgtcctaatattgagcgagtaacggttgttgcgtcaaaaagattaagagccttattcaacatgcatgaaagaactatatgcggatcctgtaaactgag

SEQ ID NO: 172892 - DNA, 376 bp, Zea mays
  Clone ID: MRT4577_89259C.1
cgaccgcacgcgttcgctgaagctgatgttgggcacgcctaacgccccaaagcctgaagaggatgagtctgctaggctaacgcaagcttaccaccgggggctgctccctagggctgtcatatctcaacatcaaagcggtgaccagcctcagccactcctgatggagggccaacagcagcatgctgcaccagcatctgactacttcaacacttcagcaccaccagcagcggatcggactgtgtatccatcaatggatccacagacgatgggtgctatagtttaaccccatgacagtgaatgcaaaccagtgccctaacaagcttggcaaggtcaggcattaagcaacccagcacatgggggccgtttattctgcatt

SEQ ID NO: 172893 - DNA, 489 bp, Zea mays
  Clone ID: MRT4577_8925C.1
ccggccgggacgaggcttccctgattgaggcattttccgaggaggctatccagcagtcccccaacttctccgctttcgaggttgacgacgaggttctcggtagcctccgcgagtacggccttgccaactctctctactgggctcttgctgagggccacgcctgcgagcagtctgcccgacgaaacgctatggataacgcctccaagaacgccggtgagatgatcaacaagtaccagattcttttcaaccgtacccgacaggctgtcattaccggagagctggtcgagattattactggtgctactgcctctgcggacatgtaaggagtgggagtacaagtcggggtgtaatgcttccctttgtaacaaatgccaacgggtcaccatcctcgcatggtttccctcattgtatcaaagcttcaataaattccttagtagcccataaagtctatatgcatgccagaaaaaaaaaaaaaaaaaacccgcggcc

SEQ ID NO: 172894 - DNA, 306 bp, Zea mays
  Clone ID: MRT4577_89260C.1
acaacccgatcaacgtattctttttcgccgccatcacaacacctagactgggaggggggacgctaccattacgaacaacaccacatcatacacctctacatgcaaggttataaaatacctggataaaaacttgtatatgaaggaatgaagaatctgcaataaccactcgagtaaattatcgagcgctgtaacaaccctattaatattgattcactttaatgatcaaaaacttataaagctgaacctaaaaaatatatatactctgtgctaaacgtatcatatagatttacactctgaaccaataaa

SEQ ID NO: 172895 - DNA, 533 bp, Zea mays
  unsure (1)..(533): unsure at all n locations
  Clone ID: MRT4577_89261C.1
tactgcatttttttagtattgcacattaattgaatgttgaaacacaaatcacattccagttggaatcgagcaaatagaaatagtaggagaagaaattgaaaaaaaagaaaataaaaagagggcttttcctcagttctttgggctaaaaccggccggcccagtccaccgcgtttttttttcagcagccattcccttgcgtgtccatgacggggggggccccttgcgcagctcgttcttccacctcagcgcggaatcggtcctcagcacgacaaaccgagtcggatccactgtaaacggaagcttcccaaccgattccctgcggctctccgtcttccgcgcttgggttgccgtcccggacagccttgcgggcgtacggactcgcagagcccgcgttcactgtatggactaaatcgtcggtcacattctctccacgccatgggcgtgtttggcggaaacagaaatccgccgcgccacctgcacaactgacctcngggaactacgcagctaacccactggatacttatgcgcgcacc

SEQ ID NO: 172896 - DNA, 392 bp, Zea mays
  Clone ID: MRT4577_89262C.1
gaggggggggaaggatttctcaaaaaaaaaaaattcccaaaattggaaacccctttacccttgctaataaaggatcaaaccccccctttgggccggaacttttttttttttcgggggggaaagcaaaaaccccaggggggtgggctgtttttaccgaaaaaaacaaaaaaatggggcgaggcttttttttttttttggctggatgggaagaaaaatccagttttttgttcccactgggtggggtggcccaaacttttttcttaaggcccctttggacatgggcctcagggggggacttttttacaaaaaatttggcctttttgtccccggttttaaaaacagagggattggccagttcgctttaaataaaaggaacaattttctcgcttttt

SEQ ID NO: 172897 - DNA, 334 bp, Zea mays
  Clone ID: MRT4577_89263C.1
gcagatcaagaaggacatcaaggagttcaaggaaaaatacaaggtggacaaggtagtccctcccccggggtcctgtgtaaattctgtatccatcccttcctttacccttcttcattcttcacctaaaattacataaatctagtccttcctcccatattgactcactaaaccaccttctgtgatctgtttctatggccaaaacctctctgtgcggccacttcttttcatggaaacttgaagttgacgacccaacatctagacacacttgctgttattcaaaaaaactccccccacccctactttttccactccccctatatttctttctccactt

SEQ ID NO: 172898 - DNA, 316 bp, Zea mays
  Clone ID: MRT4577_89264C.1
gtctgctcattgtttcaggtcatatatgacgtttttaagtgatgtatgcacaaactcagttatgttctctaattcactcatcctgtgaaactgtgcttttataactgcataaatcctatcctcatatatgtagtgatctgccctatggtggccctgtgaatgttgtgacaatgttgttgagtatgttggccctatgactcctttgaccatgctgttgagcttgatggccctgtgagtcctatgaatcttatagacgatgaccaggttttttgtaaactcactcatttagtgtagtttgcactgtgatgcatagatc

SEQ ID NO: 172899 - DNA, 2005 bp, Zea mays
  Clone ID: MRT4577_89265C.1
ctgggaaagctcgaacgcggcctgcaatggctacctcgaggccgtccgggctcgcgtacataaacgacggagaaaaggacacaacccagcccgccctaaaaccctcccaccatcatgtcgctctccacactcagccacccggccgccgccgccgccgggagcggaaaatcccttttcccggctggcccggcggcgcagtccgtacatttccccaaggcacggctccctgtccccgccgccgtctccgccgctactgcggctgttcacgcggaggatagggtttcgtcgctgactcaagtctccggcgtgctggggtcgcagtggggcgacgagggaaagggcaagctcgtcgacgtgctcgccccccgcttcgacatagtcgcgcgttgccagtctcttcgaacacggcaagggggagcgaacgctggacataccatctacaactcagaaggcaagaagtttgctctgcatcttgttccatctggtattctccatgaagggacactgtgtgttgttggcaatggagcagtgatccatgttccagggttctttggagaaattgatggtcttgagtccaatggagtccgctgcgatggaaggatactggtatccgaccgggcacatctgctgtttgatctgcaccaggctgtggatggacttagggaagcagagcttgaaaattcatttatagggacaactaagagaggcattggtccttgttactccagcaaggtaactcgaaatggactgcgggtttgtgatttacgacacatggacacttttggggataagcttgacatcttattcaaagacgctgcttcgagatttcaaggctttcagtacagcaaaagcttgctcaaggaagaggttgagagatacaagaagtttgctgatcgcttggagcccttcattgctgataccgtgcatgtgctaaatgaatctatcaagcagaagaagaaaatcctggtcgaaggcggccaagcaactatgctggatattgattttggcacttatccatttgtgacttcttctagcccttcagctggcgggatatgcacaggcctagggattgctccaagggcaattggcgacctgattggagtggtcaaagcttacacatctagagtcggctctggccctttcccaactgaactatttggagaggaaggtgatcgccttaggaaagctggaatggaatttggcacaacaacaggtcgcccaaggcgttgcggctggcttgacattgttgcgcttaagcacagctgccaaatcaatgggttctcatcacttaatctgaccaaactggatgttctgtccgggttgtcagaaattaaggtgggtgtttcttatacccagactgatggacagaagctgcaatccttccctggggatcttgatacccttgagcaagtacaggtcaactatgaggttctgcctgggtggcaaagtgacatttcttctgttcgaagatacgatgaacttccccaagctgcccgcctctatgtggagaggatagaagaacttgttggtgttcccgtgcactacattggtgttggacctggcagagatgctctcatatacaagtaaaagcaactttatttggtccttggttgggcggaaaccaggccgggactcgggagcatttgcattttcttggcgtggtagcttttgatacggtgaagtcactgactcgtggagtgatgttgctcaataatcagaaccttgtcctaatacagccgctgagacatcagctaaggcgaataagggaaggatgagtcatttgcaccatgtttgaccaccaattgttaggtggtccatatattttgtactaattgtgagactttgtgctatggatctcaactgtataccttgctggtgcatggctttgggtttacatggttgaaaatgagattggtgtactaattgtctaaaaaaaaaaaaaaaaaaaaaaaaaaaaaaaaaaaaaaaaaaaaaaaaaaagctcgaggagagggcgccgtgtacc

SEQ ID NO: 172900 - DNA, 988 bp, Zea mays
  Clone ID: MRT4577_89266C.1
gagaagatggagcacacaattgtgagagccaagtctagtgaagtaggatgctccaatgttgaacggaaacttaggcagctacttgatataactgaagatgaagcttatttccatacaaggcagagtgcatttctatatcatcttggagtgcagactatgccgaaaactcaccattgcttgaacatgagattgacagtagaatatttcaagtctggatcaaatcatgtggatcagttaaatgaccagaagcttgaaagtcctgccttacatcactatgtaatgttttccaggaatgtacttgcagcttccaccactatcaattcaacggttatgaactcccaggattcggaccacatcgttttccatgtattcactgatgcacaaaacttttatgcgatgaagtattggttcgataaaaattcatacttggagtcgactgtacgcgtaactaacattgaggacaaccagaagctctctaaggatgtagattcccttgagatgcaacaattatggcctacagaggaatatcgtgtcacgattcgtaatcattctgaacctttccagaggcagatgaaaactaagtacatatctatcttcggcctttcacatttcctcttgcctgaccttcttcctcgcttgaatagagtagttgttctggatgatgatttgattgtccagaaggacttgtcacctctatggaacctcgatatgggtggtaaagtgattggagcagtccagttctgtggagtgagattagggcagctgaaaccttatatagcagaccataacgtcgatgatgattcatgtgtgtggttgtcgggcctgaatgtcattgaattggataaatggagggacactggcattaccagtttgcatgatcaatcagtccagaagttgcgaaaggacagcctgaaatcacagcgactgcaagcactccctgcaggtctacttgcctttcaagaactgatatatcctttggaagattcat

SEQ ID NO: 172901 - DNA, 274 bp, Zea mays
  unsure (1)..(274): unsure at all n locations
  Clone ID: MRT4577_89267C.1
aaaaaggggagaaaaaangcaggggcttctttccccgtccggcgggggggggtttttaaaacaaaaaaggggcctctgggagggaaccgcaaacggtcaacccaaagtttccgaagggccgcaaaaccccctagacaattcccagttatttttcggaaaaaacccccggcccttcctcccggaaaaaaaaacgcgccagtccaaccccttgggcgggccctccccaaaaaaacccccgagaacccaaaaactccccgaaacccctaacccaaaa

SEQ ID NO: 172902 - DNA, 425 bp, Zea mays
  unsure (1)..(425): unsure at all n locations
  Clone ID: MRT4577_89268C.1
ggaacaaccggggcacagttgggctctcgccttgggaattccccaagatgttaaaaacaagttccattacagccttttgttcaacaccctcagcaattcgtttagggaaaatgataataagtcctatcctcaaaacggcggcnttgaggaagcaaccaccggaaccttttcacctgcagaagttgccaacacttttttgggttgcttaaacaagcataatttccctttctttgatcatgggctgcagaagcctcagggggaaaccataagcttacttcccaactttaacagcatcaacctttcttttgggatgaaaagaagacctcttcttgaagaaaattcaccccttgctccacccccacctggcaattcatgccttggtcattaatgcaacaggttcttcacggaaatcatgccctcccccc

SEQ ID NO: 172903 - DNA, 510 bp, Zea mays
  Clone ID: MRT4577_89269C.1
gctcacgcgcccagggggagcagaggctggcccgcaccatggcttatctcgcgcacacggcgaagcccgggacccccacaccgtgggctcctacgaccagggccgcttcaccgtgctcatgaccgagggcaagcccaatgaggcggcggccaacagcccctacaacgactcgggggggggggcgtacctggaccactcctcaggacagctctcgatcttccttaccggcaagggcccctatgcactacggctgcaacaccgccgggctgtccaccgacccccataccttcgccacgaaccgggaactgaaggcaagccactcccgctttgccatgctcggcgcgctcggcgtgcgacggcctcaaactgctctcccgctgcggaatcgatggctcgcgagggcacattgcttcactgccggttcccagatcttcatcgagggcggcctggactacctcttctacccctgcctgatccacgccctgagcaccctcggcaactggacctgcc

SEQ ID NO: 172904 - DNA, 539 bp, Zea mays
  Clone ID: MRT4577_8926C.1
tgtttttgtgagcaatgacctgaatgaacaatcgaaatgaaaagaaaaaagtattgttccattttaaaaatttttttttttttttaaaaaaaaaaaaaaaaaaaaaaaaaaaaaaaaaaaaaaaaaaaaaaaaaaaaaaaaaaaatttttaaaaaaaaaaaaaaaaccctattaaaaaaaaaaaaaaaaaaaaaaaaaaatttttttttttcccgggggggccttttaaagggggaatttttgaaattttctttaaaattgggggcggttgaaatttttttttaaggggcccatttcccctttttgggggtggtttaaaatttaattggccgcgtttttaaaactttttaattggaaaaaacttgggtttcccaaattaatttgctttgaaaaaaatccccttttttcaagttgggttattagaaaaaaggcccgaacgattccccttttcaaaaatttgccaaccttaaatggaaaatggacccccctttaaggggccttttaagcgcggggtttttggggtttaccccaaggggaac

SEQ ID NO: 172905 - DNA, 362 bp, Zea mays
  Clone ID: MRT4577_89270C.1
gacctttggtctgatttagtgcttgaagtaccggacgtcttcaccccttacgccaatggcgacgacccggaggtcgccgcctacgctcgcgagtctgttgtagaacggtgctagataccctacctagacgcagcggcggataccgcacgtcattggtgacccggttacaacgaaaccgacgagttgcttcctatttaattcaagacgcataaggcgaccaggaattacgtaagcgtgtcagagacccactaaaggaagccgccagagctcgggaagactctaaaggaagacaccgacaggccaaatataaaggctagtatcacatccaacgaggaaccctagaatagtaaagatcacgcctt

SEQ ID NO: 172906 - DNA, 648 bp, Zea mays
  Clone ID: MRT4577_89271C.1
cttatattctttgtcttatgcctatttgcctcttctactacatccttgtttgttattacctttaaaaaaccctcgtgatatctatgcccttgccttcctgcttatcatgaacctatcctttgaagcctcctctattccatccctgttcgaggataatgcctcatctatctcatcattgactggtcccccttctctgacactttgcaagcttttcctcaaatacgtcctttgtcgtgtgtttgtccgttatcaccttaacccttgtcatccctcgatctttaccttgatgcttatcctgtacctgcactttaaagccgcctcttccattccattccaagagtgatgtcttgcccttctcgatcttgtccgttcccttttcctctgtcgcattgtatgtcctagcttttgctcgatatcacccctagcttcctaatatctagatctttccatgatgcttatcctatacctaccttttgaattatcatcttttccatctcgatttgagaatggtgttttacctatcctaaccttggttgcattctctccctgtcggatacaatccttgctttagctccatcctttattatgctcatgcccctatcctgcatgtcttattattccccttgcctttcgatgtccttagagtag

SEQ ID NO: 172907 - DNA, 366 bp, Zea mays
  Clone ID: MRT4577_89272C.1
ggccgcttttttttttttttttttcttttttttttttttttttttttttttttttttttttttttttttttttttttttttttttaacaccatgaactgaattaaccagggcccccgactaggtaaaaacaaacatcctttgacaagaagttcctaattaaaccatggctgcgcttgggcagcattattaagagagggaagggggatgtccttacacttcccactccccttggggagcaacaagcaccttcatcgaaaaagaaaaaatggcctacacatgatctggagtgtacccccctagggtttccccaaaaaatctctaagaggagaaggggaagaacatctccttgaccctgtcttgctttc

SEQ ID NO: 172908 - DNA, 375 bp, Zea mays
  Clone ID: MRT4577_89273C.1
agcttggacgagcagggaggttggatgaagcaagaaaggtaatagaagaggctggtgatgttggtgctggtgcatggaggacataccttgcggcgtgccggatgcatggtgataaggagagagcacaacaagcagctaggatgttgatgatggcagaggaatcagggagcgggggatgggttctgctcgccaacacttatggttcggatggaaactttgaggaactcgaagaggtgagagaggagatgaaacgccaaagggtgcagaaggcagttggttgcagctgggtcgaggtcggatgagagaataatggaagtgaaacaattatgcatacttttgttaatggggatggggacaccctgaggctgacatgat

SEQ ID NO: 172909 - DNA, 2073 bp, Zea mays
  Clone ID: MRT4577_89274C.1
tcacaacccccttcgccgcctacgcccagcacttggaccaggcacaactttagcaaccgcagcacgcggcgaagcctccgccgctgccacatccaaggccgcaaagtaatccaagtcctcatccgatgactcttccgtccactcaaccgaactcccagagtcaccaaaatcagaaaacttagaagcggactcatccaattcattcccagcatccacggtcaaagccgccacaaaattagtagtagcggttgcgtgcgtaggcccaaaatcttgaacctgcgaaggcccagccgccgtggatcctccgctgccggctccgtcgccgtcttcggggatcctcaacactcggcacagcggttggcgacgagccaccgccggacgcagtagccgcaggggcagcgaggagccttcgccggtttccaggggcggcgccaggatgacttcagcctcggccgccaccgggttcgtctcggcttcgggccgcgcgctgtttaaagctccgaagtcctccatggtctcggcacgcgccgcctgactcctcgcccggtcggaccactccctaaccacctcccgactgtgagggccccacatccggtcaaagagggcccccgcggactccttcaccaccgggtcctcgaccttgtaaatatcgcgctcaaaatcttcatcagctcggtcgaagacctcatagtggtggcacccttcacgggacagcgcgttcatcgccccttcgcaggtgacgagggaggcaaaagacataaaaccctccacaatggtagggagcgccagcaactcctcttgcagccactcgaggcagtgaaggcccaactctcggttgggcacttcgaagtcagcggtccgcgcgcccagctcgtggtatgaatccataagctgtttgcgcgtccgctcaacttccgagcgtgtcgaagcctcggccctctccatgcgggcctgcagagcgttgaaccgcccctcccattcctcggcgtgctggctggcgaggctaccctccacccgcgccaaattggcctccgcctgcgcagactgcgccttggcgagggtctgattagcctccctcctctcctccgccagctggcgccggaggtcagtcctctcggcctccagcgcggccaccttctccgccagcttgcggcacttgctatcggcggccgatttttcccggacggcgtcagcatgctgcgcgcgaagtctctcgacttcggcagacacaactgccgtcagggcccccgatgccacgcgatcagcgaagtcagccgcctgacttagccgctgcgacgcctccttcagccggcgggacacagcgcccgcctcgtccttgacggcagcgagcgtcggaatctcaccaccagcgctgagagcactacccttcgccccggacaccgcgatagacaccgcgggcgccaccgcaggcggaacaacaacaagttgcccctcgctcgatccaacgaggtaatcgtccacgctaatatcggtggcgaagtcagcaacgcgcttctccggcgaaggcaattcccgggtcttcgcggctccggctgaggcggacttggttccgccggttccggctgccttcgcggccttcggcaccttgctagacccaggggcggccgacttcgccgccagcgtcgactggctaccaccgggggcggcagacttcgcagtcccccacgccctttttggcctagcctcgggcagcttgatgaccgcccgtcgcttctgcgtagcctcctgacgatccttgtccatcacaagcttcctcttcttggaggatggggtggccaccggcgcggagtcgtcttcagtctccgccgccggctttttcccgcggcggtcgacaatgtcttgcccgggataaccgccatacggcagacggttcaactcgaagaccctattcaagcgatcgttggatccgcgtatatcccaactacgttgggcctccgtctttggcacatagcgaccaacaatccgcactgccccatcctccacctcacgcacgaaagcggcgggatcacggccatgcaagtccaatgcgaaggctagactccgcacctgcat

SEQ ID NO: 172910 - DNA, 367 bp, Zea mays
  Clone ID: MRT4577_89275C.1
aaaaaaatgattccatctttaacaggatatctatgcatatcaatttgcttcataaaaaactctttacaagtctttaaatatattttttaaagatgcattacataaaactaataatcaatactcaaaataatgcatttatattaaagagatatttattctttaccactcatatgggagtaaactctttctctaatactaacctttcttccagtaccaggtctattaagtttgctgtggttctgtgttttatccacaaagtagatggcaattgcagtgatgattcctaccacagcaacccctgccagagtgagttgtgtccaataataacccttggcttcatcattaatagggtccttattaattcttg

SEQ ID NO: 172911 - DNA, 3234 bp, Zea mays
  Clone ID: MRT4577_89276C.1
atgccgacctcctcttcttccgctgccgctacgccgccggccgacgcctcgccgccggccgacgcctcgccgccggccaacgcctcgtctgaggagacgctgagtagtttgatggcggaggagttgcgcggcggcgattctgtggattttggcgtatcgcggatgtcgtcggtccacgtgcaagatatgcagcggttgggttacttcggcggcggagttgctcgtgtcccggggacggaggaagtccccgagccggagggcgagttggttgtgttcgaggtgttcttcgccgccagtctccgcctgcctgcgcaccaatttgttggcgaagtcctgcgtaggtttaacgttcagatacatcagctgacaccgaacgccgtggtggctctgtcgaagtatgtctgggcgacgacttcgtacggcggacagccatcggtcgaagtctttgcgaagtattattgcttgcactggcagaagaggatgattggagatgaagttgctcagtttgggtcctgcacgtttacgccgaagaccggcaagaccacgatgcaggtagtggagttggttccttgcgcccgcaacaagtggggcaactggaatgagttttggttttacgttgctgagggtaccgtcgaagaccatgagggactccccgtgtccgagatgtgttctcatttttactcagcgtacccgccctttgaggtggcggaggaggatgcggacgaaggggcccttcggtgcgccgccggcctgagcagtgggcgcgatttggttgaagaatttgtggcgtacgggatgcctttccatggtgagagggtggtgcgaagtcccgccttcgcgctggatctgcaaagccgcgatccggccgcctttgtgcgtgaggcggaagatggggcggtgtggctcattggtcgttttgtgccgaggacagagggccagcgcagctgggaaatccgcgggtcgaatgaccatctgaacagggtttttgaattgaatcaactgccgtatgacggctatcccggtcaagacgatgtggaccaccgtgggaagaagccggtggtggagactagagacgaccctgcgccggcggccgccccatcctctaagaagaggaaactaggtactgcaatgggaggacttggggtttctgatggttttgctagagagttgatgaggacatgcgcggcccctgggggaaggatgtcttcgcccgagctccgggagtcttcggctcggatgctgagggttaccgggggttgttggcctaggaatgttcctatcccccgcgcggctggcgaggacttttttacatctcgcatggttcgtgaatggagagtttttccttacgggcggaatattgctgctgttgtgtcggcagtgatggacaaggatcgccagggagctgcacaaaagcgccaggcggttgtcaggctcgttgaagccaggccgaagaggcagcggggggctgcgaaggctacggcccccggcggaggcaagccgccgctggcggcgaagtcgggcgtccctgcatctagcaaggcgcaggaggcaacggcaggcgccggaggctccaaatcgtcgaaggctgtgccgccgtccagcagagtgccggaggtcgcgaaggcggcccaagcgttgccgtcgtcaggcaagcgtgtcgccgacttcgccaccgatattaatgtggacgactatcttggtgggtcgaacgaaggccaacttgctatagttgcgcctgccgcggcgaccacgacggctgccgtagtgccgaaggcgaagggcggggctcttagcgccggaggcgaggtgttggccctcgcggctgtcagggatgaggcgggcgctgtgtcccaccggctgaaggaggtgaaggaggcactaagtcaggcggctgacttcgtcgaccgcacagcgtcgggagcgctcacggcagttgtgtgtgccgaagtcgagagacttggtacgcaacatgctgacgccgtccgtgaaaaatcagccgccgacagtaagtgccgcaagctggcggacaaggtggccgcactggagagggagaaggctgacctccggtgccaactggcgggggagaggagggagaccaacgaggccctcgccaaggagcaggctgcgcaggcggaggccaaattggcgcgggcggagggcaatattgccagggagcgcgccgagcagctgcaagagcggctcaccgccctggagagccgcgtggagagggccgaggccgcgtcgcgcgcggaggcagagcggacgcgcaaacagcttatggatacataccatgagctgggcgcgaggaccggtgacttcgaagtgccggaccgagagcccggacttcgctgcctggagtgggtgcaggaggagttgcaggaactccccactgtcgtggaggggtatatgtcgtatgcctccctggtcacctgcgagggggcgatgaacgcgctctcccgcgaagggtgccggcacttcgaggtcttcgaccaagccgatgaagattttgagcgagaaatctacaaggttgaggaccccatagtgaaggactccgccggagccatctacgaccggatgtggggtccgcacggtcacgaggtggtcagggagcgggccgagacggcgagggctcaggcggcgcgtggcgagagggtggatgacttcagggcgttaaacagcgcgctgcctgacccggagccgatcccggcggaggccatgtccggggccgccctggagccgcccccggagaccgtggaaggcgctccggatgcccccgcagctgctgcggccgtcggagaccttcccccggagaccgccgaaggcgcgccagatgcccccgcagccgctgcgtcgagtgctgaggatcctgcgacggtggcggtggaggcgacagcggaggcgacggcggaggcaacggcggaggctcccgcaacggctgggtcttcgcaggttcaagattttgggcctgcgcacgcaaccgccactactaaatttttggcggcttcgaccgtggatggtggtaataaatgtgatggttctgcatctgagttttctgattttgctgactctgggagctcggttgagtggactgaagagtcgtcggaggaggacttggactactttgcggccttggatgtggctgcggcggaggcttcaccgcgcgctgcggacgcggaagatgtgcctggtcctagtaccgggcgccggcgacgaagggcggttgcgaagcgcaga

SEQ ID NO: 172912 - DNA, 270 bp, Zea mays
  unsure (1)..(270): unsure at all n locations
  Clone ID: MRT4577_89277C.1
gacccacgccggcggnccggccccagcccgcgccggcacgaccccaagcgcccccgcggccccgcaggaccaacgacaggnnngnatggagagagcccaaagcgnacggncacggcgccggagcccnncnngacgccgccgcccgcgccgcggcaccncgccgagcgccgcancgaccccgcgcaacacgaaggngccancgccgcgcccggcgccgccgacgcgaggcgcaagcgccgaagccggcncccggccaccaccgagcgcaag

SEQ ID NO: 172913 - DNA, 2337 bp, Zea mays
  Clone ID: MRT4577_89278C.1
atgccgacctcttcttcttctgctgccgctacgccgccggccgacgcgtcgtctgaggagacgttgagcactgtggcgacggaggagttgcgcgccggcgacacggtggatttcggtgtgtcgcggatgtcctcggtccgcgtgcaagatatgcagcagcttggttactttggcagcggaatcgctcgtgtcccggggacggaggaggtccccgagccagaaggcgagttggttgtcttcgaggcgttctttgccgctggtcttcgcctgcctgcgcaccgattcgtgggagaagtcctgcgcagatttaacgtccagatccaccagctgactccgaatgccatggtggctctgtcgaaatacgtctgggcgacgacttcgtacggcggacagccatcggtcgaagtcttcgcgaagtactattgcctgcactggcagaaaaggatgatcagagataaggttgctcagtttgggtcctgtacatttacgccgaagaccggcaagaccacgatggagtttgaagtggcggaggaggatgcaagcgaaggggcccttcggtgcgcggccggcctgagcagcgggcgtgatttggttgaggagtttgtggcgtacggggtgtggcctttggcgcatggctgggcgctgggcgaagtatgccctcgccagatgccttcccatggtgggaagctggtgcgcagtcccgccttcgcactggatctgcatagccgcgatccggccgcctttgtgcgtgaggtggaggatggggcagtgcggatcgttggtcgggtcttcgagttgaaccatctgccgtacggcggttatcccgggcaagacgatgtggatcgtcgcgggaagaaaccggcggcggagactgaagacgaccccgcgccggcggccgccccatcctccaagaagaggaagctagggggaaggatgtcttcgcccgagctccgggagtcttcggcgcggatgctgagggttaccgggggttggtggcctaagaatgttcctatcccccgcacggccggcgaagacttttttacatctcgcatggttcgtgattggagagtgtttccttgtgggcggaatattgctgctgttgtgtcggcagtgatggacaaggatcgtcagggagctgcgcagaagcgccaggcggtcgtcaggctgcatgaggccaggccgaagaggttgcgggggaccgcgaaggctgctgcccccagcggaagccagccgatgctggcggcgaagtcggccgcccctgggtccagcagggtgccggaggctgtgaaggcggccgccgccgacggtaccaagtctgccccggccggcgccgcgaaggcccgagagctacctccgctgagtaagcgcgttgctgacttcgcaaccaacattagcgtggatgattatcttgttgggtcgggcgaaggccaacttattgttgttccgcctgtcgtggctaccgcggcggctgctgtggtgcccagggcgaagggtagtgctcttggtgccggtggtgagattccggcactcactgccgtcagggacgaggcgggcgctgtgtcccgctggctgaaggaggcattaagtcaggcggctgacttcgcagaccgtgcggcgtcgggggcccttacgacggttgtttctgccgaagtcgagaggcttcgggcgcaacatgctgacgccgtccgggaaaaatcggccgccgacagcaagtgccgcaagctggcggataaggtggccgcgctggagggtgagaggactgacctccggcgccaactggcggaggagaggaaggaggctaatgaggccctcgccaaggcgcagtctgcgcaggcggaggccaatttggcgcgggcggagggcagtcttgccagacagcgcgccgagcaattggaggagcggctcaacgctctgcagacccgtgtggagagggccgaggcttcgacgcgctcggaggctgagcggacacgcaaacaacttatggactcataccatgagctgggcgcgcggaccgctgacttcgaagtgccggaccgagagcccggactttgctgcctcgagtggctgcaggaggagttgctggcgcttcccgccatcgtggagggctttatgtcctatgcctccctggtcacctgcgaaggggcgatgaacgcgctgtcccgcgaagggtgccggcactatgaggtcttcgaccaagctgatgaggatttcgagcgtgaaatttacaaggttgaggaccctgtggtgaagaaatccgcgagagccctcttcgaccggatgtggggccctcacggtcgggaggtggtcagggagcggtccgagacggcgaggggtcag

SEQ ID NO: 172914 - DNA, 303 bp, Zea mays
  Clone ID: MRT4577_89279C.1
ccggaactcccgggtcgacccacgcgttcgctaagcctttcggcagaggacgataatccctcaactcaatgaccagaacgcgcaggattgaatacactacatggggcgaccctgattagtgcacagagaggacattgtgtctctgctacaaggcccgacggttgcacgagcagctggactgctggtgcttcattttcacgggcatagtgacattcgcatttatgatgaacttgcggtttgtttgtgccacgcaatccgctgttggaacaacaaacccatctcaggctaccagaatgtcgacga

SEQ ID NO: 172915 - DNA, 509 bp, Zea mays
  Clone ID: MRT4577_8927C.1
aaaacaacagcccatcaaatagttagataacggggaagccaaatccccgtttaagggggacccccttaaatggggtttacccaaaatagccaacaggcaaatttttttaaaactgcccaaatgcaggggggggatttttgggggggggctaaaaaagggggccccgggccttggaaggcccaaaaacaagattgtaccaccaaacttggaaaaaaaagggggggggggaaaggaaaaatttcccaatgaaaagttaccggggtttaaaatttttttgatccccaaccggggggaaccccccttaaattttggggggtttggttgccttcaccaccggattaaccttggaaagggggcccctggaaaaagcccggaaaaaaaacttgcaatcgtgtttgtgggaatagggggggagggcccaaaaaaagttcccacaccggcgggtgaatcccgaaagtccaaccttttttttgagggggctgaacgggttcggccctaccttccccctt

SEQ ID NO: 172916 - DNA, 3234 bp, Zea mays
  Clone ID: MRT4577_89280C.1
atgccgacctcctcttcttccgctgccgctacgccgccggccgacgcctcgccgccggccgacgcctcgccgccggccaacgcctcatctgaggagacgctgagtagtttgatggcggaggagttgtgcgccagcgattatgtggattttggcgtgtcgcggatgtcgtcggtccgcgtgcaagatatgcagcagttgggttacttcggtggcggagttgctcgtgtccccgggacggaggaagtccccgagccagagggcgagttggttgtgttcgaggcgttcttcatcgccggtctccgcctgcctgcgcaccgatttgttggcgaagtcctgcgcaggtttaatgttcagatacatcagctgacaccaaacgccgtggtggctctgtcgaagtatgtctgggcgacgacttcgtacggcggacagccatcggtcgaagtctttgcgaagtattattgcttgcactggcagaagaggatgattggagatgaagttgctcagtttgggtcctgcacgtttacgccgaagaccggcaagaccacgatgcaggtggcggaggaggatgcggacgaaggggcccttcggtgcgccgccggcctgagcagtgggcgcgatttggttgaagaatttgtggcgtacggggtatggcccttggcgcatggctgggcgttgggcgaagtgtgccctcgccagatgcctttccatggtggaagggtggtgcgaagtcccgccttcgcgctgaatctgcaaagctgcgatccggccgcctttgtgcgcgaggcggaggatggggcggtgcggctcgttggtcgttacgtgccgaggacagagggcccgcgcagctgggaaatctgcgggtcgaatgaccgtctgaacagggtttttgaattgaatcaattgtcgtatgacggctatcccggtcaagacgatgtggaccgccgtgggaagaagccggtggtggagactagagacgaccctgcgccggcggtcgccccatcctctaagaagaggaaactaggtactgtcatgggaggacttggggtttccgatggttttgctagagagttgatgaggacatacgcagccccggggggaaggatgtcttcgcccgagctccgggagtcttcggctcggatgctgagggttactgggggttgctggcctaggaatgctcctatcccctgcgcggctggcgaggacttttttacatctcgcatggttcgtgaatggagagtttttccttacgggcgaaatattgctgctgttgtgtcgacagtgatggacaaggatcgccagggagctgcacaaaagcgccaggcggttgtcaggcttcatgaagctaggccgaagaggcagcggggggctgcgaaggctgcggcccccggcggaggcaagccgccgctggcggcgaagtcgggcgtccctgcatcgagcaaggcgccggaggcaacgacaggcaccggaggctccaaatcgacgaaggctgtgccgccggaggtcacgaaggcggcccgagcgttgccgtcgtcaggcaagcgtgtcgccgacttcaccaccgatattagtgtggatgactatcttggtgggtcggacgaaggccaacttgctatagttgcgcctgccgcgacgaccacgacgactgccgtagtgccgaaggcgaagggtggggctcttagcgccggaggcgagatgttggcactcgcggcggtcagggatgaagcgggcgctgcgtcccgccggctgaaggaggtgacagaggcgctaagtcaggttgctgacttcgccaaccgcatagcgtcgggggccctcacggcagttgtgtctgccgaagtcgagagacttcggacgcaacatgctgacgccgtccgcgaaaaatcggccgccgacagcaagtgctgcaagctgtcggacaaggtggccgcactggagagggagaagactgacctccgacgccaactggtgggggagaggagggagaccaacgaggcccttgcccaggcgcaggctgcacaggcggaggccaacctggcgcgggcggagggcaatcttgctagggagcacgccgagcagctgcaggagcggctcaccgccctggagagccgtgtggagagggccgaggccgcgtcgcgcgtggaggcggagcggacgcgcaaacagcttatggattcgtaccgtgagctgggtgcgcggaccggtgacttcgaagtgccggaccgagagcccggacttcgctgcctggagtgggtgcaggaggagttgcaggcactccccactattgtggaggggtttatgtcatatgcctccctggtcacctgtgagggggcgatgaacgtgctctcccgcgaagggtgccggcacttcgaggttgaggaccccatagtgaaggaatccgccggagccatctacgaccggatgtggggtccgcacggtcgcgaggtggtgagggagcgggccgaaacggcgagggctcaggcggcccgtggcgagagggtggatgacttcggggcgctgaacagcgcgctgccagacccgaagccgaccccggcggaggccgtgtccggggccgccctggagccgcccccgaagaccgcggaaggcgcgccggatgctcccgcatccgctgcggccggcggagacctgcccccagagaccgccgaaggcgcgccggatgcccccgcagccgctgcgccgagtgctgaagatcctgcgacggtggcagcggaggcgacagcggaggcaacggcggaggcaacggcggaggcaacggcgacggcagggtcttcgcaggttcaagattttgggcctgcgcaggcaaccgctactactaaatttttggcggcttcgaccgtagatggtggtaataaatgtgatggttctgcatgtgagttttctgattttgctgactctgggagctcggttgagtggactgaggagtcgtcggaggaggacttggactattttgcggccttggatgtggctgcggcggaggcttcaccgcatgctgcggacacagaagatgtgcctggtcctagtactgggcgccggcgacgaagggcgattgcgaagcgcagagcgacttctgcgcggatagtcttcgcggtggactttggttttttccgcacttgttgtgctagtccggctgcacccttgggcgacttctgcgcggatagtcttcgcggtagacttcggttttttttcgcacttgttgtgctagtccggctgcacccttag

SEQ ID NO: 172917 - DNA, 410 bp, Zea mays
  Clone ID: MRT4577_89281C.1
agcggcccatggcctccatggcgtttgccctttcgggggccttcaagggcctctgggtggcgcccaccaccaccacgggttgcttcccgctctgcgaccgcgcctcgctctccgtcggcggcgcagcgggcgtgccggcggtgccggtgccggcgcggcggctcaccatccagatggcgcacaagaagggtgccgggagcaccaagaacggccgctgactccaatggacagcgcctcggggccaagatatactgcgaccagcttgccaagcccggggccatcatcattcgtcagcgcagctccagtgtctttcctggaaataactttgtgatgtgcaaggttctcacattcttttctttgatatatggactccttaaggtttgaataatttttggctctgttaagaaaaa

SEQ ID NO: 172918 - DNA, 2757 bp, Zea mays
  Clone ID: MRT4577_89282C.1
atgccgacctcttcttcttctgctgccgctacgccgccggtcgacgcgtcgtctaaggaaacgctgagtactgtggcggcggaggagttgcgcgccggcgatacggtggattttggtgtgtcgtggatgtcgtcggtccgcgtgcaagatatgcagcggctgggttactttggcggcggagtcgctcgtgtcccggggacggaggaagtccccgagctggaaggcgagttggttgtgttcgaggcgttcttcgccgctggtctccgcctgcctgcgcaccgatttgttggagaagtcctgcgcagatttaacgttcagatccatcagctgactccgaatgtcgtgaagaggatgattggagatgaagttgcccagtttgggtcctgtacatttacgccgaagaccggcaagaccaagatggagatagttgagttggttccttgcgctcgcaacaagtggggcaattggcatgagttttggttctacgtcgcggagggtaaagtcgaagaccatccggggctccccgtgtctgagatgtgttcgcatttttactcagcatacccgccttttgaagtggcggaggaggatgcggacgaaggggcccttcggtgcgcagccggcctgagcagcgggcgcgatttggttgaggaatttgtggcgtacggggtatggcctttggcgcatggctgggcgttgggcgaagtgtgccctcgccagatgccttcccatggtgggaagttggtgcgaagtcctgccttcgcgctggatctgcatagccgcgatccggccgcctttgtgcgtgaggcggaggatggggcggtgcggatcgttggtcggtacgtgccgaggacaaagggccagcgtagctgggatatccgcaggtcgaatgaccgcctgaacagggtttttgagttgaatcgtctgccgtatggcggttatcccggccaagacgatgtggatcgtcgcaggaagaacccggtggtagagtctggagacgaccccacgccggcggccgccccgtcctctaagaagaggaaactaggtactgctatgggaggacttggggtttccgatggttttgctagagaattgatgaggacatgcgcggccccggggggaaggatgtcttcgcccgagctccgggagtcttcggcgcggatgctgagggttaccgggggttggtggcctaagaatgttcctatcccccacgcggccggcgaagacttttttacatctcgtatggttcgtgaatgggaagtatttccttacgggcggaatattgctgctgttgtgtcggcagtgatggataaggatcgccagggagctgcacagaagcgtcaggcggtcgtcaggcttcatgaagctaggccgaagaggcagcggggggctgcgaaggctactgcccccgacggaggccagccgccgctggcggcgaagtcggccgtccctgcatccagcagggcgccggaggctgtggctgccgccagtggttccaagtctgcgaaggctgcaccggcgtctagcagggtgccggaggccgcgaaggcggcccgagagttgccgccgccgggcaagcacgtcgccgacttcgccaccgacattagtgtggacgactatcttgttgggtcggacgaaggccaatttattgttgttccgcctgccgtggtgccaaaggcgaagggcggtgctcttagtgccggcggcgagatgccggcactcactgctgtcagggacgaggcgggtgttgtgtcccgccggctgaaggagatgaaggaggcgctaagtcaggcggctgacttcgcagaccgcgcggcgtcgggggccctcacggcagttgtgtctgccgaagtcgagagacttcggacgcaacatgctgacgccgtccgggagaagtcggctgccgacagtaaatgccgcaagctggcggataaggtggccgtgctggagggtgagaaggctgtcctccggcgccaactggcggaggagaggaaggaggccaatgaggccctcgccaaggcgcagtctgcgcaggcggaggccaatttggcgcgggcggagggcagtcttgccaagcagcgcgccgagcaattggaggagcggctcagcgctctgcgggctcgtgtggagagggccgaggcctcgacgcgctcggaggctgagtggacacgcaaacagcttatggattcataccatgagctgggcacgcggaccgctgatttcgaagaggagttgcaggcgctccccaccatcgtggaggggtttatgtcctatgcctccctggtcgcctgcgagggggcgatgaacgcgctctctcgcgaagggtgccagcactatgaggtcttcgaccaagctgatgaggattttgagcgtgatatctacaaggttgaggaccctatagtgaaggaatccgccggagccctctacgaccagatgtggggcccccacggtcgagaggtggtcagggagcgggccgagacggcgaggggtcaggcggcgcgtggcgagagggtggatgatttcggggctttgaacagcgcgctgcctgacccggagtcgaacccggcggcggctgtgtccgaggccgccctggagctgcccccggaaaccgccgaaggcgctcctgatgcccccgcagccgctgcggccgacggaggcccgccccggagaccgccgaaggcgttcctgacgcccctgcagccgctgcggcctgcggaggcccgccgccaactgctgcgccgagggctgaggatcttgtga

SEQ ID NO: 172919 - DNA, 3210 bp, Zea mays
  Clone ID: MRT4577_89283C.1
atgtcgacctcttcttcttccgctgccgctacgccgccggccgacgcgtcgtctgaggaaacgctgagtactttggcgatggaggagttgcgcgccggcgatacgatggattttggtgtgtcgtggatgtcgtcggtctgcgtgcaagatatgcagcggttgggttactttggcagcggagtcacccgtgtcccggggacggaggaagtccccgcgccggaaggtgagttggttgtgttcgaggcgttcttcgccgccggtctccgcctgcctgcgcaccgatttgttggagaagtcctgcgcagatttagcgttcagatccatcagctgactccgaatgtcgtggtggcactgtcgaagtatgtctgggcgacgacttcgtacggcggacagccatcagtcgaagtcttcgcgaagtactattgcctgcactggcagaagaggatgattggggatgaagttgctcagtttgggtcctgtacgtttacgccaaagaccggcaagaccacaatggaggtagtggagttggttccctgcgcccgcaacaagtggggtaattggcaagatttttggttctacgttgcggagggtaccgtcgaagaccatccggggctccccgtgtctgagatgtgctcgcatttctactcagcatacccgccttttgaagtggcggaggaggatgcggacgaaggggcccttcggtgcgccgccggcctgagcagtgggcgggatttggttgaggaatttattgcgtacggggtatggcctttggcgcatggctgggcgttgggcgaagtgtgccctcgccggatgccttcccatggtgggaagctggtgcgaagtcccgccttcgcgctggatctgcatagccgcgatccgaccgcctttgtgcgtgaggcggaggatggggcggtgcagatcattggtcggtacgtgccaaggacagagggccagcgtagctgggatatccgcgggtcgaatgaccgtttgaatagggtttttgaattgaatcgactgccgtatggcggttatcccggccaggacgatgtggatcgtcgcgggaagaaaccggtggtagagtctggagacgaccccgcgccggtggccgccccatcctctaagaagaggaaactaggtactgctatgggaggacttggggtttccgatggttttgctagagaattgatgaggacatgcgcggccccggggggaaggatgtcttcgcccgagctccgggagtcttcggcgcggatgttgagggttaccgggggttggtggcctaggaatgttcctatcccccgcgcggccggcgaagacttttttacatctcgcatggttcgtgagtggaaagtgtttccttacgggcggaatattgctgttgttctgtcggcagtgatggacaaggatcgccaaggagcggcacagaagcgccaggcggtcgtcaggcttcatgaagccaggccaaagaggcagcggggggctgcgaaggctactgcccccggtggaggccagccgccgctggcggcgaagtcggccgtccctgcatccagcagggcgccggaggttgcggctgccgccggtggttccaaggctgcgaaggctgcaccggcgtccggcagggtgccggaggccgtgaaggcggcccgagggttgccgccgccgggcaagcgcgtcgccgacttcgccaccgacattagtgtggacgactatcttgttgggtcggacgaaggccaacttgtcattgttccgcctgccgcggcgaccacggcggctgccgtagtgccaaaggcgaagggtggtgctcttagtgctggcggcgagatgccggcacttgctgctgtgagggacgaggcgggcactgtgtcccgttggctgaaggagatgaaggaggcactaagtcaggcggctgacttcgcagaccgtgcggcgtcgggggccctcacggcagttgtgtctgccgaagtcgagagacttcggacgcaacatgccgatgccgtccgggaaaaatcggccgccgacagcaagtgccgcaagctggcagacaagggcggtcttgccaaggagcgcgccgagcagttggaggagcggctccgcgccctgcagagccgtgtggagagggccgaagccgcgacgcgcacggaggctgagcggactcgcaaacagcttatggattcataccatgagctgggcgcgcggaccgctgagttcgaagtgccggaccgagagcccggacttcgctgcctggagtgggtgcaggaggagttgcaggcgctccccaccatcgtggaggggtttatgtcttatgcttccctggtcacctgcgagggggcgatgaacgcgctctctcgcgaagggtgccggcactacgaagtcttcgaccaagctgatgaagatttcgagcgtgatatctataaggtcgaggactctgtagtgaaggaatccgccggagccctctacgaccggatgtggggcccccacggtcgagaggtggtcagggaacgggccgagacgacgaggggtcaggcggcgcgtggtgagagggtggatgactttggggctttgaacagcacgctgcctgacccggagtcgatcccggcggaggccgccctggagccgctcccggagaccgccgaaggcgcccctgaagcccccgcagccgccgcggccggcgaaggcccacccccggagaccgccgaaggcgttcctgatgcccccgcagccgctgcagccggcgagggcccgccgccaactgttgcgtcgagggttgaagaccctacgacggtggcggcggaggcgacggcgaaggctcccgcgacggctgggtcttcgcaggttcaagattttgggcctgcgcacacaactgcctctactatttttttggcggcttcgaccgtggatgatggtaataaatcggatgggtctacatctaagttttctgattttggtgactctgggagctcggttgtgtggactgaggagtcgtcggatgaggacttggactactttgcggccttggatgtggcagcggtggaggcttcaccgcgcgctgtggatgcagaagatgtgcctggtccgagtactgggcgtaggcggcgaagggcggttgcgaagcgtagattgtgtgccctcgcacattcggctatgctagcgaaggcgttacgtacttggtcaggtgtaattgttatcgtgctagcccggctgcgcccgtag

SEQ ID NO: 172920 - DNA, 2901 bp, Zea mays
  Clone ID: MRT4577_89284C.1
ttacatcggttcaaccttcggaatgattcccatctccctatagttaaatagcattatcctcagctcctcaccctcaaaaagacttcgcagctccccctcacctacactcgcaacggccggcgaggacaacaattcctgcttgccagccctgcccacacgaagctgaccgccgtccgcctcactcactctacgcttcgcaaccgcccttcgccgcctacgcccagcactcggaccaggcacaacttcagcattcgcagcacgcggcgaagcctccgccgctgccacatccaaggccgcaaagtaatccaagtcctcatccgatgactcttccgtccactcaaccgaactcccagagtcaccaaaatcagaaaacttagaagcagactcatccaattcattcctagcatccacggtcgaagccgccacaaaattagcaatagcggttgcgtgcgcaggcccaaaatcttgaacctgcgaagcccagccgccgtgggatcctccgccgccggctccgtcgccgtcttcggggatcctcagccctcggcacagcggttggcgacgagccaccgccggacgcagtagccgcaggggcagcgagggagccttcgccggtttccggggcggcgccgggacgacctcagcttcggctgccaccgggttcgtctcggcttcggtacgcgcgttgttcaaagatccgaagtcctgcacggtctcggcacgcgccgcctgtcccctcgcccggtcggaccgctccctaaccacctcccgaccgtgagggtcccacatccggtcaaagagggcccccgcggactccttcaccaccgggtcctcgacgttgtagatctcgcgctcaaagtcttcatcagatcggtcgaagacctcataatggcggcacccttcgcgggacagcgcgttcatcgcccgggcctgcagagcgttgaaccgctcctcccattcctcggcgtgctggctggcgaggctaccctccacccgcgccaaattggcctccgcctgcgcagactgcgccttggcgagggcctgattagcctccctcctctcctccgccagctggcgccggaggtcagtcctctcgccctccagcgcggccaccttcttcgccagcttgtggcacttgctatcggcggccgacttttcccggacggcgtcagcatgctgcgcccgaagtctctcgacttcggcagacacaacagttgtaagggcccccgacgccacgcgatcagcgaagtcagccacctgacttagccgctgtgatgcctccttcagccggcgggacacagcgcccgcctcgtccttgatggcagtgagcgccggaatctcaccaccagcgctgagagcgctacccttcgccccaggcaccgcggtagacaccgcagtcgccacctcaggcggaacaacaacaagttgcccctcgcccgatccaacgagataatcgtccatgctaatatcggttgcgaagtcggcaacgcgcttccccagcgaaggaaattctcgggccttcgcgactccggccgaggcggacttggttccgccggctccggctgccttcacggtctccggcaccttactggacccaggggcggccgacttcgccgccagcgtcgactggctaccgccgggggcggcaaacttcgcagtcccccgcgccctcttcggcctagcctcgggcagcctgatgaccgcccgacgcttctgcgcagcctcctgacgatccttgtccatcactgccgacataacagcagcaatattccgtccataaggaaacaccctcatatcacgaaccatgcgagatgtaaaaaagtcttcgccggccgcgcgggggataggaacgttcttaggccaccaacccccggtaaccttcagcatccgagccgaagactcacggagctcgggcgaagacatccttcccccgggggtcgtgcatgtccccatcaactccatagcaaaactatcggaaaccccaagtcctcccttcgcagtacctagcttcctcctcttggaggatggggcggccgccggcgcggagtcgtcttcagtctccgccgccggttttttcccgcggcggtcgacaacgtcttgcccgggataaccgccatacggcagacggttcaactcgaagaccctattcaagcgatcgttggatccgcgtatatcccaactacgctgggcctccgtctttgacacatagcgaccaacaatccgcacctcctccgccacttcaaactgtgggtacgccgagtaataatgcgagcacatctcggccacggggagcaccggatggtcttcgattgtgccctcggcgatgtagaaccaaaactcccaccagttgccccatttattgcgggcgcagggaatcaactcaatgacttccatcgaagtcttgccggtcttcgacgtaaatgtacaggacccaaattgagcaatcttattttcgatcatccttttatgccaatgcagacaataatacttcgcgaagacttcgatcgatggctgcccaccgtacgaagtcgttgcccagacatattttgacagggccaccatggcattcggcgtcagctggtggacctggacgttgaatctacgcagaacttctcccacgaatcgatgcgcgggcagacgaaggctagcggcaaagaaagcctcgaagacaaccaactcgccttctggctcggggacctcctccgcccccgggacacgtgccactccgccgccaaaataaccaagttgttgcatgtcttgcacgcggaccgaggacatccgcgacacgccgaactccactgtgtcgccggcgcgcaactcctccgccgccacattgctcagcgtctcctcagatgacgcgtcggtcggcagtgtagcggcagcagaagaggaagaggacgacat

SEQ ID NO: 172921 - DNA, 3018 bp, Zea mays
  Clone ID: MRT4577_89285C.1
tcacgtcggttcaaccttcggaatgattcccatctccctatagttaaatagcattatcctcagctcctcaccctcaaaaagacttcgcagctccccctcacctacactatcggcggccggcaaggacaacagttcctgcctgccaaccctgcccacacgaagccgaccgccgcccgcctcactcactctacacttcgcaaccgcccttcgccgcctacgcccagcacttggaccaggcacaacttcagcatccgcagcacgcggcgaagcctccgccgctgccacatccaaggccgcaaagtaatccaagtcctcatctgacgactcctcagtccactcaaccgaactcctagagtcaccaaaatcagaaaacttagacgcagattcatccgattcattcccatcatccacggtcgaagccgccaaaaaattagcagtagcggttgcgtgcgcaggcccaaaatcttgaacctgcgaagacccagccaccgcgggatcctccgctgccggctccgccgccgtcttcacaggatcctcagccctcggcgtagcggttggcgacgagcgaccgccggccgcagtggctgcgggggcatcaggggcgccttcgacggtttctgggggcagcaccggagcgacctcgggcccagccgccaccgggttcgactccgcctcaggccgcacgccgttcaaagccccgaagtcatccactttctcgtcacgtgccgcctgacccctcgctgtgtcggaccgctccctgaccacctcccgaccgtgggggccccacatccggtcaaagagggctcccgcggattccttcaccacagggtcctcaaccttgtaaatctcgtgttcgaaatcctcatcagatcggtcgaagacctcatagtgatggcacccttcgcgggacagcgcgttcatcgccccttcgcaggtgaccagggtggcataggacataaatccctccacaatggtcgggagcgccagcaactcctcttgcagccagtcgaagccctcgaccctctccacgtgggcctgcagagcgttaaaccgctcctcccactcctcggcgcattgcctggcgaggctaccctccacccgcgccacattggcctccgcctgcgcagactgcgccttggcgagggcctgattggcttccctcctctcctccgccatctggcgccagagctcagtcctctcgccctccagcacggccaccttctccgccaatttgcggcacttgctatcggcggccaactgacttagccgctgcgacgcctccttcagccggcgggacacagcgcccgcctcgtccttgacggcagcgagcgccgaaatctcaccgccagcgctgagagcgccacccttcgccacaggcactgtggcagacaccgttgtcgccatcgcaggtggaacaacaactagttgcccttcgcccgatccagtgagataatcatctacactaatatcagtgccgaaatcggcaatgcgctttcccggcggaggcaattctcgggccttcgtggcttcggccgaggtagacttggctccgccggcgccagctgccttcacgacatccggcaccttgctggacccagggccgatcgacttcgccgccagcgtcggctggctaccgccgggggcggcagccttcgcggtcccccgcgccctcttcggcctagcctcgggcaacctgacgaccgcccggcgcttttgcgcagcttcctgacaatccttatccatcactgctgacacaacaccagcaatattgcgtccataagaaaacactctgaagtcacgaaccatgcaagatgtaaaaaagtcttcgccgaccgcgcgggggatcggaacgttcttaggccaccaacccccggtaaccttcagcatccgcgccgaagactcccagagctcgagcgaagacatcctccccccgggggccgcgcatgtccccatcaactccatagcaaagctatcggagacccccagtcctcccatagaagtacctagcttcctcttcttagaggatggggcggccgctggcgcggggtcgtctccggtctctgccgccggtttcttcccgcgacggtcgacatcgtcctgcccgggataactgccatacggcagacgattcaactcgaagaccctgttcaagcgatcgttggacccgcgaatatcccaactacgctggccctccgtccttggcacataccgaccaacgatccgcactgccccatcctccgcctcacgcacgaatgtggcgggatcgcggctatgcaaatccagtgcgaaggcaggacttcgcaccagcatcccaccatgggaaggcatttggcgagggcatacttcgcccagcgcccagccatgcgccaagggccacaccccatacgcaacaaattcctcaaccagatcccgcccgctactcaggccggccgcgcatcgcagagccccttcgtctgcatcctcctccgccacttcaaactgcgggtatgctgagtaataatgcgagcacatctcggccacggggagcctcggatggtcttcgactgtgccctcggcaacgtagaaccaaaactcccaccagttgccccatttgttgcgggcgcaaggaaccaactcaacgacttccatcgaagtcttgccggtcttcggcgtaaatgtacaggacccaaattgggcaatcttatctccgatcatccttttcacggcattcggcgtcagctggacttctccaacgaatcgatgcgcgggcagacgaagaccagcggcgaagaacgcctcgaagacaaccaactcgccttctggctcggggacctcctccgcccccgggacacgagccactccgccgccaaaataactaagtcgttgcatgtcttgcatgcgaaccgaggacatccgcgatgcgccgaaatccaccgtgtcgccggcgcgcaactcctccgccgccacggtgcttagtgtctcctcagacgacgcgtcggccagcggcgtagcggcagcagaagaagaagaggacgacat

SEQ ID NO: 172922 - DNA, 3018 bp, Zea mays
  Clone ID: MRT4577_89286C.1
atgccgacctcctcttcttccgctgctgctacgccgccggccgacgcctcgtctgaggagacgctgagtagtttgatggcggaggagttgcgcgccggcgattctgtggattttggcgtgtcgcggatgtcgtcggtccgcgtgcaagatatgcagcggctgggttacttcggcggcggagttgctcgtgtcccggggacagaggaagtccccgagccggagggcgagttggttgtgttcgaggcgttcttcgccgccggtctccgcctgcctgcgcaccgatttgttggcgaagtcctgcgcaggtttaacgttcagatacatcagctgacaccgaacgccgtgaagaggatgattggagatgaagtcgctcagtttgggtcctgcacgtttacgccgaagaccagcaagaccacgatgcaggtagtcgagttggttccttgcgcccgcaacaagtggggcaactggaatgagttttggttttacatcgctgagggtaccgtcgaaggccatgagggactccccgtgtctgagatgtgttctcatttttactcagcatacccgccctttgaggtggcggaggaggatgcggacgaaggggcccttcggtgcgccgtcggcctgagcagtgggcacgatttggttgaagaatttgtggcgtacggggtatggcccttggcgcatggctgggcgttgggcgaagtgtgccctcgccagatgccttcctatggtgggaagatggtgcgaagtcctgccttcgcgctgaatctgcaaagccgcgatccggccgcctttgtgcgtgaggcggaggatggggcggtgcggctcgttggtcggtacgtgcctaggatggagggccagcgtagctgggatatccgcgggtcgaatgaccgtttgaacagggtttttgaattgaatcaactgtcgtatgacggctaccccggccaagacgatgtggaccgccgtgggaagaagccggtggtggagactggagacgaccctgcgccggcggccgccccatcctctaaaaagaggaaattaggtactgctatgggaggacttggggtttccgatggttttgctagagagttgatgaggacttgcgcggccccggggggaaggatgtcttcgcccgagctccgggagtcttcggcgcggatgctgagggttaccgggggttggtggcctaggaatgttcctatctcccgcgcggccggcgaagacttttttacatctcgcatggttcgtgaatggaaagtgtttccttacgggcggaatattgctgctgttgtgtcggcagtgatggacaaggatcgccagggagctgcacaaaagcgccaggcggttgtcaggcttcatgaagccaggccaaagaggcagcggggggctgcgaaggctgcggcccctggcggaggcaagccgccgctggcggcgaagtcgggcgtccctgcatctagcaaggcgccggtggttccaaatcgacgaaggctgtgccgccgtccagcagggtgccggaggccgcgaaggcggcccgagtgttgccgtcgtcgggcaagcgcgtcgccgacttcgccaccgatattagtgtggacgactatcttggtgcttgctattgttgcgcctgccgctgcgaccatggcggctgccgcagtgccgaaggcgaagggcggtgctcttagtgccggaggcgagatgtcgacactcgcggctgtcagggatgaggcgggcgctgtgtcccaccggctgaaggaggtgacggaggcactaagtcaggtggctgacttcgccgaccacacagcgtcgggggccctcacggcagttgtgtctgccgaagtcgagagacttcggacgcaacatgctgacgccgtccgtgaaaaatcggccgccgacagcaagtgccgcaagctggcggacaagaggagggagaccaatgaggccctcgccaaggcgcaggctgcgcaggcggaggccaatgtggcgcgggcggagggcaatcttgccagggagcgcgccgagcagctgcaggagcggctcatcgccttggagagccgcatggagagggccgaggccgcgacgcgcgcggaggccgagcggacgtgcaaacagcttatggattcgtaccatgagctgggcgcgcggaccggtgacttcgaagtgccggaccgagagcccggacttcgctgcctggagtgggtacaggaggagctgcaggcactccccactatcgtggaggggtttatgtcgtatgcctccctggtcacctgcgagggagcgatgaacgcgctctcccgcgaagggtgccggcacttcgaggtcttcgaccaagccgatgaagactttgagcgagatatttacaaggttgaggaccccatagtgaaggaatccgccagagccatctatgaccggatgtggggtccgcacggtcgcgaggtggttagggagcgggccgagacggcgagggctcaggcggcgcgtggcgagagggtggatgacttcggggcgttgaacagcacgctgcctgacccggagccgatcccggcggaggccgtgtccggggccgccctggagccgcccctggagactacggaaggtgctccggatgcccccgcatccgctgcggccggtggagacctgcccccagagatcgccaaaggcgcgcctgatgcccccgcagccgctgcgccgagggctgaagatcctgcgacggtggcggcggaggcgacggcggaggctcccgcagtggctgagtcttcgcaggttcaagattttgggcctgcgcacgcaaccgccactactaattttttggcggcttcgaccgtggatggtggtaataaatgcgatgggtctgcatctgagttttctgattttgctgactctgggagctcggttgagtggactgaggagtcgtcggaggacttggactactttgtggccttggatgtggcagcggcggaggcttcaccgcatgctgcggacacagaagatgtgcctggtccgagcaccgggcgccggcggtga

SEQ ID NO: 172923 - DNA, 701 bp, Zea mays
  unsure (1)..(701): unsure at all n locations
  Clone ID: MRT4577_89287C.1
cggacgcgtggggcagtgcaggtcgctttaattcggcacgaggtgaaccccgaaccctagctctgctcctcagttccccgtctccatggacatcggcggcagcggcggcatcatattgtcgcccggatcggaggatgataagtttgcgcggaggcgctcccgccgtgtgagcttcgcggacaccaccgcggtgcacgtgttcgaccgcgacgaggacttcgagacgcctcccgaggagcgcgagcccgactccacccccgcacccccttctcccaggaggtcctcggttggccgggaggttgaggacgacacggaggaggatttcaaccgcccccctgtcatcttcctccacgacgtcgactcgtcgtacccagacagcgccgctgaatccatcgcctccgccgatgatgaaaacttttttggacctgtgtcggcaagctttattcaaacaggaagaccatcagattctggaatgtcagaggatgacaaccatgatataactatggattccaggacgttctctttgcattttcgcaatattgctccaccagatgactgtacagcctactcagctgggagtctaatgacacctaatactgcatctganggacccctgaaggaacttactgcatctaatcctgncagagcatcaattaatggccgagatacattgactgacatgagtttgntgagtggaaccc

SEQ ID NO: 172924 - DNA, 583 bp, Zea mays
  Clone ID: MRT4577_89288C.1
tttttttttttttttttttttttttttttttttttttttttttttttttttttttttttttttttttttttttttttggactaaagagcacatgcatttttaccagggggacaacaaaaattggtaaaattaaaacaaaaaaacctgaatccagaggggggggattaaaaagctaaacgaaaaccaaaaccgccaaaaaaaagggccctaaaagggaaaaaaaaaaaggaggggatcgcactattaaatttccttgggaaaaagaaaccccgtaacaaacccaaaaaaggtgatttttgggaccctaaaacccaaccacccccagggttggggaaactgaaggggcaaacctttggctttaaaaaaaaataaaaaagccttgggtggaaaactttggctagggaaaaaaaaacctgctccaaaataagggtcggtttcgcactcgtttaaaaaaaatgaggccaaactaaaaaaaaagagcccgcccttttagaaaggggcaaaacccgtttggtttaaaccaagacagctttggggcccaccaaaaattattaaaaatgggggaaagagggtggtcataagt

SEQ ID NO: 172925 - DNA, 258 bp, Zea mays
  Clone ID: MRT4577_89289C.1
ataacgcacattagagataggccaggaattatggaattgcatgagcactggcacaaccatataaccaggattaacacaggggcccaagacaataaactggacggaccaccgggcacgaatacctgggcacaaattacaatatgggcgtggctgaccttatgagctcaaaactggaaaaacatcaacagcgccaaagcttggaaaagacggctgcagcttattaaccgattaacggatcctgacgaactctaggaaccc

SEQ ID NO: 172926 - DNA, 1114 bp, Zea mays
  Clone ID: MRT4577_8928C.1
ggggccgtggcctcgccccaaactaatcctacggcccacgtaaccagtcagtcctctctccccccggcttccgctgctcttctttctttcctggcatcttggagacggcggcgagacgaggagaggactggaccatggctgcctcttcggctctcaggctaatcctgggctcctcgtcggcgtcgcgtcgccagattctgtccgagatgggatacaaattcacgcttcttagtgcggatatcgatgagaaagcgatcagaaaggagaacccagaggaactggtggtcgccttggctcatgcgaaagcagacgctattctggagaagatgcagaacaatgggatgatgaaagagattcttgattctcaagatactactctgatgataactgctgaccaggttgtgttgcatgatggagtgattagagaaaaacctagcacaccagaagaggcacggaaattcatcaaagggtactctgaaagccatgctgcgacgattggatctgtgcttgttacaaatgtgaagactggagctagaagggaaggatgggataaagcagaagtttatttccacaaaattcctgacgaagttgtggagagtttgatcgaggagggcgatgtgttctatgtcgctggtggtctccttgtggagcaccccttaacttcacctctcgtggaagccattgttggtacaattgatagtgtaatggggctccctaaggcgctcacggagaagctcatcaaggaatccctttcagagacatagctacaatcctatggactgaactgacctgtaatgcagaaatcatattggtggcggactggcggtggctaaatcagtttggcagcaatgtagtgtgagaatcatgtaaccattcctattttccaacaaaaaaggccgtcatgtgatcagcccactatgaacggaattcatccttggcttccatgaccataggtctgctgaatcattcgttttgttttctgtaatgtgttcggccgcaaggatttttaacgcctggcagattgcttgatttgatctatgaattcgtgctaggtgctctgtggtatgtactgtctgccttgctttgttatatagagaggtgttaatggatcacg

SEQ ID NO: 172927 - DNA, 2916 bp, Zea mays
  Clone ID: MRT4577_89290C.1
atgccgacctcttcttcttctgctgccgctacgccgccggccgacgcgtcgtctgaggaaacgctgagtactgtggcagcggagttgcgcgccggcgatacggtggattttggtgtgtcgcggatgtcgtcggtccgcgtgcaagatatgcagcggctgggttactttggcagcggagtcactcgtgtcccggggacggaggaagcccccgagccggagggcgagttgatccatcagctgactccgaatgccgtggtggctctgtcgaagtatgtctgggcgacgacttcgtacggcggacagccatcagtcgaagtcttcgcaaagtactattgcctgcactggcagaagaggatgattggagatgaagttgcccagtttgggtcctgtacatttatgccaaagaccggcaagaccacgatggaggtagttgagttggttccttgcgcccgcaacaagtggggcaattggcatgagttttggttttacgtcgcggagggtacagtcgaagaccatccggggctccccgtgtccgagatgtgctcgcatttttactcagcatacccgccttttgaagtggtggaggaggatgcggacgaaggggcccttcggtgcgccgccggcctgagcagcgggcgcgatttggttgaggaatttgtggcgtacggggtatggcctttggcgcatggctgggcgttgggcgaagtgtgccctcgccagatgccttcccatggtgggaagctggtgcgaagtcctgccttcgcgcttgatctgcatagccgtgatccggccgcctttgtgcgtgaggcggaggatggggcggtgcggatcgttggtcgttacgtgccgaggacagagggccagcgtagctgggatattcgcgggtcgaatgaccgcttgaacagggtttttgagttgaatcgtctgtcgtatggcggttatcccgaccaagacgatgtggatcgtcgcgggaagaaaccggtggtagagtctggagacgacctcgcgccggtggccgccccgtcctctaagaagaggaaactaggtactgctatgggaggacttggggtttccgatggttttgctagagaattgatgaggacatgcgcggcctcggggggaaggatgtcttcgcccgagctccgggagtcttcggcgcggatgctgagggttaccggggtgatggacaaggatcgccagggagctgcacagaagcgtcaggcggtcatcaggcttcatgaagccaggctgaagaggcagcggggggttgcgaaggctactgcccccggcggaggccagccgccgctggcggcgaagtcggtcgtccctgcatccagccgggcgccggaggctgcggctgccgccggtggttccaagtctgcgaaggctgcaccggcgtccagtagggtgccggaggccgcgaaggcggcccgagagttgccgccgccgggcaagcgcgtcgccgacttcgccaccgacattagtgtggacgattatcttgttggccaacttgttgttgtttcgactgccgcggcgaccacggcggctgccgtggtgccaagggcgaagggcggtgctcttagtgccggcggcgagatgccggcactcactgtcgtcagggacgaggcgggtgctgtgtcccgccggctgaaggagatgaaggaggcactgtgtcaggcggctgacttcgcagaccgcgcggcgtcgggggccctgacggtagttgtgtctgccgaagtcgagagacttcggacgcaacatgctgacgccgtccgggagaagtcggccgccgacagtaagtgctgcaagctggcggacaaggtggtcgtgctggagggggagaagactgacctccggcgccaactggcggaggagaggaaggaggccaatgaggccctcgccaaggcgcaggctgcgcagatggaggccaatttggtgcgggtggagggcagtcttgccagggagcgcgccgagcagttggaggagcggctcagcgctctgcagagccgtgtggagagggccgaggccgcgacgcgcacggaggctgagcggacacgcaaacaacttatggattcataccatgagctgggcacgcggaccgctgacttcgaagtgccggaccgagagcccggacttcgctgcctggagtgggtacaggaggagttgcaggcgctccccaccatcgtggaggggtttatgtcttatgcctccctggtcacctgcgagggggcgatgaacgcgctctctcgtgaagggtgccggcactatgaggtcttcgaccaagctcatgaggatttcgagcgtgatatctacaaggttgaggaccctatagtgaaggaatccgtcggagccctctacgaccggatgtggggcccctacgatcgagaggtggtcagggagcgggccgagacggcgaggggtcaggcggcgcgtggcgagagggtggatgactttggggctttgaacagcgtgctgcctgacccggagccgaacccgacggaggctgtgcccgaggccgccctgcagccgcctccggaaaccgccgaaggcgctcctgatgcccctgcagccactgcggccggcggaggcccgtcgccaactgccacgccgagggctgaggatcctgtgaaggttcaagattttgggcctgcgcacgcaaccgctactctaatttttttggcggcttcgaccgtggatgatggtaataaatcggatgggtctgcatctaagctttctgattttggtgactctgggagctcggttgagtggactaaggagtcgtcggatgaggacttggactactttgcggccttggatgtggcagcagcggaggcttcgccgcacgctgcggatgctgaagttgtgcctggtccgagtactgggcgtaggcggcgaagggcggttgcgaagcgtaga

SEQ ID NO: 172928 - DNA, 1820 bp, Zea mays
  Clone ID: MRT4577_89291C.1
agaaaatcactactatatatcaatatgatcaagctagaaaatcattgtccagatcatacagatacagatgacaactttattcctaaaccctgatgaatgatggtttgtatacaggcctggtgcagggaagatgacgccaatgctatgcagcttattattagaaataacacaggtgtttgtttttgcctttttggcacgggctgacttgattcctccaaacgctaacaagtcactccagcgacagcgtagccattgtcaaggctaggaccttcaccccattcgccatgtcctcgggtgatgcatactcctccggcttgtggctgtaacctttgtaacagggaatgaagatcatacccattggtgatactctggccatgaagagtgaatcgtggtaggctctgctaatcatctttttgtatgccaggtttaactgttttgcagcaaattccattgcgtcaacgactgatttgtcagatagagcaggtgggtcctggttgatgatcttaaattctgaaagctctactccacggttctttgaaatatgtgctgcagactggcgaatcttctcaatgacatcattccttctcttctcatcaatatctcttacatcaatttctaggtgtgatttgcttgggatgctattgattgctcctggatgtaactgcagaataccaacggtgccaaccgtatcaattgatcctgattccaggacatgtttctcgactgctaatgctaattcagctgctgccagtccagcatcatttcttgcaggcatcagcactgctccagcatgaccgccattcccttcaaagtccaccttaagacttgcaggagcagcaattgcagtaacaatgccaatagggataccctccttttctaagatgggaccctgctcaatgtgcagttctataaaagcagagtatttgtctgtctttaaaaatacgctatgcaggtcctctagattcaacttatagccagcagattctgcagcatccaaaaatgacacattctgattgtcaactacttttcggagggattgagcaagttcttcaatccctgccattaagcggcttcccaagcagctaattccaaatcgtgtaggctcctctgatgtaaacataataacctccaaagatctttttggcaggaaagcagaccttttcagcaaactaattgcctcaagagcacccagaactccaacaacaccatcaaatttgcctgagaatggaatggcatcaacatgagatccagttgcaactgctcctagtccaggctcggaaccctcccagcggccaaatatgttaccaacagcatcttctcgaacaacaaggccaagttgattcattatcccttttatataccttcgagcctgcacatccttgtcggtgtacagaacgcgggtcacggacggcgcgggcgagtcggagaacgaggccagttcatcgatctgacgctggaggccctcggagtcgacgtggaagtcgctggaagggccctcgccgtcgtcggaggcggggaagccggcgaactgctccatcgtccgccgcgccgcggcgtcatcgttggccgcggcggcgctgatgacgaggaggaaagcgaggaagacgaggcgcgacgcggcgttcggcttcgacggcatgcttcgttgttcggctggctgctctgctgggttcgatggaacagggagggctacttgcctacttcgggaggctagggagatttgaacggcgggcgggggaggtgggagttgggacttgggagtgggagacaacgcgacggcactactgctgttgctgttggtggtgacctgcctgctgcgt

SEQ ID NO: 172929 - DNA, 256 bp, Zea mays
  Clone ID: MRT4577_89292C.1
gctgcctgtgctttctttctcttcctgttattactacctctctagtctgtacttgtttatttattttatttatgtttcttctgttttgtttatttattttattattagggttccatattgccatttgtacacagtttttctctcttcttattattgactacgattactctgattagtgtatatattgtttccatcagatgaaggcttgataatcgctctcaagtctcaagttaaatcgacaaaaaaataaaataaa

SEQ ID NO: 172930 - DNA, 202 bp, Zea mays
  unsure (1)..(202): unsure at all n locations
  Clone ID: MRT4577_89294C.1
gcgtttcggccgntggggcgntgatgatctatgtcgtaggtggcgtgttcagtttcattccacctgctcaaactgtcgtgctgtggcttgtgctgctccacctgtccgttgtggtgtgttttttgctcttggctcagtgccggttggcgtttccttctcggttggttggctggttggttttttttggtggttttgtgtttgg

SEQ ID NO: 172931 - DNA, 537 bp, Zea mays
  Clone ID: MRT4577_89295C.1
cctgctcgcgctcggcctcgggtttggcgccgtgctgggcagcgccatcgtcggggtcatcgacgcggggacccggagcggcggcagccacgacggctggctgccgagcaacctgaacagggggcactacgactactactacttggtactggcggtgctatgcgccgccaacgtgctgtacttcgcagtgtgtggctgggcatacggcgacgaggggcaaaaccgggtggtggccgccgacgccgcggtggacgacgtcgacgacaaggaggaggagcaaaaggcggtaatcatctaggcttaggccacggtggactttgagcagagcactaggaacagtatagcgttgatctgggatgatctcttgctctagtgtgtacctcgtacatatgctaatcaatatggtgacatttcaagagtagataatcttgaaatgttaatatggacagtaagtactgtcgtgtagcgtgtcaaaaatgccgcatgcattctctcttccgaattaggaggtagagagaacttcagtgcccccccccc

SEQ ID NO: 172932 - DNA, 232 bp, Zea mays
  Clone ID: MRT4577_89296C.1
tctgattcaatacttaatttactaaattaagcaatcgatttaactgttgattttcttaattaataatagttgaacttgattagtgtcgatttggaatctagaacattcacaacaacaacaagatcaagaagaacaatggcaggtctcattccagaagaaactcacggtttttcgtttcacaattatgaacgaaacgaacatttgaacggtttgggatatccggttccgaagt

SEQ ID NO: 172933 - DNA, 492 bp, Zea mays
  Clone ID: MRT4577_89297C.1
cccgctgggcgcgcctgcctgggcaccggacattatccggtgcacactgtacagtccggtgtaccacaggctggtgcaaatctgtttgctctaacgttgtagaattgccccaaggtctttttccttgtatgtgtatatgaactttgtgcacctgagaaaagaacaactaggcaaactagttagtccataaggtttgtgatggtcgtcaaacactaaaatcgattatagtaaatatttgaggtcattttttgttcaaggtacgaaagtattatttttgaagcatcgtttgagtaccttcaaaactttcataaaactggtctctagtttcatttttttttttaaaaaaactagagctcgtgaagctcctgtttagatagaaaaagctataactaagctgaatttttttgaagtgaagccatgtcaaacatagtccttacttctaaaaatataagtctatggttgaaagtaattgctttgactttttaggataac

SEQ ID NO: 172934 - DNA, 460 bp, Zea mays
  Clone ID: MRT4577_89298C.1
aaacacttaaaacaaaaagggaatccaacaaaaaaaggggggtccggggtcacacaaaggacaaaggggcattgggaaaaaccctagaggcatatccggacctgcaacaagaatggcaaatcaaatgaaataggggaagagggggtagccgaaaagcccaatccggggaggagcctttaaaaactttggattggggggggcaaaaggggacccaaatccggggaggggcctttaaaactttgcattgggggggggaaaagggaaccccgctgggcacccatggggagaggggaaaaaaaggaagggggccgttaaagggcatttggagccgggggggacctcccaaccgaagttgacaagcacccccagggcgaggggcacgtaaacggagatgtccagcaccttggccttggggggggggcaaaggcaccccgccgggggaaagcccggggaggccctt

SEQ ID NO: 172935 - DNA, 2058 bp, Zea mays
  Clone ID: MRT4577_89299C.1
ggaagaacacttttacaaagaaacaattgggggggccaggctattaccaaatgaagagtcgagttcaacaccattcacaccttcgctgattggatcggttggaattctgtatcatctgaaggagtagcaaatcagctggaaccttcttctaactttgatgaggctcctggttcacccgtctgtggtataatgaaaggggaacacaaaaaaactcatagtcgagatctgtccgcagttgcctaactgccacaactcgaggccggccgggttttcgcttactttccttaatgcctcgaggccggccggagaacagaggttattcgttttggctacccgttttgaagacgatgatgagtccggcgtcggagcgcagcctcatcatccagagcgacgacgacgacgacgcccgatccggccacgacgtggaggagccggagccagagcaggagcaggactccgactcctcgtcgtcgtcctcatcctgcgccaccccacgccgcggcccaagctcacccccctacatccagcaatggccgcagagttacaggcaatcgatcgacattctcagcagcgtgcagtcacccaacctgagctttctggggactccaactctgagcaggctgtcgaactcattcctcgccatcaccgattctttccggagcaaggcccccgaaacgatctctagctttatcaagccactccttggccccacgccaagtgacgatcagcagcggcagcatgaaggcacccgaaagagttccgagtaccttgtgccctcgagaagatcatctctgcagcagatcccagaggatcaaaagccacctgtaggtggccatggggcgtctcatgaccagaactgctcttacacccagggagtgatgaatggaataaatgttctatgtggtgtggggatcctatcaacaccttatgccatcaaacaggggggctggattgggctggcgatactctgtatatttgctcttctcgcatggtacacaggtgtgctcctgcgccattgcctggacagcaaggagggcctcaagacatacccagatattggccatgcagcctttggcagcacaggccgcatagttatctcgataatactgtacgtggagttgtatgcatgttgcatcgagtatttgatattggagggtgacaatttgtcaaaattattccccaatgctcacctgaccattgggagcatgacactgaactcacatgtattcctgaagaatcgcaaccagtttccttcattctttttacttgtattgggctgtctacctttttgtatgctggtgctgcagtgatgggatacaaaatgtttggtgaagccacagagtcccaattcacactcaacttaccagataattctgtcatttctaagattgctgtttggacaacggtggcaaatccaataaccaaatatgcattaactattattccattggctatgagtttggaagagctgctgccaccaaaccaacaaaagtattctacaataatcatgcttagatcatctctggtgatatcaaccctcctgattgctctatctgtgcctttctttggacttgtgatggccttggttggttctttgtttgccatgcttgtgacctacattttgccttgcgcgtgttttttggcgatcctcaagacaaaagtggggtggcatcagatagcagcttgctcgttcatcatagttgtcggggtttgctgtgcctacgtgggaacatactcgtccctgtcgaagataatccagaactacgcatagcacagctgttcctgtgatcctgtatatgcatctgcccgacaaaatcatgtgtgtgctatatgggccgaacatatgtacaagatgaaagtttaccattcaattcactcgatgtataataaattattggtgccttatcatagggctcaatgatttctactacgattttaaggttgtatggtgcgtgagtaacattgttccttatggtgagaaaaaaagttgatttggtcttcttctagcaaaaaaaaaaaaaaaaaaaacggcaaaaaacaaaaaaaaaaaaaacaccc

SEQ ID NO: 172936 - DNA, 119 bp, Zea mays
  Clone ID: MRT4577_8929C.1
ccggccgggagtcacaggaagaacgaagagagatcagcgatttaacacaataatggccaccgacatagttcccacgaacgacgaagtgatgatttttcatgggttgagggggagacgga

SEQ ID NO: 172937 - DNA, 328 bp, Zea mays
  Clone ID: MRT4577_892C.1
aagaaaaaaaaatataaaaaaaaaaattttttttttaacaaacaaacataaaaaaaagggatagtataaaaaataagcttgggaaccaatcaatatatataaaataactatatatgcatgacagttaaaaatatacatacttcctttaaaaatattagccaatactatttgcctatggtgaactaatcaatccttaatgactgcccccatgtacaaaaccagatcaagattctagctcttccggttgaaattactccttatgtgctgtaagtttacccttgacattatattttccaacttaaatgcagcatgatttattcttttaata

SEQ ID NO: 172938 - DNA, 1312 bp, Zea mays
  Clone ID: MRT4577_89300C.1
ttgggaccctcgaggccggccggggcaaggcccccgaaacgatctctagctttatcaagccactccttggccccacgccaagtgacgatcagcagcggcagcatgaaggcacccgaaagagttccgagtaccttgtgccctcgagaagatcatctctgcagcagatcccagaggatcaaaagccacctgtaggtggccatggggcgtctcatgaccagaactgctcttacacccagggagtgatgaatggaataaatgttctatgtggtgtggggatcctatcaacaccttatgccatcaaacaggggggctggattgggctggcgatactctgtatatatgctcttctcgcatggtacacaggtgtgctcctgcgccattgcctggacagcaaggagggcctcaagacatacccagatattggccatgcagcctttggcagcacaggccgcatagttatctcgataatactgtacgtggagttgtattcatgccaaccacctggctccgtgacctgagctggctgagctacatttcagctgggggtgtcattgcatcaatccttgtggtcatctgcctgttcttggttggggttgtcaatgatgtcggctttgagaatgaagggactgcactgaacgccccaggaattcctattgcaattggattatatggttactgctactcagggcatgggttttttccaaatatctattcttccctgaagaatcgcaaccagtttccttcaattctttttacttgtattgggctgtctacctttttgtatgctggtgctgcagtgatgggatacaaaatgtttggtgaagccacagagtcccaattcacactcaacttaccagataattctgtcatttctaagattgctgtttggacaacggtaattgttgcttgataaaccttttcaaattcctctttcaccccctccgtctcaaattaaatcaacttctaaagttatcctaagtcaaactattttaagtttgatcaaccttatagaaaagaacaccaatatttataacaccaaattagtatcactagatacactgtgaaatatatttcataatatacttatttggtgtcatgtatgtcattataatatcatataaagttggtcaaacctaagatagttgacttagggtgaccctaagaattaatttattttgaaacggaggtagtaagaaaaagggcctgacttgttgtttaaaataataatcaccttttgtgcttctggaggtggaaatccaatacccaatatcttggtgtgcaatgatagtttataaaaaatggacaaatgttt

SEQ ID NO: 172939 - DNA, 1985 bp, Zea mays
  Clone ID: MRT4577_89301C.1
tcgaggccggccgggaagcagaacagaggttattcgttttagctacccgttttgaagagaagccgattttggaggagacgatgatgagtccggcgtcggagcgcagcctcatcatccagagcgacgacgacgacgacgcccgatccggccacgacgtggaggagccggagcaggactccgactcctcctcgtcgtcctcatcctgcgccaccccacgccgcggcccaagctcacccccctacatccagcaatggccgcagagttacaggcaatcgatcgacattctcagcagcgtgcagtcacccaacctgagctttctggggactccaactctgagcaggctgtcgaactcattcctcgccatcaccgattctttccggagcaaggcccccgaaacgatctctagctttatcaagccactccttggccccacgccaagtgacgatcagcagcggcagcatgaaggcacccgaaagagttccgagtaccttgtgccctcgagaagatcatctctgcagcagatcccagaggatcaaaagccacctgtaggtggccatggggcgtctcatgaccagaactgctcttacacccagggagtgatgaatggaataaatgttctatgtggtgtggggatcctatcgacaccttatgccatcaaacaggggggctggattgggctggcgatactctgtacatttgctcttctcgcatggtacacaggtgtgctcctgcgccattgcctggacagcaaggagggcctcaagacatacccagatattggccatgcagcctttggcagcacaggccgcatagttatctcgataatactgtacgtggagttgtatgcatgttgcatcgagtatttgatattggagggtgacaatttgtcaaaattattccccaatgctcacctgaccattgggagcatgacactgaactcacatgtattttttgcaatcttgactaccatcatagtcatgccaaccacctggctccgtgacctgagctggctgagctacatttcagctgggggtgtcattgcatcaatccttgtggtcatctgcctattcttggttggggttgtcaatgatgtcggctttgagaatgaagggactgcactgaacgccccaggaattcctattgcaattggattatatggttactgctactcagggcatggggtttttccaaatatctattcctccctgaagaatcgcaaccagtttccttcaattctttttacttgtattgggctgtctacctttttgtatgctggtgctgcagtgatgggatacaaaatgtttggtgaagccacagagtcccaattcacactcaatttaccagataattctgtcatttctaagattgctgtttggacaacggtggcaaatccaataaccaaatatgcattaactattattccattggctatgagtttggaagagctgctgccaccaaaccaacaaaagtattctacaataatcatgcttagatcatctctggtgatatcaaccctcctgattgctctatctgtgcctttctttggacttgtgatggccttggttggttctttgtttgccatgcttgtgacctacattttgccttgcgcgtgttttttggcgatcctcaagacaaaagtggggtggcatcagatagcagcttgctcgttcatcatagttgtcagggtttgctgtgcctacgtgggaacatactcgtccctgtcgaagataatccagaactacgcatagcacagctgttcctgtgatcctgtatatgcatctgcccgacaaaatcatgtgtgcgctatttgggccaaacatatgtacaagatgaaaagtttaccattcaattcactcgatgtataataaattattggtgccttatcatagggctcaatgatttctactacgattttaaggttgtatggtgcgtaacattgttccttatggtgagaaaaaaagttgatttggtgttcttcttctagc

SEQ ID NO: 172940 - DNA, 331 bp, Zea mays
  Clone ID: MRT4577_89302C.1
gggatccccacaagccttacttttcctcttgctatgacactccggcaacgttctccctgattggggtacgacctcctctttcctcttctatccaatcacactcctcgggttcgtctcacaacctacacctacggacactccagctgtacacatccccttagaagcgctctagctccttacatctccgatactacagacccatgaaccagggttcaagaactaaggaatgaggaaagcatattgcctccccatgccgaatctcatcatcgcatcgatggcctacagatcggaagacgacttctactacatcttcaaagttcatcttatggga

SEQ ID NO: 172941 - DNA, 355 bp, Zea mays
  Clone ID: MRT4577_89303C.1
gggggttggttgttttaaatctccctttttgatccacgggggacctcaaaaaaaacaaaccaaaaacttgggaccacccgggaatcgcggaggggacccagagagcaaaccaacaccccctcaaggggcccaaaaaaaaactgggggaaaaaagggccaaaccggatccctgggggaaaagggttcccgggagaaatgccctaaaaaaacaagccgaaaacaaaaaggggaaagccgggggggcgaaaagggggaccaaactaacaataaaggggagacgactaaggcccggtgtccacccgaaaaaccacacgggccccctggataaatgaaccccccaacccccgggaaaagg

SEQ ID NO: 172942 - DNA, 2853 bp, Zea mays
  Clone ID: MRT4577_89304C.1
atgtcgacctcttcttcttctgctgccgctacgccgctggccgacgcgtcgtctaaggagacgctgagcactgtggcggcggaggagttgcacgccggcgatacggtggatttcggtgtgtcgcggatgtcctcggtccacgtgcaagatatgcagcggcttggttactttggcggcggagtctctcgtgtctcggggacggaggaggtccccgagtcggaaggcgagttggttgtgttcgaggcgttctttgccgctggtcttcgcctgcctgcgcaccgatttgtgagagaagtcctgcgcagatttaacgttcagatccatcagctgactccgaatgttgtggtggctctgtcgaagtatgtctgggcgacgacttcgtacggcggacagccatcagtcgaagtcttcgcgaagtactattgcctgcactggcagaagaggatgatcgaaaatgaagttgcccagtttgggtcctgtacatttacgccgaagaccggcaagacctcgatggaggtagttgagttggttccttgcgcccgcaacaagtggggcaactggcatgagttttggttctacgtcgtggagagcacagtcgaagaccatccggggctccccgtggccgagatgtgctcgcattattactcagcatacccgccgtttgaagtggcggaggaggatgcggacgaaggggcccttcgggttttcgagttgaaccgtctgccgtatggcggttatcccggccaaaacgatgtggatcatcgcgggaagaaaccggtggtagagactggagacgaccccgcgccggcggccgctccgtcctctaagaagaggaaattaggtattgctatgggaggactgggggtttctgatggttttgctagggaattgatgaggacatgcgcggccccggggggaaggatgtcttcgcccgagctccgggagtcttcggcgcggatgctgagggttaccgggggttggtggcctaagaatgttcctatcccccgcgcggccggcgaagacttttttacatctcgcatggttcatgattggaaagtgtttccttacgggcggaatattgctgctgttgtgtcggcagtgatggacaaggatcgtcagagagctgcgcagaagcaccaggcggtcgtcaggcttcatgaggccaggccaaagaggccgcggggggctgcgaaggctgctgcccccggtggaagccagccgccgctggcggcgaagtcggccgtccctgcatccagcagggcgccgaaggctgcgaaggcggctgccgccggtggttccaagtctgtgaaggccgcccctgtgtccagcagggtgccggaggctgcgaaggcggcccgagagttgccgccgccgggcaagcgcgtcgccgacttcgccaccgacattagtgtggaagattattttgttgggtcggacgaaggccaacttgttgttgttctgcctgtggtggcgaccgcggtggctgccgtggtgcccagggcgaagggcagtgctcttagtgccggtggcgagataccggcactcactgccgtcagggacgaggcgggtgctgtgtcccaccggctgaaggagctgaaggaggcactaagtcaggcggctgacttcgcagaccgcgcggcgtcgggggccctgacggcagttgtgtctgccgaagtcaagagacttcggacgcaacatgctgacgccgtctgggaaaagtcggccaccgacagcaagtgccgcaagctggcggataaggtggccgcgctggagggtgagaggactgacctccggcgccaactagcggaggaaaggaaggaggctaatgaggccctcgccaaggcgcagtctgcgcaagcggaggccaatttggcgcgggcggagggcagtcttgccaggcagcgcgccgaggagttggaggggcggctcaacgctctgcagacccgtgtggagagggccgaggcttcgacgcgctcggaggttgagcggacacgcaaacagcttatggattcataccatgagctgggcgcgcggaccgctgacttcgaagtgccggaccgagagcccggacttcgctgcctcgagtggatacaggaggagttgctggcgctccccgccatcgtggaggggtttatgtcctatgcctccctggtcacttgcgagggggcgatgaacgcgctctctcgcgaagggtgtcggcactatgaggtcttcgaccaagctgatgaggatttcgagcgcgatatttacaaggttgaggaccctgtggtgaaggaatccgcgggagccctctacgaccggatgtggggcccccacggtcgggaggtggtcagggagcgggccgagacggcgaggggtcagcctgacccggagtcgaacccgctggtggctgcgtccgagaccgccccggagttgcccctggaaaccgtcgaaggcgttcccgatgctcccgcaaccactgcggccagtggaggcccgtcgccaactgccgcgccgagggctgaggatcctgtgaagatggcggcggagccagcagcggaggctcccgcgacggctgggtcttcgcaggttcaagattttgggcctgcgcacgcaaccgctactgctaattttttggcggcttcgaccgtggatgatgggaataaatcggatgagtctgcatctaagttttctgattttggtgactctgggagctcggttgagtggaccgaagagtcgtcggatgaggacttggactactttgtggccttggatgtggcagcggcggaggcttcgccgcctgctgcggatgctggagttgtgcctggttcgagtgctgggcgtaggcggcgaagggcggtcgcaaagcgtaga

SEQ ID NO: 172943 - DNA, 3133 bp, Zea mays
  unsure (1)..(3133): unsure at all n locations
  Clone ID: MRT4577_89305C.1
atgccgacctcctcttcttccgctgccgctacgccgccggccgatgcctcgccaccggccgacgcttcgccgccggccgacgcctcgtctgaggagacgctgagtagtttggtggcggaggagttgtgcgccggcgattctgtggattttggcgtgtcgcggatgtcgtcggtccgcgtgcaagatatgcagaggctgggttactttggcggcggagttgctcgtgtcccggggacggaggaagtccccgagccggaaggcgagttggttgtgttcgaggcgttcttcgccgccggtctccgcctgccggcgcaccgatttgttggcgaagtcctgcgcaggtttaatgttcagatacatcagctgactccaaatgccgtggtggctctgtcgaagtatgtctgggcgacgactttgtatggcggacaaccatcagtcgaagtctttgcgaagtactattgcctgcactggcagaagaggatgattggagatgaagttgccaagtttgggtcctgtacgtttacgctgaagaccggcaagaccacgatgcaggtggtcgagttggttccttgcgcccgcaacaagtggggcaactggaatgaattttggttttacgtcgctgagggtaccgtcgaagaccatgaggggctccccgtgtccgagatgtgttctcatttttactcagcatacccgccctttgaggtggcggaggatgatgcggatgaaggggcccttcggtgcgccgccggcctgagcagtgggtgcgatttggttgaagaatttgtggcgtacggggtatggcccttggcgcatggctgggcgttgggcgaagtgtgccctcgccagatgccttcccatggtgggaagatggtgcgaagtcctgccttcgcgctgaatctgcaaagccgcgatccggccgcctttgtgcgtgaggcggaggatggggcggtgcggctcgttggtcgttacgtgccgaggacagagggccagcgcagctgggatatccgcgggtcgaatgaccgtttgaacagggtttttgaattgaatcaattgccgtatgacggctatcctggccaagacaatgtggaccgccgtgggaagaagccagtggtggagactggagacgtccctgcgccggcggccgccccatcctctaaaaagaggaaattaggtactgctatgggagggcttggggtttccgatggttttgctagagagttgatgaggacatgcgcggccccggggggaaggatgtcttcgcccgagctccgggagtcttcggcgcggatgctgagggttatcgggggttggtggcctaggaatgttcctatcccccacgcggccggcgaagacttttttacatctcgcatggctcgtgaatggagagtttttccttatgggcggaatattgctgttgttgtgtcggcagtgatggacaaggatcgccagggagctgcacaaaagcgccaggcggttgtcaggcttcatgaagccaggccgaagaggcagcggggggctgcgaaggctgcggccctcggcggaggcaagccgccgctggcggcgaagtcgggcgtccctgcatctagcaaggcgccggaggcagcggcaggcaccggtggttccaaatcgacgaaggctgtgccgccgtccagcagggtgccggaggtcgcgaaggcggcccgagtgttgccgtcgtcaggcaagcgcgtcgccgatttcgccaccgatattagtgtggacgactatcttggtgggtcggacgaaggccaacttgctatagttgcgcctgccgcggcgaccacggcggctgccgtagtgccgaaggcgaagggcggggctcttagcgccggaggcgagatgtcggcactcgcggctgtcagggatgaggcgggcgctgtgtcccgccggctgaaggaggtgaaggaggcactaagtcaggcggctgacttcgccgaccgcaaagcgtcgggggccctcacgacagttgtgtctgccgaagtcaagagacttcggacgcaacatgctgacgccgtccgtgaaaaatcggccgccgacagtaagtgccgcaagctggcggacaaggtggtcgcactggagggggagaagactgacctccggtgccaactggcgggggagaggagggagaccaacgaggccctcgccaaggcggagcgtgccgagcagctgcaggagcggctcaccgccctggagagccgtgtggagagggccgaggccgcgacgcgcgcggaggcagagcggatgcgcaaacagcttatggattcataccatgagctgggcgcgcagaccagtgacttcgaagtgccggaccgagagcccggacttcgctgcctggagtgggtgcaagaggagttgcaggcactccccactatcgtggaggggtttatgtcgtatgcctccctggtcacctgcaagggggcgatgaacgcgctctcccgcgaagggtgccggcacttcgaggtcttcgaccaagccgatgaagattttgagcgagatgtctacaaggttgaggaccccatagtgaaggaatccgccggagccatctacgaccggatgtggggtccgcacggtcgcgaggtggtcagggagcgggccgagacggcgagggctcagncggcgcgtggcaagagggtggatgactttggggctttgaacagcgcgctgcctgaccccggagccgaacccggcggcggctgcgtccgaggccgccctggagccgcccccggaaaccgccaaaggcgttcctgatgcccccgcagccgctgcggccggcggaggcccgcccccgtagaccgccgaaggcgttcctgatgcccccgcagccgctgcggccggcggaggcccgtcgccaactgctgcgccgagggctgaggatcctgtgatggtggcggcggagtcgacagcggaggctcccgcgatggctgggtcttcgcaggtggcctagtgggtgtgggtagttaggaaattttggatattgttgctgaaccttggttgctgcgcaggttcaagattttgggcctgcgcacgcaaccgctactgctaatttttggcggcttcgaccgtggatgatgggataatcggatgagttgcaaaaaaaaaaaaaaaaaagggggag

SEQ ID NO: 172944 - DNA, 322 bp, Zea mays
  Clone ID: MRT4577_89306C.1
gaacgggccagcggtgttattaaccgagggttgccttcctaacaacccttttcaatttccttctccggtcaaatcttaaaataagaaattgggggaaaacatacccgcccccaaaactacccatgcccccggggccaaaaataaaaccccccataacaggtttttactttttcccacccccggccaaaagggagcgggtttttgcctaaactaaacttcattaaattatctttttgcccgccttgtcggcaacaggagccatttttttttccaccaaaatttttggggcccccaccaatttgtccaccttgtttttgttttt

SEQ ID NO: 172945 - DNA, 1455 bp, Zea mays
  Clone ID: MRT4577_89307C.1
atggacaaggatcgtcaggaagctgcgcagaagcgtcgggcggtcatcaggctgcccgaggctaggctgaagagggcgcgggggactgcgaaggctgccgcccccggcggtagccagtcgacgctggcggcgaagtcggccgcccctgggtccagcaaggtgccggaggtcatgaaggcagcccgagccggcggaaccaagtctgcctcggccggagccgcgaaggcccgagaattgccttcgccggggaagcgcgttgccgacttcggcaccgatattagtgtggacgattatctcgttggatcgggcgaggggcaacttgttgttgttccgcctgcggtggcaaccacggtgtctgtcgcggtgcctggggcgaagggtagcgctctcagcgctggtggtgagattccggcgctcactgccgtcaaggacgaggcgggcgctgtgtcccgtcggctgaaggaggcgtcgcagtgtgctaagtcagttgtgtctgccgaagtcgagagacttcgggcgcagcatgctgacgtcgtccaggaaaagtcggtcgccgatagcaagtgccgcaagctggcggagaaggtggtcgcgctggagggcgagatgactgacctccggcgccagctggcggaggagaggagggaggctaatcaggccctcgccaaggcgcagtctgcgcaggcggaggccaatttggcgcgggtggagggtagcttcgccagccagcgcgccgaggaatgggaggagcggttcaacgttctgcaggcccgcatggagaaggttgaggcttctacgcgctcggaagttgagcggacgcgcaaacagcttatggactcataccgcgagctgggcgcgcggaccgctgacttcgaagtgcccgaccgagagtcgggccttcgctgcctcgagtggctgcaagaggagttgctggtgctcccgaccattgtggagggttttatgtcttttgcctccctcgtcacctgcgaaggggcgatgaacgcgctgtcccgcgaagggtgtagccactatgaggtcttcgaccgatctgatgaagattttgagcgcgagatttacaaggtcgaggaccctttggtgaaggagtccgcgggggccctctttgaccggatgtggggccctcacggtcgggaggtggttagggagcggtccgaccgggcgagggatcaggcggtgcgtgccgagaccgtggaggacttcggatctttgaacagcgcgcggcccgaagccgaggcgaacccggtggcgtccgaggctgaggtcgtcccggcgccgcccccggaagccggcgaaggctccctcgctgcccctgcggctactgcgtccggcgatggctcgtcgccaaccgctgtgccgaaggctgaggatcccccaaagacggcgacggagccggcagcggaggatcccacgacggctgggccttcgcaggtggcttag

SEQ ID NO: 172946 - DNA, 2562 bp, Zea mays
  Clone ID: MRT4577_89308C.1
atggaaccttatgtgttcttctggtgggcaaagatgcaaattgaaattgcacactatgtggctagatgtgacacttgtaaacgtgtcaaggccatatacatgaagactgttggtccattacaatccttacctatcccaacatggaaaggggaagatattgtatggactttatcatgggattacccaggactacaaaaggcatacccgtcctttgaggtggcggaggaaaatgcggacgaaggggcccttcggtgcgccgccggcctgagcagtgggcgcgatttggttgaagaatttgtggcatacggggtatggcccttggcgcatggctgggcgttgggcgaagtgtgccctcgccagatgccttcatatggtgggaagatggtgcgaagtcctgccttcgcgctgaatctgcaaaaccgcgatccggccgcctttgtgcgtgaggtagaggatgggcagtgcggctcgttggccgacgatgtggaccgccgtgggaagaagccggtggtggagactggagacgaccctgcgccggcggccgccccatcctctaaaaagaggaaattaggtactgctatgggagggcttggggttttcgatggttttgctagagagttgatgaggacttgcgcggccccggggggaaggatgtcttcgcccgagctccgggagtcttcggcgcggatgctgagggttaccggggattggtggcctaggaatgttcctatcccccgcgcggccggcgaagacttttttacatctcgcatggttcgtgaatggagagtgtttccttacgggcggaatattgctgctgttgtgtcggtagtgacggacaaggatcgccagggagctgcacaaaagcgccaggcggttgtcaggcttcatgaagccaggccgaagaggcagcggggggctgcgaaggctgcggcccccggcggaggcaagccgccgctggcggcgaaagtggcggaggtcgcgaaggcggcccgagtgttgccgtcgtcgggcaagcgcgtcaccgacttcgccaccgatatcagtgtggacgactatcttggtgggtcggacgaaggccaacttgctatagttgcgcctgccgcggcgaccacgacggctgccgtagtgccgaaggcgaagggcggggctcttagcgccggaggcgagatgtcggcactcgcggctgtcagggatgaggcgggcgctgcgtcccgccggctgaaggaggtgacagaggcactaagtcaggtggctgacttcgccaactgcaccgcgtcgggggccctcacggcagctgtgtctgccgaagtcgaaagacttcggacgcaacatgctgacgccgtccgtgaaaaatcggccgccgacagcaagtgccgcaagctagcggacaaggtggccgcgctggagggggagaagactgacctccggcggcaattggcgggggagaggagggagaccaatgaggccctcgccaaggcgcaggctgcgcaggcggaggctaatctggcacgggcggagggcaatcttgccagggagcgcgccgagcagctgcaggagcggctcatcgccctagagagctgcgtggagagggtcgaggccgcgacgcgcgcggaggccgagcggacgcgcaaacagcttatggattcgtaccatgagctgggcgcgcggaccggtgacttcgaagtgccggagcgagagcccggacttcgctgcctggagtgggttcaggaggagttacaggcactccccactatcgtggaggggtttatgtcgtatgcctccctggtcacctgcgagggggcgatgaacgcgctctctcgcgaagggtgccggcacttcgaggtcttcgaccaagccgacgaagactttgagcgagatatctacaaggttgaggaccccgtagtgaaggaatccaccggagccatctacgaccggatgtggggtccgcacagtcgcgaggtggttagggagcgggccgagacggcgagggctcagagggtggatgacttcggggcgttgaacagcgcgctgcctgacccagagccgaccccggcggaggccgtgtccggggccgccctggagccgcctccggagactgcggaaggcgcaccggatgcccccgcattcgctgcgaccggcggagacctgcccccagagaccgccgaaggcacgcctgatgcccccgcagccgctgcgccgagtgctgaagatcctgcgacggtggcggcggaggcgacagcggaggcaacggcgggggctcccgcaacggcagggtcttcgcaggttcaagattttgggcctgcgcacgcaaccgccactactaaatttttggcggcttcgaccgtggatggtggtaataaatgtgatgggtctgcatctgagttttctgattttgctgactctgggagctcggttgagtggactgaggagtcgtcggaggacttggactactttgcggccttggatgcggctgcggcggaggcttcgccgcacgctgcggacacagatgtgcctggtcctagcgccgggcgccggcggcgaagggcggttgcgaagcgtaga

SEQ ID NO: 172947 - DNA, 2142 bp, Zea mays
  Clone ID: MRT4577_89309C.1
atgccgacctcttcttcttctgctaccgctacaccgccggccgacgagtcgtctgaggagacgctgagtactgtggcggcggaggagttgcgcaccggcgacacggtggatttcggtgcatcgcggatgtcctcggttcgcgtgcaagacatgcagcggctgggttattttggcggcggagtcgctcgtgtcctgggggcggaggaggtccccgagccagaaggcgagttggttgtcttcgaggcattcttcgccgctggccttcgcctgcctgcgcatcgattcgtgggagaagtcctgcgcagattcaacgtccaggtccaccagctgacgccgaacgccgtggtggccctatcaaaatatgtctgggcgacgacttcgtacggcgggcagccatcggtcgaagtcttcgcgaagtactattgtctgcactggcagaaaaagatgatcggaaataaggttgctcagtttgggttctgtacatttacgccgaagaccgccaagacctcgatggaggtagttgagttggttacttgcgcccgcaataaatggggcaactggtatgagttttggttctacgttgcggagggcacagtcgaagaccatccggggctccccgtggccgagatgtgctcacattattactcagcatacccacattttgaagtggcggaggaggatgcgaacgaaggggccctgcggtgcgcggccggcctgagtagcgggcgcgatttggttgaggagtttgtggcgtatggggtgtggcctttggcgcatggctgggcgctgggcgaagtatgccctcgccagatgccttcccgtggtgggatgctggtgcgaagtcccgccttcgcactggatttgcatagccgcgatcccgccgcattcgtgcatcaggcagaggatggggcagtgcggattgttggccgcagccagccgacgctggcggcaaagtcggccgcccctgggtccagcagggtgccggaggctgtgaaggcggccgccgccggcggaaccaagtctgtcccggccggagtcgcgaaggcccgagaattgcctccgccgggcaagcgcgttgctgacttcgccaccgatattagtgtggacgattatctcgttgggtcgggcgaggggcaacttgttgttgttccgcctgcggtggcgaccgcgacggctgccgtggtgcctggggcgaggggtagcgctgtcagcgccggtggtgagattccgacactcactgccgtcaaggacgagacgggcgctgtgtcccgccggctgaaggaggcattaagtcaggcggctgacttcgctgaccgcgtggcgtcgggggcccttacggcggttgtgtctgccgaagtcgagagacttcgggcgcaacatgctgacgccgtccgggaaaagtcggccgccgacagcaagtgccgcaagctggcggagaaggtggccgcgctggagggcgagaggactgacctccggcgccaactggcggaggagagaaggggggctaatgaggccttcgccaaggcgcagtctgcgcaggtggaggccaatttggcgcggcttatggactcgtaccacgagctgggcgcgcggaccgctgacttcgaagtgccagatcaagagtccggacttcgctgcctcgagtggctgcaggaggagttgctggcgctccccgccattgtggagggctttatatcctatgcctccctggtcacctgcgaaggggcgatgaacgctctgtcccgcgaagggtgccgacactatgaggtcttcgaccaatctgatgaggatttcgagcgcgagatttacaaggttgaggaccctgtggtgaaggaatccgcgggagccctcttcgaccggatgtggggtccccacggtcgggaggtggcggcgcgtaacgagaaagtggaggacttcggggctttgaacagcgcgcagcctgattcggagtcgaacccggtggcggctgtgtccgaggtcgccccagcgccgcccccagaaaccgtcgaaggcgcccctaatgcccccgcagccactgcggccggcggtggctcgtcgccaactgctgcgccgagggctgaggatcctgtgaagatggcggcggaggaccccgcgacggctgggtcttcgcaggtggcttag

SEQ ID NO: 172948 - DNA, 1055 bp, Zea mays
  Clone ID: MRT4577_8930C.1
agtatttgctaggtctcgcctctgccgtagtctgccgtggcctcgcccacaagctaatcctacggcccacggaaccagtcagtcctctctccttccggcttccgctgctcttctttctttcctggcatcttggagacggcggcgagacgaggagaggactggaccatggctgcctcttcggctctcaggctaatcctgggctcctcgtcggcgtcgcgtcgccagattctgtccgagatgggatacaaattcacgcttcttgttgtttttttttgcgccctatcgtttgagatgtttgctttagtaatttcttctcccgcacctttcagttcattcattttcttttttctccgggggctttagagtgcggatatcgatgagaaagcgatcagaaaggagaacccagaggaactggtggtcgccttggctcatgcgaaagcagacgctattctggagaagatgcagaacaatgggatgatgaaagagattcttgattctcaagatactactctgatgataactgctgaccaggttgtgttgcatgatggagtgattagagaaaaacctagcacaccagaagaggcacggaaattcatcaaagggtactctgaaagccatgctgcgacgattggatctgtgcttgttacaaatgtgaagactggagctagaagggaaggatgggataaagcagaaggttatttcgacagagtaattgggctcgttgaggcgagtttgatcgagctcatcaaggaatccctttcagagacatagctacaatcatatggactgaactgacctgtgatacagaaatcatattggtggcggactggcggtggctaaatcagtttggcagcaatgtagtgtgagaatcatgtaatcattcctattttccaacaaaaaaggccgtcatgtgatcagccccctatgaatggaattcatccttggcttccatgaccataggtctgctgaatcattcgttttgttttctgatgtgttcggccgcaaggatttttaacgcctggcagattgcttgatttgatcaatgaattcgtgct

SEQ ID NO: 172949 - DNA, 185 bp, Zea mays
  Clone ID: MRT4577_89310C.1
cgaaactcctctcacccttttcttgataatttgccccagtaacattatcgatatgtgttcaaaaaaggtgagaggagcttcgcggtcgcgtgggttcgccccgggattaactggcccggtcctctgcaggcgtactcgctattttgtcgcgtgacgttatcgatatgtgttcaaaaaaaaaagag

SEQ ID NO: 172950 - DNA, 669 bp, Zea mays
  Clone ID: MRT4577_89311C.1
ataagctgacccacttgccatagagagaaaagaagggagggagaatgacgtgcgggtcctactcgtaaggaatagagagaggaggtcacgtacgtaagtgagatggctggtttttaaagcttgagaattggaatggtggggcccactagtcataggtagaaaggaggggagggaggggaatgtgtatgtgacggtggtaactagaccaatcggctagggatggtgatcacgcatgtgtttttcttttcttttttttcttttttaaatttcgaaaattcattctctctttttttttaaaaaacattagattattcaaaaagaactatattttaaatattccaaaaagtataataaatctaataacaatattttattaagtaatatatattataaataagcttttaggcaatttttattatttaagtaaatggagcttcacaaagaggataaattaaaataaaggtgttgcaattcattaacaaacaaggaaatcatgcaccgataatgaatgcatcaatcacttggtagaatttaatcatcacaaaacttgtttaaactcagttatattaccacatcaattatttgaaaatattttctttcctaatgataatgaattaaactagattgttttaattgatggattcgaggtgttacagtcccgcagcggtc

SEQ ID NO: 172951 - DNA, 2490 bp, Zea mays
  Clone ID: MRT4577_89312C.1
ttaacattttatgttgccttgttcttgattcatagcatttgagaacaagtccccaacagaggcataggacataaacccctccacgatggcggggagcgccagcagctcctcctgtagccactcgaggcagcgaagtccgggctctcggtccggcacttcgaagtcagcggtccgcgcgcccaactcatggtatgaatccataagctgtttgcgtgtccgctcagcctccgagcgcgtcgaagcctcggccctctccacacgggtctgcagagcgttgagccgctcctccaattcctcggcgcgctgcctggcaagactgccctctgcccgcgccaaattggcctccgcctgcgcagactgcgccttggcgagggcctcattggcctccttcctctcctccgccagctggcgccagaggtcagtcttctcaccctccagcgcggccaccttatccgccagcttgcggcacttgctgtcggcggccgacttttcccggacggcgtcagcatgttgcgcccgaagtctctcgacttcggcagacacaactgtcgtaagggcccccgacgccgcgcgatctgcgaagtcagccgcctgacttaatgcctccttcagccggcgggacacagcgcccgcctcgtccctgacggcagtgagtgccggaatctcaccaccggcactaagagcactacccttcgccctgggcaccacggtagccgccgcggtcgccacagcaggcggaacaacaacaagttggccttcgtccgacccaacaagataatcttccacactaatatcggtggcgaagtcagcaacgcgcttgcccggcagcggcaactctcgggccgccttcgcagcctccggtgccctgctggacacaggggcggccttcccagacttggtaccgccggcggcagccgccttcgcagccttcggcgccctgctggacctaggggcggccgacttcgccgccagcggcggctggcttccgccgggggcagcagccttcgcagtcccccgcggcctcttcggcctggcctcatgaagcctgacgaccgcctggcgcttctgcgcagctccctgacggtccttgtccatcactgccgacacaacaacagcaatattccgcccgtaaggaaacactctccaatcacgaaccatgcgagatgtaaaaaagtcttcgccggccgcgcgggagataggaacattcttaggccaccaacccccggtaaccctcagcatccgcgccgaagactcccggagctcgggcgaagacatccttccccccggggccacgcatgtcctcatcaactccctagcgaaaccatcagaaacccccagtcctcccatagcaatacctagcttcctcttcttagaggatggggcggccgccggcgcggggtcgtctccagtctctaccaacggcttcttcccgcgacgatccacatcgtcttggccgggataaccgccatacgacagacgatacaactcgaaaaccctgttcaagcggtcattagacccgcgtatatcccagctacgctggccctctgtcttcggcacgtaccgaccgacaatccgcactgccccatcctctgcctcacgaacaaaggcggccggatcgcggctacgcagatccagtgcgaaggcgggacttcgcaccaccatcccaccacgggaaggcatctggcgagggcatacttcgcccagcgcccagccatgcgccaaaggccacaccccatacgccacaaactcctcaaccaaatcgcgcccgctgctcaggccggcggcgcatcgaagggccccttcgtctgcatcctcctccgccacttcaaatggcgggtatgctgagtaataatgagagcacatctcggccacggggagccccggatggtcttcgactgtgtcctccgcaacgtagaaccaaaactcatgccagttgccccacttaatgcgggcgcaaggaaccaactcaactacctccatcgaggtcttgccggtcttcggcgtaaatgtacaggacccaaactgggcaaccttatctccaatcatccttttctgccagtgcaggcaatagtacttcgcgaagacttcgactgatggatgctcgccgtacgaagtcgtcgcccagacatacttcgacagagccaccacagcattcggagtcagctgatggatctggacgttaaatctgcgcaggacttctcccacaaatcggtgcgcaggcaggcgaagaccagcggcaaagaacgcctcgaacacaaccaactcgcctttcggctcggggacctcctccgtccccgggacacgagcgactccgccgccaaagtaaccaagctgctgcatatcttgcacgcggaccgaggacatccgcgacacaccgaaatccaccgtatcgccagcgtgcaactcctccgccgccacagtgctcagcgtctcctcagacgacgcgtcggccggcggtgtagcggcagcagaagaagaagaggtcggcat

SEQ ID NO: 172952 - DNA, 390 bp, Zea mays
  unsure (1)..(390): unsure at all n locations
  Clone ID: MRT4577_89313C.1
tntttttttttttttttttttgtttttctttttgggttttttttagtgttggtcgggtggatcaacagatatgggggggtgaaactgattgccaccctgtaaataacgccccccactgaacccaaccgaggtagggaacaagctacaaaagaattggccgcatgatacccgggtagctgaacaaaaactgggttaccaacaccactccaaaccgaggggtgcaagacccacaccatgaaaaggaccctctggacaggaattacacagggcgggggactaaaacaggtgtgatgtacaaagtatccctaaaacaagacttagcagttggcggccatttagggcctccagcgagacccaggcaggcgtatccatccacctaccccaaggatg

SEQ ID NO: 172953 - DNA, 3300 bp, Zea mays
  Clone ID: MRT4577_89314C.1
atgccgacctcctcttcttctgctgccgctacgccgccggccgacgcctcgccgccggccgacgcctcgtctgaggagacactgagtactttggtggcggaggagttgcgcgccggcgatacggtggattttggtgtgtcgaggatgtcgtcggtccgcgtgcaagatatgcagtggttgggttactttggcggcggagttgctcgtgtcccggggacggaggaagtccccgagccggagggcgagttggttgtgttcgaggcgttcttcgccgtcggtctccgcctgcctgcgcaccgatttgttggagaagtcctgcgcagattcaatgttcagatacatcagctgactccgaatgccgtggtggctctgtcgaagtatgtctgggcgacgacttcgtacggcgggcagccatcagtcgaagtctttgcgaagtactattgcctgcactggcagaagaggatgattggagatgaagttgctcagtttgggtcctgtacgtttacgccgaagaccggcaagaccacgatggaggtagtcgagttggtcccttgcgcccgcaacaagtggggcaattggaatgagttttggttttacgtcgcggaggataccgtcgaagaccatgaggggttccccgtgtctgagatgtgttcgcatttttactcagcatacccgccctttgaggtggcggaggaggatgcggacgaaggggcccttcggtgcgccgccggcctgagcagtgggcgcgatttggttgaagaatttgtggcgtacggggtatggcccttggcgcatggctgggcgttgggcgaagtgtgccctcgccagatgccctcccatggtgggaagctggtgcgaagtcctgccttcgcgctggatttgcaaagccgcgatccggccgcctttgtgcgtgaggcggaggatggggcggtgcggatcgttggtcgatacgtgccgaggatagagggccagcgtagctgggatatccgcgggtcgaatgaccgtttgaatagggtttttgaattgaatcgactgccgtataatggctatcccggccaagacgatgtggaccgccgcgggaaaaagccggtggtagagtctggagacgatcctgcgccggcggccgccccatcctcgaagaagaggaaactaggtactgctgtgggaggacttggggtttccgatggttttgctagagaattgatgaggacatgcgcggccccggggggaaggatgtcttcgcccgagctccgggagtcttcggcgcggatgctgagggttaccgggggttggtggcctaggaatgttcctatcccccgcacggccggcgaagacttttttacatctcgcatggttcgtgagtggaaagtgtttccttacgggcggaatattgctgctgttgtgtcggcagtgatggacaaggatcgccaaggagctgcgcagaagcgccaggcggtcgtcaggcttcatgaagccaggccaaagaggcagcggggggctgcgaaggctacggcccccggcggaggccatccgccgaagtcggccgtccctgcatccagcagggcgctggagcctgcggctgccgccggtggttccaaggctgcgaaggctgcaccggcgtccggcagagtgacggaggctgtgaagtcggcccgagggttgccgccgccgggcaagcgcgtcgccgacttcgccaccgacattagtgtggacgactatcttgttgggtcggacgagggccaacttgtcgttgttccgtctgccgcggcgaccacggcggctgccgtaatgccaaaggagaagggtggtgctcttagtgctggcggcgagatgccgacacttgctgctgtgagggatgaggcgggcgctgtgtcccgccggctggaggagatgaaggaggcgctaagtcaggcggctgacttcgccggtcgtgcggcgtcgggggcccttacggccgttgtgtctgccgaagtcgagagacttcggacgcaacatgctgacgccgtccgggaaaaatcggccgccgacagcaagtgccgcaagttggcggacaaggtggtcgtgctggagggggaaaaatccggcctccggcgccaattggtggaggagaggagggaggccaatgaggccctcgccaaggcgcaggctgcactggcggaggccaatttggcgcgggcggagggcaatcttgccagggagcgtgccgcgcagttggaggagcgactcaacgccctgcagagccacgtggagaggaccgaggccgcgacgcacgcggaggctgagcggacgcgcaaacagcttatggattcataccatgagctgggcacgcggaccggtgacttcgaagtgccggaccaagagcccggacttcgctgcttggagtgggtacaggaggagttgcaggcactccccactatcgtggaggggtttatgtcgtatgcctccctggtcacctgcgagggggcgatgaacgcactctctcacgaagggtgccggcacttcgaggtcttcgaccaagccgatgaggattttgaacgagatatctacaaggttgaggaccctatagtgaaggagtccgccggagccatctacgaccggatgtggggcccgcacggtcgagaggtggtcagggagcgggccgagacggcgagggctcaggcggcgcgcggtgagagggtggatgatttcggggcgttgaacagcgcgctgcttgatccggagtcgaacccggcggaggccgtgtccgaggccgccctggagccgcccccggagactgccgaaggcactcctgatgcccccgcagccgctgcggccggcggaggcccacccctggagaccgccaaaagcgttcctgatgcccccgcagccgctgcagccggcgaaggcccgccgccaactgctatgccgagggttgaagatcctgcgacggtggcgttggaggcgacggcggaggctcccgcaacggctgggtcctcgcaggtggcgttcaagattttgggcctgcgcacgcaacccgccactactaattttttggcggcttcgaccgtggatggtgttaataaatcggatgggtctacatctaagttttctgattttggtgactccgggagctcggttgagtggactgaggagtcgtcggatgaggacttggactattttgcggccttggatgtggcagcggcggaggcttcaccgcacgctgcagacacagaagatgtgcctggtccgagtaccgggcgcaggcggcgaagggctgttgcgaagcgtagagtgagcggggtggagggtggtcggcttcgt

SEQ ID NO: 172954 - DNA, 265 bp, Zea mays
  Clone ID: MRT4577_89315C.1
ttatagggcaaaatggctggaagaggcaccactggttgagctttctattcatatacggcttgtggtagagatgatccttctcgtgtatgatcagattcttgagatttttctatttttctttctctttcattattttctattctttaacttttatattttctttttataataacttcttgtattagattactcttttttttttctttattcttttttcttatattttaattttttctcttattttttttttattttttcatctttt

SEQ ID NO: 172955 - DNA, 716 bp, Zea mays
  unsure (1)..(716): unsure at all n locations
  Clone ID: MRT4577_89316C.1
ctaaactaacttaccggttaacctgcgtatcatatatatattagtaaaacttcccatttttaacacctacagtcccgcaaacactgagacctattgagacctctttcatcctacgacatcgaccaaattaccaaagtgactcaggcaatctaataaatatcatacctagccaaaccatccatccatccactaacaagaataacaaatttgcttaccctgactacttcgacgcgatagttggaagcacgatgacggtttctggtcgacgtcattgatcacacccgtctggcgagcgaggcacacagtttctattcttgaccaaatatccatgtattccttttgttgagctggtgacgtgtggccagcaccagagtgtcttcacagcttaggggcttggcgtagacgaggatgtcgatcgacgacttgtgcgagcttttgtcgagtacttggtgaatatcaccctgctagcttcatcttcaccagattcttgggatttcttgatgacgcacggaacgacgacgagaccgaatttggagtgagctggcgaggacacgaatccagtgagggctctggcgatgacgaagtcacaagcaaggaaggacgggttcaacaacccgacgataaatgcgagcacgcgcgaagcccgatggacgaagagagagcgcacangataggtcgggctgggagcagaggacgacggacgccatggcggtttg

SEQ ID NO: 172956 - DNA, 365 bp, Zea mays
  Clone ID: MRT4577_89317C.1
gcgcatggaggagggggagttctccgaggctcgcgtttacctgtccgccctgaaaaagggcgtcagtgaggtcgccgcaaagggcggcactaataacgttaacaagaagaaggattcctgacctgtttgcttaaatctgtttgcttgtcaacccaatttgtggtgttaaaaaaccttagtttgtgtcctgccccccttggataatgtttgggtgtttccttccatcataattgcttgacacggctatagtattcgcatttgaaataaaaatctctctcttaaaactctctaggttctaaaaaaaaaaatcattatttacaatttcccttctattaacaaaaaacataaatttataatatactttt

SEQ ID NO: 172957 - DNA, 1079 bp, Zea mays
  Clone ID: MRT4577_89318C.1
ctcggtcttctcctcctcggaaccccccaatcgatatttttagattatattgctctaaagtctcatcccattcggccgatcagcaccccgtctcgctgagccgactgtccggcggcagccagtcgtcacgggtgtcccctcccggggtttctggatcggcgttgtcctctacgccgcccgccgcccgccactcgcccggcgtgatcgtgggagttcgcgtccggcgaagcgaggagggtttcgatccacggcgttattgccccggacagcagaggtttggcggcagctagcggcttacgcacggagtcgtcgcgctagtccatttggggaggtgccggggacggcgcggtgggcaatggcgaccccgacgccggcgcgcccgtaccggttccccgcgctgccggaggaggaagacgagcaggcggccacgcggtgctccaggcggtcctgcgggacgtgcggcgcgtcggcggtggcgagctgcgtggcgctgtgctgctgcccgtgcgccgcggtgagctgcctcacgctggcgctcgtcaaggcgccctacgtggcgggccggcggtgcgtggccaggctcgccaggaggcggctgcggaaggggagggcgaggcgcgtccgcgacatgggcgaggacgacgacgagcggcagggcccgcggtgcagcaaggagtcgtgcgacctgcctcgtgcggctgcggccgacgagagggcgaaggtgagctccaggattgacgcgtcgtccgagaaggtgtgggtggacatgtaccaggtcgggctttgggggttcggccggctgtccttctcggcggcggccggggctggaagcgactccgacaaggacggcgacactgctccagagtaatgtcgtcttgtagtacaacagacttctatcttgggcaatatggcctgtacgatcttttgtgatggcgtggatcgtttggttggtggacacgatgctgtgacgcgcgctgcctatgggcgactcacctttattgctgcatcaaaactctgtacaaaattgcacccggtacatcattgcacacatactggctgcccaaaaaaaaaaaaaaaaa

SEQ ID NO: 172958 - DNA, 233 bp, Zea mays
  Clone ID: MRT4577_89319C.1
ccggcagcaaaaatgaataataagggggggggttttaaatttaaaacccccccacacaaaaagttaccggttgaagaacacaactgaataggactgctcacagaaataactaaatagaaccctcccttgaaaataaatagctgacaacaaaattaactcctacgcgtcttcgcagtacgcaacatttaaagtggccggaaatcataacatgtgagaacatgccacactacaga

SEQ ID NO: 172959 - DNA, 711 bp, Zea mays
  unsure (1)..(711): unsure at all n locations
  Clone ID: MRT4577_8931C.1
ccggcaatgcggcacgcgtccggaggcgagcagcagtgagggaaagcgaatcccctcctctcctcctcccactcttcaatgctctccccgtcccctccgccatggacgccgccgccctcgccctctccatcatcctgctcgccgccgccgccaccactctcgcccgcggggccacgcacccggcggaccaggcaacgctggaggaccttcggaaatcgctgacgaacccggacgcgctggggtggcccgacgacggggacgcgtgcgcgtggccgcacgtctcctgcgaccgcaccggccgcgtcgacaacctcgacctcaagaacgccggcctggcggggacgctcccgccgtcgctcccctcgctcgcggcgctgcgcgacctcagcctccaggggaacagcctctcgggcgcgctcccgtccttccggggcatggcgtccctccagcgcgccttcctcaacgacaacgacttcgacgccatcccgcccgacttcttcgacggcctcgccgacctgctcgagatctcgctcgccaacaacccgcgcctcaacgcgtcccagggcggctggacgctcccgcggggcctcgccgactcgtcgctgcagctgcaggcgctctccctcgacaactgcagcctcaccggcgggatcccggactccctcgcccgccttacgggcctncagaacctcacgctcttctacaacaacc

SEQ ID NO: 172960 - DNA, 375 bp, Zea mays
  Clone ID: MRT4577_89320C.1
accccgcgtccgcccacgcgtccgcccacgcgtgcgcacacgtttgcgtttacatcgccccttcgcccacacgagcaagcgataatccggcggcgttgagatgttggtatatcaggatctcatatgtggcgacgggctcctggcggatttattcacctacagggggctcgaaaccggttttctgggggaagtcgggggaaagggggtcaacccagggtcttgttgatgtgacattggtgcccaaacaatccgcgggggtggtggaggacaaagcctttgacacaccagtggaaatgggggtgattttggtgacaaatttcggtcacgaggagcatccttttttggacagaaaatatttgggttctaccataaaaa

SEQ ID NO: 172961 - DNA, 262 bp, Zea mays
  Clone ID: MRT4577_89321C.1
cccggcccttccccaaaggaggggggaagccggaacgcagggccaccaagaaccaggcggaccgaggcaggacgccaaagccgacgaaggggaaggcgcccgcacggacggccgcggcgcggggggccacacgccggccgacgagacaccacgcacaacacggacgaccgcgagaggagaggcgggcgaaggggcgacgagagcgaggacacgggggacgacacaccagagcacgccgccgagagcacacccggcgcgggga

SEQ ID NO: 172962 - DNA, 448 bp, Zea mays
  Clone ID: MRT4577_89322C.1
gacccctctagcgcgcgcgcagtgctcgtgcggatgacgggaggctaggtgtgtgcgagatatcctgtgggccccaagatcatgccgctacggctctccccgaagaagattggcgtggacatacgcaaggagaccgccaaagactggaagggcctgctgggccaccagggaagctcaccgtgcataaccgtcaggccacggtctccgaacatccctccggcggggagctcgatatccatgcgctgaacgaacccgacagggacaagaagagagcctacatcatcaagcacagcggccacatgagtctagactacgtcgtccatatcggcaagaccatgccgtacacgtccatggcctaggagttgggcgggaccgtctaggagatcctggggacctgcgccagcgattagagcaccgtacatggaatagaccccaatgactggcagca

SEQ ID NO: 172963 - DNA, 151 bp, Zea mays
  Clone ID: MRT4577_89323C.1
ggcacgaggagacactgagctggtctgcttagtgggacagccatctgtactttcttcggctgtcatgtaggatgagatgaccacccagaccactctgaacaatccgcgattcgcacagcttgcttgcaccagttgctgtgattttccttcc

SEQ ID NO: 172964 - DNA, 692 bp, Zea mays
  Clone ID: MRT4577_89324C.1
gtaccctcgggttctggccaaaaaaaaaaaaaaaaaaaaaaaaaaaaaaaaaaaaaaaaaaaaaaaaaaaaaaaaaaaaaaaaaaaaaaaaaaaaaaaaaaaaaaaaaaaaaaaaaatccccccttattttttggggctttcaaaacccccccaggggaggggccttaccaccgccctaaaaaaatgggttccaaaaatttaacccccctttggcttttttgcctttttggggagcccaaaaaaggggttattttttccaaaaggctaatttgctccaagggccttttttccaaagttcctcccccaatttttttaaaggggtttaaaacccctatttgggaaggcaaaattgcaaaaaaaggccttgggggggagggtttaaaaaaacccattggccaatttgaaaaaaaattttttgccaattttaaaaataaaggccttcaaaacgcaaaagaaacaacggttcttaccagctttggcccccttacccttgggaacccctgccccttatttgaaaaaaaagttgtttgattccaacccatttgttttgggaaacgtatttgaaaaccagaaaaaaaaacggttacaaaagtttttgccaccgctaattcaattagcctgggggacccttgccgcttaggtaaaaaaaaaaaatttgttttatttaaccccgttcgttgggggaatggcc

SEQ ID NO: 172965 - DNA, 508 bp, Zea mays
  Clone ID: MRT4577_89325C.1
attacggacttgcacacaaaaccattgatgcactgcaatagcgaaacgctaacaccagtgcaatgaacatatggaagcctagaagataaaaccatgccgcacactaaaagacgacagacacatccgtggaactgggcacagaaactggccaaataactcgctcattgcaaggaagtaaccacacagaaaaggcaccgtatcaacacacgcatgtgtccaaaggcttgaaactacctcgaattgctgaggaaccagctactgccaataacacacactaccttgctggggaaactgccatcttcgaatataactgagctcctgttatcacttcatctgatccggggcttctcccctctccctcgtcaaagcagtatcgagccctgaaaacgagccaccatcagactcgaacaggcaaacggtatacacggtggcgaccttttagagagactcttcctttgacatgcggacgacctactgacatggtgggccgaagctaaaccctgtcctg

SEQ ID NO: 172966 - DNA, 117 bp, Zea mays
  Clone ID: MRT4577_89326C.1
tcgctcattcggcgccgcggcaccccctagtcgtaactcgcgatgggccggagcaaggtgcacgagctgctcggaaagagctagacggatctgcatgcgcattttaaggagctttaa

SEQ ID NO: 172967 - DNA, 662 bp, Zea mays
  Clone ID: MRT4577_89327C.1
ccgatctctcatctctcttcagccacgcacactgcctccttccctccccgatcactactctccctctccagttcacacccaccgccccacctctcccactcaaatccagggccatcgcagatccaccgcctccccgatccggtcgcctacccagccgcccgatcggatcctgcagggtttgtgcccgccgtgagttagatggtttacgatggtgccgtgaaggaccaggaccaggagagcgcagcggcgagcactgcgttggcggcatcggtggtggcggcgtctcccgagcaggtggtggtggggagcacgagggtctcggcgaggccgccgcaagacaagcgcctcggcgtgcgccaccccttgaagcaccgctggttccgtgcccggggtaaggtgatggtggagctcggaggggtgccgcccgctcacgccgtgccggaaggcgaggaggaggaagaggaggaggagggagtcagcgagagcgaggtggaagaggagttagtggaggtagaggtggagcaagcctcgtcagcggggacgggaatgcggggcgttgaagtggaggtgttatccgcgccagcaacaggggtgcaggagatggacgtggaggtcggtgaaatggaggtgtcgcctgagcccgcggtcgctgtggggggcac

SEQ ID NO: 172968 - DNA, 441 bp, Zea mays
  Clone ID: MRT4577_89328C.1
ggggccttcaaaacaaggaaagaccggcggggcttttttcccatacattggacaaaaaagggttttaacaaggggttgaactacaagatctctcgacatgcctttttttttggaaaaacggggtctagggactgccatcgatcctgggaaaaatgaatgtatttcccttggaaccctcaactacgttatcggcaggcactggaataaatataacccaaaaaacataaatggcaagggcagcccccccacatgggagtttatttttcaacgaagggcacacccctaaactaagggtcaacacaaaaaacagcggggcaggcactctggggctgtttcaaaaacgttcacatgaggaagtccctggggtcccggacgaaccccgtcagggcccaggcttcaacggtgtagggggaccccaggaaaaactgccctttcttgggc

SEQ ID NO: 172969 - DNA, 472 bp, Zea mays
  unsure (1)..(472): unsure at all n locations
  Clone ID: MRT4577_89329C.1
cggcagcaggaccggtgcggttttcccttgacgacccacgcctancggcaaacggaaaccaaagcaggctcttttgaatttttgaggagacactgctaacctctcatagggggaaaaaaaagcttacgtgcttttcaagaatttcagccagcagagaaagtgcaagctctcttgtggccacatctgggtcatcaagcatctcgagaagggaagaagacatctggtgtaaattctgaaaacgagtgcaagatgaggtggtgtctagctttgtaaaatctgttgccaagctttgtagaaacaagctcataggacacttatagcatgtaactgttgcagaaagagaacacactaaatagtactgtagttatcaaacaaaacaccatcagggtagtcaaaattcttagagatctgatgtatgtgcagaagtgctattttaagagagagagaaagatgagtgggaaatgattacctc

SEQ ID NO: 172970 - DNA, 198 bp, Zea mays
  Clone ID: MRT4577_8932C.1
cctcaataccgttccttattttcttgtggagggacgcgttcggttctattaatcgagtatgtgggggctctagcgatatgcaagatcgtggtgtgcgcccgggggggggacaacgactgtgtggcggtggttccccaactggctgacatacaagaagtacgtgggcttcttcgacagagtgaaagaagccatggtgcg

SEQ ID NO: 172971 - DNA, 647 bp, Zea mays
  Clone ID: MRT4577_89330C.1
gtataaataagtgttatactaagaaaagatttcttaataatacaagtacttagctgtcccttggctgggaatgcaaaaacaaaatatcttctcagaggaacgaagttttagcagtagcaatttcaaaggctaaagttttagcaaacacaattccaaaggctaaactgttgtaaaacactggtggtacaccatccaaacacaacaatatgaaaaaaggggcatcagcatcaggcatgaacaacatctgcaatagatacttgcaagcacagtaacctgccccccttgtctctaattatcttagtaaccaccagtgtttacatacccagcgatgttcaaggagtcctcgtgacagtggaagcttacagccctcttacatgaagccctctttcctcctgcatgaccagatcacgagcaaccttcatggagttcttgcccaccatcccggcgaggaggtgctaagcgccaaggttcgatgtcatgatgaccatggtgttcctgaagtccaccgttctgtcttgcccatccatcagcctgccgtcgttgaggacctagagcagagtgttgaacatggcgacatgggccttctctacctcatcaaagtggatcacgctgcggcctcctcacttgttcaggtcgacgcggccgcg

SEQ ID NO: 172972 - DNA, 494 bp, Zea mays
  Clone ID: MRT4577_89331C.1
acggcgtgccactactcgccgtcgcttgtggcagaggagcagcttcacggctccaaagacaccttgaccttgaagggcgagaaggctttgctcgagttgcttctaggcatggctctggaccagcacgttgacggcaggaagctcattacccaacaggaggctgaggatagtgatttcgagagctatttgagagaagcaacaagccgagtgctttaccagccaacattcatgtacggagcttctgaatttattagcagtgaagaggatgatgatgattctatttcggagagctcttcagcatcattggccaaaccagctggaactttggatcttggcaagctgacagaggaaccacagttggatgtaccacagcctcaccgccggtttggtccttcaacgtcaaacactctttttatgtcttttattatactaacacttgaccaccattgtgttgccaccacagcagtgtggatccaaaccattcgtatgatcaa

SEQ ID NO: 172973 - DNA, 169 bp, Zea mays
  unsure (1)..(169): unsure at all n locations
  Clone ID: MRT4577_89332C.1
gcctaacaagancgtacatcggacgcncgnngnagcttgaacagntcatttcntncatcgngccaaaggnggctgcgntgncgtggngacagnacttgcanccgagtctacgntcgagatnaatacgagatnttcgncatctcnatggcatctcgacctatcgattcct

SEQ ID NO: 172974 - DNA, 194 bp, Zea mays
  unsure (1)..(194): unsure at all n locations
  Clone ID: MRT4577_89334C.1
tntttttttttttttttttttttcttcttccagtggggctttttaagccaagttgcgggccgccctcggaaaagggaatgggaaaaatgttttgtgtaacatccggatggctccctttgaatacacccctttctaaatttgtaatgtgcgaacacttgaaattgacgaatactttctgggtgaaggaaaatttt

SEQ ID NO: 172975 - DNA, 144 bp, Zea mays
  unsure (1)..(144): unsure at all n locations
  Clone ID: MRT4577_89335C.1
ccgtccggtaccgaggaaanntatgcctcagaagaaatgggggtggnnaaatttgatgggtcattngnnacataatgngnnagtctgctcgggtgaaagggatacccaagctagtcggaacctatttatcaaggtcnnctgggg

SEQ ID NO: 172976 - DNA, 408 bp, Zea mays
  unsure (1)..(408): unsure at all n locations
  Clone ID: MRT4577_89336C.1
aaacaacaaaccacgaaagaaaaaaggagaggaaaacatttttccggtcctcggccccggaacaaacaaaagcccaaggaaacacccacgaaaccatacaaaagataacggagccccgcttattccttattcacacaagccaaaacatcctaccccccgcccaacacggagggcggtggatgctactttaaaacccacccctaacacacggggaggggcgaggaaccgggaggaccaaggacccaaaaaaggggggattgttttttccgccggcccccggggcccccggggggcccgtggtcctttggggtnccccggggaaggggaaaccccaaaaccccagggccgacggcccccgaaccccctacctaattttgggggggggggcggggcgcgggcccctgttcc

SEQ ID NO: 172977 - DNA, 295 bp, Zea mays
  Clone ID: MRT4577_89337C.1
ggggttttagttacattgctgaactagcctcacacccaggggtaaacaatgttatggcatgagcgccactggacactcgtggcttatactgccatgagttggacaggacattcaggacatctagataacctttttgcagatctttcaccgaattatatacccactacagggtgcgggtgccttatgtgtcccagaacccatccagccagacataccgataagcgggatcattggcaactgagaccaatatgaggaccgatcaaaacacgcaaatgagctatgtgacaagggaaac

SEQ ID NO: 172978 - DNA, 376 bp, Zea mays
  Clone ID: MRT4577_89338C.1
atcggcccttcctgctgagctcggttccatggacggcgttcctcttccttcctttgacgcgcgcatctccctcggcgccctcccagtcgcgcctgctccctctgcttcatcttccttgtggtgccttcttcagctcgcggcgctcggtccctgatccagctccccggctgcagcagctccgctccaagccgaacggagctcctccatgggcttcctcgagctccgacctgggcggcccttggatgctgcttccatcaacgccggccatcgttcctcaactccggcagtcgctgtggtctcagaagttagccccttttcagtatctatctctctccctgctcggacctccgcgttcccaactgtgcgcgctgtcggg

SEQ ID NO: 172979 - DNA, 1457 bp, Zea mays
  Clone ID: MRT4577_89339C.1
aaatgataccgctcttctctctaaaaatcctcctcaagcacagcacggacgtctggttcttccccccggacgcgtcattctctctccttatcctgtcgtactcagatttttttttttgcggccgtcggccttatcttcctgcgcgcgctccttccctcccagcaagctccatggccatcggcccttcctgctgagctcggttccatggacggcgttcctctacctttgacgcgcgcatctccctcggcgccgtcccagccgcgcctggtccctctgcttcatctacctcgcggtgccttcttcagctcgcggcgctcggtccctgctccagctccccggcgcgcgcccatcttccttgctcgctgttcctatttcccctgccatggatcgtcagttcgagctttcccatccgagctctattcatgaccgagtttttttccccagtgcagcagctccgccccaagccgaacggagctcctccatgggcttcctcgagctccgacctgggcggcccttggatgatacttccatcaacgccggccaccgttcctcaactccggcagtcgctgtggtctcggaagttagccccttttcagtatctattgctctccctgctcggacctctgcgtttcccaaccatgctcgctgtcgggtggccgtcagccatgccttctctgctcaccagcacttgttcagtcgtctcggctcgctcggcctcaatcttcagcgtcttgccctgctctttggttccagccgagctcgcgcctagctccatttcctcctctccggctgctccccatgaccaccgcgctgaacttcttcctgctgtccgtgatgtgtgcgcgatggacgcgatgaagacgctgtgtgtgcttgtgtcgagctctacagcaccagccatgcctctggtctttggtcgtcgtgctgtgcgtcagaactgttcgtagctcgcctgtgtgcccagctgtctcgaaccatgtcgtcgactatcgtcaccacgagctcaccttctctggcgcacatctccgcagacccggtcttatcacgcgtatacgttatcgatctcgtccttgttccgtgcgttttcaggaaattccaaaagttgggtgaagacaaagctagcagcgtgatgttcaccaagtgctctacgcaaaggtcgaactagaatccttgccgtgttcgcggatagcgcgtcaaatttagtcgtcaaatttagtcgtgggtaagccaattcatatttctgttagcttaattattggattgatgaatgaatgcgtctagtattattgaattagttcgatgaatacaatgtgattgttttcataactttggaatagtcgcgttggggtgctattgttaggtttgagatgttaattatgtgacatatggtaaattagtgaataaagtttaaatttagcatttttaaagggtctaaacaataatataaaaaacaactg

SEQ ID NO: 172980 - DNA, 241 bp, Zea mays
  unsure (1)..(241): unsure at all n locations
  Clone ID: MRT4577_8933C.1
ttcgggcggntaggtggccgcttccccctgccgggccgggctgctgcgctcacgcgcagcgcagggcgcggccgaccttggtaggcacgcacggggcccgtggcctgtgtggtcacctcctgtctacggccgtgcgcgacacgctgtctgtggagctccctccggccgggggtccttttgcgcgggccttgcgcaggtcttgaccggggcgcgcatccccattgtggaaccgggctgcccc

SEQ ID NO: 172981 - DNA, 1067 bp, Zea mays
  Clone ID: MRT4577_89340C.1
gtcgggactatctccgctgagtttaagcatataaataagcggaggagaagaaacttacgaggattcccctagtaacggcgagcgaaccgggagcagcccagctcgcggcgctcggtccctgctccagctccccggcgcgcgcccatgttccttgctcgctgttcctatttcccctgccatggatcgccagttcgagctttcccatccgagctctattcatgaccgagtttttttccccagtgcagcagctccgccccaagccgaacggagctcctccatgggcttcctcgagctccgacctgggcggcccttggatgatacttccatcaacgccggccaccgttcctcaactccggcagtcgctgtggtctcggaagttagccccttttcagtatctattgctctccctgctcggacctctgcgtttcccaaccatgctcgctgtcgagtggccgtcagccatgccttctctgctcaccagcacttgttcagtcgtctccgctcgctcggcctcaatcttcagcatcttgccctgctctttggttccagccgagctcgcgcctagctccatttcctcctctccggctgctccccatgaccaccgcgctgaacttcttcctgctgtccgtgatgtgtgcgcgatggacgcgatgaagacgctgtgtgtgcttgtgtcgagctctacagcaccagccatgcctctggtctttggtcgtcgtgctgtgcgtcagaactgtttgtagctcgcctgtgtgcccagctgtctcgaaccatgtcgtcgactctcggcaccacgagctcaccttcccttgcgcacatctccacagaccctgccttatcacgcgtgtgcgttatcgatatcgtcgtcgtttcgtacgtcatcaataaatcctaaaagttggctgaagacgaagctagcagcgtgatattcaccaagtgctcgacgcaagggccgaactggaatccttgccgtgttcgcggatagcgcatcaaatttagtgggtaaaccaattcatatttctgttagcttaattatgaattgatcaatggatgcgtctagtattatt

SEQ ID NO: 172982 - DNA, 443 bp, Zea mays
  Clone ID: MRT4577_89341C.1
cccacgcgtccgctctactgcatgggtcatcctcacaggtgccatggtcctcctcgccgttcctttcatcatccctgcctgctccagttgctcatatgtggatacagatggccctgaccctgcatcgccactaaaccatgatgacccacataagccactcctaataagtaacaatcatcagatggagtccaatgccatgatgcaaaatccaaaggagaaccagatgcagggcaattgttgtggaacagtgatgggcaagggccgcctggcgacactcggtgaagaacacagtgcaaaaaagctcattcggtgtgtggacttttggctctactacacagcctacttctgtggagccactgttggcctggtatacagcaacaacttggggcagattgcgcagtcattgaaccagcagtcacagctcaccatgctccttgctgtct

SEQ ID NO: 172983 - DNA, 329 bp, Zea mays
  Clone ID: MRT4577_89342C.1
gaggaatagactggatgccggcggccggccgctcgccacgttgcagtgggggagacgaacaggaatggactgggagtggacgcgttgcagtggaagaggaatggactgggtcactgggacttggacgcgtacaggctacgctattatttaaatagacttatagacctgctcacaataccgcagtacagtgccacaacagcccaactcaaagtctgaataccgcagtcgcagacattgtttttgggtcttaagcaaaaaaaagcgcgcggatgaaaaagaaaatgatgatgtgcgcatgatacaagatgtgcgtgtagatatacaaaatg

SEQ ID NO: 172984 - DNA, 344 bp, Zea mays
  Clone ID: MRT4577_89343C.1
aaaattttattgtcacctaatgtttttaagttgtggtatgatgctgcttgccctttgaggccctgactcttgcctaattattttgttgcaccagattcctgtatttttcatacgtatggtttgccccagtataccatttttaagtacactactaagcatgcactgtggaccatttctcatgggggatttactgaagtggatattggtaagcattgtacagtttgttgttggcaaacggttctatgttgcggcttatagggctgtgaggcatggctctacaaacatggatgtgctagtggttcttggcaccactgcatcatatgcatactctgtctgtgcactac

SEQ ID NO: 172985 - DNA, 267 bp, Zea mays
  Clone ID: MRT4577_89344C.1
attcggctcgaggggctaccttaagcttctttgtcagagggcggtcagctaccggtcgacggatcttacagcaggcgctgtgcaaggtatgcagcatcatggtggtagacccatgagcggtgctggtcacacagggctggcttggagatagtgctacctgccctacgcatgcaaagtgtcttatactgcgagggacacttcaccgattgtgggcattgcacttgtcatcggtgatgctactaacggttgccctcctagcaccagtgg

SEQ ID NO: 172986 - DNA, 266 bp, Zea mays
  Clone ID: MRT4577_89345C.1
atcatgcaatacaaggagccactttgggtagctaaaatggccaatcaccgtacgttgcataaatttgggccagtcgtacatagaacatgcacaatggagtcgcccccccgaatggacagtcatctagatccttgagcccaactgatagacagatgagtgcttatttggatatgctggatacagggcaatcacctctgcactgtctgatcttcatagttctgttccaatccgatgatctagtgtaatcacattttgcaggcttgtgg

SEQ ID NO: 172987 - DNA, 308 bp, Zea mays
  Clone ID: MRT4577_89346C.1
ttttctctgaattcatttatttagaggtgaggcacaggcattcaaaattgtggaatacaatgtctacacacagaataaggttggggaattaagctgaattgttatattccattcacattaataaatatttttaaagaagaaattgtagattttaaaagcttcattagacactagtgacacatacaaataactaaactctcatactgcttgattttcaggttgaaaggttacaataatctatatatttcaattacatggcagtaaatacaaaagcattttaaacatcttttggactgtgtagtatacta

SEQ ID NO: 172988 - DNA, 611 bp, Zea mays
  unsure (1)..(611): unsure at all n locations
  Clone ID: MRT4577_89347C.1
ccagacgatggaagcagttgatgcagtgttcgtcaactcaggggacaaccccttcaagcttctgaaagaatccatcaagtaatgccattctcttagatgttgtccaagatcaaaggaactttcagtcatatagaggacaaggagatcccttcaaatttgaactggtttgtgtggtgcacttgggatgcattttacaaagctgttaacccaagtgggattgaggagggccttcaaagtctgcgtgaaggtggtgtgccaccaaggtttctgattatagatgatggttggcaagaaacagttgacgaaatcaaggaagtggatgaagccctccgtgagcagactgtatttgcgcagaggctggctgatctgaaggagaatcataagttcannnnnnaaacctgcaagaatcttgaggaccttgnnnnnnnnnnnnnnnnnnnnnnnggagtcaagtgcgtctacatgtggcatgctttacttggatattggggaggcaccttagcagcatccaaagtgatgaagaagtataatccaaagcttgtttatccagtccaatcgcggggtaatgctgcaaatctgagggatattgccatggatagcttggagaaatt

SEQ ID NO: 172989 - DNA, 524 bp, Zea mays
  Clone ID: MRT4577_89348C.1
gactattgttaaagctaacgcacgggtcctaagatgatctcaacgagatcagcaacctagagtggaacaaaaggtaaaagctcgaccggattctcctatccagtaccaatactaaccgtgaagagcgaggcctacagaccctttataccttaagagcccgaagctggaggtgactgtaaaagatacacacaagggataactgtcttggggcagccaatcattcatagagaccaagatttttgatcgcatcgaagatctgctcgcctctctctgctgataatcaaacggaccactacacgcgccatacagtgcttgtgacttttactgctgaccatacagaacatggacctaattctacaatgcttacagacacgtcaagatgatctctatagaacacccaactgccacactgcgaacaggagccctaatgtctgaactatcgaatcttgacttataatgcactgaaggaaaggatgcagatcttgtctaccggtgataatataatgcaggtaaggtaccagcac

SEQ ID NO: 172990 - DNA, 195 bp, Zea mays
  unsure (1)..(195): unsure at all n locations
  Clone ID: MRT4577_89349C.1
gcacacancanatacctacgactccagctctgttcttattgagcacctacctagttatncggggcgtggaactcaagaatgtgtggcttgtgaaaaccgactaccgattgaaccatcatggcggcgtctttttatggcctatacaattagggcagcggcttgggctttagggtcgttcacgccaagatcggctgt

SEQ ID NO: 172991 - DNA, 533 bp, Zea mays
  Clone ID: MRT4577_8934C.1
gccggccgggcctgcgaaaaagggggaaaaaaaaaaaaaaatttacccaaaaaaaaaaaaaaaaaaattaaaaaaaaaaaaaaaaaaagaactaaaagaagtcccctcggtcaagaaaaaagaataacaactagggggatcccaatgccctaaaaaaattaaaaaaggggctcatgggcccggggggcttcaagaggtggggcgccccccggttgggggaattgcgagttaaattttgcggaatcattgaacgacgggggggggccggcacgggggtaaacccaatttggtcgcctttgtaaaacgcccccgtgggcccccctttatcaccattgggggggaaaaacccgggggcccccccaattaaatgtccaagcggaaggccccctttaatggggaggggtaaatagaaagggaggccttcccgtaaaatttttccaaaaatttttggttcattagcgcatttggttaatgaaaaggccaaattttttgaaaacccttaggaaacaatttggaaaaaccgccttattttt

SEQ ID NO: 172992 - DNA, 2206 bp, Zea mays
  Clone ID: MRT4577_89350C.1
caagaagcaggacgggaaacagctcgaggattagggttagagttaaagtgcagacactcaagacacaaattaccttttgcccagccagcagccatcgccatctctcttttgccgaagagagaaaaatcccttggttcacctagggcgaggctggaagctggaaggcgacgcgatccgttgtcgctctcgaaataattttcaggaaccatgaatacggaacccattggtgacggcgacggagaaggcgaaggctctccggcgatgatcgcgacagatacagaggacgtcggtgtttactcataaataacatgaagactagatggactcagctaattaattctgtctatccgtcgcatctactacttttcaaagtccagcgccgcggtcaacgcagccccgacgccagctgcctgcggagctttcaagtttcatatattgttttgtttccgaatgccgagtctttgtgcagactgcagagtgccagaggtacaggccgcaggttgaggagggaggaggcaaggcgaagctgctcgccgtcggcgccacgtcccgggcggcggcgaagtttcgtggtggaatcagcggggcgcccatcggccggcgaggcctcggctgcccggccggccagtcagtcggagtcgggccgggtggtctccgtcgcagggctatcgactttagatcttgaacatgggacccaaatcactgccctggagcacaatatgaagaaaactagcttatgactgcagatctcacccatgggttcaatgagtcaaaaaatcaaaattttcacagaagatgagatcgcaagtatcactagcaattacagcactcttatcggaaaaggtggtttcggagaagtctacagaggggtccttgacgccgacgatgatctggtggcagtgaaaagatacatccgacaggacttgcgcgacgagttcatggatgaagtgaacatccacagcgtgatgaaccacaacaacgtggtgaaactcataggctactgcattggcgaaagcactctgatgctggtgacggagtacatctccaacggaaacctcgacgacatactccacagaagcgacgcctctatccctttggacgtgaggctgggcattgcgatagggtgtgcagaggcgctgagctacatgcattcgatggactcgcagagcgacaaccatatttaccatggcgacattaaacccgccaacatacttctagacaacaatctgacgacaaaggtatcagattttggactgtcaaggttccttttcagtggcactacccagttcactacgaccttgaaaggaagcatgggctacatggatcctgtatactttcacgaggggtgtctgtcgccgagaagcgatgtgtatagcttcggtatagtcctcttggagctactgactcggaagagggcaaagtatggggacgtcaacctgatccctacgttcaacaaagcctgtgccaaggggaaagggctgagggagctgtttgatgcagcaatagctgagaaggacaacgtgaagatcctcaaagagtcgtggaagctagcatcccagtgcctgtcactgaacatccacacacgtcctcagatgaatgaagtggccaaacgccttcggatgctcaagaaggaactgaagaccagtccgcagtccatactggcgacacactccatgtgggccaaacagtacaggcaggcaggctcaagctcgcccagcttcaagaagaagctgagcttcttcaagggaaacgctagcagctactctaaggtcatatctgaacttgggggcaatgtaagggtttttacaaaggaggagataaatgaagtcacacataattactccaatcttctcagtggaggtacatcagcaaccgaggtttataaaggaacacttgaggacaacacgatggtggcggtgcatagattgctctacgagggctctgaggaggcgttcatcaacggagggatggtcgtgtccaagatcgcccacaagaacatcgtcagagttctgggctgctgtctggaaccccatgttaaactatgcatagactcatattctgttagctagctcctattcttaggtgtttaccgagtctagctcctattcttaggtgtgtaccgagtcatccggctctatctcttgtaatcaggtctatatatacattgtacaccgaatggcaatatacatagaacaattcttcttct

SEQ ID NO: 172993 - DNA, 115 bp, Zea mays
  Clone ID: MRT4577_89351C.1
cgtattaggtaggatggcgttcatcatcaatgtcgcagtgaacgctgcggccgtggctgcgctgctgctggtctcagcggtgtcgcctgtcgcgctcgctgggggggtcgctgtg

SEQ ID NO: 172994 - DNA, 561 bp, Zea mays
  unsure (1)..(561): unsure at all n locations
  Clone ID: MRT4577_89352C.1
aattcggcacgaggcgacgccgaccgcactccgctccccgtccaccactcccagcgcgatggctgggaggaccgcgcccgcccccctcccctccctctccctcacgcccgacgacgagtccctgctcggctgctcccctcccctctcgattcttccggccgcatggcggtggcagttgttgacccacgtggcacgacggcggtgtggtgcgtgtgcaggggctcggacagcggcggcgaacgcgacgaccccgacccccaccaccgggtgcgcggcgtccagcgtgagcgtgacggtgtcgcagtccaacacgggcgacagggccgggtacgacccggtgttcgaggtgatggtgcggaacgcttgccgctgcgccgtccgcgttgtgcgcctccgcttcgagggcttcgccagctcggtgcccgtggacccgcgctgatctactcagctccgtccgagacgatagcccagggttcgnttnctttcttcctacgaactcttccacacccatgcgccctcatggagccctggcagagcccgctcgtgatgcccatcccgccg

SEQ ID NO: 172995 - DNA, 412 bp, Zea mays
  Clone ID: MRT4577_89353C.1
aatcaaattctggttgggatatgtaccttcttgttcccctcatgatgcaaactgggctgcaacaatttgttgcggccgccaaacaaaacccagaggaaaaacacactgcacccaataatgcgatcgcacagaaacttttctctgggggcgttcgatcgatcgatggtgcactaggccgtcctcgcactcaggatctgaccgggcgcgacgggactggacgcaacggaagcctagaaacgactgtacatacaggggttgggacttgggagggagctcgggttcttggagggctttcctttgggtggacagcgagggagcgcgagcgagagccagacgcgctggctatcgtgcagggcaatgaacagcacagcgaggcaattcctgcgtacaagagattgtattgtgaccaagc

SEQ ID NO: 172996 - DNA, 613 bp, Zea mays
  Clone ID: MRT4577_89354C.1
gtctactcgtaccgtaccatagagacgggacaccggcacgccgcgcctcgctctcagccgatgtagccgccgtcttcttccagggcggtgctctgaaaatctgaattcttaacgagttctcgcgcgccgttgccgtgcgtgcagatccaggtcctggggcaccggaccgtggaccactactccgctcctgtctcccaggcaggtgaagcctcggcacgagcgcaccaggtccaccacgtcgtccacgtactcgccgccactcgtctcccaggtggccgtggcagcctcaggacgcaggccaacgggtgcgtgacggagtaggacgcggtggcgcagccggaggagagcgtcgtcgtccggccgccgccgacgacgacggacatgcgggagcgcgtgcggctcctggagcgggaggcggcggcggccaagcagagggagatgaaggtgctggagtcgctggtccagcagaccaaggagatggagcgggccaaggtggcgttcgaggagtcccggctcgaggtcgccgcgctgcggcggcagcagcatgacgagggcgccgcggcgcatgcgcaggcgcagcagtggagcgtcatggacctcatgttcggcggcg

SEQ ID NO: 172997 - DNA, 425 bp, Zea mays
  Clone ID: MRT4577_89356C.1
tgggaccctcgaggccggccgggccgggatcgcgcctccgatactgcccgaggtagcgctctcctcgtgctgcgaaagcacgagcagcaacgcgagcagtcaccaccatctcagatcttcccctccacgctccctttcactttcctctacctcccctagcccgccgtcccgcaatgaccagactcctccgcctccagtccacgcttctaccctcggcatccgctctccggcgtcgcgcgggagcgccagagtcctgttagtcccgtcgccgatgccgaggcgagggcaagatccgagagatcttcatgacggcgctcagctgcgccatgaccgagggcaagattgtctcctggaccggcgtcgagggcgaccgcctgctcgaaagacgaccccgtcggcgacgtctagtgccatgaggctgacat

SEQ ID NO: 172998 - DNA, 334 bp, Zea mays
  Clone ID: MRT4577_89357C.1
gggcgcccccctcggggagttttttttttttttttgtttcaaagaagctcctgctatttcatgacctagtcagacaagcgcaggataggtttcaaagccggaggacacccagctaaggctatcacaaagccgacaaggtaatagctgatccatcgctccaactcaaaacgacagccgacggaggcaaggtctagactactagttcagcttatagattaggggcgttgatcttggcacagcggtactcctgagtcgccgccatgccttgtaggaggtccttttcatctgcagcctcctctccggagaccttgagcctggagggcatgaggagcct

SEQ ID NO: 172999 - DNA, 366 bp, Zea mays
  Clone ID: MRT4577_89358C.1
ctttgtcaaggcagccgactccggcaacgatgtgtccgagctcctggaggccagccgcgcacagctcgaccgcaacttccggcagctcaaaaagacggtgtaccattccaacagcatgctatcagcattgtcgtcgacatggacatcaaaaccgccattggctgtacgatacaagttggacactaatgcactggagatggagtcgacggaagggaagagtcacggatccactctagagcggcttttggcttgggagaagaagctctacgaggaggtcaaggcgagagagagtgtgaagattgagcatgagaaaaagctttctactctgcagagcctggagtacagagggagggatagcgcaaagct

SEQ ID NO: 173000 - DNA, 332 bp, Zea mays
  Clone ID: MRT4577_89359C.1
gacccacgcgtacgagctctcatggacatctccctcccctgtttccctccatggtgtctgctctcctcttcccagacatggctggcgcgtctctctccctggagctctctcgactgcgccatctccagcttctcgccagggacgcgcgcaaatccctcaagcttccttccatggcgctcccaatttcaagcgctcggagctccagctcaaccgaccgcccggcaccaatgcgcgcctcaggctcctcgcggcctcgctgggcgggatctccctccagctccaatcccctctaccgcgcccctctgcttgccgcgaacgcgcgccgccgccct

SEQ ID NO: 173001 - DNA, 252 bp, Zea mays
  Clone ID: MRT4577_8935C.1
gagtctagtttcaagcgaccatggcagaagcagatcttagcgtccagcgacgcctcatcattgcgatgctgaagatcctaatgatgatccgaggtgagcggaagcccagctggggatctagctgccacagatgctgcagggactcaggtccgccaatcaccttatgacacccagatcagctgcaaatgtgagaacatccacacaaggtagtaacatctcccatctgaaactgatggaaaacatttgtcagcg

SEQ ID NO: 173002 - DNA, 692 bp, Zea mays
  Clone ID: MRT4577_89360C.1
gtacctccagccggccggggtatccaaaactatcagtctgggccatgctcagacgtctccactcccgtcccgcgctccgcaaccgatgagcggcagaagagatggcctgcaacggcgacgacccgcgctatcggcatcgacctcgggacgacgtagtcttgcgtgagcgtgtgatagcacgaccgcgtcgagatcattggcaacgaccagcgtaaccggaccacgccctcggacgtcgccttcaccgactccgagcgcctcatcggagatgcggccaacaaccaggtcgccatgaaccccatcaacaccgactttgatgccaagcgtctcatcgccaggaggttcagcgatgcgtctgtccagagcgatatcaagctgtggcccttcaaggtcatttctgggactggtgagaacccaatgattgctgtccagcacaagggtgaaggagaagcagatcgcagtgtgaagagatctccgtctatgggtcttatcaagaagcgtgagattgctgaagcttacctcgggagcacgaccaagaatgctgtgggcacagtccctgcccacttcaatgactcacagaggcaggccacgaggcatgtttggggccattgctggcccttaacgcgctgcgtatcatcaacgagccaacagctggcagtatcggcctatgggagttgaccacaaaggctacc

SEQ ID NO: 173003 - DNA, 520 bp, Zea mays
  Clone ID: MRT4577_89361C.1
gactcactcacacgaccttcatcaaaatcatgaaccaacctgaatggctggccagaacacacgcgggacatgccccatgcgctgtcaaaggtgcccatgcacgtctgtatggcttgagctctgtgacaaggccacagcttgccgtcgcggccagggcaggctcatgcacatgtggtgagctgcccacaatctctgggtaggctccgccttcatggcgagaggcatctcgtgcgacactgtgcagctctttgctgctaagtaccgcgatgaggggctcaaggagtctgggccttatgggcttgatgtcacattggccttcttaggcgatcgctcctgctataatggccagttcttcgaatggcggaacatggcacagatttggaagcatcctattgtgctggctggcgagaataaccagcgggaaataagaatgatacacattatggctacatctgacccaaaaaatgcaataaggggccagcatttgcaatgcctggggcgcatgtcgatggtatggatg

SEQ ID NO: 173004 - DNA, 179 bp, Zea mays
  Clone ID: MRT4577_89362C.1
gggccccctggaggtccggcgcgggatcttccacgcacgcctatgcatggaagctgctctattatctacttatctactgcttctgcctgtgtgccgcgcgcccctacatgctgttgatgcgcgctgacacgagctcagagcttacctgcgcgcattgactccctggccgaggatgccct

SEQ ID NO: 173005 - DNA, 2464 bp, Zea mays
  Clone ID: MRT4577_89363C.1
aatattgggactcttgcgtgcggccgggagacgaatggtgcagcggtgaaggcaggaggaggaggaggacataggaggggataggagccgccgcagacatggctggcggggtggccgttggggtcgtggcgctgttcttggctgcagcttcatttggggctaatgccaacaccgactcgaatgatgtgaatgccctcaatgtgttctacacaaccatgaattcgccgccgcagctgacgaattgggtgtcccaaaatggggatccctgtgggcagtcgtggctgggggtcacctgctcgggttccagagtgacagcaataaagttatctgggatgaggcttaacggcaccttgggctacaacatgaaccagctcactgcactagttcagctggatatgagcaataataatcttggaggcagtgacattccttataatcttcctccgaatctccagaccttaaatcttgcagtaaataacttcactgggactgtaccttactccatctcccagatggttgcacttagggatttaaatcttgatcataatcagctctcgaacatcaacgatatgtttagtcagctcacaaatttaacaacgttggatctatcatacaacacattctctggtgatatcccacatagctttaactccttgacaagtttgaaaacactttaccttcagaacaacaaatttaacggcacaatagatgttctcactgatcttcctcttactgacttaaatgtcgaaaacaaccaattcacaggttggatacccgataaactaaagggaatcaataatctccagacaagtggaaactcgtttaacaatggccctgctccaccacctcccccatcatcatcatcaccaccatcgacaaatacccctcctccctctcggcagcatgctgttccaagtagcgctggtaaaaatgccccatctgaaaatggtggaaaacactcgaaacttggtggtggtgcagtagcaggaatcataatatgtttgctggttgttggcgcaatagttgcattccttgtgatcaaaaggaaatcatggaggttatcacagggacaagaccctgaacaaaacgaacctctcagcccttttgcttctggacttaaacagatgaaatcaatcaaatctatcaaaatcgtatcaacaatgggcaaagaagaattgcagaagactgtttcgatgagtttgaagcctccaacaaaaattgacctgcacaagtcctttgatgaaaatgataccactaacaaggccatctcaaggaatgtaagcttgtcttccatcacaatacctgcatacacagtggcagaccttcaggttgcaacgggcagcttcagtcctgaaagttttatcggtgagggatcggtaggccgtgtttacaaagccaaattcggtgatcagaaggtcatggctgtaaagaaaataaacttctctgtatttccaagccatccttcagatttgttcattgagttggtcgcaaacatttcaatgttaaatcatccaaaccttgctgagctcgctggttactgctcagagcatggacaatgcttgctggcatatgaattctaccgaaacggttctcttcatgatttccttcatctgaaagatgaacacagcaagccattgtcttggaacaaccgtgtcaagattgcgcttggatctgcaagagcattagagtacctacatgagacttgttcaccctctgtggtccacaagaatttcaagtcatccaacattttattggatggtgagctgaccccccacctctctgattctgggtttgcaggccttcttgcaaaccaggaattccaggaatcagatgagaactcaggatacagggcacctgaggtgatcttggctggtcagtactccctgaagagcgacgtgtacagcttcggagtcgtcatgctagagcttctgactggccggaaaccgtttgacaggacccgaccgcggcctgagcagtcactggtccgatgggctactccgcagctgcacgacatcgacgcgctggaccagatggtcgaccccgcgctgcaagggctgtacccgtccaaatccctctcccgcttcgccgatgccatcgccctttgtgttcagcctgagccggagtttcggccgccgatgtcggaggtcgtgcagtcgctggtgcgcctggtgcagagggcgaacatgacgaggatgcacgagagccagtcgcggcgccacggcgaatccggcggggactacgagttttgagcgagacaaaactgtgcctttgcctagatttttttcttctaaaagtataaaaatagttataaactctccttgagagttttgaacttcaaatattcacatatagtttcaaactatattagataggtagtagttcagaataagtatttatctgaaataagtattggttcacatttgcctttgcgttgcaggcattttgttttgctaaagacaccccc

SEQ ID NO: 173006 - DNA, 194 bp, Zea mays
  unsure (1)..(194): unsure at all n locations
  Clone ID: MRT4577_89364C.1
gcgaccagcgtcgcaggtctttactaagatgaaggggactccaccgtcctcgcggttaagaccggcgcgagcgcaggacgccgcggactccacgctcgccgctacaggccgngcaggaattgcgtaaggagctgtcgccacgcatccataggctcggctcgcctaacttctcgctttacacagacctcagtgcg

SEQ ID NO: 173007 - DNA, 402 bp, Zea mays
  Clone ID: MRT4577_89365C.1
aagggaacaaaatggggggccgcctttaatttacccatttggtaggggcgccatgccggggtaggccaagcccccgacgattggggccggtgaaacgacgggttgcccatcctgcagggggatatgggcccgggctaggtcctcgcacttggaaacactgataaaacccgggttttggcacaacagggcacacttggggaccctttgggcataggcatgcctgccgaattccatataggtacacccgggggcggcgaacattcctgcgtattgttgggggagtcacgttcgtgcacgacaaacaatgtttgcttgcacccgggggccgacacccggggggggggggcgggcccccgggggaggggggccccccttaagtctggggccggttggttcttcccc

SEQ ID NO: 173008 - DNA, 189 bp, Zea mays
  Clone ID: MRT4577_89366C.1
atttttatatttgctcttttttattttttttaggggggggtacattacacattagcgccaacatcaacaaaccatactctactgtaaaagactttctttataaatatttgtttctgccaaggacagacattaagagcaataacaaaattttccatcaagatttaaaaatcgatggtttgaataaaccat

SEQ ID NO: 173009 - DNA, 454 bp, Zea mays
  Clone ID: MRT4577_89367C.1
gctttgctttgcagcgattcagaacgctccggcggctagctatagcagctggtgtgcgctgctggctactgaactctgaagaggcgctcgtgcagagcgtgcgttctgaaacttgtcaagacagcagactagcagcagagcacaggcacgcagcagcccgacgcctgggctagcttaccgccgaccaccgtcacacgcactcccacgtcgacggcgacgactgagcttccacatgcatgacaagaataaagtcatggcaactatataatctggatatccgtctttgttcaccgcctatcagatcatgtagcttccactttaattattttttgtgctattaatcatgtcaagctcttggagcaatagtttgtcaaatgttaaatctattccttgagttgtctattgagtatgagttgctcaaaaaaaaaaaaaaaaaaaaagtcgacgcggccgc

SEQ ID NO: 173010 - DNA, 177 bp, Zea mays
  Clone ID: MRT4577_89368C.1
gtaaaaaatgtggggggtaatcccaacaaaataaaatcacgcgcagaaaaaaaaaaggaaattacacaggggcgagaccaccattatgatgatacagacctgtttaacttaaagccgggaggatgcatagacactcaaggtgagggcccccaacaaagaaaatggagctgaatctca

SEQ ID NO: 173011 - DNA, 404 bp, Zea mays
  Clone ID: MRT4577_89369C.1
gccgtaccggtcccgattcgacgccacgcctccggcgtacagcggcagtgcgtaaagaggatcgtcgaccagaacaagctgaagatggtcatcgggctcggggtgtgcctggctctgtcagctgccatcgcctctgcaatgcaaatgccctgtccatgcgcggggctggagggcttgtacggcgctggcgccggcctgacgacgatgatgggcgccggcgggctgtacccctacgcagagtacctgatgcagcacgcagtgcaccccggtggcggcggcgccctactacaccgggtgtgcgcagacgagcgccatgtaccatgcggtccggcaacagtgctgacagcagtaaatgaggatgatggacgtgtcatccgtggcgcagcagatgcagatgatgatgc

SEQ ID NO: 173012 - DNA, 230 bp, Zea mays
  Clone ID: MRT4577_8936C.1
cctgggaatggtccattttcatattttccacatttcctataaaaactaaaattttggcggccttaaaaatagccaacctaaacccaaaggggtaaatccgggggggtcaaaatccccataaaaaaaattaaaccacttagcccggaaaaaaaaaacccctgggggcaaatgaaaaacaataaaagtgaaaggggttgaaaaaacccccaccgaaaaagaaccttagttat

SEQ ID NO: 173013 - DNA, 1317 bp, Zea mays
  unsure (1)..(1317): unsure at all n locations
  Clone ID: MRT4577_89370C.1
cggggttatatctgcgcctcactgctgcggtgcacggtgtccccctccctacccgctgtctgcggctggccaccctcatagcccccgagctctgtgtgcgatggactactcgggcaccaaggagtcgcctcctgccggggcttggtggtcgagggagacggtggccgtggtgaccggcgcgaaccgcggcatcggccacgcgctcgccgcccgcctggccgagcacggcctcaccgtggtgctcaccgcgcgggacggcgagcgcggggaggccgccgcggcgccgctcctcgcgcgcgggctcgccgtcgtcttccgcaggctcgacgtctccgaccccgcctccgtcgccgagttcgccgcgtggatccgcgacgccctcggcggcctcgacatcctggtgaacaacgcagccgtgtcgtttaacgagatcgacaccaactccgtggagcacgccgaggctgtcctcaggaccaacttctacggggccaagatgctcaccgaagcgctcctgccgctgttccggcagtcgtcggcgacaagcaggatcctcaacatcagctcgcagctgggccttctcaacaaggtgggcgacccgtcgctgaaggcactgctcctggacgaggagcggctgacggaggcggggatagaggcgatggtgtcgcggttcctggcgcaggtgaaggacgggacgtggggcgagcaggggtggcccaaggtgtggacggactactccgtctccaagctggccctgaacgcctactcccggctgctggcgcggcggctggaggcgcgcggcgtgagcgtgaactgcttctgccccgggttcacgcgcacggacatgaccaggggctgggggaagcgcaccgccggcgaggcggccgacgtcggggcgcggctcgcgctgctgccgcccaccgagctccccacggggaccttcttcaagtggcgcacgccgcagctatactctaagctgtgactggctctgggctctggctggctggctagctgagctgtcgtccgtcggccggggcgtacagcatttcggtccggcggtgtaggcgtgtagccgctcctcctattcctcctgctgaatagtactagcaagtatcaacaacgtgtgcagagaagtcggtaaccggagtgtcgatctgccaaggtgctttggttgaacacggtgtgctcagcccgtttgtgactctgagctatgtgtacaatgtgcgcttatatctgtcttaagatttaggcccacttctgagcactggttgaatggctgttccttacagttctgtcnnnnnnnnnnnnnnnnnaaaaaaa

SEQ ID NO: 173014 - DNA, 576 bp, Zea mays
  Clone ID: MRT4577_89371C.1
aaaaggacggacaccttcttttttttttttgtctgaacaatacatggagagatttactcatacacaggaaatacatatatgcacaaattatgactggcgcgcgcacagattttttctttaataaaaaatacatgaaaaatgcgggggtgttgtaagcatgcacgcagccttccgttcaaagaatgaccgctgactgaaggaaggcattcattcgcgcccaggaaataactatttacccacccactccaagaaccaggggaggccccagcaaaacttggaaggatagtcttttataaacacatccttgctgcagccaccgacatacaaactaaatgactgcttgcgacccgcctttgagacacgactggcacacacaacagaaaggatgtgtctgtcgtaaacaaccctcacagagggagtgactgccggccaactagcaattacttttgaaaagaactgggtgagtgtgtatcaatcaaaaaaaaatgaaggaacgcgctggcatgcctgtatgatacatagatgcactcttttgtgcctgaggaaaacttttggacagagggaggcggtctctct

SEQ ID NO: 173015 - DNA, 140 bp, Zea mays
  Clone ID: MRT4577_89372C.1
cccacgcgtccggaagagcggtaagtataggacagtgactaagctaatacttgtgtctggacctcgctagtggccggtcgaccctggctaggatgcacactcacgcgatgcggtatttgcccacgcgtccgaaactatga

SEQ ID NO: 173016 - DNA, 158 bp, Zea mays
  Clone ID: MRT4577_89373C.1
gccggctattttccgccgcggtgttccaggaccggaggccgaaggagctatcaagcaacggaggtgataaccaggaggaggcgtacggccaggtggaccgcatcgtctccagccgcacagtcagcagcccggtgttcgcggaagacggctaggacacc

SEQ ID NO: 173017 - DNA, 374 bp, Zea mays
  Clone ID: MRT4577_89374C.1
cacgctcaatgctgatgaatttgaagacatggtggctgaaaagcggctgatcccagatggatgaggggtcaagtacatccccagacgcggccctctggacaagtggcgggcactgcactcctgagggcttccaaagtgctgtccacatgataatactcaccaatgaattctactacctgtccactgtaccattataaatgaagaacagataagaagatgagttagataaccaaatgagagaaaggtggagatattgaagattaccgggggggcgatttataggacccaacgctacttacacatacttgctacgctagagaacatataccagggtaccgaactaaagactactggccgggggttacaacgagaag

SEQ ID NO: 173018 - DNA, 613 bp, Zea mays
  Clone ID: MRT4577_89375C.1
gtaccggcccccttcctcgagtttttttttttctttttttttttttttttttttttttttttttttttttttttttttttttttttttttttttttttttggggttttccccccgggggttttaaaccttttttgaatttaaaacctttacccattttttccaaagggggcctgcccccccaacggaaaattgctcaaacaacctttttccccattggcccggggccacaagtttttccccccaggaaacccttttcttttccctttttccggccggggcccaagggtttctcccccttttattttcccccaaaaaggaagggttgcccccttttataccccccttcagggcccctaaaaaaagaaatttttggggggaaacccccccccttggtgtcaagggggccatttttactagacccccccgccaatggggttttaattttggcgggttttgccccttgaatacctggccccccctttcaaaaaagggggccctagagaaagttttcccttgggctgaatgaacccccaccctcccctgttgggcggggaaaatttatttttggttgggggggtttttcccaaaggtggtttctccctttttaaaatt

SEQ ID NO: 173019 - DNA, 335 bp, Zea mays
  Clone ID: MRT4577_89376C.1
ctctcctgcttattacatctcagctttactaccattcatccatctagcgcgtgtgagcccttctaccttattgacacaaccacaattgttgccgttctaccatcacgctgctcctaacgctggcaccctcttacaactgcaacactctctgtcattaaaccaacttgcttttacaaacacaacatcattctaccaacaacccatcattggtagacccctcttttacatttcttatgattcataacctaatactcaaattatgccgactgataactccatgcttgccaaaaataacaaagtacatttatagactaaacatcacaaaaaaccagtcc

SEQ ID NO: 173020 - DNA, 155 bp, Zea mays
  Clone ID: MRT4577_89377C.1
aagaaaaaagagttcactagctataatggcccattttttataaaacacacgttttttcaaggggacaatccaacaccaatcaagagacggggggttgttccaaggcatgacacccaagggggggtaactggcagttataataacagcctttaatg

SEQ ID NO: 173021 - DNA, 806 bp, Zea mays
  unsure (1)..(806): unsure at all n locations
  Clone ID: MRT4577_89378C.1
ccggccggggatttcatcaactccggcggcttggagaagacgaagctgctccagaatccgataggaagtttggtgctcgcgtgttgacgggttgatttcggtgcgccgatggggcaggcgttccgcaagctgttcgatgccttcctcggcaccagcgagatgagggttgtgatgcttggtctggatgccgccggtaaaaccaccatcttgtacaagctgcaaatcggggaggttttgtcgactgttcccacgattggtttcaatgtcgagaaagttcaatacaagaatgtgatgtttactgtttgggatgttggtggccaagaaaagttgaggcccttgtggaggcactacttcaacaatactgatggcttgatctatgtagttgattcattggatcgggagaggattggaaaagctaaagctgaatttcagaaaggggcaatgacaccaatggaggtgtgtgagggccttggcctctacgatttgaagaatcgcacctggcacatccaaggctcctgtgcgcttaaaggtgatggcctttatgagggcttggactggatggcaagcactctgaaggaattgcaagcttcaggccgcctaccctctgagggggacatcgttgttctaagaagcaaatctgcatgtaagaaatccttgggttgatactangtaataatgggatcaagagatcatcaatgatggttaacatctttgatgagaaatttcctttcaaattcatgctgcactgctcaggncttccnggtggggtgattctacttaaagaaaaggtgaaacatgggcctgac

SEQ ID NO: 173022 - DNA, 1282 bp, Zea mays
  Clone ID: MRT4577_89379C.1
tgggaccctcgaggccggccgggccgggaaatggttcagatgtgttctcacgtcacgggtaaaatctggcgaaacgagtctcgccgggactcacaaggcttttacacgactagttctgcgaggctaagagcagaaaaaactccacctgcctggctgatttcatcaactccggcggcttggagaagacgaagctgctccagaatccgataggaagtttggtgctcgcgtgttgacgggttgatttcggtgcgccgatggggcaggcgttccgcaagctgttcgatgccttcctcggcaccagcgagatgagggttgtgatgcttggtctggatgccgccggtaaaaccaccatcttgtacaagctgcaaatcggggaggttttgtcgactgttcccacgattggtttcaatgtcgagaaagttcaatacaagaatgtgatgtttactgtttgggatgttggtggccaagaaaagttgaggcccttgtggaggcactacttcaacaatactgatggcttgatctacgtagttgattcgttggatcgggagagaattggaaaagccaaagctgaatttcaggcaataatcaaagatcctttgatgcttaacagtgtaatactggtacttgccaataagcaagatatgaaaggggcaatgacaccaatggaggtgtgtgagggtcttggcctctacgatttgaagaaccgcatctggcacatccaaggctcttgtgcgctcaaaggtgatggcctttatgagggcttggactggctggcaagcacactgaaggaattgcaagcttcaggtcgcctaccctctggagggacatccttgttctaagcagcaatcctgcatgtaagatccttcgggtgatatcagtaataatggatcaagatgatggatttagagatcatcaatgatgttaacatcttgatgagaatttcctttcaaattcatgctgcactgttcaggctccctggggtgattctactaaaaaaaaggtgaaacatgggcctgaccgcataaaaatatcggtcatgcgtttgtactcacccctggggatttcttgtcaatgatctaacctgtgatataggccttgtaacttccgttgtgagtaagtttcattcaaagctaaccggcggatgcatttgtcacatatgagaattgaggagtcaacttccacatcctgttgttgtaagaatttctgtaaatcgaagttggcaaacataatttatctcaacaagttggtccggtcattattcaggattgggtttatttttgtg

SEQ ID NO: 173023 - DNA, 714 bp, Zea mays
  Clone ID: MRT4577_8937C.1
ctagttctagatcgccagccgccgccctttttttgttttgttttattttcaaacgggcccttgcattcatcaaaaaaagttaagagctcacagccttgtcttgatactgcgccactcacgcaagtgcgggatgtacaaatgatgaggaaaacgaccaaactaaaaaggccgtcttttttttagagaaaaaaaataatagagtaattaattattcacggcaacagcatactgctgccgttccaagtcgtccaagtccccggcgtcggcgtaggcgccctggggccttcgcggcgccggcctctccctgctcaacatcttgatgagcgacgcacaggcaccgatcccccggtccggagtggagctgccggcttcctgcttcacagcgtcctgcactttctcctgcacgaaccgagctgagcccaccgccgtcggcggcggcggctccacctcggcgcggcagaccgggcacgacgagctcgacgcgagccaagtgtcgacgcaggggacgtggaacacgtggccgcaggccggaagcgcgcgcacgacctcgccgtcctgcacggcgccgaggcagatggtgcactcgtcggagccggcgcccgcctcggccgcgtcgttcctgtagagggtggtcggcagcgccgcgatggccgcgggatccagcccgcccttgggggccggcgccgcggccgtggtcggcagcaagacggctat

SEQ ID NO: 173024 - DNA, 444 bp, Zea mays
  Clone ID: MRT4577_89380C.1
aaacccaatcctgaataatgaccggaccaacttgttgagataaattatgtttgccaacttcgatttacagaaattcttacaacaacaggatgtggaagttgactcctcaattctcatatgtgacaaatgcatccgccggttagctttgaatgaaacttactcacaacggaagttacaaggcctatatcacaggttagatcattgacaagaaatccccaggggtgagtacaaacgcatgaccgatatttttatgcggtcaggcccatgtttcaccttttctttagtagaatcaccccacggagcatgcagatttgcttcttagaacaacgatgtccctccagagggtaggcgacctgaagcttgcaattccttcagagtgcttgccatccagtccaagccctcataaaggccatcacctttaagcgcacaggagccttggatgtg

SEQ ID NO: 173025 - DNA, 1030 bp, Zea mays
  Clone ID: MRT4577_89381C.1
cattgggtacctcgaggccggcagggaaatgctcgagatgtgttctgaccgcattgtcgagaaacttctattttcgtcacaaggctattccgttccgagagccaaaaactccactgctttcatcaactccggcgacttggagaatacgaagttccagaatccgatcggaagtttggtgctcgcgccttgacggattgatttcggtgcgccgatggggcaggcgttccgcaagctgttcgatgccttcttcggcaccagcgagatgagggttgtgatgcttggtctggatgctgccggtaaaaccaccatattgtacaagctgcatatcggggaggttttgtcgactgttcccacgattggtttcaacgtcgagaaagttcaatacaagaatgtgatgtttactgtgtgggatgttggtggccaagaaaagttgaggcccttgtggaggcactacttcaacaatactgatggcttgatctacgtagttgattcgttggatcgggagagaattggaaaagccaaagctgaatttcaggcaataatcaaagatcctttgatgcttaacagtgtaatactggtacttgccaataagcaagatatgaaaggggcaatgacaccaatggaggtgtgtgagggtcttggcctctacgatttgaagaaccgcatctggcacatccaaggctcttgtgcgctcaaaggtgatggcctttatgagggcttggactggctggcaagcacactgaaggaattgcaagcttcaggtcgcctaccttctggagggacatcgttgttctaagtagcaagcctgcctgtaagatccttcggctgatagcagtaataatggatcaagagcgtttttttttgtcatggatctgtactcatccctcgggatttcttgtcagtgatctaacctatgatatagatcttgtaaattctgttactagttcatacaaagctaaccggcggatgcatgtcacatatgagaattgaggagtcaacttccacatgctattattgtaagcatttctgt

SEQ ID NO: 173026 - DNA, 332 bp, Zea mays
  unsure (1)..(332): unsure at all n locations
  Clone ID: MRT4577_89382C.1
cgccacgcgtncgactagttgactagctacaatgccaaacattttcttcttcgcccaggcgacgcccgncacgcgagaggagcctttcctacggtgggaagacgacacaacaccgccgaaggccgccggcggcgatgggcagacgctcgacacagccgcccgttacgcccacagcttcccatggctgccaaccgctggcatcgagtacctcacgctcagctacgcgacggccctgcaccgctgctggcccgacccccgcgacgtagcatacgccgaatcggcatacgtcgacctcaacctgctcttctgctgcctccggaagtacgagcgcc

SEQ ID NO: 173027 - DNA, 240 bp, Zea mays
  Clone ID: MRT4577_89383C.1
ccttttccgttatcacccactgccgaaagtgggacgcgcagccatcatcggttcggggctcccgaatacgtaagaacgacgccaccaagatctatagccgcccagaggaggacgcctgataatgcaccgatcgcgacaaccaacagcaccgacttctgtacaaacgccggaggggacattacctcgggtagagccatacacgcaagtctgtggcgacacgtgtacacaccagtagctgga

SEQ ID NO: 173028 - DNA, 272 bp, Zea mays
  Clone ID: MRT4577_89384C.1
cttcttcctgcagtcggtggactcggacggccggaacttcactagctcgccaccaggccaaacacagttcaaagtagtcgtaaaatccctttcgcctaaagagttggtccgtatctatgtccctaaaccttcggacagatacgatggaacatttttggtgcggtacaggatgcacgagactgtccacgaagggctcaagatagagatcctttacggtggcgagcatgtggctcagtctccctacattttaaaaggttcgtgtcactggtcac

SEQ ID NO: 173029 - DNA, 614 bp, Zea mays
  Clone ID: MRT4577_89385C.1
acgttctactatagagatccgtatctctacttgactctatcgcagcctgcgcgcggcgccgagcgacagatggcaccaatctactgccgaggacgcggcaacgatgtcaacccgcacgagttcggcaaggactactacgcccacctcaagcgctccggaaagatgcaactccctgtacgccctgacgttcgcgaaaactgcacaggctcaaggaccttcctccttatgatcctgactgtgactacatcagggctgcatccattgcagggaggatctacctaacgcatggtatcgcggagccagcgtgtcacaagatctacgatgtccgtcaaagtgatggatcccgaccaccagacttctgtgagattagtgccgctgaagcacgcgacactcactgcagaagagtgccgattatgagaatcatccatgtagatgctcagtgtgcacggcatgtcacaacgaccgaaggtggatctggaccagagtgtctgcaaggccccgtgtagaagcgcgcgcagtgccatgtttgccgtcgaggccgccatgatagatggcggagaataccgctctctatttgcgctattgggatatgatgttctagtatagaagacttc

SEQ ID NO: 173030 - DNA, 212 bp, Zea mays
  Clone ID: MRT4577_89386C.1
tttttgtgtttttttggcctgggtaaacctcccacaacacaaactctgactatcaaaagaggttgggagccacggactatgcaaatgttgcatacaagcgcaagcagaccctttaccatgaacagttagaaattttatgagctgcacctgggtagtacatgtggctgctactacaaacttcctacggctcagtggatcaagggacccaggga

SEQ ID NO: 173031 - DNA, 354 bp, Zea mays
  Clone ID: MRT4577_89387C.1
ggaaaggggctttttttttttgggggggccccaaaccttttgcaaaaaaccttttttttgggggtttacccttaagccatttaaaaggggggcccccccatggtgggttgttgggaaaacccttttgggtttttcaaaacaaggtggttgaatgggcacaattgttgccgttttaaaagggggcccgcgtttgggcccccgtgccggttgaacgggaacaactgttgttgggttaaaaagggaacaggggtcacataaactttctggcttaatggggggagctgttttttttgtaaaaaagccgcgaagtttaatgctccccattgggtgaatgggaaaaatatgtgggggggg

SEQ ID NO: 173032 - DNA, 355 bp, Zea mays
  Clone ID: MRT4577_89388C.1
cgaacgcgtgcgatctgaatccatgtgatcaacgagacaggacttatatctcgagcgggactattaccaggacgtgggaggagatcctgagggttaactgatagaggctttaagcatgctggttgaaaagcaccacaattgtggtttgaataaactgcttgaaacgcatcgagatgaacatatgcacgaatctggatgcatggaagatgaaggcgatgcaaacgagcagcctgacacgctatcattagaacaggctattctaatgataactagcataacacgagggaatgttttgagcaacccaaatgtgctttctgacgatatagatcgctgcatgagacacattttcgtacac

SEQ ID NO: 173033 - DNA, 352 bp, Zea mays
  Clone ID: MRT4577_89389C.1
gatggtcattgaatgcgcatcattcaggacagagcaggatctgtcgctcatttggatcttatccctgacgaattgttggacagcgttacctggaattggaagtatgcagctgatggtagtccatgtaatgttgaacatgaccaaactattatgggtatcaactatcgattcttgatctattaatttgtgaccagatcaatctcattgacgacacacttgacgttgcgtgactctatttacattgaacgtgattacatgttgcaaagataaaagatctttgctttgccacattaggtctgaactgattccttgattgaagaggggatgcactagaatatgtatttttcaaata

SEQ ID NO: 173034 - DNA, 266 bp, Zea mays
  Clone ID: MRT4577_8938C.1
aaccaaaaaaaaacccccacattttttactttgggggaaaagggcaaaaaaaaaaggtggggatttaacaaaagcaaaggagatttgccatttttttcttcaaaagcacaaatcatttaagccccccttgaccataaatccacccctcaccccaatttttcggcagggcacacaccaacacatttttttgacccgttcattccacacacaccttaattaaactccccacttaaaactttgcaacctacataagttcaaaccccccc

SEQ ID NO: 173035 - DNA, 303 bp, Zea mays
  Clone ID: MRT4577_89390C.1
aatcatcattcatcttagtagtataggctccaaatcatatctgccacatcaattgtctaactcggaaaaccatgaagctggtgcttgtgggtcttgctttgattgctctagactcacgtgttccttgtacacagacaagcggctgcagctgatgtcaacaacacatccgtgagcaggatcatgatgcacatgaacttgatgcacaattacagcaacttttaccaccagcacaacatgatcagctgcatcaacaccaacaacagcaggttcacatgcaaccacaaaaacatcagttgcaaccag

SEQ ID NO: 173036 - DNA, 819 bp, Zea mays
  Clone ID: MRT4577_89391C.1
gtaccctcgcggccttccgggagtcgacagaagctacggtgggtacggtccctccaccagctccctcccctcgcgttgtcatcttcttccttccgctgcctcccatagctcggtgggctcgacgcctgtggccaggaggaaaccaggattgaggacagagagcgatcagccgaagaagtcggtgcgctgccgacggttgtggtggtggatcatattcgcttccaagaagacacgaaatatcatcatcctcaacgcctcacagtcatctatggtgtgcaaatactttctttgttcttaatttctctcccagacgctacagttcgtactatgcgttcaactgctcggtctcaaactctactttgcatgattctgccattgtcaataggtattaaaaaaagtagcagtgcaactaagccttatgtcattcacttttgatccattttttattatgccagtaagtgatattccgattttgaaagagatcaaagctctggcatggtgtggttcattgttgcagcctgtaaaaaatttgcagtgcgtgcctttggggattgccgtgtatgctacttaggactagagctgggagtctgggttaccttagcttacctttctcaggttttatcttgagccatcttacatacttcttattataaatatgtactctacatatctaatgtgcatctcttacttcctttgctagccgtgctttgcatgttataccatccgacaacaaagggcagcccaagggagcttataatatcacgtatgagtgtggaatttctaattgttagctattgctgaaaagtatctatgtgatct

SEQ ID NO: 173037 - DNA, 314 bp, Zea mays
  Clone ID: MRT4577_89392C.1
ctggcggcagccatcaggtaagccaagatgggtgcatacaagtacatccaggagctatggagaaagaagcagtctgatgtcatgcgctttcttctgagggtccgctgctggcagtaccgccagctctctgctctccacagggctccccgccccacccggcctgataaagcgcgccgactgggctacaaggccaagcaaggttacgttatatataggattcgtgttcgccgtggtggccgaaaacgcccagttcctaagggtgcaacttacggcaagcctgtccatcatggtgttaaccggctaaagtttgctcg

SEQ ID NO: 173038 - DNA, 580 bp, Zea mays
  Clone ID: MRT4577_89393C.1
gcgttcgtacccgtcctccctcgtccggcaggcgggggggggggccctaccatacttactactgcttgtctcttgcatcggcgactcccatcttctctgccgccgccgacagcgccagagagaagatcccgacgcgagcgcccaacaccaaccccccaataccaacacaccaacacgccgatgcgggggggggggccagatttggcccctaggccctaagggagaaagcgaggatggaggactggatgtaccacgtgtggttcctcatgttgcaagcgcgggagcacaagctcaccgttgagcggatcgacaaccccaggtaagaccaccactctctacaagctgcaccttaatgaggcccataccgccccacccaccatcggctgcaacggggatgaggtcggctaaaataacctctgcttggaggtctgggatccacgagggcaagaaagcctgcgcacttggtgggcgacaaactaccggggaacacacgccttgatcgaggggatctactaaacagaccgagcccaggtcaacattatcaacgacgagctgaaccagctgctgcagcaccctgacc

SEQ ID NO: 173039 - DNA, 229 bp, Zea mays
  unsure (1)..(229): unsure at all n locations
  Clone ID: MRT4577_89394C.1
aaaaaaaacaccatccgatgacctcccatanaagttcagtcccaacattttatgtttcacgcaacnnctccatcaacagcactatgtctaggatcagatcacaggatataaacagctagaggcctaggaccaaagttttttcaccacaaatactgcacgcgttcatgcccagcatgatatctacatcttaccatgccaaacgaagcgatgaaattatacctgaaacaaa

SEQ ID NO: 173040 - DNA, 352 bp, Zea mays
  unsure (1)..(352): unsure at all n locations
  Clone ID: MRT4577_89395C.1
ggcgcgcgcaccaggcgagcaagcgnaacacgnacgagcaaccagaaacagggccacggnnggagcccccgacaccggcccncgccaaaacaagggcagacgggggnccccaacggaccacaaaaaagacaacaaacgagncccaaaggaagaccacacggcgcaaggcaangcaggaagcngaggggaaaagaccgggggagcaagagcncagggggaacgaagcgagaagacaacaaaaacgaaagcangacgcaaagacgncgacaggnncaaggccacggncgccaagaacaagaggggcggcgccagaagggaagagcgagcaccgcnaaaaaagggggccgcggca

SEQ ID NO: 173041 - DNA, 441 bp, Zea mays
  Clone ID: MRT4577_89396C.1
ctatttttctaccacacatacaactaaacatggaaatggttattattatggcacgggatgctggtctggactggaccatacaccttgatactgatgagaagattgatccagttgttgccagacagtactccctgaggcgattgcctttatacgtccctgtcaattaagacatctttatcttccccaattatgagagcatcattgaacgtgatgacattaaggatccattcactgatgtttccatgtttaaccaaaatgattaccatattccaaaggacacataccttggcctgtacaaagaagcaacacgtggtaattcaaactacttccttacttatgagaatgcgtaaacagctgaaagggttcaggatcatttgggaccaaacggtgctaatagatggcataattctccttaaaatcccaattgaatatcaattacaa

SEQ ID NO: 173042 - DNA, 464 bp, Zea mays
  Clone ID: MRT4577_89397C.1
gcacgagtgagctggtacctcatcacgatcaagctcagggaggccgtcgacgccaaactccagaggtcgcccccgccgccgcgggacctgccgctgcggctcacgaagggtgacgcgtcgccgccgctccagcgccagtcggccacggccaggtcgcgggcgcagtccccggcgcacagccccaagccgcaggactcggaatgggtggtcgccatccgcgggaagctggcgcaggcgcggtccgaggcggcggccctgccctgggcgcgcctgtccgtgtaccgcgtgcccaagtgcctccgcgacggcgacgagcgcgcctacacgccgcaggcggtgtccatcggcccgctccaccgcggccggcgccgcctgcgggagatggaccgccacaagtggcgcgcgctgcaccaggtgctcaagcgcacgggccacgacgtcaccgcctacctcggcgccgcgca

SEQ ID NO: 173043 - DNA, 457 bp, Zea mays
  Clone ID: MRT4577_89398C.1
attcccggtcgaccgactcatacgtccactcgtacttccactcatcctcatacttttacggttctagatctcgatctaggaccagtcagcatattcacagagtctacattgcccatatatctctctattaattcacgctcatcaatctgagattcacactccaccattgactctccataaaacctacctatatcctcccaatcaagccctttcgcccatctgcgcctcgcaaccccatcctacaatctctacacctacattccgcgccttcatctcccgcatctcctcttctctccatcacaccttctcacatctccaaccgtgtactgagctcatcaaccgtaacttcatgtaccgacccgacaccctcgccgaagcatactctcgaatccgctagaacttcgtctactttcacgtcaattacctaaccctaatccagtactcgctagcggactct

SEQ ID NO: 173044 - DNA, 424 bp, Zea mays
  unsure (1)..(424): unsure at all n locations
  Clone ID: MRT4577_89399C.1
agtgtgaaatggatactctgcagaaactctcgccctctaaagcgtgcnntcgcaggcccgagggtcttttctttcttttatttttattttattttatttctttttttctttttttttgttttttttttttttttttacctcacacccggccgggccgaagggggaaagggcaaaacccaggccacggggggccggggccagaggacccgaccccgggaccaagctaggcggaaacaaggccacacccgggccaagggggaaaccggtaaccgctccccagtccacacaaaagaggaaccgaaagcacaaaacctgaagcccggggagcccaaggaaaccaccaacaaaaactgtggggccagcgcccactgcccatttgccaaaccggaaacccagggggccaaaagaaataaagaaacccccc

SEQ ID NO: 173045 - DNA, 559 bp, Zea mays
  Clone ID: MRT4577_8939C.1
atttctagattcttaaaaaaaaaaaaaaaaaaaaaaaaaaaaaaaaaaaaaaaaaaaaaaaaaaaaaaaaaaaaaaaaaaaaaaaaaaaaaaaaaaaaaaaaaaaaaaaaaaaaaaaaccaaaaaaaaaaaaaaaaaaaaaaaaaaaaaaggttttaccttccccgggggggccctttaaaaagagggaaaattttggaaaatttccaaaaaaattggggaggccgttaaaaaattcattttaaagaggcccaatatcccccttaaaaggagagggcaattaaaaattaaatgggcccctgttttaaaaaacctttttaaatgggaaaaaaccttgggtttaccaaaattaaatccctttgaaaaaaaaccctttttccaaagtggggaaaaaaaaaaaaagcccccccccaaacccctttcaaaaaatttcccaaccctaaatggaaaaggaccccccctttaacgggccaaaaaacccggggggttggggggttacccccaaaggaacccttaaattttgaaagcccctaaacccccgcttttttaattttttccct

SEQ ID NO: 173046 - DNA, 313 bp, Zea mays
  Clone ID: MRT4577_893C.1
agcagtggtaacaacgcagagtacttttttttttttttttttttttttttttttacaatgtgttatttatttatgcttaatgtataggcaagtatcagaatgttatactatggtgtcataaattcaagtacttcaccgcacatgttataaaagtttctaatgttttaattattttttttgagaggctggtcttgattaaccctgtaagaatattgtaatttagtgatagatatcgatctttgttgcagtctgccttcttacaatcagtatttatcaagaaaagacccgcgtactctgcgttgttaccactgct

SEQ ID NO: 173047 - DNA, 462 bp, Zea mays
  Clone ID: MRT4577_89400C.1
ggaaggagccccatcaggcctctcattaaaatggaatagggcgaacatgggcccaaaatgacaagggaaaagccttggggagcaacaataaacattacaggcttgaagaaaaggaaaaagggggtgccgacaaaccgggaaaaaactttgttcctgctaatgaaaaacccgccccaaaaggaaaaaaaaacggggcgggaggcgggggaaaaaggctcccctggggtttgcatctttggggcccaaaaaattaaaaacatttcctgggcccgaaggacgggccaaactcgggggacccagccttgggaatccacatttgctggaaggggctgaccgatcccaaaaaggatcccccaatccaaacactggacttccttttggggggagcaacccccttgatcttcatgctgctaggacccagggcggggatttccttgctcatcctggcagcaaggccaggga

SEQ ID NO: 173048 - DNA, 411 bp, Zea mays
  Clone ID: MRT4577_89401C.1
gatgagttcgctcgggcttcggctccggcttcggcgacctggagcgaggagttcggagatgcagtcttccagcgctcaagcagttttcgacttcgtctcaccgcttcccgcaggattcatcaatgcgagtaccggcagaacagtttcttacacttaggccacttggtgctccaccgatcatagtgccgcttgcggcttagggtgcatttcgtggattccgggatacaatgacaccattgtatgctgtgtgtatgtctttgccacttcattttgacaaaatattgtaacacataacactattttttcccatctagaattgcttacaccttgctatttaaacggatattattttgttgtaaataacttttgtttttttattcaagctactcaatgtaattgattcgaaatgtg

SEQ ID NO: 173049 - DNA, 349 bp, Zea mays
  Clone ID: MRT4577_89402C.1
tttcgggcgggaaaaacctccgcccaatccttaaatagatttggttgatagataacgtttccttattacacactcttcacggcttgcttggttgaccccctcaataaaatccctgaaccactaccagtttttttgcagcctcgctctccgtgacttgtgcggggaggcagcagcaacatcaccagctgctacacagattacataggcttttgaggacgacgtgtcgtttctaggaacctgggcacctgccattgggggccttggggacttcataaacaacttgggggcaaaacaaagggggaaatacaggccacgaacttagagacctgttttaaaaaacttttaaagc

SEQ ID NO: 173050 - DNA, 481 bp, Zea mays
  Clone ID: MRT4577_89403C.1
tggcttggaacctttgggctgatttatgtgcttgtggatgtgcgggtcatgttctgtcagtgttccttgtgaattgatctttgagaggttgagattattttgacgcttgttacggagattgatactaatgtgttgttgtttgttttagttggtgagggacttcttgcggctggcttgcttcctctacatccttgtaagtttaataagtgtcctgagacttagaagcggaatgtttctgtgtctcgggtacgggacactgctgctgataatcgggttactcggtggaattatactacggactcacgtactgagcgttaagtgaattaagtcagtgtgattagtgaggagcgtatcgctgtccggggcgctcgcaactacgttccctatccctatcgtcctaataggcggtccaagatctgttaagcgcgtttaccagacaatagcgagcgggagccttagaaacaccgttatcagccttcgg

SEQ ID NO: 173051 - DNA, 939 bp, Zea mays
  Clone ID: MRT4577_89404C.1
gccgggagccgatctctcctatctctcctcgtgatttcgttgtcgtctccatctcgctttcgatcgactcagaaaattccctcctccccctgaagtcccgaagctcgcggaagcgccgagatgtaccatcccacgagaggcggcgtccgcggcggcagagatcaattcaaatgggacgatgtgaaggttgacaagcatcgggagaattaccttggtcatagtgttaaggctccggttggtagatggcagaaaggaaaggatctttactggtatactcgggataagaaatccgacacggaagatgctcttaaggaagaaatcaggagagtgaaggaagaggaggaacaggctatgcgcgaggctcttggcttagctcctaagcgcagcaatcgaactcagggtaatcgcttggataagcatgaatatgctgagctgattaagagaggatcaactgcggaggacttgggagcagggcacgctgaagcagcacaagtgcagggtctaggattgtacaaggcccctcgcgatgagggtgggtcaagttctttgagccttgaccctcctcaaatggagcctgagcaggctgaacccctaccagcacccaaggggaaaaggccacgtgaacgtgacgagaggggaggggagaaggaacggaaacgggacaggcatggtgatggaaaggagaggaggcgggacaagcacgagaggaggcacgacttggaggacagatcaaagcggcaccgcaaagacaagcagaagaggaggcacgattccgattctggttgataacggccctgcgcctgctcctgtatgactactgtatactgcgatatttcaaacccatggagccgcttttgtttgatgtatgcctacgctttaaattatgtttgccctaatgatgtttaaggataaaatggcccgtataaaccgcgccccccc

SEQ ID NO: 173052 - DNA, 1029 bp, Zea mays
  Clone ID: MRT4577_89405C.1
gatcgacacagaaaattcccaccgcacgagcctcgtcatttcgtcgtcgtctccatctcgcttttgagcgaatcagaaaattccccaccaaaatctcctccccctgaagtcccgaagctcgcggaagcgccgagatgtaccatcccacgagaggcggcgtccgcggcggcagagatcaattcaaatgggacgatgtgaaggttgacaagcatcgggagaattaccttggtcatagtgttaaggctccggttggtagatggcagaaaggaaaggatctttactggtatactcgggataagaaatccgacacggaagatgctcttaaggaagaaatcaggagagtgaaggaagaggaggaacaggctatgcgtgaggctcttggcttagctcctaagcgcagcaatcgaactcagggtaatcgcttggataagcatgaatatgctgagctgattaagagaggatcaactgcggaggacttgggagcagggcacgctgaagcagcacaagtgcagggtctaggattgtacaaggcccctcgcgatgagggtggatcaagttctttgagccttgaccctcaaatggagcctgagcaggctgaacccctactagcacccaagcaggaggatgatttggaagataataggaaggggaaaaggccacgtgaacgtgacgagaagagaggggagaaggagcggaaacgagacaggcatggtgatggaaaggagaggaggcgggacaagcacgagaggaggcacgacttggaggacagatcaaagcggcaccgcaaagacaagcagaagaggaggcacgattccgattctgattgataacggccctgcgcctgctcctgtatgactactgtatactgcgaaatttcaaacccatggagccgcttttgtttgatgtatgcctacgctttaaattatgtttgccctaatgatgtttaaggataaaatggcccgtatgctcctctcccctcaacgtaaaacctgatgtccttgaaaaaagtttgggccacctttcggcccc

SEQ ID NO: 173053 - DNA, 1337 bp, Zea mays
  Clone ID: MRT4577_89406C.1
cattgggtacctcgaggccggccgggtcctcgatcgaggccggcacttctctcctctctcccaccgcatccgatctcgtacctcacttcatcgccccgccgccgcttcgacggcgcgccgaccggctaggacgcgcctccgacccggatagtgttccgctcggtcgaatccgacggccgctcgctgctgcagcgggcgcttgctgtgcgtcgcgtgggctcggctggaggcaggcggaacctttcctgggtctcggagatggcggcgcctccggcgagggcccgggccgactacgacttcctcatcaagctgctcctcatcggcgatagcggtgttgggaaaagttgtctccttttacggttctcagatggctccttcactactagcttcatcaccaccattgggattgacttcaaaataagaacagttgagcttgatggtaagcgcataaagttacagatatgggatactgctggtcaagaacgttttcgaactattacaaccgcctactacaggggtgcaatgggaattttgcttgtctatgatgttactgatgagtcatctttcaataatataagaaactggataaggaacattgagcaacatgcttccgacaatgtgaataaaattttggtaggcaacaaagctgacatggatgaaagcaaacgcgctgtaccgacttcaaaagggcaggctcttgctgacgagtatggcatcaagttttttgaaacgagtgcgaagaccaacctgaatgtggagcaggtttttttctccatagcaagagatatcaagcaaaggctttctgaatctgattcaaagccagaggatcgcacgatcagtattaacagacctgatggtggtgaggcttcggcttcacaaaaatcagcttgctgcggatcgtgagggggttacattgtcacaaggaagataaatagtgcgataccatgcttgtaatttacccttctacgtttttatctggcttaatcgttctcttctaacttttaattgcaattgcttggattcaggtttctgtgttgtaatgtgaacaattttagttgtacccctgttagaaatgcaagtgctcgtaagtcaatgcaccttgtgttaatggaaatgctagcaaaatcgctgcagagtttaggggcggccgtaccacaacctgttgttttacctctcttccctatatctggatttcgtactgaagaatatatttggtagtttaggattcatatgtattcgttcgagaaaaggattcatatgtattatattcaatcaactacgctttcatggcatctggggatccattctatacctcaatttttttcgccctgtctctg

SEQ ID NO: 173054 - DNA, 952 bp, Zea mays
  Clone ID: MRT4577_89407C.1
cattgggaccctcgagggccggccgggagtggaccacttccccctcccccccaccttccttctctacttctctcctctctcccaccgcatccgatctcgtacctcacttcatgccccgccccgccccgccgccgcttcgacggcgcgccgaccggctaggacgcgcctccgacccggatagtgttccgctcggtcgaatccgacggccgctcgctgctgcagcgggcgcttgctgtgcgtcgcgtgggctcggctggaggcaggcggaacctttcctgggtctcggagatggcggcgcctccggcgagggcccgggccgactacgactacctcatcaagctgctcctcatcggcgatagcggtgttgggaaaagttgtctccttttacggttctcagatggctccttcactactagctttatcaccaccattgggattgacttcaaaataagaacagttgagcttgatggtaagcgcataaagttacagatatgggatactgctggcccctcaattttttatgggttaattcttctgaatctgctaataattttgactatgcagcctactacaggggtgcaatgggaattttgcttgtctatgatgttactgatgagtcatctttcaataatataagaaactggattaggaacatagagcaacatgcttccgacaatgtgaataaaattttggtaggcaacaaagctgacatggatgaaagcaaacgggctgtgccaacttcaagagggcaggctcttgctgatgagtatggcatcaaattttttgaaacgagtgcgaagacgaacctgaatgtggagcaggttttcttctccatagcaagagatatcaagcaaaggcttgctgaatctgattcaaagccagaggatcgcacgatcagtatcaacagacctgagggtggtgaggcttcagcgtcacaaaaatcagcttgctg

SEQ ID NO: 173055 - DNA, 124 bp, Zea mays
  Clone ID: MRT4577_89408C.1
cttacacctcgtatttcttcactccccaacgatcccagccaccccaagctttcaggccagcaatccactgatatcacacacgctactcctacataggccccacgtacgcgatatcaccaaccga

SEQ ID NO: 173056 - DNA, 217 bp, Zea mays
  Clone ID: MRT4577_89409C.1
agcttgttcatggagatgaagtggactaaggtgcaccgattcgtggtgtggaggattgaccagcggtagcgcgccgtgctggtagacagggtgggcggtcccggtgagggttacaaagagctcttggctgatctgacaggtgacaactgacattactccggttataacatctacttgcatagcgaacacaaatgttagaaaacctagaagttattta

SEQ ID NO: 173057 - DNA, 383 bp, Zea mays
  unsure (1)..(383): unsure at all n locations
  Clone ID: MRT4577_8940C.1
ggcacgagaaaagagtggattgaagaggattggaggggattaaatcttgtactagtcaaaatagaatagaaagtgtttaatctctctcaatcctctccgatccccgtgtaatcgaataagacctantggggaataaagtggnatagctttagaaaaaatagcttcagtttcgattctctttagaaatttcatggagattgtgatgcccaatatataggacgtaagcatagaaaaaaatctggtctgacgaagcattttccttgcagaatgaatgctcttttgagatttgntaagggaaaagcatatctttgcctaatctgaggatctgcttctatctcgtgtgcattttgtgctaatggtgcgaaaacgcaccctatattgca

SEQ ID NO: 173058 - DNA, 768 bp, Zea mays
  Clone ID: MRT4577_89410C.1
ggggtaccggccccccccctcggtttttttttttttttttttttttttttttttttttttttttttttttttttttttttttttttttttttttttttttttttttttttttttgggagggccctcgggggccggccggggcaaaaaattccccaataaaaaaacgggacccccggaggggggggtccaactcccaccgggcggggggtacaaaaacgggggggaaaaaaaggaaacgacaggggggccacggtctttttttccttttggggggggggggggtcatcccccccggggggctgacaaaagggggggccccggccaagaaaaaaagggggctcccctccgggtggggggaatttcccccggaaatttaacagtttgggggttaaagaccacccaaaagggggggttcctgggatctgggggggcccaactcggctaaagggcctaaaaaaaaaacatcctttttttgactttaaacaaaaacccctggacaaattccaaagtctcccccagggccttttgttttaccacgggggaattaaaaacttttttgggcccctcgggggcacccccaaaggatttgatccccttaaacaaactcaaaaaaaagagttccttgccccttgggatctgcgggcggtttggcgggcaaggggaccccccctccccccaaaattggcaaggggcttgaggcaggcccacacctttttattattgatggggcgagggcttggctcctttccccctgttggggcccctggg

SEQ ID NO: 173059 - DNA, 327 bp, Zea mays
  Clone ID: MRT4577_89411C.1
actgcacaacgagcaccacgtaaaaaggcttaactcttatccgcgcaaaaaccactagctttccgtgctggcaaaaacagctgtctctaagcaacatgcacgtacctgagctgagacgcacactgactcaagggatctagatgcaaactatacttgaccggataatgcacaacctgagattctctcccgtggtgcatcctcgatcatacaacgttcactcaaaactggctatatttcgcctaacccgtttttctaaacaacgctggacacagagactgataccttactcaaacagcctaaaacgacaataccttgcgagaatgctag

SEQ ID NO: 173060 - DNA, 1364 bp, Zea mays
  Clone ID: MRT4577_89412C.1
gcgaagagacctcgggagtgagtgggccgctgggagagcagacaacactgcaacggggtgcgcgcccgcccgtgccgttctccgtcgtcaccgttcgcccgccgccgatccatggggtgggcgctggctctgcacggcggcgccggggacgtgccgcgcacgctgccgcccgagagcagggagccgcgcctcgccacactccgccgctgcctcgacatcggcaccgccgcgctccgggagggccgcaccgcgctcgacgttgtcgagctcgtcgtgagggagctggaggactgcccgcacttcaacgccggccggggctccgtgctcacctccgccggcaccgtcgagatggaggcctgcgtcatggagggcgccaccctgcactgcggcgcggtctccgggctctccaccgttgccaacgccgtctccctcgccagactcgtcatggagaagacgccgcacatctacctcgccttcgacggcgccgaggccttcgccagggaacagggggtggagactaaggatccaagccactttatcacggacaacaatatcgagcgtctgaggcaggccaaagaggccaacagggtgcagatcgactacacccagccagcagcaggccaaagccaaaaggcccaggccgtggtggacgacaactgccagacgggcacggtagggtgcgtggccgtggacgcggcgggcaacctcgcgacggcgacgtccacgggcgggctggtgaacaagatgcccggcaggatcggcgacacgcctctggtgggcgccggaacgtacgccaacgcgctgtgcgcggtgtccgccacgggcaagggcgaggagatcatccgccgcacggtggcgcgcgacgtcgcggcgctgatggagcgcggggacgcgctcccgctgcgcgacgccgcggcgcgcgtcgtggcgggggcggcccgcggcgccgtggggctggtggccgtgtcgcgccagggggaggtctgtatggcgcacaacaccaccgccatgttcagggcgtgcgccaccgaggccggccacaccgaagtcggcatctggacggacgccgccgacgcaggcacgggcgcggacggagagactgtcagcgtcgcgctctagctctaggcatttcatccccgtgtggcgtattctatcgttcgcgtcccattattgccacctgtccgatagacaacttgttctcgatccggtaatttcaccgtgcttcagctgcgtgtgtttggaaaaattgattcggtttcgggtattgttaagagatcgatgggagaagtgaaacattgttgggcgttcagtatgcttttgtaataccttttgttttcttaaataaagtcctaaggagtgttggg

SEQ ID NO: 173061 - DNA, 520 bp, Zea mays
  Clone ID: MRT4577_89413C.1
tggcacgcctgcggagccgggccggaattaattgctgggtcggcgagcttacttgtcggaggccgacctgccctggtggcccaagatgcatgccgtgcaacaggtactcaactctatgacccagcatcatatggatcgcaccaggccatacacgccacgcaaaactcatggcacgactcgtgcccggcgttcttttccagcaggcacaaggggtgatattacctgatgcacgaaccacggtcgcacggagcactacgggggggagcgcggacccagagcgctgatatggacacactattgggggccacatccacaccatgacctgcatctggctcactgagagccgaggcggcgctattgacgacgaggggtacctaactcagcgggacaccccctggtggacactcgacgcccgggggcttgcggcaccaacgaggcttagatactgaccggccaagatctaggcctaggggacgccccagaaccccgacctcagatgaacaacaggaacggtcccgct

SEQ ID NO: 173062 - DNA, 622 bp, Zea mays
  unsure (1)..(622): unsure at all n locations
  Clone ID: MRT4577_89414C.1
gtataattgatccgtggtgcggccggccggcgtcgtacgtcgtccatggccatccaccacccgcacctcctcgacttctcgccgcctccgaacacggtggtcatggaggaggcgccgcccccaccccacttcgaccacggcctcctcgggctccatgtcgatggcatgcctcatcgcgtcctcgccgacgacgcgccggtggcggcatgggcgccgcaggccgtggtctcccactccctgtacggatacgataatacagcagcgggggcgtcgtcgctgtttggccaccatgaggcatcagaggcccagttctccgtgcttccgccggcagcgtcgtcgtttgcactactacctaaccaccaccagcagcagcagctgccgacgacgacggcggcgtcgagcatgcagcagccgttccagctgaggagctccaagtacctgggtcctgcgcaggagctgctcgccgagttctgcagcctggaagggaacctgctgcacgccacgaacaagcagggagctcccggagcagcagcaggtaacagcaggtgggacgacgtgnagacgtcgtcgtcttcttctgctggcctctggggacacctgtccctgagctccatggatctcc

SEQ ID NO: 173063 - DNA, 316 bp, Zea mays
  Clone ID: MRT4577_89415C.1
cgcgcgcctgggacctacaccgagcacgcgcgccgtatgaccgtcaccgccatgggcgtcgggtacgcgcttaatcgccatggccgaaccctctacggcttatgcggctaggcgtgccgagcggagattggtcggcattgggggtctcgtgttgctgcagttagcaagctggctgcgtggtccgaaaaatgctaaatactgttgaactgtaacgcggtgtgagcacatggtgtgtttgcttatagaaatgttgtcaatgctggcttgttttggactcaaacatgctccattctgggttcaaataagaaaaagaaac

SEQ ID NO: 173064 - DNA, 1415 bp, Zea mays
  Clone ID: MRT4577_89416C.1
atttttatcaacaagaaaagtggggctcagcgcggagatcttctcaagcacaagctacattttcttttgaatccggtgcaggtttttgaattaagttcttcacaagggccagaaacaggattatttttgttcagaaagctggcactggcaatgatctttcgagagttttatcatggggaggtggcctaggtgctgttgagaagcaaggtggcctttgcacaattttacatgacatagagcatgcagcagtcactatccttgatagatggaaggtgacagtagaagataagaaatcaaagaatgtgcttctagtaaagtacatgaacaactatctcggtatcggttgtgatgcaaaagttgcccttgacattcataatctccgtgagggaaatcctgagaaattctacagtcagttcttaaataaggtgctatatgcgagggaaggggccaagagcatcattgacagggcttttgtggacttaccatggcaagttcggttggaagtcgatggcaccgagatcgagataccagaggactcggaaggcgtgcttgtcgcgaacatcccgagctacatgggagggggtgacctgtgggaaaacgagggtgagaatcccgaagattttgacccgcagtcgatccatgacaagatgctcgaagtgggcaacattacaagagcatgggatctgggaacactccagtttggactttctcgggcgcggagaatcgcgcaagggcagtcgatcaagatacagatgtttgcccctttccccgttcaagtcgacggtgagccttgggtccagcagccctgcacgctcaagatatctcatcacaggcttttatgttgaggagagcagttgaagagccactgggtcatgccgctgctatgatcaccgacgtccttgagcatgcagagtccagccatgtaatcactgcttcgcagaagaaagccctcctccgagaaatggctctacggctgtcatgaagcaagcgccgctcattcggacgtcgcagaagaacggtttcctgcctctgcctgcacatcggtggttagtacgaggatctgtgatctcaacatgagctcgatcatgttgttagcagaagatacaggcccggagggacgtgtccacgtgcacatagagtttttttttttggggtcatgttcacgttttggaaatagcgaggcaatgttgtgtgcagctatgtatggtgtgtagacctcgggtaagccagttccttccttctgtgcaaaactagttacgcctgcggcctgccattccgtgttaggttgactggatggatttttagggctgcgtcgctgccacttcggttggtgccccatatgtaaacgagatgggcttgaatgcttggttgtaacctttttttaatgataggagctctgtcctttaattaagacg

SEQ ID NO: 173065 - DNA, 460 bp, Zea mays
  Clone ID: MRT4577_89417C.1
aattccaaacctcaaacctattcagggttgggcaaaggtcggggggggccgcccccccaacacaaccgggccatttttaaaccaacccgggcccggctcagggcccgaacgggggatcctttggcaccccccatagggggggggggcccccgacgacgcaggcccatgggggggttaaacgacccagggcttacgggcccccacggggacggggcacaagggggggggggcccccctttgggaggggggagcccgctagggggcggccctcccccagctgttggccggcgaaaaacaaaccctggggggccggggggaggcccccctgggccgggatcttcgccttcacattggcgaggggggccgagctctcaacccccaggggtaggggtttcccagccaggggctttacaaagatcgggataccacctctgggggggaaaacaaggggaagggggcc

SEQ ID NO: 173066 - DNA, 440 bp, Zea mays
  Clone ID: MRT4577_89418C.1
cggacgcgtggggtctgaattgcctgctgattccagaccccttctaatttttatggagaagaaaagtgggggtgggggcggagatcttctcaagcacaagctacattttcttttgaatccggtgcaggtttttgaattaagttcttcacaagggccagaaacaggattatttttgttcagaaaggtaccacatttcagaatacttgtgtgtggtggtgatggtactgttggttgggttcttgacgcaatagataagcaaaattatgaatcacctccacccattgcaattcttccagctggcactggcaatgatctttcgagagttttatcatggggaggtggcctaagtgctgttgagaagcaaggtggcctttgcacaattttacatgacatagagcatgcagcagtcactatccttgatagatggaaggtgacagtag

SEQ ID NO: 173067 - DNA, 267 bp, Zea mays
  Clone ID: MRT4577_89419C.1
ctggatttatatactgtactgttttctcctgttagggtgttgacgcctgtcgcggtgggaagtcagaatgacaacatgttcagctcgaagtaaccgaaattgataacaaaatatgcgggtggcaaagtgcagactctctttgggccctttctcatacgggggggttaaccggaaacacccgcccttttgtaaatgattggggccgctgaaggggacctaaacaaaactttttaattgacgacgtggcttaacccttcagggacttac

SEQ ID NO: 173068 - DNA, 353 bp, Zea mays
  Clone ID: MRT4577_8941C.1
cgcgtgcgcgtacgtccagcggatggtaccatagttgtcgacgtcctgcgcagggctgaccatttgcatttgtgcagggcctgtcgtcgtccgttccaagcgcagacaccatgacggagtgcgttgcgatccatgtacgccatgccggaatccaggtctattacacgtgctgtgagctgtactgcattgagcatggcattgaggctgtcggtctgatgcccgggcacaagacccttgtttgacgtgatgatgctatgaacacctgcttcagtgagactggtgctggcaagcacgtgccatgcgctgcgttattgacattgaccccagtgtcatcgattaggtgagaactggct

SEQ ID NO: 173069 - DNA, 707 bp, Zea mays
  Clone ID: MRT4577_89420C.1
cggccggggccaactttttctttcctctcaccttcacctcaggcgtatatccaacgtcaaatacaccggcgctcctgcctctccatgcgtcgatcaccgtgtgctggtttctattgcgacaacgatagagagaaccagaggaacaagagagatgtccaggtattctctgaagctggaactccctgtaaaaggggccagctgaggctatgcgcatgatggagaagtaccccgactcaatttctgccagtgttgagaagggcgagaggagagacatcccaaacatcgaccagaaaaagtaccttgatgctgtgcgaccacacggtgtgacagctcgagtgctggatctgccatatggcatcaagctcacgggcgagaacgagatcttcatcttcctgaagaacaccctcccatgaacaggtgccctgatgtctgtcatctacgacgagaacataggactaggacggcgacctctacatgacctacatcgaggagaacacctttgtgctgctatgggtggtgccacgccgcctcgtatcgacgtccagcaatgcccctcctcctgaaaatactctaaaaaaaatacgcgtctcaagaatccgagtacataacagtctggcatgtcttgtatcacaatgaactcgatggcgtgcactgtctgttgaaactattgaagcgtactatgacatttatacaactcgctgcgacct

SEQ ID NO: 173070 - DNA, 165 bp, Zea mays
  Clone ID: MRT4577_89421C.1
gcatcacatgcttagcggccgaccacggtcgtcctttttttttttttttttaaattaatcccttacttatttaatacccctccattccccaaaaaagggtgtaagatccccccatgcaaaaaatttttttcccggttttatcattaccaccggccagggtttaac

SEQ ID NO: 173071 - DNA, 619 bp, Zea mays
  Clone ID: MRT4577_89422C.1
ggggcgcccaacctgcacgcgctgtgctccagactgactgcccagatacttgacatccctcgagactgatgggcgtggatgtgctcatactaaagacccagctggagatcgtttcacctgatgcctatactaatttacattagtttggtatgaccaaatccttggatgcctgctctatgacatacagcgcgaggatggatatgtgactgacctgctggtactacccaaagacaaactgattattccacactgacaacgaaggccatcactgactcaggcttgcgggttttgattttacgaaggaaccacacctgctttcactgggcgcttaggctagcctagctccactatgggcgccctacacgatgaagcaaactgttatcttaaaagttgcttactgagagaatgctatattcagcattctgagattggagtctcctcacaagttactatctggatgaaaacataggactctgagatgatggcagcggacatttatgacactgatgaagaagctgcaaagctaactgaaaactgggaagggcccacgttgaataggaaggaacacaaagataacgaactggctcattgacatgaatgctaggatggggaagaacgt

SEQ ID NO: 173072 - DNA, 343 bp, Zea mays
  Clone ID: MRT4577_89423C.1
tttgttggctcaattaaaactactgactggtgctatatgccgtcaggactcggaacaccctgaggcgacccaacttacacgccttgggaagcatggcgctttgatgaggtagctggagatcgaggtggcccgcggcggtcgcacttgccaaccagctaccgttctgactggtgattggtgcgcaccatgtaggaaaccagacctggctgggctttgtgagatgacatgcacggttagggctacactttccatggccgtagggcccgttccgttcgcctatacgttttactcacttggccatggtgacctggttgaactgctgagctctgaactgaccgttgcc

SEQ ID NO: 173073 - DNA, 328 bp, Zea mays
  Clone ID: MRT4577_89424C.1
tgcgtcacaccggccgcccttttttaaaattgggatcattttaatattagcatcgagtcacgagtactgaggaaactccttgacaattcacacgagacactaaactgaacgaacaacctaccaattaaccatatagaataccacgtaaattaaaacaacaattaatttatcggatgaactatacacgatgcataaaaactttgccgccccatacgccgtcgctcaatggaggttttaggcgaggaaggaggccacgagcgcccccgcggggggcacttcggcatttggtggtggcgcttgcgctttggccatttcaaaccaccggacc

SEQ ID NO: 173074 - DNA, 412 bp, Zea mays
  unsure (1)..(412): unsure at all n locations
  Clone ID: MRT4577_89425C.1
aaccgaaaaaaataacagaatcgaccgcacgcgtccaaccacncctacatcgatagctgacaatattgaattactcctgccaaatcgccagggcggggtgtgaactgtgcgctagccgcccactaattaaactaatgcatttttgtttcaagaatgctgattttgttcgcacattccatttttggctcatataaacacctgatgagcatatgtactgttagccttactcttactccctgaagctacacgtagaagagaaccgatcccccttgatgataacaatgatgctaaaacctttttttgaacaatgataaataaaaaataaataatatggaaaatactaaaaaataatacatatataataataaattaaatatataaataataatacaaatatttttaaaataataaa

SEQ ID NO: 173075 - DNA, 615 bp, Zea mays
  Clone ID: MRT4577_89426C.1
ctggttgggacgaggctctggggaactcttcggaagcatcgaagagacaacagggaaacagcgacaagaatgcaggctcgggagtggctctcggaagcaacaggagctggcatccatcgtctggtaaccctagtcggggcggccaggggaatcaccaacatgacagggactctcacagcggtgattcgcggcggggtagctcgaactacccccggaggtccgacaatcgtcatgaccatggcagtggtggttcgtcacgaccctcgtcaagagggcagtcccagagggggctatgtaaacactacgagagtggccactgcgggaagggttcgaaatgccagtacctgcaccggtgatcgccgtggccgtgtggaagcgggacccctgtttgcctggccgtcctcacatttttgtatagcaggatgtggtttcgtcgtagtcagtatagtagaacgcttattaaccgtgtcggcaccactaagttggtagtagtacatatctttcagggcaggagcatgactaaagtaggatttgtaagttttattagagccactgatggccttggataaagattctccgctttttggttcgggaatgcacgctttttgttcagct

SEQ ID NO: 173076 - DNA, 608 bp, Zea mays
  unsure (1)..(608): unsure at all n locations
  Clone ID: MRT4577_89427C.1
gctgcagagaactcccggcagcaacgttgaggagtcttccatcctggagacagtcaccgctgtggctgcgggcaagcctctctcctgcccaaaccacgatgggaatgtgatggacttttactgccagtcttgtgagaccgccatgtgccgggagtgcacggagggggagcatgcagaacaccccacggtccccctcaaggacgtggtagagcaacacaaggcctcactccaggtccagctggacgccgtcaacaaaaggctcccagaaatcgattctgctcttcagttcatctcagaaatcattcatcagttaaccaaccaaaaggccagcattgtggatgacatccactctacatttgatgagctccagaagactctaaatgtgcgcaaaagtgtgctgcttatggaactggaagtcaactatggcctcaaacataaagtccttcagtcgcagctggatacgctgctcgagggccaggagagtataaagagctgcagcaacttcaccgcgcaggccctcaaccacggcacggagacggaggtgcntgctggtgaagaagcagatgagcgagaagctgaacgagctggcggaccaggacttcccgctg

SEQ ID NO: 173077 - DNA, 385 bp, Zea mays
  Clone ID: MRT4577_89428C.1
accgatccatcagcgacaggcgtcaggccagagtgagtccagaaaagatggaccgcgaatggcgacgcacatgctagagggaccgcgacagccgctgcaagctctggctacgcgtaggaccacaagcgttgctactgctggcacaagtggtgccagatccatgctccagtcctacaccgattacgctgcagaccacaataaagacccaaacactctccggagcatgagcttggtgctcatagctgaggcccttaggctccatgttcttagggatactgtaccgcacctcctactcgggtgctactaccatgaccaagaaaacagcggccaccactagaggagcctcatcgagccctttcaatggacatcacgatactatcaaagc

SEQ ID NO: 173078 - DNA, 546 bp, Zea mays
  Clone ID: MRT4577_89429C.1
tcgggccaactatggatactgtcgttgctattctagaagagctccaaggagcgaaagggcctctagccgagaagcatcaagagcccaaggctggaaccgaacaggcacctgctgctgtgagtggtagcaagagcagtcgcaagcctcgctgaaaatgtctgggaggcacgaaggagactgttggtccacatccaaaatcattgacccatcctcgttaacaaggaaaagcattacctagggtgataataggttctaaattttacactatataagatttaaggatcgaattaggatcaagctctatttatattcatttctgaactaaattttatttagaactctaccattttgtgaagaatcatttggaccgcgatccattatcacaccagcattacccggtcaagtcgttagctagactgtagcttgtaaatatgctctggtctagagatgtaatcggattgaatatggacagataactctgaaacacattttttattttggttgttagagcattcatcaaggaggacatggggagactactacagt

SEQ ID NO: 173079 - DNA, 355 bp, Zea mays
  unsure (1)..(355): unsure at all n locations
  Clone ID: MRT4577_8942C.1
ataagttcaaactatcaacttcaccatgtattcaagccatactgctgcagcaagagtttttgggtaccaaactagaggacactacaggtccattaaaacaacgagagccccctccacgattcatgacacacaaaccacagatgtttattagacgacgacgactcagatacccaggnacagcagnagcttaaatgaaccatggcttactggaccacccggaggcggagcactaggtngagagtgctctccttctggatgttgaagtntgctagggtgcgaccatcctcnagctgcttgccagcgaagatcagaccctgcnggtcttgggggagtgcctctttgtnctggatctttg

SEQ ID NO: 173080 - DNA, 1106 bp, Zea mays
  Clone ID: MRT4577_89430C.1
attcggctcgaggtttgcgtaacatgtttttaggcgacattccatctgggcacgacagcatcctacgtgaagtcaatgaaaatttattctgcaactaccctgttcttgacgttggaactggaaatggacttgtgttgcaagcattggatagtattctctaactcccctgttcttttgttgatgctggatgggtcttcttttgcaagcattggctaagcaggggtttacagacttaactggaacagattacagtaaaggagctgttgaacttgcaagaaacctagctgctcgtgatggcttctcttcaataaactttttggttgatgatgtacttgagacaaagttagataggaaattcaaaattattacagacaaagggacattggatgccatcggattgcatccagatggtcgtgcgaaaagaatggtatattgggaatctgtatcaaacttggttgagcctggtggcattgtggtcataacgtcatgtaatcacacaaaggatgagcttctgccacttagcttgctgtgctggtgaaaaaccactgtgcctccacagttactctttcagatctacaccttttaaaagcagcttctgtagctctaatgaaataatttgtaattgtgtactgcttgcgcccaccagattctgttgaggaagttaattggcctttcttttttggcttgtttgtattgctggaacccctcttatttgcctttttgggagtatttggttcaattctcataggagacaaatttaccagttttgcagagtattccattagcttctgtgaaaataaaggagattcttgctgacccaacagtgtcaaaatcttcatcttcctactgtccacatggattgaacacccacagcgctgtgcgacctcaagcaaaatcttctccttgccgacggcataggtggcgatcagacataacacacgctgtcttgatactgaactctcctctttcacacgtttgattgcattcactatgtaatccacagaatcctcttgcgaagggaatgtaaacttggggttgcagtatgtggtgtccagaaacaccgcatcagcacggacgaactccagcaagttaggatcacgcgtcat

SEQ ID NO: 173081 - DNA, 472 bp, Zea mays
  Clone ID: MRT4577_89431C.1
tggcttggaacctttgggctgatttatgtgcttgttgacttactccgggtgggtgttctgtgctgagggttagttaaagtccgttacggtggttgcgtggcttgatagggcttattattattattgttgtcttgaggtgctgcgcttggtaattcttgtggttgcggtggtggtgagggttgacgatgtttcgtgttagtgtttgtgggggtctgcgtaggcttgggagtgggattagggtttgtcgctgatggggtattagtattcgtattattactattattagtcgtggtggctggtggtgcctttattttgttgcttggggttggggtgttgtttcttctagtgtcgtgaaagtgattctaatactagggagtattgtcttcgtagtgaggcggttggtggtattgtggtgggtcgtgttgtcgcgcgtcgtcgtccttttcgtgctacggcggaggctgtggcgtct

SEQ ID NO: 173082 - DNA, 283 bp, Zea mays
  unsure (1)..(283): unsure at all n locations
  Clone ID: MRT4577_89432C.1
acatccncccactcctccgcctactcctatccactaactcagcaccctaacccactgaccctctacaaaccaataggtagtgccacacacacaaccanctccctncanaacactcccctncaactacctctccatacaatctctaaccaaagcccaactacgttacatccacacgattaacaacctccaacaaacaatcaacgcatctcactaattccacagcaaccacattctaccacccgagaacaaaccaaaaaatctacatcttcactcatatcaaaaa

SEQ ID NO: 173083 - DNA, 521 bp, Zea mays
  unsure (1)..(521): unsure at all n locations
  Clone ID: MRT4577_89433C.1
agcgtccgcccactctgctttgctctgccgccccgccccgcccgcactgcatcgcgtcctccggcgccctcgctgtcggcgccatcggcgctctctggctcactatgtccagaccgctggtcaccaaactggctcatcatgcttcatcgacgaaatagcacggaacccagngccaggcaatcaagaatcaaaacactacttccaagctaccttgcttataggtgttattctttggttcgctatatgaggtgaagccttgcttatgattcagtaaaacagagtacttggtatgtatgctgaggatcagctcgcccattatgatataagcatgcacaaggggaggaaagaaaaggcagagagcaacagagatagcactatccaacaggtagacgacaattatcatgtaacgactaacccaaaagaacgtgatgcagataataatcaaaatactttcaataataaagagaagactggagacactgcgttcgataaagacaggactaacttgaatgaatatgaca

SEQ ID NO: 173084 - DNA, 204 bp, Zea mays
  Clone ID: MRT4577_89434C.1
ttgtttttttgtaaaaaaagaacgcgggataaaccaactcgaaaatcaacgggaccggagcttatctgacagacctcatggcacgaatggattaataccacatacacaatataaagaaaactatggatctacaggtccaggcaaaaatatttaaccgccaaaaaaacattcatatctattaagttacgtaccccttgccaaacc

SEQ ID NO: 173085 - DNA, 575 bp, Zea mays
  Clone ID: MRT4577_89435C.1
cttatgttgctctgtttgcacagctatctgcattcacgttggcaaattctgatgggcaattttaattgtccaagtaaatctgctcctgggagcatgagagtttgtatcttgcggaacccatcagggaaaacctgcacgaaacccatggactgttgttgtcttgcacatgtcggtgacaatgacatacaagggaaattgctgcgggaactgaacatgaacgcgtctggtgccaattcttaactattttgatttattgatcctcggaaaggccaacccatttttggctttgttttttactgtaaatgcatatgatcggtttcgtcaccaatgaaaaagggttgccaagttcaaggacacaagactacggtgccgactggccgcgccagggacactgcgtacgacgcggccggcgctgacggggaccgcgcccgcgggggggcccttttaaaggatcaaatacttacgtacacacggttgaaacctaaaagcttttttttggcggcacctaacttaactccactggccccgtttttacacacgtaggacctggaaaaaacccttgctttacccaactt

SEQ ID NO: 173086 - DNA, 301 bp, Zea mays
  Clone ID: MRT4577_89436C.1
ctcctgcacgtgcggggccggaatcgatttcgggctcgacgagctcactttccgttggacgccctcacgtggcgaccgtagccagaggattctttacaacatattcgacacatactgagacactaaacatcactcatgggcgcacagatggagcgccataaaaccacacaaagcagccgctcactggcaccacggggagctcgttgctcggtaacgcaaggcatacgcctagctgggcgccgacgatacgtttactcatatcatatctagacgtaccataactactagaaggacttgtagg

SEQ ID NO: 173087 - DNA, 412 bp, Zea mays
  Clone ID: MRT4577_89437C.1
ggacttacggaggccgttaccggctgtacatcgtgcacggaaacgtcttcgatgcttccttgaaggacgcacccaaccatccgacctcatggtgcgtgttgccgatcgtattgtctgcgcgcatgacaagttgcaagcgggggaggagatggtgatttagaaagtagggaatgtggtcgacaatcacatctatcgccaaggggacgctcagggaaatcaagctgatgcgccacatggaccatgtagtaacaagcattgcctgagaggatgcatattcgttcctcaatgataaagaactttaatgagatgctcattagtcatctgaatgaaaggatatgcagctacttcatatattaggtttgcatcagccattgtctgatggttattgacaacacttactgtatcaattgct

SEQ ID NO: 173088 - DNA, 1127 bp, Zea mays
  Clone ID: MRT4577_89438C.1
ttttttttttagcatcataaatattagtatttgggtatatatttatttataaagctcaaaagtaagactgacattttttacggaggtagtacatacgcgcgcggaacgcaatggacagcgcaggcgcagcggtgtgaccgtgtcaatcaactcaaggtaagtctggagtcggccacgattgggctcctcacgacataatcatggtcgtgggacagccagctcagggtcccctcggcgagctcctgctcgctgctggctccggctgcggcgctcactgtgaccgtgaacgtcttcctctcatttaccttcgtgaactccagctccgccggctccaccttgactgtcaggcctttcggcgcttcgatcttggcggtgtagttcgacctctctggtccgacgttcgtcaccgtccggttcacggcgaacgcctcagctcgcagcggcaccagtatcgccgggtaattcagctgcgccccggtgacaggctcgagctcagcgcaagtcaagttgctgtttatggctatgattttcagggccgcctcgccgaggagcctgcagatgtagccggcgtagtcgtggacgccgaggtcgtacaccaggccggggtctacggccttcgccgggacaacgtggccggcgccgacggagtagaagctcgccttccggtgctcctcgtccatgatctggttgcccgcgttgtcgacggcgctggacgtggtcatgatggcggacttgatcgcggcggtggaccagtccgggtgcaccttcttgacgagggccgcgacgccggtgatatgcggcgtcgccatggacgtgccggagacgccgttgaagctgctcgactgggggcccccgacgggcacctccgacggccacgcggcgagtatgttgagccccggcgccatgatgtcgggcttcagcactccggggctggcgacgctggggccgcgcgacgagaaggctgccacgatcggcgacggattcacgccaacgactgtgctgttgaacacgatcgttgccgtatggttgctcgtcgacgtacccttcatggcgtagcccattatctttgtgccgtccaccgcggtcacctgcgacatggggaggttgtcgctcgtgccgatcctgca

SEQ ID NO: 173089 - DNA, 154 bp, Zea mays
  Clone ID: MRT4577_89439C.1
ggtgttcatgtccggcaccttgcccctgcttccgctgacgaggtatatcttggacaaggtcgcaccgtttatgcccaaggaggagcccaaggacgagccggcggcgggagtgatcttctggaccgtggatataacaactacggaggtggaggcc

SEQ ID NO: 173090 - DNA, 1067 bp, Zea mays
  unsure (1)..(1067): unsure at all n locations
  Clone ID: MRT4577_8943C.1
cccacgcgtccgcccacgcgtccgaacccatgctcgagctccaccaaccaccccccgcggacagatcctcgcccttgccccctccccccatgacggccgcgtccgctgtcacgccccagcccccaaacccgtgcaccgtcgaccgctccccgcctatcccaccgacgcgtggtcccctgccccactgcagagacaccgtgatgcaggacagccgcgtcgtcccctcaaacccttcagagagtctacgtccccacgtttgcgggcaggcggagatctagatctgctctcctctgcttcgtcgctcggcggtctcgtcgtggcggaagaacaagcaacttgccatcgagtgaggccacacgttccgtccctacatcagtgtcgcggctccaatgagcgtgcgcgtcagtgacaccagcgggaggcgagggcaggcagtggtggcgatggcgtccgccgacgcgcgcttggcggggatcgcctcctccattcgcgtccatccctgacttccccaagccagaaggatgcaaccaaatgcgagatctacgtggccttcaacaccaatcacctgttaatggtcatcaggcttcgagagtgctctgggttctgataggatctctaaagtttacaccttgacataccctggaatctctaaccaatgttgcattccactttggtcctgtagttttggctgaccaacaagtaaatctggtacttcctagagcggttgcacggcaagcggctgctgctcatgggcgactcgatgaaccagaaccagttcgagtccatgctctgcgcgaggccttgccgaacaaggccagatgttcgagatgcacgagcacaggatcagcaagggccaaggcttcttcatcttcgagttcacggtaataataaatcagtcgagtgtggcattatgtaaagtagcatgggagctagagtaattattttttatctcagtatggttcccactcagggagctttggtgtttctgatctcaatgttttttggtacaaggnttggcatgcgtgcaagtgactttttccttgattatatgtgctgacttttggcac

SEQ ID NO: 173091 - DNA, 593 bp, Zea mays
  unsure (1)..(593): unsure at all n locations
  Clone ID: MRT4577_89440C.1
ccgggnaaaaaaaaaaaaaaaaaaaaaaaaaaaaaattccccgccgcctcgcgcccccgctcgcttcacttctctaggtgcgcaccgatcagaaggtgcctgcctcctccacctcgaccgctacaagtgccttaagccaagctggcgcaggccaaagggtattgactcccgtgtcaggaggaagttcaagggatgcaccttgatgcccaacattggttatggttctgacaagtcgaccaggcactacctccccaacaagttcaagaagtttgtggtccacaacgtttctgagctggagttgctcatgatgcacaacaggacctactgcgctgaaattgctcacaacgtgtccactaagaagcgcaaggagatcgtggagcgtgctgcgcagctcgacattgtggtcacgaacaagcttgctaggctccgcagccaggaggacgagtagtctggtttcttgtcttaacgacgaactggatgttgccattcctttctgtaggaaactactttgcttgtggcttgttagtactgaaaaccagagacactcctacctttttccatttagcagctactaaaatgcggcagatcccacg

SEQ ID NO: 173092 - DNA, 1544 bp, Zea mays
  Clone ID: MRT4577_89441C.1
ggaccggcttcttgtgccaggcaaaaaacgaggatcccaagttcccttcacaaactgcagggggaggcgaacctcgtgcagcgcggccatggcgaagcagggggcgaagaagatgaaggacgagaacaagaagcgcttggacctactcctgcgcatcatcctcatatccaacgctatttacatagtggtgaggatggctataatgcattcatccttcacctggaagcattggattggccttatggtaacatcggcagcatattttcttccatataagcaactcgccagtatggcaaagccagtttactctgataacggagaactactggatggtggcttcgatttgagcactggtggggtttgcgagtatttatatgatgtgatctacatcactgtctttgtgcaattgatgtctatcatttctgaaaaattttggtggacatatttagtgattccagcttttgctggatacaagatttccggtttgttgagaggagttttttttcagtggtggctcagagggtgaagttgaagatgagaagacccgaaagaaaagggagaagatggagaagaaggcatctagggggaagatgatcaaaactaggactcgctgatgtgacatctgtggcctgttgcttgaaggttaggttaggttggtttatcatagctgtccgaccgaataccaaactgtttgtcaatatttataccgtgaatttgttatagcgttcagcgatcacttgtttcaacttttaaacagctagtattatgtaggaaaaatgccagctaatctccaacatgtccgatcaataagaatttcatgtgtaaaaaaaaaaaaaaaaaactcgagactagttctccctcgtgccgaattcggcacgaggcgcgcccccgctcgcttcacttctctaggtgcgcaccgatcagaagagatggcggtgccgctgctgacgaagaagatcgtgaagaagcgggtcaagcagttcaagaggccccacctcgaccgctacaagtgccttaagccaagctggcgcaggccaaagggtattgattcccgtgtcaggaggaagttcaagggatgcaccttgatgcccaacattggttatggttctgacaagtcgaccaggcactacctccccagcaagttcaagaagtttgtggtccacaacgtttctgagctggagttgctcatgatgcacaacaggacctactgcgctgaaattgctcacaacgtgtccaccaagaagcgcaaggagatcgtggagcgtgctgcacagctcgacattgtggtcaccaacaagcttgctaggctccgcagccaggaggacgagtagtctggtttcttgtcttaacgacgaactggatgttgccattcctttctgtagggaactactttgcttgtgtcttgttagtactgaaaaccagaggcactcctacctttttgcaatcagtagccactaaaatgtggcagattccactgtttaccttgcatctatctaaattatatgcgtttcatggttgaaaaaaaaaaaaaaaaaaggccccta

SEQ ID NO: 173093 - DNA, 588 bp, Zea mays
  Clone ID: MRT4577_89442C.1
caagaatctccagagtgacattgatatgagcactttcattgggcagaaggtggagaagcaagaagatgaatttccatgcttcagcagttcaagtgcagacaccttccgtgcagagaaagcagcgaattctgtaagacaaactgttgatcgacacagtacatgctcacagccttctggcagggattcattcaggcacgggttcagtcctggtttcaatttccaggagtcagaaccaaacacgttttgggcagatagctatgtttgcaatggtacttttcaggcgggtcttgagttcagtggtgtggttgcaagaaaagacaatgataagaatgaagtcaagattgaggcatctgagaaaccagatactaagatattgacaggaacatgttggctctctgcagataacaggaatgtgattaatgggactgaaacatgttctgatggctcagaagcgttcaattgtgctgaagtttccttctgtgcttcagacgcgatgacacaaattactgcgaactagagctctcttcacgaaacctgaatagaactgttacaagattagaatcacattatacctgctaagagggaaaa

SEQ ID NO: 173094 - DNA, 924 bp, Zea mays
  unsure (1)..(924): unsure at all n locations
  Clone ID: MRT4577_89443C.1
gccggccggtacgaatagagaaaaagtctgtcttcgctattgcttttagcccgtataagagccccttcctcactccggaaccccattccccgccgcctcgcgcccccgctcgcttcacttctctagagatggcggtgccgctgctgacgaagaagatcgtgaagaagcgggtcaagcagttcaagaggccccacctcgaccgctacaagtgccttaagccaagctggcgcaggccaaagggtattgattcccgtgtcaggaggaagttcaagggatgcaccttgatgcccaacattggttatggttctgacaagtcgaccaggcactacctccccagcaagttcaagaagtttgtggtccacaacgtttctgagctggagttgctcatgatgcacaacaggacctactgcgctgaaattgctcacaacgtgtccaccaagaagcgcaaggagatcgtggagcgtgctgcacagctcgacattgtggtcaccaacaagcttgctaggctccgcagccaggaggacgagtagtctggcttcttgtcttaacgacgaactggatgttgccattcctttctgtagggaactactttgcttgtgtcttgttagtactgaaaaccagaggcactcctacctttttgcaatcagtagccactaaaatgtggcagattccactgtttaccttgcatctatctaaattatatgcgtttcatggtttcaaaaaaaaaaaaaaaaaaaaaaaaaaaaaaaaaaaaaaaaaaaaaaaaaaaaaaaaaaaaaaaaaaaaaaaaaaaaaaaaaaaaaaaaaaaaaaaaaaaaaaaaaaaaaaaaaaaaaaaaaaaaaaaaaaaaaaaaanngggggggggcccttttagaggatcaaagtttacttcccggggctggcaaggaaaaattttttttttg

SEQ ID NO: 173095 - DNA, 157 bp, Zea mays
  Clone ID: MRT4577_89444C.1
tcccctccccgtgctcccctgtggcggtgggggagagtcgtcgaacgccgaccccacccgctccactgtcaatgcgcgagcgttcaatcgccgtccggctgccagcgtccgccgaaccagtatatccctaacaaatcgcttctaggatgacgtccgg

SEQ ID NO: 173096 - DNA, 2398 bp, Zea mays
  Clone ID: MRT4577_89445C.1
cctcgagggccgtgccgggacacatcccggcatacgggaccccggtatacggaccccgatggcacggcctgcgtttgtccctgcgggctgcggccctgccttttctcccattcccctcgccgcgtgacacgcgctctctccctctctcccgagtcccgacgaccgggcaacagccgccgccgccgctcagcctccgtcgggcccttcgccggtggcgagcaccatcaggtgtacatgcgtacgcccatgcccttggctgcgcccgcccctgcaagtggtttcctgctggtctgtgtggatttggctgccggaagattgattgatgcggccttcaggatcactgtagactcgctgtgagattccaaggctgctcaggtcatgttgggggaccagtgcatcatacaggcgttagactcggttagctcatcaagctctgcccctgattcgaccctctccggagagcttccttctgtgagcaggaactgtgtgattgggagcctgcaggtggcgcgggcgcagaaggggggacatgtggagggtctggtgaattgttgtcatagcaagaagaagaagaagaataggactggcagtggtttgtgggattctgcaaccaaatcctgggcttctggcatggggggtgatgatgaaaacagtgaggccaacatgagtgagctcatcggcgggatcggccgggagttggccatctcgtgcctgctccgtcttccccggtcatactattacgatgtggcatgtgttaaccggtctttctactcccttgtgaggtctgggaagctgtacaggctgaggcgtgcggcggggatcgccgagcagatgatctattgctcgtgcaatgttctcgagtgggaaggtttcgatccgcgccgccaacggtggttcagcatcccttccatgcctcccatagaatgcttcacacttgctgataaagaatccctggccgtgggcaccaacatcctcgtctttgggaagagggtggaagcccatgttgtgctgaggtatagccttctcactaactcttggactacaggagagatgatgaacacaccaaggtgcttgtttggctccgcaagcttcggtgagaaggctattgtagctggcggtattggccagaacggtacattgacctctgccgagctttatgattctgagatgcagacatggaccactcttccaagcatgaatagggcacggcagatgtgctctggtttcttcatggatggcaagttctatgtcatcggtgggaaatctgagaggcacaatgagatccttagttgtgctgaggagtttgacttggagagcagcacctggcgcttgatcccagatatggcacagggccttaatggtggaagtggtgctccacctcttgttgctgttgtgaataatgaactttatgctgctgactatgcaacgaaggaggttaggaaatatgacaaggaaaataatgcatggatcactcttggactgttacctgggaggtatacatcagttcatggctggggcattgcttttcgtagttgtggagatatgctcattgtaattggcgcgatgagttctggtggtagcggggtgattgaaatttgttcctgggtacccaataatgaactgccagattggaagatcattggcacccgccgttccggaagctttgtgtacaattgtgctgtgatgagttgttgacataccagggctattacattatcaactgtacatcttgaccaaaaggaaggataaagaaggcaaattctgctgagtctgtttactccttgatgggtaacttctgcccactggcattttaggctaagctgaaggtaagctatctaggaggacacaagttggatgataacccattgtcttcatgagcttataagtgtggtgattagtcatgtatatgtttagcatataataggtgattgtgtaattcagtttgtgtaatggtccattcaaacgtaacaaaatcgataggaggatgaacagaagattgacgtctgtgttctgggcctgctctctgatgagggacacacatcgggcatgcatatgtgagcccttcagcggatatcatatgtttgtatggttttctgtcagctgaattgaacttaatagccattgcttttaagtctgactatttggatcattcttattagtggttcggagatatgtcgtgagttcagataattaaatctttcttgcaacctcaaaaattttgatcttccctgtgtatcttgatcaaagtttttttagctccagagaatagccttacattggcaaatcatttgcccatagattgtaagaaataaagaaaaaagaaatatctttgttgacaattgttgccttttccctttgtcttctcttggttaaaagtgactggaggcacctgtgaatc

SEQ ID NO: 173097 - DNA, 1585 bp, Zea mays
  unsure (1)..(1585): unsure at all n locations
  Clone ID: MRT4577_89446C.1
cattgggtacctcgaggccggccgggaccggcttcttgtgccaggcaaaaaacgaggatcccaagttcccttcacaaactgcaggggggaggcgaacctcgtgcagcgcggccatggcgaagcagggggcgaagaagatgaaggacgagaacaagaagcgcttggacttacttctgcgcatcatcctcatatccaatgttatttacatagtggtgaggatggctataatgcattcatccttcacctggaagcattggattggccttatggtaacatcggccgcatattttcttccatataagcaactcgccagtatggcaaagccagtttactctgataacggagaactactggatggtggcttcgatttgagcactggtggggtttgcgagtatttatatgatgtgatctacatcactgtctttgtgcaattgatgtctatcatttctgaaaaattttggtggacatatttagtgattccagcttttgctggatacaagatttccggcttgttgagaggagcatttttcagtggtggctcagagggtgaagttgaagatgagaagacccgaaagaaaagggagaagatggagaagaaggcatctagggggaagatgatcaaaactaggactcgctgatgtgacatctgtggcctgttgcttgaaggttaggttaggttggtttatcatagctgtccgaccgaataccaaactgtttgtcaatatttataccgtgaatttgttatagcgttcagcgatcacttgtttcaacttttaaacagctagtattatgtaggaaaaatgccagctaatctccaacatgtccgatcaataagaatttcatgtgtaatttctgacttttttacccataattcaagttctccctcgtgccgaaagcnnnnnnnnnnnnnnnnnnnaccgcttcacttctctaggttcgcaaagatggcggtgccgctgctgacgcagaagatcgtgaagaagagggtcaagcagttcaagaggccccatctcgaccgctacaagtgccttaagccaagctggcgcaggcccaagggtatcgactcccgcgtcaggcgtaagttcaagggatgcaccttgatgcccaacattggatacggctccgacaagaagaccaggcactaccttcccaacaagttcaagaagtttgttgttcacaatgtctccgagctggagctgctgttgatgcacaacaggacttactgcgctgagattgcccacaacgtgtccacccgcaagcgcaaggagattgtcgagcgtgctgcgcaactggacatcgtggtcaccaacaagcttgccaggctccgcagccaagaggacgagtgaaatggccattatttccggttgtgatctgctggtgttgaagatgttactgagattgatgttcttctgtaccatttctatgcttatgatagacttttcatatggacaaaattctgttataagcggaaagagtgatggcgaggaccatctagttttngaccggacatcatgaagtgtatgcagccttgtgcatgtaatggatctgatggtaatgaatctgtggctccgaagctccatgcaag

SEQ ID NO: 173098 - DNA, 729 bp, Zea mays
  Clone ID: MRT4577_89447C.1
cgaggccggcccgggaaaaaaaaaaaaaaaaaaaaaaaaaaaaaaaaaaaaaaaaaaaaaaaactcgcgcccccgctcgcttcacttctctaggtgcgcaccgatcagaagagatggcggtgccgctgctgacgaagaagatcgtgaagaagcgggtcaagcagttcaagaggccccacctcgaccgctacaagtgccttaagccaagctggcgcaggccaaagggtattgattcccgtgtcaggaggaagttcaagggatgcaccttgatgcccaacattggttatggttctgacaagtcgaccaggcactacctccccagcaagttcaagaagtttgtggtccacaacgtttctgagctggagttgctcatgatgcacaacaggacctactgcgctgaaattgctcacaacgtgtccaccaagaagcgcaaggagatcgtggagcgtgctgcacagctcgacattgtggtcaccaacaagcttgctaggctccgcagccaggaggacgagtagtctggtttcttgtcttaacgacgaactggatgttgccattcctttctgtagggaactactttgcttgtgtcttgttagtactgaaaaccagaggcactcctacctttttgcaatcagtagccactaaaatgcggcagattccactgtttaccttgcatctatctaaattatatgcgtttcatggttcccaaaaaagaaaaaaaaaagggcccct

SEQ ID NO: 173099 - DNA, 311 bp, Zea mays
  Clone ID: MRT4577_89448C.1
ctggacccccgagaaccgaccacaaaaatggggggggtgagaggaggggccccggcccacccaccgagcacagacaaccgggcgagcaagaacgggggaaggggggagcgcgccagaagcagccccaggcgccggagaagaaagcccggcacgcaaacaagaggcagaggaacgcagggaccagacacgaaaggacgccgggacaggggcagagcggggagcaacacgggcaagagggagaaagggaccaaccggacaaacagaacggaggagccaagcagaggccacgaaacaggaaccccgaagcggaa

SEQ ID NO: 173100 - DNA, 1163 bp, Zea mays
  Clone ID: MRT4577_89449C.1
gtaccctcccggtccgtgccgggtcgacacgactctcggcaacggatatctcggctctcgcatcgatgaagaacgtagcaaaatgcgatacctggtgtgaattgcagaatcccgcgaaccatcgagtttttgaacgcaagttgcgcccgaagccttctggcggagggcacgtctgcctgggcgtcacgccattccccgccgcctcgcgcccccgctcgcttcacttctctaggtgcgcaccgatcagaaggtgcctgcctcctcctcgtcggcgaaaagatggcggtgccgctgctgacgaagaagatcgtgaagaagcgggtcaagcagttcaagaggccccacctcgaccgctacaagtgccttaagccaagctggcgcaggccaaagggtattgactcccgtgtcaggaggaagttcaagggatgcaccttgatgcccaacattggttatggttctgacaagtcgaccaggcactacctccccaacaagttcaagaagtttgtggtccacaacgtttctgagctggagttgctcatgatgcacaacaggacctactgcgctgaaattgctcacaacgtgtccactaagaagcgcaaggagatcgtggagcgtgctgcgcagctcgacattgtggtcacgaacaagcttgctaggctccgcagccaggaggacgagtagtctggtttcttgtcttaacgacgaactggatgttgccattcctttctgtaggaaactactttgcttgtgtcttgttagtactgaaaaccagagtcactcctacctttttgcaatcagtagctactaaaatgtggcagattccactatttccttgcatctatctaaattatatgcgttacatgaaaaaaaaaaaaaaaaaaaaaaaaaaaaaaaaaaaaaaaaaaaaaaaaaaaaaaaaaaaaaaaaaaaaaaaaaaaaaaaaaaaaaaaaaaaaaaaaaaaaaaaaaaaaaaaaaaaaaaaaaaaaaaaaagggggggcccttttaaagaaccaaattttacttcccggggcttgaaaattaaaattttttttttggggcccccaaatttaatttcctgggccgggttttaaaaacgggggaacgggaaaaaacccgggggtacccaaatttattccctttgaaaaaaatccccttttccca

SEQ ID NO: 173101 - DNA, 389 bp, Zea mays
  Clone ID: MRT4577_8944C.1
aacatcataaactgataatgtgggagaccatatccagcttcgttggtttttttccattatccgatctacaatcagctctgactactgcactgcactggtatatatatatctaagcaccgccacaacagttcagttactgttggcacggccggacagggggtggacgcccaaacgtggttgctgaacccctgctaggccacaccctccttggcaatggcaacgcagaaaacgggggccacggccttgatccaatacctcctaccatcctggctaggggacctgccgccgttatgctggaacgtcagggtggtagctgtttcgcaaccgcctttgattctggccccagccaccttcctagagaactgctgtgggcgccctttactaggttt

SEQ ID NO: 173102 - DNA, 866 bp, Zea mays
  Clone ID: MRT4577_89450C.1
tgggaccctcgaggccggccgggccgggattccccgccgcctcgcgcccccgctcgcttcacttctctaggtgcgcaccgatcagaaggtgcctgcctcctcctcgtcggcgaaagtatcccgctggtttccttgttcctttgctcggtgtttgctcatcgcctcatgtttgcgtgtttgctgttgtttgtcggtggtcggtgggtgacggagcagagatggcggtgccgctgctgacgaagaagatcgtgaagaagcgggtcaagcagttcaagaggccccacctcgaccgctacaagtgccttaagccaagctggcgcaggccaaagggtattgactcccgtgtcaggaggaagttcaagggatgcaccttgatgcccaacattggttatggttctgacaagtcgaccaggcactacctccccaacaagttcaagaagtttgtggtccacaacgtttctgagctggagttgctcatgatgcacaacaggacctactgcgctgaaattgctcacaacgtgtccactaagaagcgcaaggagatcgtggagcgtgctgcgcagctcgacattgtggtcacgaacaagcttgctaggctccgcagccaggaggacgagtagtctggtttcttgtcttaacgacgaactggatgttgccattcctttctgtaggaaactactttgcttgtgtcttgttagtactgaaaaccagagtcactcctacctttttgcaatcagtagctactaaaatgtggcagattccactatttccttgcatctatctaaattatatgcgttacatggtttccacctgccatcttgacattcgttgataatacatagcgctcattaggccaagctctgccc

SEQ ID NO: 173103 - DNA, 2034 bp, Zea mays
  Clone ID: MRT4577_89451C.1
ctgtgcggcgctcgaggcggccgggaattcgggacctgtcctcgcctcacttcactagagagatcccaacagtgtaacttcgctgccgtcgcctccgccagaccgccgccgcgacactacacaccagcgccccggcagaaggagcaagggggaagaaggaaagcggcacccgccgcacatacgccgcgcggcggagccatggccgagctgcggcacgccacggcggcggcggcggcgacgcgcgccactggctccccttccaagcgcgacgccgaggccgcgtcctcgcccttggtcgcgtccccccgcgtcggcggcggcaaggacgggctccgcccccaccagaggtggccgctcccgccccccgtccgcgccctcctcgcgtgcgaggaccccaggtcccccaccgcctccgcctcctaccggatcctggtcgcggccatcgcctgcttcgccctcgctgcgctcttctccgcgccttccctctgggcacgcctcaacgctccgtacctgtgccgcaaggaggggattcggctccactgccccagggtcagccagccagactctctgtgggagaatcctcatgcagcagcaacttcgtggaagccgtgtgctgagcgtcagagacatgaggtctcagacctcgtgtcagagaatgaaacttctgggtttatatttattcacgctgagggtggattaaaccagcaacgtatagctatatgtaatgctgttgcaattgctaagataatgaatgctacacttattctgccagtgctaaaacaggaccaaatatggaaagatcaaacgaaattcgaggacatctttgatgtagaccattttataaattatttgaaggaggatgtgcacattgttcgagatattcctgactggtttacagaaaaggatgaccttttcactagtataaagcgcactgtgaaaaatgtcccaaagtatgcatcagcacaattttatattgataatgtgcttccaaggatcaaggagaaaaagataatgtctatcaagccatttgttgataggttaggatatgataatgttccaatggagattaaccgactgaggtgccgagttaattatcatgctttgaagtttctacctgacattgaagaaatggctgacaagctagcaacaaggatgaggaatcgaacaggaagtttaaatccatacatggctcttcacttgcgatttgagaaaggaatggtgggcctttcattttgtgattttgctggaacccgagaggagaaagctatgatggctacttacagacaacagcaatggccaaggcggtacaagaatggatcacacttatggccactagcgctacaaaagagaaaagaaggccgatgcccccttgagcctggggaaataggaatcattttgcgcgcaatggggtatacgaaggaaactcagatatatgttgcatcagggcaggtgtatggtgggaacaacagaatggcacccttgaggaatatgttccccaatatggttagcaaagaagatctcgcaagcaaggaagagatggagcctttcaagaagcatgtaaccagccttgctgcgctggacttcctggtatgcctgaagtcggacgtgttcgtcatgacccacggcggcaatttcgccaagctgatcattggctaccgtcgctacatgggccgccacaggctcaagtcaatcaagccggacaagggtctcatgtccaagttcttcggtgacccttacatgccgtgggcgacgttcgtggaggacgtggtgataacccatcagacacggaccggcctccctgaacccaccttcccgcactatgacctatgggagaaccctctcaccccttgcatgtgtagagcttaaattacagtcagcgagtgatggtgcatagttattctttgtatcatatgctgatatgcaagctgcaaattttgtccaccttgtttatttttttttaccacttctgctgtacaagtttaacaaagcaaagctcagttcatcacgatccgcaaaaaaaaaaaaaaaaaaaac

SEQ ID NO: 173104 - DNA, 886 bp, Zea mays
  unsure (1)..(886): unsure at all n locations
  Clone ID: MRT4577_89452C.1
gggtacctcgaggccggccgggccggggtcttgcaaacgaaaatagatggacggcagtccgtaggccactccgcctccacgatacaccacggcaccactcaacctgtcaggtagacttctctctcccgcggaagctcttacctccggctccgcaagcaagacttcatggagaagacggtcgttctgtaccccggcctatccgtcagccatttcgtcccgatgatgcagctcgccgacatgttcctagaggagggttacgctgttgcggtcgcgctcatcgacctcaccttggaccaagacgccgccttggcagacgccgtcgaccgcgtcgcctccgccaagccgtccgtcgccttccacaggctccttcggatccagaatcctcccactgtcacagacgacggggagccgttcctctggtacttccagatactgaaacgctacaacgaccgcctccgtgagttcctctgctccctgcctccccgaagcgtccacgcggtgatcgtggacgcgctttccgtcgacgcgctcgacgtcaccaaggagcttgggctcccggcctacaccttctgcgccgccaacgcctccgcgctcgccgtgttcctccagcttccttggatccgcgcggaaggccaaccaagcttcaaggagctcggagacgcccccgtcaacttctccggcgtgcctcccattccggcgtcacacctcgtgcgccagatgctggacccggagagcgagatatacaccgcgatgatgaacgcgatgcgaaggggagcggaggaccccgacggcatcttggtgaacacgttcgcgtcgctggaagctcgggcggtgggagctctccgggacccacagctggntcctcctagcagcggcagagcacgca

SEQ ID NO: 173105 - DNA, 531 bp, Zea mays
  Clone ID: MRT4577_89453C.1
ggttctttcaaagctaattcactctcctgacatttcaggttactttgatgttcttgtgcacatggaaatgagcctgcattctatggaagttgtgaacagactcactactgccgttgaccttccaacagaatttgtccatgagtacatcacaaattgtatccaatcatgtcaaaacataaaggataaatacatgcaaaacagacttgtgagactagtttgtgtttttctgcagagtcttatccgaaacaagattataaacgttcaagaccttttcatcgaggtacaagcgttctgtattgaattttcacggataagggaagcagctggtttgttccggctactcaagtcgttggagtgaaagaattcgtgtgttttttacttgccgtctctgtaccatactgcatcgtatgcctcaagggcattggatgcgaggatcatgtgttgtattgaaaattttccatggaaccatttttggaactttatgggctgattgctactaagatttcgagttgtcaggttgtaccgacttgg

SEQ ID NO: 173106 - DNA, 641 bp, Zea mays
  Clone ID: MRT4577_89454C.1
tataaaaaaaccccaccgaagccgaaaaaaaaaatcctcgccgacgttcctcaccacggcgacggccaccgcgacctcggccccgacgttgcctacggcagccaccatgtcggcgagctccgttgtccccatgctgctgccagatgagcggcccgacatcctctcgctgctcgacgccgccgcccgcccgctcgccgacgtcgtcgccgacttccttgctcggttcccccgcgagcgccgcctccgtgtctgcggcgccctctgcttcctcctcgaggcagcctgtgatgaaacgtcagagaaatcagaacgggcgtttgtccaactattattgacttcatctagtggaaatagtaataacgaggtcctgaatcagtctgcccttgattacataaatggatctgtttcagcatctcaggtctttttgcctcgggaacaacttgagaagcaatactgcagtactggtgtacattcctcgcctcagactagtagtttcacagctcctgcagttagaagtgctataccagatccagacgtccgtcaaagttgtgcaaattcatcagagtcttcgatatcaccacctggaagcaaacagaaatctgcgtctgatgatagagatactattatttctgttttactcg

SEQ ID NO: 173107 - DNA, 973 bp, Zea mays
  Clone ID: MRT4577_89455C.1
catctcaacaatccgaagatctccgtaccgttgaccaacaccaaccggccggcgcacgctcctcctgcgcccaccatggccggcagcgacgccgaccgcgagaagagctgctgctgcagctgctgcacgccgctcatctccctgggcgtcgtcgtgctcatgtactgggccatcttccagccgcaccagatacgcgccagggtggactacgcggagctgtccagcctcagcgtctccaacgcttcatccggctcctccccctcccccgtcacggtgtcctaccacgtggccgtgaacctgagcctctacaaccccagcaagcgcgtcggcatctactacgacaccctggacgccgcgctccggtaccgcggcgccgtgctgagcccggccgccagcgcggcgtcccccgccgagttccaccagcgccggaaggccgggcgggcggtgcgcctcgtgttcgacggggagcgcgtcgccgttccaggcgacgccgggacgcagctggacggcgaggtgagggccaaggcggagctgggcctggagctcagcgtcgaagcgcgggtgaggtacgtgttcgggatcgtaaaggtacggcagaggccggcggtctggtgcgcgctcagcatcccggtcccgccggtgcccggcggcctgggcgttcttggctccggcgaccggtgccgggtcaagtaccggtgattgattgttgggttcagttggcttgttgttcgcagtaccagtaccattattcacttgttattaggctgggccttgtgattcatccagaacagcaaatgcattccattctgtttcttaattagatctataccattaaaagattgtaactttaaatatatatatagttggttttatatgtaattgaattatgttaacgccactatatacaattaagttaacaatgatatatatttaaagttataatattttaatggtataaaaaaaaaaaaaaaaa

SEQ ID NO: 173108 - DNA, 239 bp, Zea mays
  Clone ID: MRT4577_89456C.1
cccacgcgtccgcccacgcgtccggggactgggagtcgttagtgaggatgacgcggcatggcaagaactgcaccgcagggtccgtctacacctaccacgagaagaagaaggacacagcggcctcgggctatgggacccagaacattcgactgagccgggatgccgtgaaggacttcgactgctgttgtctctccctgcagccttgccacgatcctgttgtcaccccagatggctacctg

SEQ ID NO: 173109 - DNA, 330 bp, Zea mays
  Clone ID: MRT4577_89457C.1
acttgcaggagaaagtgagtgggctgtatggcaaatagatgtcctgatcaaacgcaatgaggtggagaatgtttaccattgggcatgtggccgtccaacatctctacatgatcgtgggagggatagcgatgacgacgacttccgagacagagactacgatgtggcagcactcactaataatatgagccaggcatttcgattgtcggtgcgctgactcatctgaatcaggaacagaagaagatgtggagacttggatgcatcgagaaaggaaatctgagactgctatgacaaatgaatgagcgttatgggcttggaatgataggatgggcg

SEQ ID NO: 173110 - DNA, 2016 bp, Zea mays
  Clone ID: MRT4577_89458C.1
gaggctcggcccgggaaaaaaaaaaaaaaaaaaaaaaaaaaaaatcttaataaaaaaaaaaccccaccgaagccgaaaaagaaaaatcctcgccgacgttgcctacggcagccaccatgtcggcgagctccgttgtccccacgctgctgccagatgagcggcccgacatcctctcactgctcgacgccgccgcccgcccgctcgccgacgtcgtcgccgacttccttgctcggttcccccgcgagcgccgcctccgtgtctgcggcgccctctgcttcctcctcgaggacaagatgatgctccatcctactggccggttaattgcatttgcaattcttcatcagagttattcgccgcagacagcaaatccatatattcctatattgttaaatgcagcctgtgatgaaacgtcagagaaatcagaacgggcgtttgtccaactattattgacttcatctacccgcgcgtccggtatcgggctccccttgctgtctgccctggatctaggtaccggtccggaattcccgggtcgacccacgcgtccgtgtgaataacttgagaagcaatactgcagtactggtgtacattcctcgcctcagactagtagtttcacagctcctgcagttagaagtgctataccagatccagacgtccgtcaaagttgtgcaaattcatcagagtcttcgatatcaccacctggtagcaaacagaaatctgcgtctgatgatagagatactaatatttctgttttactcgaagacataccgggggggaggttgggtccgcaatggattcggcccacacccccaagacttcctttatttgatggggagctacaatggctgaaccctgacaataaccacgagctattatgggattatagcatgtgtgctgacacgaatcgaggggctgctatccgagatttgattgcaagagccttaaaaggtccacttgcacctattcaacaggagcaagtcgtagtagaactggcaaaggatcctaaactggtttattattgtgggatgactccacagaagcttcctgatcttgttgaacacaacccactcattgctgttgaggttctttcaaagctaattcactctcctgacatttctggttactttgatgttcttgtgcacatggaaatgagcctgcattctatggaagttgtgaacagactcactactgccgttgaccttccaacagaatttgtccatgagtacatcacaaattgtatccaatcatgtcaaaacataaaggataaatacatgcaaaacagacttgtgagactagtttgtgtttttctgcagagtcttatccgaaacaagattataaacgttcaagaccttttcatcgaggtacaagcgttctgtattgaattttcacggataagggaagcagctggtttgttccggctactcaagtcgttggagtgaaagaattcgtgtgttttttacttgccgtctctgtaccatactgcatcgtgtatgtttctacttacattctctggaccatactgcatcttttttcccccctaatatatgtacatcttcattgtcatggttaagtcagatgcctcaagggcattggatgcgaggatcatgtgttgtattgaaaattttccatggaaccatttttggaactttatgggctgattgctactctaatttcgagatgtcaggttgtaccgacttggaaagtttgaagtttgcctgttctggtagttctgtggccactgcccttgaggagggtgttccggtgtgttacgtgcattgtctttgactcgttgcccttgaaagagtggccaaaacgagtatagcaagagcagaatctcaaattgttggtgcttaagcttgtactgtgtaggctcatttgtgaaatggtaggctctttgttttgtaacgtaaacaacgctccaatctatttgatttaccgttcttgtcaagttacatcatgcttgtcggtcattgttggttatatatatgcagacaagatatcaagaaactctatacgttc

SEQ ID NO: 173111 - DNA, 1687 bp, Zea mays
  Clone ID: MRT4577_89459C.1
tcggtagaatgcatctctgtccggaattcccgggtcgacccacgcgcccggaagaagctaatttgccttttagtgataaagcattgcattgatttattttttcagtacccttataataactttttgcatcatcatgttgagaacattattgtttcttgccttgaggttaaaagaaatcaattgattgaccatattcttaatgactgtggtcttgttggtaaagtccttgccgctgaaaaaagttcttctctggcagtggagtctaatgggccaacattaccatcagaagggaaagaacctccaagaattgggaatattgggcacataactcgaatagcgaataagctcattcaatttggaaatagtaacagcatgatccagagtcacttgcaggagaacagtgagtgggctgtatggcaaatagatgtcctgatcaaacgcaatgaggtggagaatgtttaccattgggcatgtggccgtccaacatctctacatgatcgtgggagggatagcgatgacgacgacttccgagacagagactacgatgtggcagcactcactaataatatgagccaggcatttcgatttgggatatacaggaatgatgacattgaagaggcacaaggatcccacgaacgagatgatgaggatgtctactttgatgacgagtcagctgaagtagtaatatcttcattgtgtttgggggatgatcaggacagcagttcactcttcacgaattcaaactggtttacgtttgatggtgatagaggaatcaatgaccgcctagctgcctctgttcctccatcatccccggattctgaagcgatttccttaaacactgagaatactgatgaagcgctaactggtgaaaccactggaggcactgagtcactgcgggaaagtgcatcccttgaaaatggtcctgttgaggatgccaatgaactagcagaagtcgctgacgacaatgatgctgatgccacggacggtgagaaaattttgtgtacagaagaggacagtcaagcctccgaggggcctgtggatgctgaagaggacaagactggaggagcgtctaaagcagcgaatgaatctgtgcctgacaatgccttgcctgaatcccaccacactgattgtcggtgcgctgactcatctgaatcaggaacggaagaagatgtggagattgatgatgagaagaagtctgagactgctatgacaaatgaatgagcgttatgggcttggaatgataggatggcggatcagattcttttgctggtgagcaatgccactcaagcaggggcgccgtacaattttaacagcgctgctttgctattgaggagtctggttgttactgcatactcgggcacgcacgctcttttatcatctcacctcatcaccatcatcccacatggaccaatgtcgtctggcggctcctgattttggtctcttcgaactgtaatatctgcagtgagttttttccatcagtttttatttttttttccgggtttctgcatctgtaatagctatttcttcaagcgcaaaacatgtcttctctttgttgctataaaaagcatatagtttcaccaaaatttaggttcagaatcatataatatttgttgtccgctagttcatttttaaactaaaccgcgacaaataaaaaaaagaatggaatgaatgtttgttagttactact

SEQ ID NO: 173112 - DNA, 1539 bp, Zea mays
  Clone ID: MRT4577_8945C.1
cattgggtacctcgaggccggccggggccagccctccagccgtcgcccgatgcacccgcaccacgtaaaaagatgcacagagccggccgtctcggtcgcccgcgacgcaccgcacaccctagcataggaggcaaagaagtacagagggaggaggcgggcagcagatacgcggcgtgacagacacccagggaagggtgctgtttatccatgctgctccggctgaagatcgtcgtcggcgtccactcggtggtgcttccggttcctgttccaggcggctatggccatggcgcctgctacgcggcagtagagccctgctggcgccgcagccggaggccagcgctagcggcggcgggtggcctcgtcgcgaggcggccgaggcagagcgccacggtggtgatggcgctgaaggaggagccggagggcagcagccgccgcggcttcgccggcggcgggccgagctgggaccccgggctggagatccaagtccccttcgagcaaagaccggtgaacgagtactctgctctcaaggatagcgccctctactcgtgggcggagctgagcccagggtccttcttcctccgcctcggcggcctgtgcctcgtgaccttcactgtgctcgcggctccaattgccgccgcaagcttcaatccaggaaaggatccactcaagttcgtgctagcagctgggatcgggacgctgcttctggtgtcactggcggttctcaggatatacctggggtggagctatgttggtgatcgcctgctgtcagcggtggtaccgtacgaagaaaccggatggtacgacggccagatgtgggtgaagccaccagaggtgttggcccgtgacaggctcctgggatcttacaaggtgaagccggtggtcaacctgctgaagcagacgctggtgggcaccggcgcgctgctcgtgggcgccgtgtcgctcttcgcgttcgccgcgccggtcgaggacttcctccacgccctgagccagcctccctcctccgccaccgcctcgtccaagccgagcttgaggaaggaggagctgctgcggctacccgtggaggtgatgcaggacgacgacctcgctgcggccgccgactaggccgccgccggccggcccgtctactgcagggaccgctactaccgggccctcgccggcgggcagtactgcaggtgggacgacctgctcaactgataaatacctagagcagtattgctgtggtacgacgcggcaggacaggacgtattttttttgtcagatgggaaatttcggactgaactgctagaaattgagttcttaatggcacacaagcataaggaacagcaagaaaaagcaacacagaatcagagaaaaaacaagagtttatatattcacttttctctctttgtttctggagttacatctggtctttccgtttcttgagttacctctgatctttttgtttcttgagttacatctgtagagagtgaccttttatttacagcaaaggatgcaagggttaatcccctttacagtgtgtacttttcagtttctcccctc

SEQ ID NO: 173113 - DNA, 324 bp, Zea mays
  Clone ID: MRT4577_89460C.1
ggttgcggggcaagcgaattggcgtcccagctgggttcttcggcttcccagatggatccgtcaggcagatggtgtaccagcagcacctcgacacgctcaggcgacatggagcggtggtgacagaggacctttcgattgcgaacctggatgtgatacagaacgccactgtgagtggggagctggcagctctagcagcagagttcaagatcgccctgaacgcatatctgtcgtccgatctgtcacgctcccccgtggcctccctggctgaactaatagtgttcaacaatgcgcatccggatgaagagatgctcaaacaagtcgggc

SEQ ID NO: 173114 - DNA, 320 bp, Zea mays
  Clone ID: MRT4577_89461C.1
tcgcccaacttttttttcaaacgtccgttcaggaaactgtccgggaacgagccggtcgggactgggcggggggcgggcaagagcgatcgggaccgcattggttgggtggttcttcagggcttcgccttccttattataaatggaacggggagaaaaacaaaggaccgggcggcggggggctccactgacattgcctaccatgggttccatgctgggccggggcatgcgggaactgcgcccgctgggggcttttgcgagggtccccagacccaactttggggagagggcaacattttttaaatgtagaagcaacttaacaa

SEQ ID NO: 173115 - DNA, 391 bp, Zea mays
  Clone ID: MRT4577_89462C.1
ggggttctgttgttctttgtggggttttttttttggtttctgtttttttgtttttttttctgttttcccaacccccccttaaaaacgaaaccccccctttaaaaccgggggggggggcccggttaccccagcccaactccccgctggggaaaagcggcccaccccaaacccgggggaaacaaggggggggcggccgcccgggtcccccttgccaaaaaaaaagggtcaccccgccccccccccgggggggggcccagcccccaaagttgggggggccgtgggcaagcgctccaaacaccaaggggggccgggcgaaggccccctgaaaacaaggggccttaaggggccaaaaactgccccagagcccggggcccccccccggggggggggg

SEQ ID NO: 173116 - DNA, 600 bp, Zea mays
  Clone ID: MRT4577_89463C.1
actcctaagggcgattgggttcctcgaggccggccgggaaaaaaaaaaagccgcgggccgcaaggttgccgccagcgcccaccgttcgtctccgttcgtgtccggcctccgcgccaccacctcctcgcaggagggagaggaacatccctttctttcttgcccaacaaggttacgggaacgagattgcgtgaccttggccgccttgagcggcatcgttcggacgccggtgattaactgattccgccgaacttccaaaccgcctccctggctggtccttgccaatggcgaggctgaggcaaggtatccgccgacttcgctgctgctgcagctgctgtttcagcatgccgcgaccatccagccccgtggtctcgtgcaaagcgcgattctcgggatccggagtgccagtcctctcccaaatctcaacccttgccggggtcatgtggtggtggaggtgccgccggcggatcaccgttaatggcttggcgggggctccaatatatttacgttaagcacctgtcgtccttccaatagttccatatatcattcgcatttatgagcacatctgtacattagaaaaaaaaaaaaaaaaaatttgcggcc

SEQ ID NO: 173117 - DNA, 974 bp, Zea mays
  Clone ID: MRT4577_89464C.1
cattgggtacctcgaggccggccgggaaagacttatagttccctacctagatggcctccacgtagcacgctcccaaatctccccacccctcgtcacctcgtcctcagcaccccaagtccccaaccaacatttgccgaacggatcccgcccgagcccgagagctcgcgaagcccaggcccagccagacccacgaagcgatgcaacggagatagtgagatcgcgtgaagccgccgatgacctccgccgtcctcgccagccgggatgaggtccaccacgggcacccgcaccaccgccgctggggcggcgcccgcgcccccctcatgcccaagccatcctccaatcataaccctaggcgctaccgcccgggaccaaaccctatcgtcagtggctcgccgccggcgccgcgggccggttcggctgtcgcggctgagcccttgccgtcgcccttaaggcacgtgaaattcaggccgtcggaactgacacccgccgaggcccgtcatctccgcgagcggctcaccggcgagcttggccgcgtccgcgctttcgtctcccgcatcgactcgtggcaggacgggcgtcgctcttccccgccgccggcgctggtggaggcgatgtggaggcgatgcgcggatatcctgacgcggctgcggagatcgaagaaaagcgtgtggttcaattcccccgtcgacgtggagggcctcaagctgcacgactaccgcgccatcattcggagccccatggatctcggcaccgtcaagcagaacctcaccgctggccggtacccctcgcacgaggcgttcgctggggacgtccggctgaccttcaacaacgcgctgcggtacaaccctcccgaccaccacgtgcacaggtacgccggcgacctcctcgccacgtttgaagggatgtacaaagaggaggtctcgtggttcgagcagcagcgccagcagctcgagctgccaatgcagcttgatttg

SEQ ID NO: 173118 - DNA, 262 bp, Zea mays
  unsure (1)..(262): unsure at all n locations
  Clone ID: MRT4577_89465C.1
cctgacatgacttattgtcacaatcaactgaactgaaacctttcataccaataattgaaggatcctggaaccaggccgcccctatacaaggggacatgggcaccaacactggcggtttttttaggggcttgggccagccctacacagcctctaagctatttttttttctagncctggcaaaacaactttccaggggtaccgctgcgaggcctacatattgatcgcaggacttcgatatttgaaagccttccgtgggactgga

SEQ ID NO: 173119 - DNA, 392 bp, Zea mays
  Clone ID: MRT4577_89466C.1
gacccactcgtccgaatgatcgtcaggagattgatcaactgcttgcactgcctgagaagccacaggtggggagacttgttataaagaggaggaggcacacgaacaggccgtaccaagagaatctgctcaacatggctgaagctcggcgggagatcgtcaccgccctcaagatccaccgggccagcagcaggaggcatcagcaacccaagtaccagcgtcatcaggagccgccgctgcgtcaaccaccgtttgcacagctccagcaacagcaagaatagccgaagcacgtgcaagaggcgtatctggatccaagatgaagccaaccgaagggtgacgaagaagcatctctggcacataccactatgaaatacgccatcttcactaacaacccg

SEQ ID NO: 173120 - DNA, 265 bp, Zea mays
  Clone ID: MRT4577_89467C.1
tccaacgttcgtccacgcgttcaagagcagtgatccatccatcctatcccccgtgcgaagccctacccagctatgagcatcccgacgacgactcctcctcgcctcatccgacgccataacacctcttcctgttcgcaccccttctcactacgactaccctaccaagcgctcaacctggtcgcaacttctccacactctctcggcgctgctatgaccctgtcttcctgtctgcataacgtgtgcacaaccaccatctgctacgtca

SEQ ID NO: 173121 - DNA, 408 bp, Zea mays
  unsure (1)..(408): unsure at all n locations
  Clone ID: MRT4577_89468C.1
acccgcaccccacancactcanccacagcncgcagccgnannccngncncggaggcgcgctcgccgcncacgaggcccgcacgaagcaaacagcaaggaagncgaccggcggcaaggccccccggaagcagcnggccacnaaggctgcgcgcaagncggccccggccaccggcggcgngaagaagccccaccgcgnccgccccggcaccggcgggcgccgcgaganccgcaaggaccagaagagcacngagcngcncaaccgcaagcnccccnnccagcgccncgnccgcgagaacgcgcaggacnncaagacngancngaggnnccagacccccgccgncgcggcgcngcaggaggccgccgaggcgnaccnggnggggcncnacgaggacaccaaccnnagcgccc

SEQ ID NO: 173122 - DNA, 285 bp, Zea mays
  Clone ID: MRT4577_89469C.1
gggacacgagctgggagctaagcctcatcggaagaagcggggtaggctggcctgggaaggttcttggaggcagcagccctctagagtgtgtagaaaatgttgggattgcaggtgcgctcttctggggccccagggcccctgactctgaaggaggtggaggagctggagcagctgacccagcagctaatgcaggacatggagcatcctcagaggcagaatgtggctgtcaacgaactctgcggccgatgccatcaacccctggccacgggcgcagcagctcgtcct

SEQ ID NO: 173123 - DNA, 728 bp, Zea mays
  unsure (1)..(728): unsure at all n locations
  Clone ID: MRT4577_8946C.1
gccggcccggttcgcagagatcacactccgttcagagaacgactcatatccccgaaccctaagtcccgatctcgatgatcaaccctcacgtcttctgccacctgaccgtgctcctggccccagacgggacgcatcgagacggagctggacggcagccaagggtccgagaccggngagaacttccacgagctgcgcacagatcagaacggcggggacatttccgcgcaacccgatccactacaaaggctacaccttccaccgagccatccccgagtacttgcgccaggaaggagactgctcccgagcacaacgctcaccggacccccattccatctactcagagaagaccacgacgagaatatcgagagtctgacaccgcccgcggagcgctctgcatgcacaacgacgatccacgctgccgcggataacatgtctgcctttgaaccgaagaaagcccttgcttcgacaggactgctgcgaacacgaacgattacgtgaggctgacgcacgactatgatgcccttgatgaggtcaacaccatcgacatcttctacatcgctgcagttacgagatcctatgacagctgacgtgtccccaatctatgtcggacccagagctgtgcagctatggttctcaatcgatccattaccatgcgtgatgcacacttctgaattcgatatcatccgagtgacgctcttgaacaaaaattaaaaaaataaagcccctat

SEQ ID NO: 173124 - DNA, 472 bp, Zea mays
  unsure (1)..(472): unsure at all n locations
  Clone ID: MRT4577_89470C.1
ccactcgtcccctagtcaactgaccctgttagtgggnataaaccacaagcgcagagagaccatttggtggacagtgatgtcgagcccggtgttggcatgactaaggaggagttctacgagcagccatagtggaagcaggagttgcagaaaaagacacccatcttttctaggacaaggctggctgcgaactaataaaagcaacaccgtcanacaggatagcgcagcatgctaatcatgctcggttcgttgatgctgatcgacaacaagcagcttcatacgagagtggaatatgcaacatctaatatgtgcacatggncaatgagcattggttacacatggtccttgcaagtccataatactgaggttgatctagatgntgatnactgacggggtgntattttttataattatataaataatcaactgatgtaaatggaatttctagtgacatttaggaanttatatgtggttg

SEQ ID NO: 173125 - DNA, 549 bp, Zea mays
  Clone ID: MRT4577_89471C.1
ccggccgggccttccctcctatctcttgtagcgctcacacccccactcgtatgctcttgctcagtcgctcctaggctttgtatttgagagagacagtgtcgtgaattcgctgccagcaaaaacaatcacacttctagtacagcacctgcttaccccggtcctgacgggctggggaagctcagggcacttcgtgcacgccgggcttcaagacctcaagccctccaagctgcgccaactctccatggacaggctcgatctgtataagtacaatctttccattgagatgagtcttgcgcctgtgattggtctcctggacgcttgccagataatcgggatcaccctcaccaaggagggtctcaccatcggtgagacaacggttacgcgcaattatctaccttcaaggacctgttcagcgcataccgggtacttcaaccatgccaattgcatctgaccaggcatgtgtggtaagttgtgcactggcacgcccttggcaaatatagcgacctgaaagccagctcacttaagattgaggctaggcgaggagcgaga

SEQ ID NO: 173126 - DNA, 460 bp, Zea mays
  Clone ID: MRT4577_89472C.1
gccgatctgccttttttttttctgacaagctcctttacacaactgaacatggcctatccggacggcgaaccagaggcagggggatcaacatgggtctgtggaaagactgcgtacacatggacgaggcagcccttcaaattgaaaaggagtacagcactggacctgctgtggacgggcctctgggtagcttggatagccataaggacccacagcgctaagatatgggtgacatccgacttgtagatggaaccactctacgtggtcaatgttcttgacgctgagggataaaaacctggtgtgcatgttcattagggatcgtcggaaatacacagcaaagcgcaaccgcgcattcaacaggcaatgttttgacaacgccaggatcgctggatatggttggtctcatttttaatgggtctgcgaaacctattgacaatggcccaacagaatgaccggaagccta

SEQ ID NO: 173127 - DNA, 1251 bp, Zea mays
  unsure (1)..(1251): unsure at all n locations
  Clone ID: MRT4577_89473C.1
cggatgggattgaggcaagatgtagctagctagctaacagtactacacacgtacattaggtcacgtgtacgtggtacagcctagctcagctctggaaatagctagcaggcggcgggacgcattattatcacgcgcgactcacgagccaaatctaacggagctggctttctcgatcaattgatcggccggagagcttggacgggcaacgagggagggatagggagcctgcgtagcgatagctagcgtaccatgaggccgaagttgatgccgacgacgacggtgttggcgatggagatggcggcgagctcgaggtcgccgaggtggccggcgaaggcctgcgtgatgacgttcatgctgtaggtgacgacgcggctgaagatggccggcgccacgatgtcccacagcttcctcgactcctcccacacccgcgccgcgaggtgctgctgcttcttgccgccctcgccgcgnnncgcnncgtccgcgtcnncagcagcgcnncacccggcacnngcgtccgctcgcttccatnncgtcgtctgcgnntcttggttggctcggtttcccctcgatctccctctctctctctctccaaatgtttttagcttttagggagggaaaggagagaagagaaggagtcctgtctggctttctctcccgtatacaaaagccagcgaggacgccttttaataggcagaggcaaggcgttcggagtagcgtggctggggtggcgagtcccaggcagcagccgcagccgcagcccgcagctagcgtcatcgacgacggaagggcgacgggaacagctggccgggttgcgttgcgtttcgatcggcacgtgttatttgttggtgccgagagctgctcgcgttcgttgccgcgggggacgacagatcgatgagcccagcgccggcccgaccacccatgcatgactcgcccgatgcatcaaggttccagcagcagccgcatgttccacgagacgagctcgcctctaatttgcggaaggcgagtcagcgaaaggtcgtagccccatcatgatcgtccagcagaggacggactcgggttaagcgacacccacgtcaactgaaaccttttaggcccagtttaagttgagaagaataccacatcagtatggtatattgtacggtgggagtcgttccacgctaagctactatagtcgtgcttccttcccgatcctaatttaggtcatgtacaatactatttaatatagagttttttagaggtacgtaaggagct

SEQ ID NO: 173128 - DNA, 293 bp, Zea mays
  Clone ID: MRT4577_89474C.1
tagggcgtccgctgctttcactcggcctggcctttgccaaggagctgtggagtcatgctgcactccacttactctttccgccagcattgcacctgcagtccatcattcctgcctgataaccttctgtgttttctttattaaaagggattagtacaactgatagttattttcaacaaataaagccattatgtttagagggggactgtcctcagtgagtgaaaggtggcaggctaccggggcctacggctcctgggtgatggagaacttaggtgaagccaactgaaagatcttat

SEQ ID NO: 173129 - DNA, 803 bp, Zea mays
  Clone ID: MRT4577_89475C.1
ccggccgggattccccgccgcctcgcgcccccgctcgcttcacttctctaggtgcgcaccgatgagaagagatggcggtgccgctgctgacgaagaagatcgtgaagaagcgggtcaagcagttcaagaggccccacctcgaccgctacaagtgccttaaggtttgaatctccaccctcttgtcatctctggaatggactgttcttcggaggtggatctgtgtacttgatagaagtcgatggtttgtagagcagcgatattcttatgttgccttggcactggcttaacacatgatgtattgatacagtatgattacgtgcctggtttaatcttgcctagatccgcatcgttaatgtttgtaactgtaattagctacgagcgctggtttaatcgtacctagatggttagatccaaccggcttattttgtaactagcccatatatagttttcttgaatggcatgccgatgcttggtgacagcagatttgcgttacctagactgcaagtgcttcaaactgaagtattgaactgcctctgtttgggttgaataagtgtatttgaactcccacggacatatatatagcagcatagataattacattgcttatcccttgcccaatggaattttctcgcttgatgtcatggaatttttcgcatgtttctatttttatgtagagaaacataacaatcatagggtttttctggtgtacatgatgaaatgccccccttttgacataattttggttccttctggttattctggctcatatactgtacagttaaccatggttgcataaattgaaa

SEQ ID NO: 173130 - DNA, 273 bp, Zea mays
  Clone ID: MRT4577_89476C.1
gtctgaaagcaatcatggcggcgtggacggattcgataagggcgcccaggagaacaaaggctcctttggggattgaccattctcaaatagttgatggtcccgcccgacgagtaaagagacccacatcctgtgagcctggccttccgagcaaacaaatgcggaggggtcctgaagaggaaatacgggggggaggagactgggtggaactggggagatggccaatgtaatggagatgttcatttgatcatgcaggtaaacgaggcaatctttatt

SEQ ID NO: 173131 - DNA, 903 bp, Zea mays
  unsure (1)..(903): unsure at all n locations
  Clone ID: MRT4577_89478C.1
gctgctgcgagcgtgcgactcgaggcggggaggcaatggagttatccactcccgttgggagctcccttgctagaacagcgaccatggccctcgttagccccagcttcaagataaccaatcaaatgcgtggcaggggtatgccacttgaatgccaatttcctcataggctaccatctgtagcttgttcaatgttgttaaacacacaaccttcacaacgaaccaaccataaagattgtggtttgcttcaggtgcaatgtacagaaaacctgatgcagtcgccagtatctttcagtgacttctctgtttcagtgtgtactcaagaggatggtctgataaagctacaggtaaatgtatctggcacaatgacagattctatcttcgagaaagttttcacaaagaatgttgccgccgctcaaccccttcccggctttcgacgaatgaaaggagggaaaactccagacataccgaaagaagttgctctacacttaatcgggccatcaaaagtgaagaaagaaacaatcaagaaaattataaatagcacggttgctgagtacgttcaaaaggagggcctgactgtatcgaagaatatgaaagttcagcagagctatgaagagcttgaggcagcatttgaaccagggaaagaattttgctttgacgcaacagttcatttacaataagctgatgacgcataagtggtgccactaggattgataaccagccttctccagcattatgccctcattagtagttgttatgaaatgttttcaggtgaaacagaattaggcaaaatatcatggtaatcttcggtagggccatgggcgtaaatgtattnttttgtatggcagtaatctaaaacatggtgaatgttctcgttgatacagggatcaaataagtgagcgctgc

SEQ ID NO: 173132 - DNA, 282 bp, Zea mays
  Clone ID: MRT4577_89479C.1
tacgtaagctcggaattcggctcgaggctttccaaaacggagcctctacaccagggtggaccaacaagagaacagggtcgttttagaccccctgaccccgcaagtcaatagctgctacggcgacagcaccggggagcgcgatggcctgcggagcactgtcgtacataccgtccagcccaaaaaagactccatcaacgacaaaagcggtcaccatgtcgacgggtcgaatacagaactcaacgattccacctaaacggtacatcacgtcagaaagacttacta

SEQ ID NO: 173133 - DNA, 226 bp, Zea mays
  Clone ID: MRT4577_8947C.1
tttttgttgggtggattcaatacactgacataaaaggactatgtaataattgattaaaggcccatgctttgcctaagcatatagactgtctacgcccttaggtatggtacacggtcggaagacgtaatactgaacgctatgaaagcgtcaacaggtgtatccacaacgcacatgcttgacaacgtacgacaagtagcacttcctaactatacacggtgtgagaaga

SEQ ID NO: 173134 - DNA, 487 bp, Zea mays
  unsure (1)..(487): unsure at all n locations
  Clone ID: MRT4577_89480C.1
tcgggattcacacannggctcgntcatacgtatatttttttaagtttttggatagcatctttggcgatggtgacatgtgatgtacactaaatcatggggccagttctaccaaatataaagttacatttactgcatataaagagagtcgttttgttataagatctggcgccataaaaatctgggaggctagagatgatgggatatatctcacagatgaacatcaccatgcagtgaaaatgtatggttggtaaaatcttaactttcaagctatatgttgactttaattttgatatcaatagattgcaagatataaattttaagaaaataaaatttaatatattgaattttcaaaatcgcatgcaaaagcctaaaaaaattcgttggtaatctatgtgatctgacaaattccaattcacatacatcacataacaaacacaattatttgatacactgtgaattgcctattacatacatcttttagtctacc

SEQ ID NO: 173135 - DNA, 264 bp, Zea mays
  Clone ID: MRT4577_89481C.1
ccaaggaacaaccggggaaccccccgaaggcgaggacgaagcttggctaaaaaaaaaatcccgtgtgtcccgaccgggatacactacacgggttactgtacagcgtgcaccctacgggtgggctgtttgagagacaacgactaaacccaaggatgctggagattgtagaccgggatcaagatacggcctctgcttaacataatatcaagagggcggtcttaccctgccctggtcaggggactatgccaatactaaagaacgcca

SEQ ID NO: 173136 - DNA, 384 bp, Zea mays
  Clone ID: MRT4577_89482C.1
aaaatcaacagggttttttccagatgggggaacggaagccacaacacccccgggccctcccaaccagccagccagccaaaccaattgggccaagcccctatccttccctgttgtaaccccaacagatttgcccgtcctcctgaatcgaatgcccaatggaatttgggttaaagggaagaaccaccaaaaaaaggaattaacggctcaccccgggttgcgattaattacaccaggggacggcgcaaatctccccctctctcaaaaaaaggggggggcgggggcggccactgtttcgggggcggctaaccactttgccgagggggaggcccccccaaccggggccctgggggcttggggaaccccccttggggcctttcacccggg

SEQ ID NO: 173137 - DNA, 805 bp, Zea mays
  Clone ID: MRT4577_89483C.1
tattctacaatcacagccacaaactaaacatttccaagcactagcctgagaatcaagaagaaccaagcagcaaccatgatcaatcccaagaagctcgctcagttggcgaggaagtggcaaagggtaaaaatagccaccaaagacgacgacagatgctgcaccatttcaccaattgcaggcaggggccactgcaccgtgtacacagtggatgggagcaggttcgaggtcccattagcgtacctccgctcagtggtcttcagtgagcttttgaggatggctgcggaggagtttggtttcacaggtaatggcaggatcactctgccttgtgatgcagctgtggtggagtatatgatatgcttgctccagagaaatgcatcagaggaagttgagaaggcattcttgagctctgtagtgatgccttgtcagcaatcaagctatccaacgccaccggtggtgctgcatcagcaatttgcagtttgtagctcctaaagatatccaggaatttgcagcaattagtgtgtagtactctaatacaaatagaatgaaaattgtatttatttatcttagagaactagtggctgtcatttgttgatgccattttttaaaaaaatataacaggtgctctgtagcaatgccttggtcttatttttcattgccgttctttcttcaaaagttatattaaattagcagacaaatgatgagtaggtgtagatgcagaaatgtatgcttaccaaagtgttattgaaaagtttcccaaaatacatgcatgaactagaaatgaaaaggcaatggcctggctccatgc

SEQ ID NO: 173138 - DNA, 320 bp, Zea mays
  Clone ID: MRT4577_89484C.1
gcggagtcacagtcggctgccttacagcctttccatcgagtgaaagatgatcagctatagttacgacgaccagagctaatgggcttcaccgcacgtgcacgtacgtcccgcgcgctgcacgagtgatcgtaaccccgggaagagagataagaagaggcgctgtattgccaggagcagcatgcagattcgatctatgtgtatactggactggagtcctcgtatattatgcctgtgagggctgcaagtgctagatgtttagatccacctacattgatgacacagtttaaaaaataaaaaaaagggcggtcgttataaaggat

SEQ ID NO: 173139 - DNA, 538 bp, Zea mays
  Clone ID: MRT4577_89485C.1
ataaaaaaaaaaaaaaaaaaaaaaaaaaaaaaaaaaaaaaaaaaaaaaaaaaaaaaaaaaaaaattaaaaaaaaaaaaaaaaaaaaaaaaaaaaaaaccaaaaaaaaaaaaaaaaaaaaaaaaaagttttttccttgggccggaaacccccttagggggaaatttttgaaaatttccataaaattgggggccgttgaaccttgcttttagggggccaaattccccttttagggggtggtttaaaaattaatgggccggggttttaaaacgtggggattggaaaaaccttgggtttcccaaatttaatccctttgaaaaaaatccccttttccccagttgggttaatagcaaaaaggccccacccaatcgcctttccaaaaagttgcccaccctaaatgggaaagggcccccccttttaggggccctttaagcccggggggggtggggtttccccccagggggaccgttacatttgccaggcccttagcccccgttcttttcgtttttttcctttcttttttcgccactttggcgggtt

SEQ ID NO: 173140 - DNA, 538 bp, Zea mays
  Clone ID: MRT4577_89486C.1
ataaaaaaaaaaaaaaaaaaaaaaaaaaaaaaaaaaaaaaaaaaaaaaaaaaaaaaaataaaaaaaaaaaaaaaaaaaaaaaaaaaaaatttaaaaaaaaaaaaaaaaaaaaaaaaaaggtttgtcctttggcccggaaaccaccttaggggcgaatttttgaaaatttccataaaattggcgggccgtttaagcttgcttttagggggcccaattccccttttagggggtggttttaaaattaattggccgtggtttaaaaacgtggggattggaaaaaccttgggtttcccaaatttaatcgctttgaaaaaaatccccttttcgccagttgggttaatagcaaaaaggccccaaccaatcgcctttccaaaaatttgcccaccctaattggcaaatggaccccccttttagcggccctttaagcccggggggtgtggggtttacccccagggtaaccattaaatttgcaagggccttagcccccgttcttttggtttttttcctttcttttttcgccactttcgccggttttccc

SEQ ID NO: 173141 - DNA, 788 bp, Zea mays
  unsure (1)..(788): unsure at all n locations
  Clone ID: MRT4577_89487C.1
acatgttcacctgaagagaggtcattctcaagagttcttcagcaaagcagggtgcctcccggagaaattctcaagattttaagaagaatgagtgccttttttcgggaattgccatcaaaggaaaaacaggcactgatcttgcagtctgccgaacaatggaggaaagcaaacttagatgttgaaaaaacactgaaccacttcgaggaactgcggctccaggacccatgttttttctataccgtgcaaaaggatgaagacagcatgcttaggagcattttctggactgatgcaaggtcgaggatggattatgaaatctttggtgatttcgtatcgtttgataccaccttcagcacaaatagacacaacatgccttttgttcctatcactgggatgaataaccgtgggagaacaatcgtgttaggatgtgccttgctgcaagatcggaaagctgaaacctacaaatggatgctccagacgtttctgcaagagatgggaggaggtcaaatgccaaaatcagtcataacaagccaggacgaagccatgtcgaaagcaatagccgaggtcatgccacaagcaaggcacaggttctgcagatggaatggtaaagcccaggaaaagatggcagcctttgtggcagcaagaggcaacatgaaagcagagctggacatcttagttgacaattcactgacagagacggagttcgaacaaggatggagtgcactcattcagagacatgatgcaagtgaaaacgagtacctacagtnntgctgtgggagatgaggaaaacc

SEQ ID NO: 173142 - DNA, 516 bp, Zea mays
  unsure (1)..(516): unsure at all n locations
  Clone ID: MRT4577_89489C.1
agcagttacgttngattggatactgcaaattcaccgtcaaacacaaagctaatgacgaagaaccaacaggaagtgatgcttgaaatttttgccttactgtatactgctgcagaatgtagattcagctgctgccagttccaaatcaatctctcaaacccatggcagatcttattcacaagccagcggttcaatgtgccgtcctgtaagcagcatttggctggaaagaaaagcttcttactgttaatatttgcccttgtgattattttattttgcagagtgagaatacagctgttgtatcggaataagtaggcagcaaatatcgtggtgtgggtatattatacaactggggtcgtgtagtggcatttggattctttcctgatctgattcctagtccggttcagttacttggcatttgggttataaaaagttccatcgtgtaaactaatttttggctattttagtctgtttgtaacaggagatctcatttaatttaaccattcctcgaacgttcctttt

SEQ ID NO: 173143 - DNA, 690 bp, Zea mays
  unsure (1)..(690): unsure at all n locations
  Clone ID: MRT4577_8948C.1
gccgcgcgagggtgcgaggcgtcccgcaggcgtacgtgggcaacgccgtgacgctcgccgtggcaaagtcgaccgccggcgaggtgctgggcggcgggctgggctgggcggcgttgctcttgaaccgcgccgtggcgtcgttcgacgaggcgggcgtgagggccgagctcgcggcgtgggcgcgcgaccctcggttcgcgtacgtggagccgcgcgggtacggcggcgccgcaacggtcgcgaccgggagctccccgcggttcgacgtctacggcaacgacttcgggtggggccggccgctggccgtccgcagcggcgccgggaacaagatggacgggaaggtgaccgtgtacgagggccgcggcggcgcgggcagcatggcgctggaggtgtgcctggagccccaggcgctcgccaggctcgtcgccgacgacgagttcatggaggctgtgactgtgagcgctgccgcgccgtgaatgccttgttaattataaacccagcgcatacttagttgtagactgcatatttatctttcagtttattgcatgcgtgtgagccccagtctgtggtgagccgcacgagtaggagggcgttacgagaatagctccgcacgaccctgagatggccggnattntagcagcatcgtgcgcatggggatggacatgcgaccaagcacgacgcagctgaaca

SEQ ID NO: 173144 - DNA, 525 bp, Zea mays
  unsure (1)..(525): unsure at all n locations
  Clone ID: MRT4577_89490C.1
tcgagcggccgcccgggcaggtcagaaataagaagttacatttccagattctaaaaaaaaaaaaaaaaaaaaaaaaaaaaaaaaaaaaaaaaaaaaaaaaaaaaaaaaaaaaaaaaaaaaaaaaaaaaaaaatttaaaattaaaactacaaaaagcctaaatggaaaaaattggggggaatattgtaaaaattggggggacattataaaaatgatttaaaaaggggcaatttaggggttttttagtgggagtttaaaaatcaacgggccggggtttaaaaacctgaaaatgggaaaaacaaagggttttcaaaacttaaaaacttttaccaatttcgcctttttgaaaattggggaaaaagtgaaaaggcccaacactttcgaatttttcaaaatttttgaagcttaattgggaatgggttttcccttttaatagagttttaaagaaggggtgtaaggggaatacaaaaagnaaaaacccaaaatttccaaacgccttattccccgntttttttttttttttttt

SEQ ID NO: 173145 - DNA, 1137 bp, Zea mays
  Clone ID: MRT4577_89491C.1
ttgggtacctcgaggccggccgggtgaatatctatagggtttaagatctagtaagtgacatattcctcctatcgtgacgactcgtccgattctgttcacgttaatttggacaattttcatcaaatcgattctcatagaagcgggctgagaagctgggcgtttcgcagtccgcaacaacttctagcgatcagaatctagatttaagccgaaacaaacggggttgttggcttcaaacacataacatctagtttcaatatacagatctaagtcactttccattggaaaaatatatctcaaaattgtagcctagatattttcttgcataaaataactcgacctgtgggggcaaggcagcccacggacatatattatattaagaagaagaccttctcacgcaggtcgagaaaacccttaaactcctgacccacccatacacaacgacattgtagcccatgtgagaaacaaccgcgactaggatcgggccttagacctgtgctttggcatgggacaaacggatggttttttttaaccacggcctgaaattcgctcccaccgtgagtcgaacccaagaactgagtgctactcatgccacctaatcaactcgactagaggcccttttgctgatattttcttgcatgaaacttggttgttcttgctgtctctaaggggatttgagttttgagaaatttccttcagtatacaatttactgtctactttgcgttcaggttaagctgctggcaagacacataggtaaaccaatggaagagattgctcgggacatcaggcgtcctaaatactttagccccagtgaagctgtggattatggcatcatcgacaaggtgatatacaacgagaaaatccaggaagatggcggtgtcgtgtcagaactcaaaagatcaaatttgatatagcgttctttttccacaagtagacacgtctttgtatgtttagtggtcattcacgtgcgtttgagtattgagtagttaccactcgatcactcagtacctggttgtagaggcgtagagcacatagccaatgcattgaacaagcatttccttccaccctctgccgtttcaacgctgtattgcccttacccaacgggcgtgctgaaagatgaattttggtgggttgttgag

SEQ ID NO: 173146 - DNA, 185 bp, Zea mays
  Clone ID: MRT4577_89492C.1
tttttgtaacaacttttttaaaagggactctgaagcgccgtaaaatttctctcaacctatacacatggccacgtcaatcactgggatgttttccatatatgctaccaacagaatataacacacggaccattaggttatctactacatacatcggtataaataaaataccctatgctattaatact

SEQ ID NO: 173147 - DNA, 598 bp, Zea mays
  Clone ID: MRT4577_89493C.1
cagctcaaactggcacccacggcgccacgcacgaaaccagacacgcgggctgtgggagcagccgagcacctcgtctcctattctccctcccccgattcccagcggcggcggcgagcgattccaggtccggcggccggccctccccggctcagcctctaaccaccgccgaagaacctctcctcctcgaccctctgtcccctcgggcatcccagcggcgcggcaatgaagcaccgccggcggtcgaagcagcagaagctcaactccgtacctccccctgcgtccccggccgcccgcgctccacgctccatgccaagcccgagcgccagccccaaaagccctgcccccaccactcctccgccggagcaggcgccggaagtggtagtccccgaggactgggccctggccaccaaggtcatctcctccgacctctcatctccggtagtcctcgtgtgcggtccctccaacagcggcaagtcgaccttcacccgcctcctcctcaacaagctgctccccagctacgggaggattgggtatctggacacagacgtggggcagccggagttctcaccgccggggtgtctctctctacacatcgtcg

SEQ ID NO: 173148 - DNA, 173 bp, Zea mays
  unsure (1)..(173): unsure at all n locations
  Clone ID: MRT4577_89494C.1
gggaaaatcttccttctaattctagggttttgctggtctcccaccccgagctccgaaggccgctgcatcaggcgcggcccccctcccgtgtgaccgatatggtgctgccgaatcnggtgaccgttgattaccccagcttcnngttcgtcttcgtcggcgttggtggaactggg

SEQ ID NO: 173149 - DNA, 1809 bp, Zea mays
  Clone ID: MRT4577_89495C.1
ttgggtccctcgaggccggccgggccgggaattataggagaaacttcgggggtcgtaggggttcccgatccttcctttcccacttccccttttttgcccgcccgctacccaaccgccgccgcggttctcgctgccagcgacggacgggccacaccgcgcaggggctcagccccgccacccaccttaaccccgccgtcgggaggcgtcgtccccggcccggcccggcccggccctcgccctctactgcaactggactggcgcgtagacctgtccccgccacgagatcgttccgccctatgtcggtgaagatgctctttgcatagctcaagctgcaatctgatggactctgatgacaagaagtttggaaatggaccaagggagctcactggtgctgttgatttgatcagccactacaaactgctgccacaccatgatttcttttgcaagaaacctttgccgctggcaatatcagatacacattatcttcacaatgttgtgggagacactgaaattcgcaaaggagaaggaatggagttagatcaacttgttcataatgcatatctgagggataaacctgcttatattcagccctttgatatggaaactctggggcaagcgttccaacttcgagaaacaggccttgtcgaggtgccttctactgaaaaaggtataccgactatttcgggtaaaccaaaaattgagtccaaggacaaagagaagaagcataaaaggcacaaagacaaagacaaggaacataagaagcacaaacatcggcataaggatcggagtaaggacaaagataaagacaaagacaaggataagaaaaaagataaaagtggccatcatgaaaagaagaggaagcatgagggaacagaagattcagtagatgtgcataagcacaagaagagtaagcacaagagctccaaaaccgatgagatggggaatggagttagttaacacttcctagctctacctccaatccttgtaatttgctgttaaaacttaaaaggagacagacggtctctgctatcaaaaccctgtgcagaatagtgggtatcatgaatgggagctcttatttttgcagagtccattgtgaagagaattgaatttgttaatataggtctaatccttccaactgtgcaaatcaactgtgttcctccctgaagggtgcgcttgaaaggatgtgcattggttgtagggtgcgcttgaaaggatgtgcaatgagattgtttcgatgtaacgtgcatgagtaccctgagtagctgtggatggttatacagtttgtggtctagggatgtgcagtgagggcagggaattgggaataatttcgtgcccccatcgaccttgatttgtagggtaggatgatttactgtttaaccactagcaaatgttagtagccagttccatgttcatttactccacggcaactgtgctttcgtgtgccaataaccggagttgatccacatgtaatgaattggtgtcaaattgacgatcctgtgtttcaaagtatggttattggatcgtgttgccaaaaaaaaaaaaaaaaaaaatccagcacctgcttcttggcgctgctgcccgactagcgctgctccacactgcgactggatccattatagtcgtattgacacagcgcggacgctcaatttacctgccttcggctcatactgactggctgcacgggagtaattatataatcaatgccccgtctcaatccccttgtactaactgcatcctgaatgggtgtttcagactttcaggatgctgtttcaggactgattgacttcatgtgctgcaactgagagcttg

SEQ ID NO: 173150 - DNA, 329 bp, Zea mays
  Clone ID: MRT4577_89496C.1
attcgtctcgagcttgttcaaccatcttacttttcggccgccgccctttttttttatttttgggtttattaaaaccaaatgggggttaaaaaacactctcatactccatctttctgccataagaccacaattctactcctatatttatgcacaactcctttatacttattctaaaagaataataataatttctaatccgtaaaaacactttttattcgaactattctaaaatagaactccattcctgcacaattataatcatgaccaataccatgctcatcctctaacagccaatgttttactactaacgaaacacaagtttctttctc

SEQ ID NO: 173151 - DNA, 4128 bp, Zea mays
  unsure (1)..(4128): unsure at all n locations
  Clone ID: MRT4577_89497C.1
agcgaaagggcgaaagccccaaccccggggaaagtttcccgcccgagcccctcgaaccctagtaccatcaccgactggcgacgcctcgccggcggccggcgagatgcacatcaaggaggtaactctcgaggggttcaagtcgtacgcgggacggactgtggtgccggggttcgacccgctgttcaacgccatcaccgggctcaacggttccggcaagtccaacatcctcgactccatctgcttcgtgctcggcatcacagatctccgtcaggtacgcgctgcctcgctccaggagctcgtctacaagcaaggccaggccggggtcaccaaggctaccgtgtccatcgtcttcgacaattccgaccgctcccgctccccgctcggctacgaggactccccggagatcactgtcacgcgccagattgttgttggtggaaggaacaagtaccttatcaatggccatcttgcacaaccttcccgggtgcagacccttttccactcagtgcagcttaatgtaaacaatcctcattttctaattatgcaagggcgcataacaaaagtgctgaacatgaagcctccagaaattttgtcaatgttagaagaggcagcaggtacaagaatgtacgaaatgaagaaagaatctgctcttaagacacttgaaaagaagcagaataaagttgatgagattaataaactccttgatgttgaaatcctccctgcactagagaaacttagaaaagagcggtgtcaatacatgaaatgggccaatggcaatgctgaactggataggctcaaaagattttgtattgcctatgactttgttcaggctgagagagtgcgagatggcgcactgaatgatgtnnnnnnnnnnnnnnnnnnnnnngttgagctggatgaaactacagaaaacataaaagcagctatacaagaaatggacaataacatttctaccttggctgctgnnnnngaagctaaagtaggtggtgaaatgaaggttctgtcagacaaagtggataaactatcacatgtacttatcaaggaaacttctgtgatgaataatcaagaggaaaccctgaagtctgaggaaaagggtgctgagaagattctcacaaacattgaggacatnnnnnggtctatactcgagagagatgctgctgtnnnnnntgtagagaatgaggcttctgacatgaaaagaagagcagaggatctcacaaaggagttggacgagaaggagaaagaataccagggtgtgctagcaggnnnnngcagtgcaaatgagaagaaatgccttgaagatcaactgagagatgcaaaagctgcagttggagatgcagaatctggactaaagcagctagctacnnnnntaaagcattcnnnnnnnnnnnnnnnnnnnnnnnnnnntctattagtatccaagcgtgatgaggctattgctgctgagaatgagctgaaaacaaggacaaaagacttggaaggtatcaaggcatccatgggatctattaattatgatgagggtcagatggaagctttgcaaaaggaccgttctgcagagttagaaattattcaaaaattaaaggatcgtgttcgtaacctttctggtgagcttgctaatgttcacttcagttatcgagaccctgaaagaaattttgacagatcaaaagtcaaaggggttgttgcacgtcttattaggattaaggacagctcaacagcaacagcactggaggttgctgcaggtgggaggttattcaatgtggttgttgacactgaagaaactggaaagcaacttttaaaaaatggggatctacgaagtagagtaaccatcatacctttgaacaaaatccaaacttacatgatacctgacagagttcagcagacagctcgtagactggttggtcctgacaatgtaacattagctctagaattggttggatatggtgaggaagtaaagaatgccgtggcttttgtctttggctcaacatttgtgtgtcgtaatatggatgcggcaaaagaggttgcgtttaataggcaaattagcagtactagtgtgactcttgagggtgacacttatcagccaagtggtcttttgactggaggtagtaaagggggtagagggaacttgctaaggaaactcgacgaactagctaaagctgaggctgatctatctgatcatgagaaaaagctctttgtcattgaacagcagattggagcccttttaccattgcagaaaaggcacactgagttgaaatctcagtttgaactgaagtcatatgatctctcgctgtttcagaacagagttgagcaaaatgaacatcacaagttaggtgagctcgtaaagaaaattgaacaagagcttcaagaatctaaacaagagttgacagaaaagcaagtgcagcatgaaaaatgtgtgtccacagtttctgagttagagaaaactatcaaaacttatggcacggaacgagagggcaaactcaaagcgctggaaaaaagaatcaaatcaattaaatcagagatgcagtcgatgtcgaagcaactaaaggcttatgaaagtgacagggagaggctgatcatggagaaagatgcggttgttggtgagcttgctacactggaagagcagctaacgacttcaaaagctcagattacttctctgtctgaaaccttggaaaaacagaaggacaaggttacatccataaagcaagattatgatcaagctgaaagtgagctcaacgttgggcgttctaaactgaaggaatgtgactcacagataaaccgtatggccaaggaacagcagaaacttcaacagaagttaagtgattcaaatgnnnnnnnnnnnnnnnnnnnnnnnnnnnnnaagaggatggagatagagcagaaggattgctcttcaatagtcgataagctagtcgagaaatataattggattgcaactgagaaacaattgtttgggaaaagtggtacagattatgattttgaatcttgtgaaccacataaagcccgagtttccccactacaatttgctcgtcatcaatccagtcttgagaagagggtcaataagaaagtaatggcaatgtttgagaagtcggaggattagtacaacgatttgatgtcaaaggccttcataatcgagaatgacaaggctcccatcaagaaagttatagacgaaaaatacgcgttaagttgctactcattgaaggtcacttggctcaaagttaacaaggatttcgggtctatattcagtactcttttacctggtacaatggcaaaacttgatcctccagaaggtggtacttttttggatggtcttgaagttcgtgtggcatttgggacagtttggaagcagtctctgtctgaacttagtggaggacaacgatcccttcttgctcttagtcttatcctggctctgcttctttttaaacctgcaccactttacatattggacgaggttgatgctgctcttgatctgagccacactcaaaacattggtagaatgatcaaggctcattttccgcactctcagttcatagttgtctctttaaaagagggtatgttcaacaacgccaatgtgatatttcgaacaaaatttgttgatggtgtgtccaccgtgacacgaacagtgccttcgaaacagagatgaccagtttacacatcatgcatcttctgaaccaaaactaggcatataattccaaatctgtcattttaaggagctgctataatcaaacattttcgctgtttattcagccaggaaaattattccatgaaagctgaaccccacaattacttgacgctgatgcctcaagcccctcgcttgtcaggcaatgacatcaaaataggtgctgtaactgtaatctcatggcgtgacgttcatgatgacctcgactggcttctacattatgcgctttcttctgacctgatgtgtaattagcggttgaactattttgtgttgaaggtcgaccgtgtagcatgtatgtaacagccatttataaccaaggtcatgtataattctgacttgcaaatttaccctatgttgatttaccttttattacttagaacaaaaatctcatcatagttttagaaagtcaatgctctaaacacttcataatattattgactatcgtgtgcattgccgagaaa

SEQ ID NO: 173152 - DNA, 1130 bp, Zea mays
  Clone ID: MRT4577_89498C.1
aacttcaacagaagttaagtgatttcaaatgttgagaggaagaaaatggaaaatgaggttaagaggatggagatagagcagaaggattgctcttcaatagttgataagctagtcgagaaatataattggattgcaactgagaacaattgtttgggaaaagtggtacagattatgattttgaatcttgtgaaccacataaagcccgagaggaacttgaaaatcttcaagctcaacaatccagtcttgagaagagggtcaataagaaagtaatggcaatgtttgagaaggcggaggatgagtacaatgatttgatgtcaaagaaaaacatcatcgagaatgacaaggcaaaaatcaagaaagtgatagaggagttggatgagaagaagaaggaaacattgaaggtcacttggctcaaagtaaacaaggatttcgggtctatattcagtactcttttacctggtacaatggcaaaacttgatcctccagaaggtggtacttttttggatggtcttgaagttcgtgtggcatttgggacagtttggaagcagtctctgtctgaacttagtggaggacaacgatcccttcttgctcttagtcttatcctggctctgcttctttttaaacctgcaccactttacatattggacgaggttgatgctgctctttgatctgagccacactcaaaacattggtagaatgatcaaggctcattttccgcactctcagttcatagttgtctctttaaaagagggtatgttcaacaacgccaatgtgatatttcgaacaaaatttgttgatggtgtgtccaccgtgacacgaacagtgccttcgaaacagagatgaccagtttacacatcatgcatcttctgaaccaaaactaggcatataattccaaatctgtcattttaaggagctgctataatcaaacattttcgctgtttattcagccatgtttattcagccaggaaaattattccatgaaagctgaaccccacaattacttgacgctgatgcctcaagcccctcgcttgtcaggcaatgacatcaaaataggtgctgtaactgtaatctcatggcgtgacgttcatgatgacctcgactggcttctacattatgcgctttcttctgac

SEQ ID NO: 173153 - DNA, 299 bp, Zea mays
  Clone ID: MRT4577_89499C.1
cgcaattgctgtgtgcagtcactgtcaaccgtgtgagcctaactgatgcatgggatgcaaacacaatgcaacccatatcctgactgatccagccagcgtatgcagagtttacttagctgcatacagacatgaagcctgatcttacctataattaggataatttgggaggcggtacgaggctgtccactctgaaagatgtacatataaggcgctaagtaattaacctataactgtaaaatgtatggactaccaaagtgtacacatgaatgggaaatcctgctatcaccagaatgttaaac

SEQ ID NO: 173154 - DNA, 720 bp, Zea mays
  unsure (1)..(720): unsure at all n locations
  Clone ID: MRT4577_8949C.1
cattggtacctcgagccgaacgagatctgtatgatctctgtagcgatggcgcgctgtatcgctataaggagtacacgccgccctagcacacgcgcagagatgtgcccaagcttcattcgatcaagactcatgcacagctttaatgccaaagagtatgatagggagacacttctcctgtcatgactagctactgtgatctcgccaaggatgaggttgagcactcgtacgcaactacctgaacctcccgtctgacatcatgactgccacgctcactaagcatgctgaggcaccgtggacgcacagttagacatctgagcccatcactgtgtgaccatgccaaggcagccccaagacgaggtatgacttacacatcgacataccgctagtgtgacaacgggaatgtgtnacaccgaagcgtgggtacgtaccatggtgcatccatgctggacatttgtacggttcatacaaacgagcattctccgtgcgtgcacatcacagagcatccacttgcagtgagcgtctcgcgattgtgtcgctgtggagcccaaaagccaattcggagaagatccaacctcttctgccatgagactgaaaatgcccctgccatggatgtggcgattcacttcgcgtgctcactctatgctagagggacaactactatgtactagaaacaacactcgngatggccagagctgactgtgcacataatggactgacatg

SEQ ID NO: 173155 - DNA, 235 bp, Zea mays
  Clone ID: MRT4577_894C.1
gcacgaggtcggctcggcgtgaagatgggcgccgcggagatacagcagcaccccttctctgagggcgtcaactgggcgcttatccgctgcagcactccccccggcgtgccccgggccgtcgagcccgtggcgttggcgccgcccgcgccagctaagccagcgccggtggaaagagcggagatcagcagcagcagcaatagcaagatgatggagatcaacagcagcagcaacagcg

SEQ ID NO: 173156 - DNA, 2069 bp, Zea mays
  Clone ID: MRT4577_89500C.1
gcgcgatgcccgacgcgataccggcctgcttccgccgcgtcgcggcagcacccggcgggcgggcgtcgccggggtcggggcccggctccggggtggggacgagcctggccacgtccgtctacaccacgcggctcggcctggccgcgctgacctggtcgcgcgccgcgctcgggctcagcctccgcgcggtgctccgcgtgtccgcggggcccgcgccgtctccctcggcgtccgactacggcgacggcgaggtggagtacgggggcgccgagaagggcgacggcgagggggagcaggacgcgacggtggccgtgcgcgtgcggccgtggctgctgtggcggcggcgcgggtccaagcgcttccgcgcgcggggccgccgcgtggacctggcctgggacctgtcgcgcgcgcgcttcgcggcctcgggctccccggagcccgtgtcggggtacttcgtcgccgtcgtggtggacggcgagatggcggttgccgccggggacatggcggaggaggcctacaggaagaccagggcgcgccgcccgcccggccccggctccggccctggtcccgccctcgtctcgcgccgcgagcacgtgtccatgcgcgacggggccggcggcggacaccggacctgcgtcgtcgtgcgcggcagggagcgggagatcgcggtggatctcgtctcgcgcgcgcagggccagggccaggggcgggagcgggacagggccgaggtcggcatgtcggtctccgtcgacggcgatcgcgtgctccacgtccgccgcctgcgctggaagttccgcggcaccgagaagctggacctcggcgccggcgaccgcgtcctcgtctcctgggaccttcacgactggctcttccccgcgcgcgacgcctcgccacccgccgccacggctccgcccgcgcgcgccgtcttcgtcttccgcttcgagctcgccggccgcgacggcgaggagcgtgacccggccgacgccagggagaaggaggtggtccaagtcggaggcggcttggcggggtacgtcgacggtaggaggtgggggagaggggactggagcgagagcagcagcagcggtgagaagcggaggacgaggggccaggcgagcaggctggcaaaggcgagctcctcctcgtcggcgtcagtggcttcctcctccgcgtcgtgggcgagcggctccaccgtcatggactggggcagccccgaggaggccgagctgcagagcggcgacggcttctccctcctcgtctacgcctggaagaactagcgtgcttgggccttgggctagcggcggccaaaggggcttgcccggcattgtttcgattgatgattggttcacagttcagtgaggatttctcttcccattgttgttgtaagttgcagttgttcagcgagcaatgttcttgtgcagctttgagtgctccactgaccaagctatttacccttccttccattgacaaccagagaaaatgagcatcctgtgtgatccacagtccatcatcaaaatccgacacaaaccattggtctgctcccttgattacgtaaacaacgtggacttggaatattgatttggagttaaacaagtgataggccttagtggctgcggcttaaatccatcggcatcggctcacattattttgtctctatggattgcagctgcattagtccgaacggctttaatccagccatgtttttccggtgacactagctgaaaagattggattgctcggctattattggcaactgcgagcttaatccccaaccatggcctgctgatagtaggtgacaaggttgtttggacggcgacgttcacatgctggggccccgctgggaatgtggttgtcagttgtttctcttgcttaaatggctcgggctggtggttaagacctaaacaacaacgattcggtggggggtgttatcgatgcgagcctttggtaaaggctgatgtgattttgatttttaaaatgtgctcatagtggaggaggttagggtcttagtgtcaatttaaatggcaggagccctgggcgttttgtaaaaataggaaattccatggaccggtgccagg

SEQ ID NO: 173157 - DNA, 266 bp, Zea mays
  Clone ID: MRT4577_89501C.1
acgcttctcccgaagcccaaagccaaaaattcccgggggccattgtcggattcttctgcagtctgctcgaaaccctcctttcttccttctgaattcgcaaaccggtcttccaaatcataatgggcaatacgattgtttggtctcgagactgagctgcgccccaatccgcgagctatttgttgattttttccagcgcgaaagcgccgatttttgggcccgtggctgaggaggccggttcggcgtttcttgaacccgctggcttcccg

SEQ ID NO: 173158 - DNA, 361 bp, Zea mays
  Clone ID: MRT4577_89502C.1
aattcggcacgaggctgcagtcggccggtgatgcagacgtatggccgagccgagccaacggctgacgtatcgaacgcgatgttagcagcaggcactgtaccgtcggagggggggacacaaccgcaattactcatgcccagcgaccatgaagaccgcctctggctctagtacgacagatgcggcgaatactagcgcgtcatcataacttgggcaaatacactcagcggattgaaacaaagctgcactgcaatttcatgagaatggtttcattggctgtgggtactaagcctgtgactgtagcagggcgtatgaaaactctgagtggttgaatgtgaatctgttcttcatgatgaagaaatga

SEQ ID NO: 173159 - DNA, 779 bp, Zea mays
  Clone ID: MRT4577_89503C.1
acgttcccttgtcacctcctgagtcctgactcctgacctcaaaaaactaatgaataaacaacgcccagaacccgccgccggccgtcgccacagccgccacccagacggcgaggccgacgtgcggcggcatcatcggcgccacgcgcgaggcgaacatcgccgtgagcagcgtggtgagcgcccagacagcggccttcgccctgcccctgccgccgtcgtccctaggccgcgcacgctcgaaccggcgcaggaaatgcaggagcagcagcagcgccgcgtcggcggcgaccacgaagccgaccgaggccgggtcgccccacgacctgtagacggccacggcggagttgcagccgagcacgcctagtcctaccacggccattaccgagcggccatcgccgtcgccatccattcgtactggcgtcgtgccagctgagctgcggccgcctcagccgcacgcccgcagctggttcccggcgtgaggccagccgtggttctgctcccgcttccttcagatctgcttgcgtctttatactccacgcgatatgcgctccaacgagctagttccacctttcgcggcggatcgtgggcctgattcttcgccggcgcagacgggtttcgtggattcttgtgcgcattagtcaattttatacactctcgtggggcggccggtgatttcatcagattcttgtgccctcgatgagctttcggggatgcaattggggtccgttttgggtcagcacagcaatgccaagaatgacaactccgagagagctaaagaa

SEQ ID NO: 173160 - DNA, 382 bp, Zea mays
  Clone ID: MRT4577_89504C.1
aatgaatagcctaaggggtgggtttaacatgtttgccctgaagcaaaaagcgggggaaaggggggcgttttttttccccccaaaacccttgggcgtggactttggtttacccttcctttttttttggccaattgttttcacaagggttgacccttctggtgaaactggccaaagtccaccgaattggcgggggcccttgggtccataacagtgaaactggaaaggtaacaaatggaatacgggtcccttgataaccccggaaacccagcaatgctaaggttttgtttgggcactggataacccacgatgttgggcacaacccctcgtgatgcctccggccttaacaacacccggatgatttttgggcccggttgccaccccc

SEQ ID NO: 173161 - DNA, 225 bp, Zea mays
  Clone ID: MRT4577_89505C.1
tacacgtaagaaatacggatgatatacacctggctttttttttgttttgttacttatgggtgatatatacatacatggtgtgctactgccataatgcacagattttttactaaaatcagagaatgaatgtgtgtgtgtgtgtagcgtgcgtgccaaaacgcctggagctacgaacaagcgagcaccatgctgaaactatgtgtgtatgtgtggggctaggcttgt

SEQ ID NO: 173162 - DNA, 203 bp, Zea mays
  Clone ID: MRT4577_89506C.1
ctggagactaattggcatcatcatacttatggaaaagtttgtcatcctttataagctgttaactgatgtgagcgtgattctcactaaactcagttactctatgtagtaggcagcctactgcaactgtgtatgtcgcagtaccctatgcttcgggtgcgttagagtcattgcgtctcttttacccggctttacgtatacgctcc

SEQ ID NO: 173163 - DNA, 400 bp, Zea mays
  Clone ID: MRT4577_89507C.1
attcggctcgaggagcgctacattgctagtgaattatgcgaagctctgtgcccagggcaagcaccagcaattgaggctgaagaacgtggagatggcactctccgaaccacaagtattgagtttgccatgaccagatgcatgaactgtgggttctagtcgagaggctagcccaggctatgctcttgatgaggggcctaactctgagtgccgccctgagacacacgaggaactactgtcgacaaggagaattgtagagaaggcaccgctgggagactgagattgctcataacttgagacctgagagcctttatcggtgaatctgtatagcattgatggttgataaactggggtcttccatttggcatattttgctcaactagctgatgaataagcaaacaat

SEQ ID NO: 173164 - DNA, 360 bp, Zea mays
  unsure (1)..(360): unsure at all n locations
  Clone ID: MRT4577_89508C.1
ccgtcgtctcttttatattccctggcgtatttcctctcccctcgcgctgctgcgtctccccctaggggngtcgtcggtgcagggcgtcgcctcngcggggccgtctgcattcccgcgtctaaggtcagccctgcgcgcacanggccggtctggcgtgccccggtcccccgtgcggacccatctctctgcntccaatccctgtcggcttcttcggtctgcgcggtcgaccatgtaacatgtgtctccacgtgcctctcggtgtatgtttctcgttgctggatcaggccacgtctggctttcctctctctttcgcccgtcttcgtgttcggccgcgcctccgttctcggtgccggttgttgc

SEQ ID NO: 173165 - DNA, 607 bp, Zea mays
  Clone ID: MRT4577_89509C.1
cggccgggtctggaaaaaaaaaaaaaaaaaaaaaaaaaaaataaaaaaaaaaattagatgctttacatgaaaaaaaaaaactttggtggttttcgtggacacaaacgaccccttgtggtgtgcgcgtggtgccgggcctagaactgggggtgggatttgttccctgaagaacaagctggtgtgtgttccctgccgaccaaggaagtgttcctgcggcacccaccgaggagaagctcctgccgtatatggaaataagagtgtcctgaaaaatgccggaattaagagggtcttcgaggatgccttcctttttcatgaatattgcgattcctttcctatttctttatgaaaaaacgatgctactctttaatgtctgcgttgggatgtatttctgagagttaacaacccgtttgtttttgaaccaaattatgaccccttttctgctggtgtatgaccctctgctggttgcctgatgtatgaacctttgcttgataagaaaacgaccgttctagggctcctgggtcccccggcgtgctagaattagagatccccctcttcttaccgaattccatataagggttgtccataaccccgtcccccctatagagac

SEQ ID NO: 173166 - DNA, 302 bp, Zea mays
  Clone ID: MRT4577_8950C.1
gggctattcagacctatcaggaacatttaacaacacgttctgccagagtaaacgcacgggttcagacaccctttggaaatctagaaacaagagcatgcctaggagcaacactccgttcaaccagctaaaaagggaaggagcgctgcctggacaggatgccccataccatactccattactggcgaggtttgcttgctgccgtgcccattatcaacgagatgcctgtgcgaccgatgcagacattcactctgtggaacatgatacttactcgcgtccattatagctatggtgttccacgaatc

SEQ ID NO: 173167 - DNA, 134 bp, Zea mays
  Clone ID: MRT4577_89510C.1
aaaacgagatcatgaactccggttacagtgcagtactgacaggtacgagtctatagcacacagctagcctttgtcttacttttttaacataagttatgatagtgtacatatggctagactggagtctgaccatg

SEQ ID NO: 173168 - DNA, 534 bp, Zea mays
  Clone ID: MRT4577_89511C.1
cttatgcggtctagaacccactgtgagcgaggagggccactgtacgtgccgccgttattccaccctgagcaggtaatctgggaaaggaagatgccaccttgaatttactccgtgaatcgctacacatgggtctaggatattgacgatctgtgccttgaccgaatacggaagcttgtttacaactgatcaggccttcagcgcttactgcactgcaatgccgtagggggaggtactgaatatggccctggttctctcctgcttgagcgactgtttggggagcacgaccataaatgcaagctgtgcttcagtgtgtacacatctaaagaggcgttaacgcttaggtgtataaccgtacaacaatggggtatcaatactcactgctgcagcacactgatgtctccatagctgctcgacaacgaggacactctatgacatctgtaggcacttcctcgacatagagaggtcaaagtacataaacttgaagcgccttgtgtcttatgagaactgattagactggttctatgatgtatgatg

SEQ ID NO: 173169 - DNA, 437 bp, Zea mays
  Clone ID: MRT4577_89512C.1
cttctcttttttcttttttttttttttggtttgggtttttttttggattggtggatcataaaaccgtgaccaacccaaagagagagagagagagacgactaaaaatttcaacccgaaggccactttgggaatttttttacaccaaacatacacccacgcaagagttttacgaaaaagcccatcctggagcccggaaaggcctggggacccctacattggcttaaggataggatggataaaaaattaaagggacagtatttccaaagcgcatgccgttgtcttcctcaagaatgcgtaaggctggctgtcacacaacaaaaccatttttttgggcttggctttgcaacaaaaaaatccaccctttcaatcctgggggccttggaaggggactcaagggcttggccgttcccacccttcttttaaaatttggctttggt

SEQ ID NO: 173170 - DNA, 657 bp, Zea mays
  Clone ID: MRT4577_89513C.1
ggttggtgaggtaacacatcaaccaacgaggtgggtgtacgaatgggaggaccctgagtactaccaaatgttggtggagtcgtggagtacgacttctgcgtggaccggtcagacttgggtagagtacaaggcccagttgatgcgtgaccaaggtattatgttgctatcaacggaggagtacaatatggcacaggcacaatatcagtggaatgccccgtgggaatgatcttcgacggaggatcaactgtgaactataaaacatgtatctgtatcttcgatgttgtttgtgaactatgaaacaatgtcctgtaatgtgtttgaactgctaaatgttgttattggacttgtgataatgtttgggtcatcttttgttcaaattatgggacctcaatgtgctttatttgcaaaaacacatatggatcggttttggattctatgcgaccggtttatcagtcgtatcggccggtttatcggccgtatcggccggtttatcgtttggaaaccagttcgaattcaaaaactgtccaaactcgatttcggccggtttctaccggtttttgccggtttatcgcgataaatcggttatcggtggtggccggttttagccctagaaccggtttcttgaaccctgctccgcacactccatctgctggcgat

SEQ ID NO: 173171 - DNA, 990 bp, Zea mays
  unsure (1)..(990): unsure at all n locations
  Clone ID: MRT4577_89514C.1
ataaatgtcaattccaatatcccagctcctcaaacactagcacctaatcatgatgtagctgcaacctctacacatacatggacgccatctgctacagtagggttcctgcctcnagctcctgtgccaccacaaacagcacagatggatccttctgtgcatgctgcaccactttttggagcagcatctagttctagttatgttccacctgcagcatttggtgttggtaatgtaacaattcggcacgaggcagatccaaacactccttttagtgttgcagataaatcaaagaaacgtccagtacctaactggcttcgggaagaacttttaaagaaaaaatcggaaccactgagtgcttcagcgcaaaactcagaaaacttaaatcccatggaagctaatgaggcagtacagacaataggaagacctgaccaaagtgacagcagaagcaatgattccgctaaatccactgaagacgatgacgatgatgaggatgaaattgaagcagctcgaatggcagcaatcaacaaggaaattaagcgtgtgttgactgaggtccttttgaaggttactgatgagctttttgatgagatagcaacaaaagttctaaatgaagacgactcagctgaatccaatgaagccactggtgttttcggatcaaaggagactggtctgggaagatcaagagccaaggcctcggctaaagttgttctccctgctaagtcaacaaatagttctgatcataaagatagtactgggttaagttcccctaaaggtgctcttctcggcctggctagttatgattcagatgatgacgacgatgctgacactgacagcaaggataagatgccaatatcaaatttatcttctaaagataatgctggtgctgtaaatactgaaggtgataaaagcactcttggtaaaagaaatgggaatcacaatgaacagaattctttaattggaagttctccatcaggggaagatcttaaatctaat

SEQ ID NO: 173172 - DNA, 355 bp, Zea mays
  Clone ID: MRT4577_89515C.1
caaagaattagaatatctgaacaattgaatatctcacttgaacgttatatggctcattttaggcatattctctttgcgtctggatacggttacaaaccacaaatacttgcagtaatcctattagcctctgagggcacaccttgcttcaacatatttgtctactgaatcgatgacaagtgttcatgcctgaacgtcttgcttacttcttgacacaacaacagttgctgccgttctaccaacagtttgcgggtcgccccgtatacatgttacaacctcacacactcgtgatgcgagttcatattgcttttacagacccacctaactcctaccaacaacacatcattggcagcgccct

SEQ ID NO: 173173 - DNA, 413 bp, Zea mays
  Clone ID: MRT4577_89516C.1
ggtctagggttgacgggcccgtcagacatgcatccgctataaataaacatcacagcacaaacgatgaaatcaaatgctctttcgcttctattagtgataatatctgtgcagatcttgtacctttcacccgagctgaatacctctttcagaacactgagtgtggcttaaatttacaatacactgggtgtggcttaaatttaaaacgttattttatgtatcccttaaaacacactgtttactatcctctagtgaacctacaattggccaattgtgggaccaggtaaaaacggatttgacaaacaattgtctgacactgtcaactttacatttgatttagagagtacaaaaaactaggggtgagattatagggttgacaacctgaagaaaaaaagatgttaaattactgacacaaa

SEQ ID NO: 173174 - DNA, 624 bp, Zea mays
  Clone ID: MRT4577_89517C.1
ctcgagggccggccgggagacgtttccctatcttgcctttctcgacttacgtctgctctctgctggcggcgctctgccaagagtgcctgcgagatgatatcaccacatcaaaaacaaatcataccccaagagcacgaactgtctgggatgcctctgacccccagatcacgatctacaaagcaccgagtgatacaaatgggctgataagttctcctactgtgtcaccttaggacttacaacaaggacaaagatacaatgacgatcttcaaggtgaccggattgcttgcaaaagaacataaccagaacatgcatgaaaggatgacatacacctacggcgacgacgaccaacttacatagacttcaactccacaagatgctttccagagtacgccttcaatatgtccaaacctcgtcatgagacgagacattgcctaccctctagcgaactgacgataagaagaacatcgatgacgccctccattctgccatatgttgggtcgacaacgatcaactcgccagagatgatcagcttgacgacaagatgaaggacctggagcgcatctgcaaactcatcatcgagaagatggatctcgccgcctctggccctgacattacctgaggcat

SEQ ID NO: 173175 - DNA, 416 bp, Zea mays
  Clone ID: MRT4577_89518C.1
cacctctctgtcggccggtactaggggctccgagctaccaaccttactcgtcgtgccgatggcaatagactagacgcctgcagtgaggatgggaactccggtcacaatcctgcacactcctacaacccggatgcatacgatgaagccctggagacccctgcagagggagctaacttacatgatgcgcgctgggctcactgcaccaatttccattgcgcaatgacctgtctgaccacgatgcgattaatgaagtctgcatcctgcttggagaggcgagctgcgtattatgcgctatttcgctatctgggtcactgacttacctgatctatgacagtgggctgaagggagcgatatcagctcatcagacgcgcttatcagggtctgcataactgaagaaggtgtcgcaagcatcatca

SEQ ID NO: 173176 - DNA, 220 bp, Zea mays
  Clone ID: MRT4577_89519C.1
ctggtggctggatttggccagtatctgggatgggaatgcctaggattctggatggatcgggggaaggcataagggagcagctggccattgtgcttatggctgttgatgcattgagggatatcgccacacacacattcagtaaatttgaggagctgagagggtgactggcccctgaaggcacagtgccagaggtctgtggaaagggggtcagcactggggt

SEQ ID NO: 173177 - DNA, 333 bp, Zea mays
  Clone ID: MRT4577_8951C.1
gggcgggaatccgggaggaagcaagcgttcgaagaactcatatttgaatttgaagtgaaatagaaacataaacacgaaatagtgaatagtaaaaggtgataaagaagtgggggagacgtatttggggcggaacctcattattggccgagattctcacctgtacagccagcctaacctgccctcacgcgcgtgccgacaggtggggtcgcgtgagcagtcaccatcacacctgcacgttgaatcgtgtatctgcctcgcgtgtaggtgtcacacatggatttaatagataaagccgggtacattttatatatgcgtcaaagaagacaacacata

SEQ ID NO: 173178 - DNA, 1619 bp, Zea mays
  Clone ID: MRT4577_89520C.1
cggccgggggacataaccaaggagcagcatcaatggcaagcccccggtgctggtcggtcgtctgtcccaagccccggcaggtcgcgagcgagagcgtccacggcgcgcagctcgctctacagcggttgagcaggcgctgtgagacctgcgacggtgaggccagcacgccatgcagctgccgaaaggaagccgttgcccgggacactgaggaggatagtagcgggccgaacagctcctttgcacactccgtcatcaacatggttgggatgctcatagggctggggcagctttccactccatatgccttggagaacggcggctgggcctctgtattcctcctcatcggcctcggcgtgatgtgcgcctacacagcccacatcatcggtaggtgcctcgacgaggactctgctggttccaaaacgtaccaggatatcggcaagcgggcgttcggcgtcaagggccgcgtcatcgcctcaaccttcacatacctcgagatcttcttggccctcgtctcctacaccatctccctcagcgacaacctgccgctcgtcttcgctggcgttcacctccatcttccgtggctccacctcagcgcgacgcagctgctaacaatcatcgccgtactgctggcgctgcccagcctttggctcagggacctctcgtccatttccttcctttccttcgctggcatcatcatgtcgctgctcatcttcggcagcgtcgtctgcgccgccgcgttcggcagggtgagcctgggcaagcacatccccgtgctccagctggagaagatcccggcggtgtccggcctgtacatgttcagctacgcagggcacatcgtgttcccaaacatctacgccgccatgaaggacacctccagcttcaccaaggtctccgttacgagcttcgccgtggtcacggctctctacgtagctcttgcgttcgtcggctcgagcctcttcggcgcggcggtgaactctcagatcacgctcagcatgccgccgcatctcgtggtcaccaaggtagcgctgtgggctaccgtgctcacccccgttaccaagtacgcgcttgagttcgcgccgtttgccatccagctccagcaccacctcccagagggaatgggacctcgcgcgcgcatgttcgtccgaggtggagtcgggtcggcggcgctccttgtaatcctggcgctggccctctgcgtgccgtacttccagtacgtgctcagcctcacaggctcgctagtgagcgtggcgatcagcgtcatcttcccctgtgcgttctacctcaagatctactggggtagagtgcccatgtccaccgtcactatcaacgtggtgttgattctgaccggcgtagttctcgcggtggtgggcaccatctcgtcggccatgtcgcttgtgcagagtatccagagaggccatgctgcgtaagagtatcaagatgccacctacaccgtaccattagaattccatcaatgtaacacattacactcttgttctatatataattattgcatcaaatattgtaacactccaaaaatattgttttggagttctaataaaataatacaaagatttgaaccatgatattattttaacaaaaaaaaaaaaaaaaaagcggcc

SEQ ID NO: 173179 - DNA, 183 bp, Zea mays
  Clone ID: MRT4577_89521C.1
tacacacgtactatcccagcttttctttatcaatatgtccgactattttctttcagggcggagtacaatatgcgcgactctcgacacattacttatgagtaactttacaaatcatacgccagaaccatatcctttctctatacattgctcaacgcactttcattgactatacaccaataatgt

SEQ ID NO: 173180 - DNA, 258 bp, Zea mays
  Clone ID: MRT4577_89522C.1
tgtagcttaaaatgtagctaatgtagcttccttattacagtgacaattaggaaaaaagctcaaattattgtacttgttaaaggaatttgagaggtttgtgaaagcatttctcagcaatattgctaatttgggaatacgagttgtacagttcagtcataattgcactgcatggtatctgcactcagcagtttacacctgctagggtgttcaaaggtcagtgctatagaaattcagtatctggcatcgttggttttcttg

SEQ ID NO: 173181 - DNA, 711 bp, Zea mays
  Clone ID: MRT4577_89523C.1
gtaccctccgggctctccgttcctctgggttctaagagccacccgtcgtggcgagctggcctcccggacggctacgcagagaaggtttccggccgcggcaagatcgtctcgtgggcgccgcaggaggacgttctgaaacacgaggcactgggctgctacgtcacgcactgcggctggaactcggtgctggaagctgtgcggcaaggggtccgcatgatctgctaccctgtctccgcagaccatttcgtcaactgcgcctacgttgttaacgtgtggaaggtcggggtggagctggccaccagtggacagggtgatgtgaaagactgcatcgagagagtcatggaaggcgacgatggacggcgtctgcagcggaaggtgaatgcgttgcgagaaacagtcacggcgggtgaggcaatgcgtgctgccaagaggaacctcaccttattcatggacagaatcaatggcagttagcgccagataaaggcataagaaaataggataatatataagtaactcgatctgccaaaatggttatgatggcccccatccttatattacaatacccttttcttcgagattcagttttagtttcaagttgatagtaatgactctgtcttgcttccgatgtactagttcatttgtgtccccaaaagataccattaccactgtgaaatgaataggaaatgcaggggtaggggggtaacacaaact

SEQ ID NO: 173182 - DNA, 368 bp, Zea mays
  Clone ID: MRT4577_89524C.1
cccacgcgtacggcgcggagagtgagagcccggaagaagcaacgggggggagcaagatggtgcatcgccttacctaccgcaagcggtgcaagtacaacgcatactactaccggcggctggtggtcaagacacctggtgggaaacttgtgtaccattacaccaagatatatgcgagcggaccgaagtgcccaatcaccgtgaagaagattctaggaattacacacctgagacctgctgagtacaagatgtataagttggcaaggaaccaaaggactgagaattgtccatatggtggtgttctgtatggtactgcagttagcgagaggatcatccacgccttttaaatcgaagaaaagaagatagtgaag

SEQ ID NO: 173183 - DNA, 312 bp, Zea mays
  Clone ID: MRT4577_89525C.1
agccacacgcgatcagatcaattgctgagacaacgatggggcacccaacgcagcacgggtcggacaagaccagtgagctgcttgcaagctaccggcagctgtggtgccatgccctgagctacgtcaagagaatttcgctcaacagcgcactgagcctgcgactgcccaacaccatcgaccgttgggcgggaagcgccaccttgtgcaagacactgaggcgaagccagatctcaccgtccaaccacaaatacttgcgacgggtcatgcccacgacaacaggcatgcgcacattgtggggcacccacaactacc

SEQ ID NO: 173184 - DNA, 429 bp, Zea mays
  Clone ID: MRT4577_89526C.1
tttttttttttttttttttttttttttttttttgggtgggttttttttttttttttttttttttttttttttttggggaggaaccactcttgttttttgggagaaaacccccggggttttttttaaaccaacccggtaactgttaattactttaaaaaaggttttctggggaaaaaataaacagggaaaaaaaaaaaaccctgggttgtaattgggtggggaaaaaaaattcaaaatgcctttaaaagaaaccgggcttcttaaaaaaccttttggcaaaactaaaaaagagccttttttaaccttttataaaaaccaaagaacaccccctgccaaaacccattaaaatgggcgagtttttgattcctaaagggccctctccccttatttttaaactacacgggggcgggcttttttttttatttggcg

SEQ ID NO: 173185 - DNA, 236 bp, Zea mays
  Clone ID: MRT4577_89527C.1
ggggtagcactgtttattggtacatgacaaagggtgaacattcatggggggtttattattaacaaaccccctgtttttacaccactaatcccaagaagcgcctgcattggattttcttagccggagagggcgctggtgttttaaacaaggagggcccccccccctaggatcccaaggggggggacgggccaaaataaaaacccagtggtttccaccccctaaaactttccgggggg

SEQ ID NO: 173186 - DNA, 517 bp, Zea mays
  Clone ID: MRT4577_89528C.1
ggaaaaatcacaaaataatggggccgggagccaagtggttcgtgttattgaaaaaaaaaaaggggggggcggaaaaaggatcaaggcaaaaaaaggaattaccccattaaaaaacaagggggggcacctttggcaggggaatgaacaaaacacacagagggggcaaagggacaaaaacctcggaccgaagagatgaaacaggggggggggatccatgagcacgggaggcaaacaagggaaaagggaaaaaccaagtttataaaaaaaaagggaagggaaattcgggggggggggcgttaagaaataaaggtcccaccaagttaaacctcccaagggaaaacaatctcaaacaatttctatttgggggccaggaggcccccgggggcccaagggggaaactaaaaaaaaggccccggagaaatgcccacaacggggcaagccccgtggcagaacccaagggaaaacgcactggggcatgtcaaaaacaaaaccgggggggggggggagggccattttt

SEQ ID NO: 173187 - DNA, 290 bp, Zea mays
  Clone ID: MRT4577_89529C.1
ggggccagcttgaaattcctatttatttcaggatgttaaatatacccctttacacgtagagaagtttttttttccgggttggaccacttacataccaaaacttgcaattaatggaatggccacaggaacgtttggttttctcgccaaaaccccaagcgcttgccttggctcgcctgtgtggacaaaaaccaaactggttggattggattctataccatctggctgggttcccgtgccgaaaagatttttccatgcttgcccaggttttaggggagccgttttagcttgcc

SEQ ID NO: 173188 - DNA, 1948 bp, Zea mays
  Clone ID: MRT4577_8952C.1
gccactcggagtagcgtagtgcggtgcggtgcggtgcggtggtgagtgacaggaaggatggaagaaggcttcaccggcggcgtccggatcgtgtccaggcgtctcgtccggccggagccgaccgcgagctcgccggacaacaacagcgcgccaccggaggaggaggaggatgagataatgcacatgacgccgtgggatctgcgcatgatcacggtggactacatccagaagggactgctcctgcccaagcccccggcagcaggcggggcgcacgcgcaccgactcgtggacggcctcgcctcgtccttcgcgcgcgccctggcccgcttccaccctctggctggccgcctcgccgtggatgccaccaccggcggcccgggcgtcgtcgtctcgctccgctgcagcggcgagggcgccgagttcgtccacgccgaggcgccggatgtcaccgtcagcgacatcatcacgccgcccgcaggccgttactacgtccccagcgcgctggtctggtcgctcttcccgctgaacgggctgctgggcacggacgccgccctggacgacgactcccgcgcccccctgctatcggcgcaggtcaccgagctcgccgacggcgtcttcgtcgccatgtcgctgaaccacgccgtgggcgacgggaccacgttctggcacctgttcaacacctggtcggagatcagccgggccggcggcgaggggcgcgaggcggagctctccacgccgcggccggtgctagacaggtggttcctcgacacctgcccggtccccatcgctctgccgctgcgcaagctggaggacatcgtccggcagcccgagtacccgccggtgcgggagtgcttcttcgacttccccgcggagagcgtgcggaagctcaaggcgaaggcgaacgccgagattgcggcgggaggcggcaccgcgccggccgccgtcgtgctgtcgtctctgcagtccctgttcgcgcacctgtggcgggcggtgtgccgggcccgggatctcgcgccgggcgcggagacggcgtaccttctccccgtcgggtgccgcgcgagggtgcgaggcgtcccgcaggcgtacgtgggcaacgccgtgacgctcgccgtggcaaagtcgaccgccggcgaggtgctgggcggcgggctgggctgggcggcgttgctcttgaaccgcgccgtggcgtcgttcgacgaggcgggcgtgagggccgagctcgcggcgtgggcgcgcgaccctcggttcgcgtacgtggagccgcgcgggtacggcggcgccgcaacggtcatgaccgggagctcgccgcggttcgacgtctacggcaacgacttcgggtggggccggccaatgagcgtccgcagcggcgccgggaacaagatggacgggaaggtgaccgtgtacgagggccgcggcggcgcgggcagcatggcgctggaggtgtgcctggcgccccaggcgctcgccaggctcgtcgccgacgacgagttcatggaggctgtgagcgctgccgcgccgtgaatgcctccgccgcctgtggctgtgctgagagccacctgtacctttgagagacaattcttctatccatcagttgcatgaaatctgggcttttgttcggcgaccatgttgtccattcatttcgtttgaagaagatttgagttgtcaattataaacccagcgcatacttagttgtagactgcatatttatctttcagtttattgcatgcgtgtgagccccagtctgtggtgagccgcacgagtaggagggcgttacgagaatagctccgcccgaccctgaaatggccggagttttaccagcatcgtgggcatggggatggacatgcgaccaagcacgccccagcctgaacacgactgttttctccttcgttgttctctgaataaaggaatagccaatatccagaaaacgctgcccctttcagcagccccc

SEQ ID NO: 173189 - DNA, 344 bp, Zea mays
  Clone ID: MRT4577_89530C.1
gagctttctggtttgatcaatggaaccattgccttacttggagatgtagcgcatgcagcagtcgtgaattaattatagctggattccgttgcgcaaagttccacgctatagttgcgacaaatgtagcctcaagtcgtcggtatattaacggtctgcagcttataatttagtgagaacctgccaggaatgttcaaccttacatacaccagtcacgtctgacagggagagcaggtaatactgcggctgctgtattgctttattagcccagatataagctcagtgtctgcagactagaaaggtagtctgaggttaaaattgagcatatagatcatccacaacctact

SEQ ID NO: 173190 - DNA, 282 bp, Zea mays
  Clone ID: MRT4577_89531C.1
gacctgtacttgatgaatgtgactcccgcgccgacatcaacagctatagggagggcggcgtcaactcttctacactggataggcctttggcatacatggtcccagaaccccttgatctctccagagacagggatgatgtaaacgatgatattcatgatgcctggctatgagaatatgactgggtagtgtgaggagatgatatagatgttcctactacattccttgtgacattcttatatggaggagggtgcaaaatatttgtctctccccactaaactagtt

SEQ ID NO: 173191 - DNA, 373 bp, Zea mays
  Clone ID: MRT4577_89532C.1
tcacacgcctgctcccacccgcgcacgccatggccggctgcgcacctaccctagccctgcccgccgcccccaccccggtcccggccccgtcctcggccgccggccccgccccgaccccgcactgctagagctaagacatccttcttctgcatggcatcgcgactgtggccgtcgacgccagaggaggtggtgcgctccatcaaggactccttcctcacgctccacatgcgcacccacgccaaggctctggagaggtcgagaaaaatatgtcatccttgagattgttgatctttggtgatggagaagtcgaaccaaatgaagagcaggtcttgcaaataacccttgagatttgcaaggaggacgtcatttccct

SEQ ID NO: 173192 - DNA, 671 bp, Zea mays
  Clone ID: MRT4577_89533C.1
aaatgtaaaaacaaaaataattcactaaaaagtctatatttttatagacaattatcacaattacatatatcatcagtattctaaatattcaaatttagatactaaatacagattaatatagtaattatgtataaatatgaagtcatgtgtctgaaattgtagaaaataaaaataaaaaaccaaaccgaaatgggccaagttagtcggcccattcatggtctataggagatggggcgaacagttagggatttctagccggtcctgtccccgtcctcccatcttcttcagcagcagggcgccgccgccgctagggaccggcctacagccagcacgggcgcgtggccctcggccggcgcgggggcgcggcggccatgacggctcgggcgcggtagcctcggccccggcgtctccgtcccggtgcgtctccccgtggtacggcggaccccggactcaacagctcgggggcgcgactccctgcgacgcgtggcctcatggccctgatggctcgtgcgctgttgcccacggtgcgcggccccacggcccggcggctcaggcgcggctgcctgctacgcacggcccccagccccggcagctcgtgcacggctgcctgcgacgcgcgcacccccggatccagtggatcgggcgaaggccccctgcacgcactggtgagg

SEQ ID NO: 173193 - DNA, 217 bp, Zea mays
  Clone ID: MRT4577_89534C.1
gtgctgtgttgtcgtccccctcgtaccgaggactgttcgggttgagggtacttacggttatgacgaggggcgatagcagtcgctgatgtagagtaccgatgaatctgcagagaggcgttgcctgtgccaccagcaacgagtcggttgagaatgccttgaactactacagggagaacctcaactccaagggcatcaccgaccgtgagacggcgaagta

SEQ ID NO: 173194 - DNA, 440 bp, Zea mays
  Clone ID: MRT4577_89535C.1
ctaacacaaaagctggaggttcagacacagaggcttgaactattgacttctcaaaggatggctaacgagaatgccctgggcgaaaccaattgacacacgccccatcaacgaggcaacaatgtatgcggatgaaggagacgaggttgttgaacgggtgcttggctggataatgaagctcttcccaggtgggccaaagcggcgaaccagcaagcttctgtaatgaaaatagagctcctagtataccagatatttcttccatttagggtgtgtttggcatggctctgctccaccccagagcagctctactctaaaactctgggtggagcagctctgctccagagtttagattgtttctcataaccagtgacaatggcgggtaaataactcaaaactccatgactaggttgcttttttggagttttcagagcagcaaaagaggt

SEQ ID NO: 173195 - DNA, 324 bp, Zea mays
  Clone ID: MRT4577_89536C.1
ctgacgcgtccggcagtcaccactcccaagccagttccgagtcctacgagcagtcgcacgcacgtgtcaagagacgagacggtcgacatggctcgcacgcaatctggcgtagcggtcgccgtggtggccgcggtgctgctgctggcagctggggcgacaaccgttgatgcctgcatcacctgcgggcaggcgagctgcgacatcgcgccctgcctctgctacacccgctgaacggagtccggccgcttcgggtactgctgtagcggcgtcaggaacctctagagcgccgccagctccgacaccgacaggcgcgccgcctgcaac

SEQ ID NO: 173196 - DNA, 103 bp, Zea mays
  Clone ID: MRT4577_89537C.1
tccggggcgggaccctgcggttgcaatcgcttactgttttggtttgagaactgggtcttaaccggcttgatcagaactaacctccataaggccctgtggaccc

SEQ ID NO: 173197 - DNA, 215 bp, Zea mays
  unsure (1)..(215): unsure at all n locations
  Clone ID: MRT4577_89538C.1
cnccaacccagcgcgctcgncccagctgatnnggtcgagcacctagtatcgacctgcgcnancatcatngtatagtctcgttaggtgtctgtctctcttggngncttgttgcaacggtcatgtcgacgtcgtctcntcggntgcccntgctgcggctgtgcctgttcggncttgtgtcctgctcnttcgcggcggnagcttgnannagtagttga

SEQ ID NO: 173198 - DNA, 303 bp, Zea mays
  Clone ID: MRT4577_89539C.1
aaaaaaggaagggggccaaaaggggttattactttaatggcgccccggttttttaaaaaaggagcaggagtggttgggtttggaaaagtggaaaaaccttaaatggggggttttattaatttaaggaagggccccgcgtttaaaaaagaggggggtttttgaattgggctgcctgcgggcgggggggataacaaccacaggagggatttgagggagttttgtggttaaaaggggaaaaaaaggggggtaaaattagggggggccaattgggtatcctcgcggagggggggaaattttttggaa

SEQ ID NO: 173199 - DNA, 304 bp, Zea mays
  Clone ID: MRT4577_8953C.1
gagaaacagcgggctagtgcgggacgacgggcaggataagctaacagacttggagctggcgggtctcctcgactcaagctggtggtacgtacagtcggcgcaagcagctcgggcaaatggaggcggcagtcacgacagctgctgggcgaacgatgcagctcgaagtgactgggctcttagtcatgaggataagctgcacgacggcatctacaactgacagtgccgaatacgagcgagtacacctgttggtgtgcgtaaaaaggacaagatcagaaccgggccagactaatcatggggagcggct

SEQ ID NO: 173200 - DNA, 280 bp, Zea mays
  Clone ID: MRT4577_89540C.1
cggacgcgtgggctgctccagctcctatacaggagcgagcgacccatactcctctgcttctgtgctggggagtgccggcagccgccaatccccccatttcttatgcttcggtgcacgcacccacccagccccagctgctgcagctgcaacgccacgatggacggaggcggagcccgaagcgggacgaacctgctgctaatcctcaacggtcaagagacatgctatggtgaccgctgagtggtgcaaggccaatgtttctgcacagaccactgcggggtgg

SEQ ID NO: 173201 - DNA, 394 bp, Zea mays
  Clone ID: MRT4577_89541C.1
gcggaagacaccatccccatcgctccaactctcgtcgcgtttactgttgctgcactgctgtaaggatggatgggcgcggggccgatgcgctaggcaaaaacacctgatgccccctgcgccagggcccccggaccatctgctgacgcacctgccgctgggcctagcgcacccgcgagtgcacctccggcgcagggcgtaccatgactgtgctgcactgaggacacctactatgactcaagacgctcgagcacatcacgcgggacactttgactatgaagcagaacatacatcgacaatgtgagacagctgcgtgaagaaccagcgatccatactaatatgtgcacattcctggtatgtgctggctgaggctatctatctgattggatgattacta

SEQ ID NO: 173202 - DNA, 440 bp, Zea mays
  Clone ID: MRT4577_89542C.1
agcgtggtcgcggccaaggtacgcgggggggcaatgatcaacaaccatggctgacataagcgcctatgagcaatcaaggctgctatgggtatcaaactggagccctccctcttctctcctgggaaccttttcagttatgttctaataatagtggttctgtccttggacggtcatgccattccgtgtgtgataaccagggcagctccacttataatatcaggacaagttgatctggtgttaggagatggtggggttaccagttaaatgattgagcaaaggcgaagctgagcccccaaattactatactttaaaacataaaataaaaaaaaaaaaaaaaaaaaaaaaaactaaaaaaaaaattaaaaaaaaatcaaaaaaaaaaaaaaaaaaaaaagtacctgcccgggcggccgctcagccgaatccaacacatggcggcc

SEQ ID NO: 173203 - DNA, 468 bp, Zea mays
  Clone ID: MRT4577_89543C.1
aattaattttttttttttttttttttttttgttgtgtttttttttggggttatgtatttttagtggggggggggaaaataaaaagaagcaaataaaaaaatagagagaagaaaaacccagagggtcacccccaagactagggaacccaaaaccaactaaaaataaaaggccaaaaaatcagcatcaagaaaaagacccatggcacccaaacaacggaaaaaaaaaacccgggccaaaaaaaaaaaaaggcggggcgcgaaaaaaccaacgaatagtccccgttgaggcagcgtatgaaaagaggggggaagacccatcccaaaaccaggggaaccccaccgccgcacctaagaggccacgggcaaaacggcacacccagggggggggaacacgtaggaaaggcccaacagaaaagggagcggtctaacacgggggggagggaaaaatgggcccaagccaccctacaca

SEQ ID NO: 173204 - DNA, 663 bp, Zea mays
  Clone ID: MRT4577_89544C.1
ctcgaggccggccgggcacgattcccaccatcccttcgctcgcaagctttcccagtcatggcgaccgcgacgaggaagctgctccccgcactcctcaagaccctagatccagtcgcaagcgcgcgacctctccaccgaaaaagctgatggagcagccgacggcgaaggtagacacgctgatatgtgtatgcatgacacaaaaaaaaagtctgcaatgacaactgaccgctgatcacctccgaataaaaggtgatgctcacattgctgactgagaacgccctcctgaaggcgctgcacttgtccacccaatctagcacatctgccttgatctgtaggcacctaatgagtgaaaatactgaggcctcccgtatggtcccgctctccatcactatattgagaaagatactgccgcctaccgctgaagaagctgagctgaagagctatatgcatcacacatttgttccacaatggtctgtagagaactttgtactatgcttgcatgaaaagcattacctttgatgatcatcactcgttctcgtccgatcttgttattagttctgcctgtacccatgcagtgcatgtttgctacagatgagaagagccactctatcagaatatatacaagctgtgagtattgaacttttactctgaataagcatgaaa

SEQ ID NO: 173205 - DNA, 146 bp, Zea mays
  unsure (1)..(146): unsure at all n locations
  Clone ID: MRT4577_89545C.1
cttnntattatttcactantactaacaacaagactaacacacacaagcacaatagacgcccaagaagtagagacagtttggncgattctcccaggctgncattcntatagctaantgcccttccctccctacgaattccncncnnc

SEQ ID NO: 173206 - DNA, 288 bp, Zea mays
  unsure (1)..(288): unsure at all n locations
  Clone ID: MRT4577_89546C.1
aacgaatagctgctgctctcaatgtttacaacgttcttatctctaatccagtttcgtcagagccacagcaggcgcagtagccaaatacacgtccaagtcctcagcatcgacatcgagggaagcctgctggccatggggccgttggcgctgctggttattggctcatcaagattgcttactgccacgtgtgagcctgcaggtcaacattgcagatgttagatgtgagtcacatcatgtgactcgtagatgcatcccgtttcaatccgctgtattatgntttcgtttttt

SEQ ID NO: 173207 - DNA, 667 bp, Zea mays
  Clone ID: MRT4577_89547C.1
cctcgaggccggccgggaaccctacacgaatctggcgacggtcacgctaggaaccaatgtattgtgcgacgacactgagtaccgatgcctcatctatcatgcttcaggttgtcatcatgaacggacgacaatgcctaaactaatgctgccgcagcagctacagaaaataggacgatacggaagaactgctacaggggcgtagaaataaatgcgcttctcgagatgagcgctgtatgacctacccactagatgcttccctcagggtgtcgccagggatacaggttgacagaggtgcgctgatcgaggaagcccatggagatcatcaggaaactgcgccatgcggaagaggatgctcctgctgatgagaagactgagctagacaagacacatctccgcatcatgatcattgtccctgagatgaatggaagcatggtcgccgacgatcacgtcaagaacatcaaccaggttgacatcacaggctgacatgatcggccactagcttgctgatctctccatctcctacgaggagctcaagcacgagatgaccgaaatcgaggccacccactcctcgaggtgtatacctctgacatgatgtgggactctattcgttacgatcgcaatgactgatgatgagctgcatgccagcatcatgatgcacagctaataa

SEQ ID NO: 173208 - DNA, 301 bp, Zea mays
  Clone ID: MRT4577_89548C.1
ggggctatattactattatggtggaaccagttaccataagagatagtttcttacactaaacaatttagaataaaatacaacaacttatacgagcctccacggaaataagcaaaaccaggatgctcacgttggcagcaaattagtagccactgattctttgaccctttactcatgaaatgtcaagactacttgtgccaccttggtctaaggaaatctggatattggaggtttctcgaactgggttcgtatggcagaatgaaataacgctggtttatggcacttggagaatgtgggaaacttg

SEQ ID NO: 173209 - DNA, 615 bp, Zea mays
  Clone ID: MRT4577_89549C.1
cgaattccgttgctgtcgaaaagctagaccctgtggacgagtgagacttatgagtttagtcgcttctccgctatcagcagatgtcagctttgcatttgctttttcttgttaaataccaacttatcccatgctggtgatggatttttccctaatagcacaaagtacagaagtgacattttattacgcatacacgcaacgatgaaaactggatttaaagacgacatcaaagtgaaaaattagactgattcagttttttcccaattaacagccataaagtaactggctgaaaaaagtggtccaatttaggcctgtcagatttcagacttagtctaaatgcaaatcctgaatttcagtgttttggtgtaactttggagctctctattgctctatccatagggttataggttatgatgattataacacaattatagatctaaactaggagtataagtttgattaagatacttagccctaaggctacttggaacctagagaaaagctggcctaaagtagagctgtctgaaagtgtggatttcagacttagtgaaattcagagtctgaatttcagtaatttgggcaaactttggacctctgtagtttcgacagcaacggcga

SEQ ID NO: 173210 - DNA, 262 bp, Zea mays
  Clone ID: MRT4577_8954C.1
gcaccacagtcaacaccatggccatgtctacccttagtcacgccgaccaatagcagcaggacgggcggtcttagaccatgagcaacgtctacgacaacatctaggcgccctactacaacaccgtcaactacgtcagcaacaaggtcctgatcatgaaccccctgctcgaccgtctcacgctccgcctgaccctcaacgacctcatgcgctacctgctccgccacagcctgctcacctactctgatgacgcacacagcaacag

SEQ ID NO: 173211 - DNA, 442 bp, Zea mays
  Clone ID: MRT4577_89550C.1
aagtataattagcatccatatgagtgtattgggcattataattacaaaataagggcacatccaagttgcatgagtgcacatcagagttgcaaaataaatgcactttagtgcacatcatagttacaaaataacctccacgtcaagaaccaacactagtttcacttttaacatgtcagatatctaagcttctttttggagtcatcttcttcgggagtgtactaggttgtacagttggaggaaaaatatcctgagatgctccttctttcatcaacaaagcaagacgtctacacatgtaacattttatctttcaaaattgtacccatgaaaactaattatgcacgaacagaactagtaaaatttcttaccctcttgtcacaattccaggactctcttgcatgatttgctcccttgttggaacaggactacctggtaacaaatcttt

SEQ ID NO: 173212 - DNA, 136 bp, Zea mays
  Clone ID: MRT4577_89551C.1
cccacgcgtccgctgcactggtttggggtgtgttgatccaatacattccaaggctgcttcgaatattccctgtgatcacagggaatattcgaagcaccttggaatgtattggatcaaaacacccaaaccatgcagt

SEQ ID NO: 173213 - DNA, 394 bp, Zea mays
  unsure (1)..(394): unsure at all n locations
  Clone ID: MRT4577_89552C.1
attcngctctagatctaggaattttttttctaggcaacagacaatgctaaacagtactgtcttccaataataatgtggtccaaacanaatgagaattcatttatgacagcgtttggctcgttaaacgcttacacaatactctatcgcaaagaattctccaagattacctctcgaacagcaattgatctccttgtgatgggattcatttgcttcttcttgaaacttattttcattccaattaacaacatcatcttctcatctgcttatgattaaaggttctacaatcgccttaagaattcacgttgtcaagcaaaaatatgcacaaatagtttccacatcaatagatcattctaatgccctaaatcttaaatcctgtttcaatttttgttttttt

SEQ ID NO: 173214 - DNA, 252 bp, Zea mays
  Clone ID: MRT4577_89554C.1
ggggcaaaaatagtacatttttgcaatccatcaacaataaaaagcgtttcaacacttgcttttagcgcagattccattcaacacccaaacgggagttacaaatgagttttttgtatttacacgggggtcgacaataaacacccggatggggactttcaaactattcagggtccacaaaaagcagttttggaaacttaattcatttttgaaaggtgacgggcctcccaaacaaaaagcctttggaaattagac

SEQ ID NO: 173215 - DNA, 406 bp, Zea mays
  unsure (1)..(406): unsure at all n locations
  Clone ID: MRT4577_89555C.1
ccacgcgaacgcgcacgcgaccgggaagcagttccatgttcggctgcaccgacgccacncacganggggggnggcggcaggaggccatcgccgcggacccggaccccaaccaccgcgncatnggttggtacacccccaggcacacgcagngcgnnagctacatcgccaacaagccccccggcagcgagtagagaccgtggctagaacgacccagggccatgcctctgcccgacgaacggaacaccaacaagcagaggaaccgcactctctctcccaccatcgctaacccttgaacgcagcacatctattctcctgcatgcaacggaacccaaagctaccaacaaagcgcctgccgacgcaaccagcatggcagcatccatcaacaaggaccgacgaagtgcaacga

SEQ ID NO: 173216 - DNA, 175 bp, Zea mays
  Clone ID: MRT4577_89556C.1
cttcatatcctaataattctcgtgggagagcagctgggcggccccccccagtcagccgtctctatttagtgtgcgaggaaggcacccttcctcttcaggggcagctccagccctccacccaaacaagatgccgacaggcagctgtggtttgtgttcaagcaaaaactcttctacc

SEQ ID NO: 173217 - DNA, 280 bp, Zea mays
  Clone ID: MRT4577_89557C.1
ccaatttccgaatcgaccgcacgcatgcacccactcgtccgcccacgcctactacctttcagaccacgctctatcacactacatacacgatcagcggctatatcaaggttcacagttgctcctggtcccaatttatcctcactctgcattctatatgatacagtccttatcaaccattattatgactcaacccaactatcctaaacttatattcactcctacaaccctattaattacgatacaaatcacatcttccataacatcacctatatacgcacta

SEQ ID NO: 173218 - DNA, 808 bp, Zea mays
  Clone ID: MRT4577_89558C.1
gactcgccgccggatagataatccccagcccagcccaaatccaaccagacccgatccccacgcgcattccccgtcccggatccgatcgtccgaccgaccgcgccgcgcgaccgccggggggagagagggagagcatggcgagcgggggcaggacggatctggacggcgccgccgtggcgccgctgaccatctgcgtgatcggcgccggcggcttcatcggctcgcacctctgcgagaagctcatggccgagacccagcacacggtcctcgccgtcgacgtctactgcgacaaggtccgccacctcgtcgacccgcccccgccccacctcgccggacgcatctccttccaccgcctcaacatcaagaacgactcccgcctcgagggcctcatcaagatggccgatctgacgataaacctggcggcgatctgcacgccggcggactacaacacgcgcccgctcgacaccatctacagcaacttcatcgacgcgctcccggtggtcaagtactgctcggagaacagcaagcgcctgatccacttctccacgtgcgaggtctacggcaagaccatcggcagcttcctccccaaggaccaccccctccgcaaggaacctgaattttatgtgctgacagaagatgagtcaccctgcatctttggtccaatcgtgaaacagagatggtcctacgcgtgtgcaaagcagcttatcgagaggcttgtttttgctgaaggcgcagaaaatggccttgaattcacgattgtgagacttttcaattggattgggccaaggatggacttcattcctggcgt

SEQ ID NO: 173219 - DNA, 330 bp, Zea mays
  Clone ID: MRT4577_89559C.1
gttgtcctcaacacagcgaggcgacgccgaggggggtttttttacggcgatttggtggatggaacacacgctaccacggggattctgattctggcatgctagcgaggaagaacaacttcttcctggcgaagcagtccgtgatcggaactgccaaggcgctagtcctccaaggagccccagagcctttgctaagtacactcctacaagtcctctggcttagcaaacaagaaaactgtaactacccgctcagcttgttgaaaggacgcatctgcctgtgtacctcctcccatagcaataagcaggaacacaggccccaagtttaaacccaaa

SEQ ID NO: 173220 - DNA, 1975 bp, Zea mays
  Clone ID: MRT4577_8955C.1
cctcgaggccggccgggccgggatcgtaggcgtcccaccactgctgcgtggtgcacggttctgccgcgcgtccgcgcccaatctcgcatcgatgtcgatggaaagtcgtgtgttacgccgcctcccccgccccttccatactcctcccgcgtcccttccatccccaccaccgtgctccatgccccggcctccaccatccccgccccacgagtcatccccggcctcggaaatctcgccgtgcccctcagaaatctcgccgcgccaccgccccaaaacctcccctacctcccacccagagaagatcccatccactaccgccgggtcgtcgtcctcccttccgccgcgccgtcgttgttgccgcacatctccatgagcagcgtgaacgctttgagcgggtttccctccttgcagtggccgttcaggagcgcgttgtaggtgaatgtcgtcggcgagaggcccatcccggtcgcatcgtggaaaatggtcgtggccgccgtccggccgaccttacagaacccgtcgagcacgatggtgaagatgtagatgtcaggcgtcaggggcgagtccttgagcttcttgaggagttcgagcgcctcctccagtcggccgacgtagcagagcccgccgacgaggctgttgtacgtgcggatggtaggctcgcacccgaggccgcacatggcgtccaacacctccatggccttggtgacgcgtccgcgcttgcagaggcaccccacaacggctgagaacgtggcaacgctggggcggaacccgcgcgccaccatctcgtcgagcgcgagcttggcctcgtcgggcgcgccctgtcggcagaggcactgcacggcggtggcgaaggagtgtgcgtcgggggcgacgggcatggcgcggaacagagcgacggccgtggcgtggtcccccgcgcgagccagagccgagaggatgtcgttgtaatcggagacggtgagcgccgcgtcgtcgcgctgcaggaggtcgagcaccttcacccgctcctccacgggcagctccatgatccgcttcgcgcaatcacgggcgcagaaacgcgacctcttgctgctgccttcgccgcccggtccgtcggagcgcgagtcgagcacttgcggcagtgctgtgtccccgtggagggtgccgttgccgttggaccgtagagcgcggaggagctcagcgtcgtggtcccgcaccggtgctttgcagtggcacgcgaaggcggaggaagacgccgcgggtcgagggagcgcgctgacatggttggaggaggacggcagggcggggaggcgcgaggatgggggcagcgcgcgagagggttcggggacgacgcgacgtcttcctccgtcgcgcccctcctgttccaaccgctccgcctgctcaccgcaggtgacaagctcgtcgctcggtcgcttccatttgggcggccccgtcccgtgcttagatccgggcgcgggcctccttcctcctcgctcgcggcgcctaccccaggtacctggaccgctgccacctcaacgcgtcggtgaccgaggacggccaggtgatgccggcgtgcgtgccgggcctcgcccccgccgtcgtcctcgccaactacaccaagtcgcagtacaaccggttcctcaacgacagccagttctccggcgccgggatcgcgagcgagggcgactgggtcgtggtcgtgctcagcaccagcacgggatccggcgactactcgccggctccgccgggctccaactgggcggtctcggcggctcggccgttcggcttcggccagctggtccttttgttggtggggtttgtagttttgctggtgaagtgagtgtttagtacgcatgcaccaacatcttcgtggcttatgttgtcacgttcaggtctcgttggctttattaagcttttttcacttgaaaagattgattacgaaacaaacatgtgatttattgttaaaaaaaaaaaaaaaaaaaactcgagctcgtgc

SEQ ID NO: 173221 - DNA, 584 bp, Zea mays
  Clone ID: MRT4577_89560C.1
gcgcccgggggcacacggcggcaggctcgtggctgaggttcgaaagatgcggttgtggagctgtgtgccttctctgatccgatccgtcctgactgtgaagagagaacctccgcctccgcctcggaggtgcaggtgcagtttcctcggccggtaaaatttgcgtagtgggctcctgcattcatctgtaacagaattttggtgcctcatgtgtggatctctctcaaaggatgtaaacagcacacaggagcgcgactaggttaggaggcgtcctggtgccagacgctgctggtatcttgctccacttgtgaagctgagagtagatccagatcgtgggcttgtttgtccacgtgtgtttgttgtagcctgtctctccccgctggacgccgggggaaagctggcagttgtcgagcgcggtgtgtcacatgactggggaagacgaagatctgtgtctcctgcatatgccgatgatcattgcgcatcaaggttccaggagcagctggtctcatcgaactggttagttctgttgggatatgtaaccttttttttcctctgcaactaacgtgttaccggctctgtagtgtggt

SEQ ID NO: 173222 - DNA, 634 bp, Zea mays
  Clone ID: MRT4577_89561C.1
agcgtaatacttggtcaaacataagataatttgtcttgttttttttgtcaaacatgagataatctgtaatttcctggagaaaactagaacgtcattttgttcagacagagggagtagcaatcatgtaggagtatgcatcatctgtgctagatccaccagcagcagcagcagaagagagaaaaaatctaggtgcacctgtggccaccaggtccaccaccatcactcatgcttgccataccagcaacagtacccatgctgctcccaactttcctatcaccaccaggttatcacaagtcaactgaattctggtactagctaagctaggcatggtgtcttctccagccacaccatggtgctggcatcaaacacagacaaacactcaactgaattctggtaatctggttacacatggtgcaggtgccacaacatgcagggcgccctcaagacagtagtcatcactcatcaccatcacaaaatatactcacatgtgaaaacaaataggatctaacatcttgcaattccaatggcccttccatgttcagccacccatgaatattgtgatcggtataaaaaacgatctggaaaagtaacatcatccaaagaacctgaatgctagtccatcatattttgggca

SEQ ID NO: 173223 - DNA, 145 bp, Zea mays
  Clone ID: MRT4577_89562C.1
tttcttttgaaagccgactatattttccctggggggggaagccagaaagtatgaggtggaaaaccagtgatgactacgagaaggtgattgagggggctgtgttcaatttggcagccggactggttcttcatcttgacaacgcaga

SEQ ID NO: 173224 - DNA, 391 bp, Zea mays
  unsure (1)..(391): unsure at all n locations
  Clone ID: MRT4577_89563C.1
cagggncggaaaacccggggcgacccacacgcccgcccacacgcgcgtggatggacagtttaactataccacaattacaaaggacgtggtccactagacacttatggtggatctaactcaaaatgctatgaatcttgtgagactgtccactctacacgagaatgtcctctgtgcatccactctagaggtctagccagcgaaatacctacaatactcattacaagtcccagtccaatcaagagcagaagctccaaccctagccccaaccctagataccccaatagtccaatctatagtacaaggagctatagcccttgttatgtatcttcaacgcgccatattcctactacaactttcgcgcgcagttataacaagtcaccataaaacaact

SEQ ID NO: 173225 - DNA, 383 bp, Zea mays
  Clone ID: MRT4577_89564C.1
aacaaccaggccagcttggttttttttcataaaatccgggggtcggtgcctttttttttcaaacaaatcccagtcccacaggttaactggaacaggtgggtggggttggcttcacataatagccatttaatggtccaaaggggggacaggctcaacatggtccctcacattggtcaccgggaaaagaaccctttgaatccaaggggggatgactcaggggggggtttttaaagccttttaattggcccgagattggcctccccgggttgagaaaattttcccccccataaaaccccccaaaacaaaagcttttgcgaaaataagggtcaaaattttgcccccaaacaactttgggtggtgggcatttcccccaaccccggggt

SEQ ID NO: 173226 - DNA, 207 bp, Zea mays
  Clone ID: MRT4577_89565C.1
gtaccgccgattcccgtcgaccacgcgtcgtggctccgcgactcacgtagcgttaaaggttgcggctcggatgcgctcggctgggccgcacctggtgcgcgaggtcatccgcagcaaccaccgccggagatctggcacgaactccgacttccattttacgcacaccagcagttggggcgcccgcagctaaaacgccaaaaatatcct

SEQ ID NO: 173227 - DNA, 194 bp, Zea mays
  Clone ID: MRT4577_89566C.1
gccggataatgctatctcacaacaaccgcatcttgtatatcatcgcctctagatcatatcttttctactcatttgccaagatcatcaaaaaatactagcaaactctctcatgcatcaaacttttttcacttactactactttattaacccactcttctcttcaagccaagttataaatcccttcatataacctt

SEQ ID NO: 173228 - DNA, 128 bp, Zea mays
  Clone ID: MRT4577_89567C.1
ccatctccgctcacctcatcgccactcttccgtctctcccgacacaccggtcctgccctcgccgggttcagtcgagtgccatcgccatccgaggactaggaccgagaccccgcccccggagtcgacct

SEQ ID NO: 173229 - DNA, 1066 bp, Zea mays
  Clone ID: MRT4577_89568C.1
cggactgcttgggaaaacccgctccgaaaggcagaaaaccacaataaacaaggcacgcaacgaatccgatcccgatttaattcgcccaaatccgtcgattaatccccacgccggccgcgtcatgctccggccattcctctcccctcccctcaccgctctgccgccgccccctgcctccaccgcagcagccgcgggcgccgcggcgatgcgacccgcatcctcctcctcctcccgctcctcggccggcggaggcggggcccaccaccaccaacacaaccacggcggccacagcatctccgtctctccgccgacgtgcaggcacgccccatcgtcggccacgctcgatctcctcatcctgcttctcgtgctcttctcgcttgccttcctgctcgcctcctcgctctcgcacgtcgcgcgctcgctctccccgctgctcgccacgccgcccgccgccgcggcgctcgcctacgccaccgccgcactgccttacctggccgcggcggccgtgctcgtcgccaccgcgttcctctcctgtcgccggctcccgcggcgccggtgccgcaacccgcgccggcgccggaagcaccgccggcggcgccgaagcatccatgtggcgcgagatcgaggcgctgccgtggaagggcggccagggcggaaacaacccagactacgagtgccttcgcgccgaactccgccggatggcgccgcctaacggccgagccgtgctgctcttccgcaaccggtgtggctgccctgttgctaaactcgaaggatggggcgcccccaagagcaaacggcgcaacaagaagggcacgcaaggttcgttccatgaccgagggctgaggtgaacgcaagtccggtgtcgccagttgcaaacttgcaacactgttgctttagactgccatgttgaataatacttctagcaaaagatacgccaatcacagtttacatgtgggttgcgccatgattgtattgttacgggtgttcggtgaaccccaacagttatgccgatacaaagacgagacgcaacaatagaactgttaataaaggacaatgggcttgtttc

SEQ ID NO: 173230 - DNA, 711 bp, Zea mays
  Clone ID: MRT4577_89569C.1
ccggccggggctccgaaaggcagaaaaccacaataaacaaggcacgcaacgaatccgatcccgatttaattcgcccaaatccgtcgattaatccccacgccggccgcgtcatgctccggccattcctctcccctcccctcaccgctctgccgccgccccctgcctccaccgcagcagccgcgggcgccgcggcgatgcgacccgcatcctcctcctcctcccgctcctcggccggcggaggcggggcccaccaccaccaacacaaccacggcggccacagcatctccgtctctccgccgacgtgcaggcacgccccatcgtcggccacgctcgatctcctcatcctgcttctcgtgctcttctcgcttgccttcctgctcgcctcctcgctctcgcacgtcgcgcgctcgctctccccgctgctcgccacgccgcccgccgccgcggcgctcgcctacgccaccgccgcactgccttacctggccgcggcggccgtgctcgtcgccaccgcgttcctctcctgtcgccggaagcaccgccggcggcgccgaagcatccatgtggcgcgagatcgaggcgctgccgtggaagggcggccagggcggaaacaacccagactacgagtgccttcgcgccgaacttcgccggatggcgccgcctaacggccgagccgtgctgctcttccgaaccggggtggctgccctgttgcta

SEQ ID NO: 173231 - DNA, 303 bp, Zea mays
  Clone ID: MRT4577_8956C.1
gtatcacactgtttgggttcctatgccatctgttggttttgtagcatatggacgaagcccatgagactaatgatgatgggactgcgcctgaacgtttaaaggagcatggcattcttgcaaagaatgaacaccgtgaatcataatcgatgaaggaattaataccgggcgcaccattgaccttgaaaattgtccttgctcaggaagagggcaaaggactacatgcagactctgacttccatataagattccaagcttttcttatgctgcggggaaaagaagcccctctttaactttctctatgcc

SEQ ID NO: 173232 - DNA, 1091 bp, Zea mays
  Clone ID: MRT4577_89570C.1
gcgattgggggtctcgaggccggccgggggtccgaaattccccaaatccccacgccggccgcgtcatgctccggccattcctctcccgtcaccgctctgccgccgccgcccgtgccgccaccgcagcagccgcgggcgccgcggttatgcgacccgcgtcctcctcccgctcctctgccggtggaggcgggggccaccaccactatcacaatcacagcggcggccacaacgtctccgtctcgccgccgacgtgtacgacgtgcaggcacgctccatcgtcggccacgctcgatctcctcatcctgctgctcgtgctcttctcgctcgccttcctgctcgcctcctcactctcgcacgtcgcgcgctcgctctccccgctgctcgccacgccgcccgccgtcgccgcgctcgcccacgccaccgccgcgctgccctacttggccgcggcggccgtgctcgccgccaccgcgttcctttcttgcagccggctcccgcggcgccggtgccgcaacccgcgctgccgtggcctgcggaaggcgctggagttcgacgtccagttgcagaccgaggatgccgtgcgcgcttgtgccgggagcaccgttggcggcgccgacgcatccatgtggcgcgagatcgaggcgctgccgtggaagggcggccagggcggaaacaacccagactacgagtgccttcgcgccgagctgcgccggatggcaccgccaaacggccgagccgtgctgctcttccgcagccggtgtggttgccctgttgctaagcttgaaggatggggcgcccccaagaccaagcggcgcaacaagaagggcacgcaaggttcgttcaatgaccgaggggtgaggtgaacacaagtctgatctcgccagttgcaacaatgttgctttagactgccatgttaaataattctccgagcaaaagatacacccattacaatttacaagtgggttgccccatgattgtattgttagacgggagttcggtgaaccccaacagttatactgatacaaagacaaaagacgtaataaaggacaatcaaagcgtaaacattggcgaaaaaaaaaaaaaaaaaagcggcc

SEQ ID NO: 173233 - DNA, 654 bp, Zea mays
  unsure (1)..(654): unsure at all n locations
  Clone ID: MRT4577_89571C.1
aaaggcccnnntnntttnttttttntttctttttttttttttttttttgacaaagcacaagaaggttactctggcatagaatagttagaggttcgacgtccagatgaaatatgtgtgattctcctgctcatccccagtgctatatgcgatccgacaagaacacacttcatgacggctacttctttttaccaatattgcgtccatctacaaacataaacacacgatcgaaaacaatctcctgacaagagaatgttgtgcttcacaaataatattgttacagagcgcaagctgggaggtaataaataaggggatcctgttaggctgttacccagactgtaaaatcctggcagctcactgccgaacaccgtggccgacgcaggtccttgcacgcagcggtagacacagccggaggacgagcgcccataactgcatctgttcaacgcacagacggcagagctgatccaaatcactctcatctgcagatgaactgaagaatgaatatgtatgctccatccaaaccacaaggcgtccggcaagttcgcgtcgtatttcctttttttcattcatcccaacccttggtacctcttcttacccggcttttttcgagggtaccactgcaggctctgatgcgtgcattgcaaatttgcaatcgct

SEQ ID NO: 173234 - DNA, 1150 bp, Zea mays
  unsure (1)..(1150): unsure at all n locations
  Clone ID: MRT4577_89572C.1
gtaccctcgggctcgccgggncaataaacaaggcacgcaacgaatccggccgggatcccgatttaattcgcccaaatccgtcgattaatccccacgccggccgcgtcatgctccggccattcctctcccctcccctcaccgctctgccgccgccccctgcctccaccgcagcagccgcgggcgccgcggcgatgcgacccgcatcctcctcctcctcctcccgctcctcggccggcggaggcggggcccaccaccaccaacacaaccacggcggccacagcatctccgtctctccgccgacgtgcaggcacgccccatcgtcggccacgctcgatctcctcatcctgcttctcgtgctcttctcgctcgccttcctgctcgcctcctcgctctcgcacgtcgcgcgctcgctctccccgctgctcgccacgccgcccgccgccgccgcgctcgcctacgccaccgccgcactgccttacctggccgcggcggccgtgctcgccgccaccgcgttcctctcctgtcgccggctcccgcggcgccggtgccgcaacccgcgctgccgcggcctgcggaaggcgctggagttcgacgtccagctgcagaccgagggggcccttcgcgccggcgccggaagcaccgccggcggcgccgaagcatccatgtggcgcgagatcgaggcgctgccgtggaagggcggccagggcggaaacaacccagactacgagtgccttcgcgccgaactccgccggatggcgccgcctaacggccgagccgtgctgctcttccgcaaccggtgtggctgccctgttgctaaactcgaaggatggggcgcccccaagagcaaacggcgcaacaagaagggcacgcaaggttcgttccatgaccgagggctgaggtgaacgcaagtccggtgtcgccagttgcaaacttgcaacacgctttagactgccatgttgaataataccttctagcaaaagatacgccaatcacagtttacatgtgggttgcgccatgattgtattgttacgggtgttcggtgaaccccaacagttatgccgatacaaagacgagacgcaacaatagaactgttaataaaggacaatgggcttgtttcaaaaaaaagaaaaaaaaaaaaaaaaaagcggcc

SEQ ID NO: 173235 - DNA, 2904 bp, Zea mays
  Clone ID: MRT4577_89573C.1
gaaaggactacctctaaaaggcaaagaagttggacgaaaaaaaggaatttcagtaactaaagaaaggtcccatgaagccattgtttatatcttactttcagactctgttgcaaaagggcatgttatgcttccgtactctattcgtcacttcataagtgctgatgtacattcatgggtatatattaagacatattcagccaacatcaaggaggatgaacctctagtgacaatatctcctttaaagttcaagatgcatgtgaaagatgctcatgatagcagtaaattagtcagtcaggaagtggacacttcggaggtaaccacaattccttccagaaatggtgatttcttcgtatggttcgttacagtgaaaacaaaaatattcgaggaactcattttgggagcatttctgaatctgtgtcaaggcagaaattttttattaagcattggcttattgggcaccttaaatgaatgggcttgcatgctagccatactgagaggaattcaatagtcttgcgaaccaatattttgctccatttggaagccatagataaagaaggaaccaaaggagttgaattcttatactttctaaagcttacatctgaaaattctaatttcaacgattcacaacttaatattgagactacttggagtgttccaaccagcaatgctgatgatcttgaactgcattttgggaagttcgagcttggcgagcctgtatcttttgattccctagtggacagtggttccagtgatggtttcaagctgactcggtcttctttaggctggatggagaatgcaatgtcagatgtgacaaaaaggttatctgtgctcttatcagcaactagcctaaggttatttaacagaataaagttcccctttcctggacatgttattgtatatggacctcgaggttctggcaaaactgctttgaccagggcttctgcaaaatactttgaggaccataaagatatcttggcgcacataatatacattgattgttccaaacttgcacttggcaaggctaaggagacaaggcaagaaattgaagacagcatgtctgaagcactgcttcattcaccttcgatcatcatatttgatgatctggacagtgtagtttcagtctcctcagatcctcaagtgtctcaatcatccagttcttctgattcacttgttcaatatttggctgacattatggatgagtacaaggataagattcaaaatacatgcgggtatggacctatcgcgtttatggcttcagttcagtcacttcagagtcttcctcaagacttaacctcttctggaagatttgatttccatattgagctttctgctcttgcagtacctgagcgcaaagcactattgcaacatcaagttgaggagcatgatttattgtgttctgaggaagttctgtcagagatagcatcaaaatgtgaaggttatgatgcatatgacttggaaattttggttgatagggctgtgcacactgctgcttatcgctttcttctgccttctaatgcttgtcacaactctctgaaacgaactttgttgatggaagatttctttaaagcaatgcatggcttccttccagtcgccatgcgtgatcttaggaaatatgctcctgatgataaagatggtggttgggaggatgttggagggctagatgaagcagtaactatcattaaagagactcttgaattgccgtcaaaatacccaaatatctttaccagggcacctgtgcggttgcggtcaaacattctcctgtatggaccacctggatgtggtaaaactcacattgtgagagctgcggctgctgcttgttctttgcgattcatttcagtcaagggtccagagctattgaataagtatattggttcatctgagcaatctgttcgcgacttttttgcaaaggccgttgctgcagcaccttgcctattattctttgatgaatttgactccattgcaccccagcgaggaactcatagtgcaggagtttctgatcgtgtagttaatcagttcttgacggaactggatggtgtggaaaccttaactggagtattcgtatttgcagctacgaggtttcactggcaagtgatgccagtctcgaagatgttgcttctctgaccgaaggatttactggtgctgatctcgctgctattctaacggatgctggactagctgcaattcatgaacttttggacaaccaggagaacggtgttccagaaaccgaaccgtgcatcagcaaagaacttctcatgtccgtcactaggaaggcaagaccttccacaccagcagacgagaagatgcggtatgatagggagtttggtgaattcgtgtcatccaggaagtctatttcgacaaaggcaagagagtcaaaaggcaaaaaggttacactagcttgagcctttccttggccaatattaatgcgctgcaaaatttggacagtggcctacatgaaggctgctaacacgcggacttgtcaagtcatgcgacgtaggcttcctttcatttgaagagaaacaaaatctacaaagaaacctaaccaaggctcacttgtgttagtgtacttggatggaggaggaaggccattggagggacctgcaggtggtcaaaggtgtcatagtaggaaattttgtacggtaatcctgctgtaattaaagttataacacttgtcacaaattttgtacggtggtgaacggtaggaaatctatactacttattaagaaggtaagagtagtctgccgttctgccctcccccgttccgcgcgcagaaaaaaaaaatcaaaccgtggcttctcagggatcaaaccttggatctattgagcagaatgtatagccttctaccctctagccaacgtgactcatgttgaattgcgtacaagttcaactaagacgtcttttgtgttt

SEQ ID NO: 173236 - DNA, 270 bp, Zea mays
  Clone ID: MRT4577_89574C.1
gccttgccaaatgcaaatattggagctcttgaaatattgactacaatgatacattaactgtgaccgaaaatgatattcttctgcaatgggatggcagttaatttcttggaaaaaaattccctcccatttgtgcggtgattggtgattggaattaaagccggagtgagggagatgcctgcttttgactctatggcgggtattaattgtttgttgggattatgcattagcctcaagagttgcttggccatcggatgggaaagactttttatt

SEQ ID NO: 173237 - DNA, 388 bp, Zea mays
  Clone ID: MRT4577_89575C.1
ttgaacttgtacggaattcggcatgagtcacgttggctagagggtagaaggctatacattctgctcaatagatccaaggtttgatccctgagaagccacggtttgattttttttttctgcgcgcggaacgggggagggcagaacggcagactactcttaccttcttaataagtagtatagatttcctaccgttcaccaccgtacaaaatttgtgacaagtgttataactttaattacagcaggattaccgtacaaaatttcctactatgacacctttgaccacctgcaggtccctccaatggccttcctcctccatccaagtacactgtccaaattttgcagcgcattaatattggccaaggaaaggctcaagctagtgtaacctttt

SEQ ID NO: 173238 - DNA, 1802 bp, Zea mays
  Clone ID: MRT4577_89576C.1
cttgttcaatatttggctgacattatggatgagtacaaggataagattcaaaatacatgcgggtatggacctatcgcgtttatggcttcagttcagtcacttcagagtcttcctcaagacttaacctcttctggaagatttgatttccacattgagctttctgctcttgcagtacctgagcgcaaagcactattgcaacatcaagttgaggagcatgagttattgtgttctgaggaagttctgtcagagatagcatcaaaatgtgaaggttatgatgcatatgacttggaaattttggttgatagggctgtgcacactgctgcttatcgctttcttctgccttctaatgcttctcacaactctctgaaacgaactttgctgatggaagatttctctaaagcaatgcatggcttccttccagtcgccatgcgtgatcttaggaaatatgctcctgatgataaagatggtggttgggaggatgttggagggctagatgaagcagtaactatcattaaagagactcttgaattgccgtcaaaatacccaaatatctttaccagggcacctgtgcggttgcggtcaaacattctcctgtatggaccacctggatgtggtaaaactcacattgtgagagctgcggctgctgcttgttctttgcgattcatttcagtcaagggtccagagctattgaataagtatattggttcatctgagcaatctgttcgcgacttttttgcaaaggccgttgctgcagcaccttgcctattattctttgatgaatttgactccattgcaccccagcgaggaactcatagtgcaggagtttctgatcgtgtagttaatcagttcttgacggaactggatggtgtggaaaccttaactggagtattcgtatttgcagctacgagcaagccacagctaatcgatgctgcgctcttgcgacctggaaggtttgatcgtctagtcttttgtgatttccctcgatgggatgaacgtttagaaattctgaaggtgcattctaggacggtttcactggcaagtgatgccagtctcgaagatgttgcttctctgaccgaaggatttactggtgctgatctcgctgctattctaacggatgctggactagctgcaattcatgaacttttggacaaccaggagaacggtgttccagaaaccgaaccgtgcatcagcaaagaacttctcatgtccgtcactaggaaggcaagaccttccacaccagcagacgagaagatgcggtatgatagggagtttggtgaattcgtgtcatccaggaagtctatttcgacaaaggcaagagagtcaaaaggcaaaaaggttacactagcttgagcctttccttgggcaatattaatgcgctgcaaaatttggacagtggcccacatgaaggctgctaacacgcggacttgtcaggtcatgcgacgtaggcttcctttcatttgaagagaaacaaaatctacaaagaaacccaaccaaggctcacttatgttagtgtacttggatggaggaggaaggccattggagggacctgcaggtggtcaaaggtgtcatagtaggaaattttgtacggcaatcctgctgtaattaaagttatagcacttgtcacaaattttgtacggtggtgaatagtaggaaatagaaatttgaagagaaaaccggtaatcctgctgtaatgaaagttatggtgaatgatccgcttcttaacgtgcagcggtcgtcttgaatagatcagatgtgttcgcctgacacaaaaaaaaaaaaaaaaaaaaaaaaaaaaaacaaac

SEQ ID NO: 173239 - DNA, 425 bp, Zea mays
  Clone ID: MRT4577_89577C.1
cctggccggttattttttgtgggggagggctcggagcgtccacccggctcgcctccgtccgcgacgtcccccgggactcgtccgcgtccgtgtccgcaaccccaccgcctccccgctgtaccacatctatgtcgcctcccttgctgccgcggtgcccgccgccgtcgtctccgttgactaccgcctagcgcctgagcactgcatccctgccgcctacgacggcgggggggcagccctgatttttgttatcgccgcgtgccgcgcggatggcgccgaggcggaggctgagccctcgctcgccgctcacggcgacgtcttccgcatcgtccttgcgggggacagcgccggcggtaacatggcgcacaacgtggcgatagggcgggccaaggaaggcggcattgttttttactacgacatggtcagcg

SEQ ID NO: 173240 - DNA, 882 bp, Zea mays
  unsure (1)..(882): unsure at all n locations
  Clone ID: MRT4577_89578C.1
tgggaccctcgaggccggccgggccgggactaggaacntaaaacatttggtctaacatctttatggcatgattttctggtggatgtatcgtgttcacatgagtcagtttctttggttgaattgttgcttactggctttttgcatctcttttctgtttcttttaaatataatatctactttgatgatattctgctatactaatttgaagtactacatggtgaatgttttcttcttatttttggatttagaaaagttcttcatcttcatgggcatgaattgctaatgtctgttttgataacttgaatcactttccttggttcaattgtttcctgaatgcatctcttgtttgctttgcttttcaagcttatactgcctgttttttaattagtattttctcatattgtatctgatctaactcataaaaaatatcctgcacacccagtgtttggtattccatcccatcaattcctccccctcaatatctacatccaaacagagccttataattgttgatgcttctcttgtttgctttgcttttcaagcttatactgcccattttttaattagtattttctcatattgtacgttatctaactcatcaaaaatatcctgcacacccagagtgtttggtattccagcccatcaattcctccccctcaataactacatccaaacagaaccttataattgttgatgcttctcttttattagtttataccctgngaatacaaaggttgtgttgtagactttggcccaccttttcaatgcaggatttcacaagaaatactttaattcccactgtttgatcagaatcttcatgctctaagcattacactagcttctttacttagncaatggtatcctttttttctacgatccatt

SEQ ID NO: 173241 - DNA, 879 bp, Zea mays
  Clone ID: MRT4577_89579C.1
ttttttttttttttttttttttttttttttttttttttttttttttttttttttttttttttttttttttttttttttttttttttttttttttttttttttggaaaaaaaattgtttggggaaaaaaaagggggggggaaaaaaaaaaaaaaaaataatttttttttggggggggggggggaaaaaaaaaaaaaaatttttttttttttttaaaaaaaaaaattttttttggggggggggtttaaaaaagcaacccaatttttttttttttttggggaaaaaaaaaaaagaaatctttttttattttagggaggaggtaaggaaactttaaaaagggaaaaaaggaaaaaaaaatttagtgtggggtttttaaaaaaagggggagaaaaacatttaagggggcccacaaaaaatcactacatttttatgaggaacaaggtgtagtcccaaaaaaatttctaccattttgggagaacaaaattataaaatttttaaaaaaaacaacaagattttttttgttttaaaaaaaaacacaattaatttgttcttttgtaaaaaaaaacagggtatttattttaaaaaaaaaaagtgtgaaggagaaaatagttattctaataaatgaggataaaaataaagggtgaaaaatttatattaaataaaaaaaatttttattttttgtggaggacatgcctacataaaagaacgtcccaactgggagaaacacagcaagttataataaaaaaatcttttaattacaaatagaaatctttttttaaaaaagaaatagttaggtaaattataaaaacaaacacggggaggaaaccccgccaaggaagggacaaacaactttaaaaaaagaaatatttttttttgggacg

SEQ ID NO: 173242 - DNA, 427 bp, Zea mays
  Clone ID: MRT4577_8957C.1
cgagccggccgggccggggcttccagcctcgcctgtggccgcaaaagcctcacccgtcaccgtcccgttccttctcccgcctcatccgaaccctattatctgtacagatacggcattatgtctgctctttcgctaaacaacgcatgcatggacgggggagggaagggcctcatgtccgaagacgactggattgtcacggacaagaactacaatggtggtctccatgaccccgaggacaactgccatttgatgctaaagatcgattatgataaccagagacatagggcattcagcgcggtccttctcgattccgagtatgagcttctacttcgataaaggtcctgcagacaaagggtacctttcctctagatcggaggaatacctgctgcagacaccctctgaaccgtgacgctgagcttatccagga

SEQ ID NO: 173243 - DNA, 397 bp, Zea mays
  Clone ID: MRT4577_89580C.1
atcagagtcacttgccgcgctggtatcccaggtgagctgcatgatgccgttccgcttgctctcggtggtcagtagctgccggctgctggtggcaacagatagatccgatccgtgcgtgcgtaaacaaaacggaagcttagggcaagaggtacgatggtgtggtggtgcagggactgctcgagcaggatgtggtggacgcctacgacgccccgttctacgcgccgagcgcacgggagatcgaggaggaggtgagcaaggagggctccttcagcctggactacgtgcggacgttcgaaggcagcctgagcagcggcgcaagcgctgagacagacggcaggaaggtgtccatggcgatcagggccatccaggagtccatgctcacccaccatttctgggc

SEQ ID NO: 173244 - DNA, 757 bp, Zea mays
  Clone ID: MRT4577_89581C.1
ccactgggatcgcgtcgggtgtccggcaccagcagcagcagttggactcggggaagccccgcggaggaccgagttgggaggacctgacctctctggatcaaccgaggcctttagacaggggtattttgggccgacctcggccgcgttcaatccgagaagagagtacctaacggtggtggcgccctggtgcccgcgttgggatccgcgacctctcggtttcgttgctcccaaaaagtcttatccggtgatgactcgttgctccgtgagttgccagccatgtgtcgacctgaggccattggttgctagtgggcttactgaggatgggaatggaaggaaggacacgccattggcacagtttaatcaggagaggttctactcggtggctgcgaggcgattcggcaggaaatggagaccagattcgtcggaccaggatgacaagggcacgtctgcgcccaagaagaatctgaggttcggaaaaaagtttggggcttcgagcgaagaggattcagaaattgacgagtctggggacacaggtgccatcaggaggaggtggagcagtgctgctctcaggaactgcgatgtgaagaaggaaaggcgggtgctcaagtcttacgaggaggaaagcaatgatctcgcgggtagaatccaagagctgcgagaggagattagaaatagggaggttttgggcactgagaggaggcgttacgagtccaggggtgaatctctgcttaccagtaaaagatttgatcagtgtggt

SEQ ID NO: 173245 - DNA, 816 bp, Zea mays
  Clone ID: MRT4577_89582C.1
ccggcatactgaatgcatgcctggttctttaatactgcattatctaaacgtacaatgatcatagatagatccatgtatgctacatcagcatacagcagatatggatcttttgctgaaaaattgcaattgtgtcctttatacataagcggaacgtgtcaattgtaatctttcggatgatttctccctgttttgctgtcttcttgcatgctgtctttttttatacccttgcatgctgtcttctccttgttctgcaattgtatccttgcatggtgtctttttactttacagtgattttttggctaagcgttaagtcttctgattgagcaggaaaagttgattctgaacacgctgcagttcaacatgtctgttccaacaccttatgtcttcatgaagaggtttctgaaagctgcagatgcagataaacaggtgaaatatcactacactagctcaagctcaagatgcagatgatccgtgttttgtctacttggataaacaaaacacctgtagcagtgatcttttggttttatgattgacactgccccactgttgtatctcgcagcttgagctagcgtcatttttcatgctggagctctgcttggtagaataccaaatgctgaattatcggccttcgcatctggctgctgctgcggtttatactgcacagtgtgctatcaatcgttgccagcactggacaaaggtctgcgagtctcatagcagatacactagcgaccaactcctgtaagtccatttcaagtcagttcctcactgcattgataagcgtctttatgctgactttctgtgtgtaccttttgctgt

SEQ ID NO: 173246 - DNA, 681 bp, Zea mays
  unsure (1)..(681): unsure at all n locations
  Clone ID: MRT4577_89583C.1
cattgggtacctcgaggccggccggngaaananttacaaaaaaagggggaaaaaaaaaaaaaaaatttaccaaaaaaaaaaaaaaaaaaaaaaaaaaaaaaaaaaaaaaaaaaaaaaaaaaaaaaaaaaaaaaaaaaaaaaaaaaagggggggccgggggctgttgtgggaatccccccccccccatcaacactttctgtttgctctgggggaaaggaaaaaaaaaaaaagcgaaaaaaaaacctataaaaagggctagaagggggcccccaaacaaaaatgttgggggggtccaccggccagggggggaagggcccggcgaacttggggggggggggaacccgaacccccccccccaaaaaaaagggtttttttttgggggggccctcccgggccgcgcccaacccggccgggcccgggcagttcgggaaccagggccccctcccctactcccacacaaacaaggggccccccccccccaggtctttcccggccaaggacaaggggttctccctgttcaagggggggctgaacaacctgggccgcctgacccaaaaacccgggttgtcaagaaagggccccaacaaggggcccccccccatcgaggcctaaaaaacgttggggaaccgggggccctacccggaaagtttcatgttcccccagttcacgggttccaacccc

SEQ ID NO: 173247 - DNA, 373 bp, Zea mays
  unsure (1)..(373): unsure at all n locations
  Clone ID: MRT4577_89584C.1
tnnnaagaatgttttttaaattttttttggtttnaacaaaaagcaaaataatgacccaatgcttatactgaaaatagttcaaactgaaacattaacctttaaccttacacactgaaatatcggcatgccatgccaatgttttaggacaaactgaagctccagagtccgaagaaacccatgaaaagaaaaacagaaacgatacatgcctttgctggacatattatttttaacagttgattcacacctgtaagtttttcacacgacagtaaaaaagtttttcaccccttaaattttaaaccattttggcccaaacaatcgatggccaacaaaacaaaaacacagtgagtggaggagcacaacgcattcatgcaat

SEQ ID NO: 173248 - DNA, 413 bp, Zea mays
  unsure (1)..(413): unsure at all n locations
  Clone ID: MRT4577_89585C.1
gcgacgaagcggggagcccccagagcggccgccccccttaaaccccccccaaaagaaaacacanaggggacccagggagcaaaccgccgcaagaccaancacaaaaagcagnaggaaanggacccccagggcaacacangcccccgagccccnagaaagncnaaacggacgaanagaaccgccaagaaanaaaccgccgaacaanangcacaggaccgccgaaaaacagcaagcacnaaagaaaccngggcagnacggncccaaaccggcaacagggcaaaggaccaaccaggcccgccaacggggagcgaaacccaaaaaccggggaacaaaacagggccaccagcaccgccaagacccaggacggaagcacaccaaaaccaangagnnccacanccgcacagccacgagcc

SEQ ID NO: 173249 - DNA, 516 bp, Zea mays
  unsure (1)..(516): unsure at all n locations
  Clone ID: MRT4577_89586C.1
atcaaccgccccctccccccgtctccccgccgcctcctcctcctcctccgcgtcgcaaaccctcgtcctaatccgccgaatcccgcggcccacgaaccaaggtagatcgatggcgaagagctcgttcaagctggagcacccgctcgagaggaggcaggcggaggctaaccgcataagggagaagtactctgacagaattcctgtgatcgttgagaaggctgggaagagtgatattcctgacattgacaagaaaaagtacctcgtccccgcggaccttacagttggacagttcgtgtacgttgtccggaagcggatcaagctcagtgctgagaaggcgatattcatctttgtgaagaacactcttccaccgacagctgccctgatgtctgccatttacgaggagaacaaggacgaggacggcttcctctacatgacctacagcggtgagaacaccttcggattgctctagatggcgctggntgccacggcaatcgctctgaatgcctcctgtaaata

SEQ ID NO: 173250 - DNA, 638 bp, Zea mays
  unsure (1)..(638): unsure at all n locations
  Clone ID: MRT4577_89587C.1
aagcccactttccctccttcctagctagctcatcgaccgagtggtggtaaacatgtaccctgctgctgagatcgctagcgttccatacttatctcctgcggcctctttcaagcctcactaccatgtagctaccgacgacggcggcggcttcctctaccagcagtacagcaaccttctgctgcctcaccctccgtcctactaccaagaagttgcttacgaccagctggtccttgaagccagcttcccggttggtggtaataacagatccaattcggagtcagacgagtaccaacgcagtgtcgcggaagagcgcaggaagagaaggatggtatccaacagggagtccgcccgacggtcgcgcatgagaaagcagaagcagctgagcgagctctgggcgcaggtcgtccacctccgcagcaccaaccgccaactccttgaccagctgaaccatgccatcagagactgcgaccgtgtcctccgtgaaaactcccagctgagagatgaacagaccaaattgcagcagcagctcgagatgctccctgtagagaccacaagagagtggtgccatgagtcctggctcttgaagtatctactangattccaagtggtagatgagataatatgagatttaaaccaag

SEQ ID NO: 173251 - DNA, 397 bp, Zea mays
  Clone ID: MRT4577_89588C.1
agctgcttccacaagtgcacaatcgtaccaggaccaccgcgccatggagtctctccgccgatcccgatgccgccacgccaccatccgcgccgaagacggtagccctgcaggtaaggcagtccgagtggtggagaaagggctcgtcacgggggtggggctcctctattggactgcgtgcacgggcgagtcgctcggcctcgacgcctgtgtccgtagccgccgtgacggcagagcggaggccctgctttccggagacccagggaagatgcgaagacctgatagcccgtcggctccccgtcggggggcgacacggaaccgtcaagcggtgacggacgtccaaggccgagcccggggatctcgacaacggcttccagatcaggattcacctgctgacccg

SEQ ID NO: 173252 - DNA, 514 bp, Zea mays
  Clone ID: MRT4577_89589C.1
tttttttttttttttttaaaaaaaatatctcgctcaatatataggtaacaagacaatcgtccgctacaaaaaatatagtagatcaaatcatagtgcaaacgttgaaattggggattaaaaatcacaagtgctggtatgaaaaccgaatcgctgttcactggatcactattcaccgaatcacctttcactagcatgcatggaggaacaagtgaggacagggcgctgccgttgctcgccgacacgctggaggcgcttcgacctgctcgctgttccagccctgctcgctgttccagccgcgcgacgtcacggcggtgcccaggcggggccgcgggaaggcggccaaacgtaggcggcccacaggcactgggagccggagtcacgccgccgcaggcgcgctggcctggtaggcggtggctggcatctagttgctggcgagcacagagaaggaataatgtactctacaagaggatgtcggagatgctgcagtgcaagctactgccagaagaagaggaat

SEQ ID NO: 173253 - DNA, 432 bp, Zea mays
  Clone ID: MRT4577_8958C.1
aaccatcccagacccaccccagtttaatgggccaaaaaaaactaaaaaagcccagttaaaaaacagggggggggggggcattgtcccatcaaaaaccccccgtaaggggaggaaggggggctaaggggttccctcccttcggggggggaaggggtttaaaagggcccccccccaaaaagggggaaaggggagggaaaaacccccaaaaagctgggaatcccccaatccccccagaaggggtaggggcaaaaccgaaactaaacccaagaacccccggggctcaatggaaaagggaggggggaaaaaaaaccccccgggaaacaaaaaaaagggggagcacaaggaaaaatgcggttttggggacggacaacccccccccacaaaaatggggggcaaaataagcgggggggttggtttttgggggacccgggg

SEQ ID NO: 173254 - DNA, 439 bp, Zea mays
  Clone ID: MRT4577_89590C.1
ctcatataatatatcagatagaactcaaactatgcaaggtaatgtaatagtgaacagtcataaccaatcccagaagaatagcaaaaatagttccatccataatactttaatagttactcctttgatagcaaacataagttcaatctaggttttattcactgtaaacatttttaactttagctagcaatacctgtgtgtgtattaaaaatgtagttttcataacgaatctagtaatggccaattaatataattttttagatattgatggccaatgtcaaaaagtttgacttgggacaaacctagatggacttgtatttgtgacagaaagtactaaagttgaaaaagaaaaacatcctccctcattcaatgtggccaacttctaaggatagaagaaagtttttcacgggcaaattttgttactcacaataagatcaagggc

SEQ ID NO: 173255 - DNA, 633 bp, Zea mays
  Clone ID: MRT4577_89591C.1
gggggaaaggggttgaagagaaagacggatcggcagcagtaaatattaaaatatggctatagcgtctgctacggtgcaactcgacaataagttatacaacattacaatagctgtttaaagtagttgctgataaaatggccgatactaaccgaataaataaaacgggtatacgggcagcaggggcatagggcccgtggcgtctgctattctactattggatcttggcactggattaaacaattgtgctggtgtagtccgacgtgccaactcattagctttaaagggccatcagcgcgtcagcaatggcactggcagtgttgttactcttacttcccaacgtgctggtaccacccatgcctccacccgtattatttgtggtgggccatttatatactagtttggcagtagtaccgacgtatttggtatcagattagacgcccccaacttatttagcccacgcagcgttggtgtccgttgcgtaaatgtgcgccacctagtcgcccgtgtggcgttacttggcttcagtggcgaaatgggtgggccggtaggtgtccggctcccccgccgatttcggtgcattactatccctaatgcgagaccacatttggtacaccctgccttctgtaactaatt

SEQ ID NO: 173256 - DNA, 271 bp, Zea mays
  Clone ID: MRT4577_89592C.1
ggacacaaaatgtgcttaattttatacttggaaggaaaacactccattgtctttgggggcattacatgtaccaaatttttaagggcatccaagggggggcctagtttttcaggccaaattcccggaataaagggctggggtttatttcagccctaagggtcccacagggaaaatttagaactggaaaaccccccctccaaacaacttttaaactccttggagggaacaagggaattcccaaaccttgctttttgggccccatgccctttcc

SEQ ID NO: 173257 - DNA, 743 bp, Zea mays
  unsure (1)..(743): unsure at all n locations
  Clone ID: MRT4577_89593C.1
attctcttgttgtggcactggnatttctcagagaatatgttgaagcagtgcaaccaatacatcaagcaggaaaacatttcagatgagagattagtattggtgagggctgacatatctagactcccttttgtgagtggttcaattgacgctctgcatgcaggtgctgcaattcattgttggccatccccagcttgtgctgttgcagatatcagtagagtccttcgcccagggggaatttttgttgcttcgacattcgtggcagatgttattccaccagctattccagtattgaagatcgtacgcccgtacattagccaaataactggcaacaataccttcttatctgaagtggagcttgaagatctttgcaaagcatgtgggctggttgatttcaaatttgtcagaagtggattctatataatgttttctgccactaaagcatgctaactaagtagcagcaatcgtccagtcgtttatgtcaagactcctcggttttatactgcaaatggtttccttctgtgcattgtgcggttgtgccatttgctctaaaggttgccaactttcctcaagggggtgtggtgtaaatagtgaacacatatattttacttctacttgaccgacctcattatagcatgaaaatatcatattttttgtgtacagcttcatagatctttgcaattatgtaatttaaggcttgtttggaacagctctaccaacctaaaaaaaaaaaaaaaaaagcggcc

SEQ ID NO: 173258 - DNA, 442 bp, Zea mays
  Clone ID: MRT4577_89594C.1
acagacgcacggagatcgagccatcgatcggtagctagctgacgaccatgtgcgaccctctcctctgacgccatcaccgccccttcctgcacggccgcgccagctcgcgcagtggtcagcaggaggaccttcaccgcgagcgcctctctccgcaaggccactgccaccgccgccgaggccgatgaagccagcgtgctgcttgccggcgacggcgccatggaccacgaggtgctgctgggcgcagtcgacagcgggctcgacttacagaccacacagctcaccgtcaaggcagacgacaccatcaccttcaagaacaacgacggcttccagcacaacgacgcgtaccaggaagacgaggtgccgagaggagcccacccccccaagatctcgcaggaggagcacctcaacgctcccagacgagacctactccgtacaccctcac

SEQ ID NO: 173259 - DNA, 456 bp, Zea mays
  Clone ID: MRT4577_89595C.1
ggccgccctttttttttttttttttagcgattttggtaaggaaaaaaaaactgtcgcccggcctggcatcaacgccaatcgtaacatgcaatccaaggaaaccgaagccttttgggagaaaccggaacggaggtgacaagaaacacgccgtccggtcattccttcctcctcaccgcttgggctcgatcagccgtgcgcccaagcatgcatgttgttggttaatcagacctttgagtagcagctatcaatcaatctcgacgtccatgtccaggtcagagctcgagacacaggaccctttatttatgcatccatggctgccctccaatagcagcagcgctggcaacaacggcagcccacaacccggtggacgaagccatgggcgcctttttctctaaacaagtggacccgcggaagctggtggccatccagaaacgggccctggcgacgcggctgttt

SEQ ID NO: 173260 - DNA, 451 bp, Zea mays
  Clone ID: MRT4577_89596C.1
gccaagctctccaacaagtggcggtaacattttggtggggagtaatccgtttggagccaagctttccaacaagtggcggtaacattttggtggcgtacatccctattttgttggggcttattgcctgctctggtatcagcacgaattaactagcttttgccacaagcttggtgttagtttgtgagggtgaataggccagtgaaattgttctgctgcttagcatagttggatgccaattgatctatagggttagaatgcattttagcttttcctttgctaatcaaattgccaactgctaatcttgatccttggctgttgatgcacttttctgctcgatgcatgcaaagagattatttcatttatagcacaaataaattggaagcagcagctggttgcttcttcaacatgcgcattcttattgcgatgtgccaatatgtatatatgcctgctc

SEQ ID NO: 173261 - DNA, 281 bp, Zea mays
  Clone ID: MRT4577_89597C.1
ttttttttttttttttttttttttttttttttggggttttttttttttttttttttttttttttttttttgaaagcacaacagcggctaatataacaccaattatttttttaatcctatcgggggtcattaatcggcctcataattaatggatactactaatccacatataacatcagcagcagctccgggtggttttgttcatcttcccattttttactagccaccgttcgcggcctttttttctggtggggtacttatttcgtttcattagccaacccg

SEQ ID NO: 173262 - DNA, 255 bp, Zea mays
  Clone ID: MRT4577_89598C.1
gttctagatctctggcatgggcccgagtgattggcccttgatgtggaggtgctgctggtgtagtcatactcatagtgatgtcctcatcactagcaccgcttaatttttcactgaaataagcaaccggtttccttcttgtaacaaaaaaaaaaaaaataaaaaagtaaaaaaaaaaaaaagggggggcccccgattatccaattcgtcacccgggactttatttcgggccgggaacctgaaggggtaccatttttc

SEQ ID NO: 173263 - DNA, 378 bp, Zea mays
  unsure (1)..(378): unsure at all n locations
  Clone ID: MRT4577_89599C.1
aaaaaatactctttttatgcacgcgtatttttcttggntcctttaaacggccggcttttttgtgttttttttttttttttttgtaaaagaaagttaagaaatagagttttgtagataatatatggggagatgataagagaagaatagtaaggatgagggtgtatgttnttaattattacggggaagggtttgtgggtaaaatggggagagaggcatttgttgaaaaaaggataagttgttaatattatttataaattgtgttttatatgtgaaggtggaataatgaatagtagtaaaagagtatgttggaatttggaaagatatattggtgaagaataaagaaggggaaaaaaaatgagattgagaattgagggattt

SEQ ID NO: 173264 - DNA, 654 bp, Zea mays
  Clone ID: MRT4577_8959C.1
cattgggtacctcgaggccggccgggaatcacacactcgactctcctctctcgatccgcaggctttgctagctctactccacccctctcgatctcgaattgtagcagtagctttcaggcggtcatggacgcgagcgcatccggagccggcgggaaggcgaagaagggcgcggccgggcgcaagggcggagtgccgaggaagaagtctgtgacgaggtccgtcaaggccgggctgcagtttcccgtcggacgcatcgggcggtacctgaagaagggccggtacgcgcagcgtgtcggcacgggcgcccccgtctacctggacgccggcctcgagtacctggtcgccgatgtgctggagctgggcgtcaacgctgccatggacaacaagaagacccgcatcatcccgcgccacgtgctccttgtcatccgcaactgcgaggagctcgttaagctgctgttcggcgtcgccatcgcccacggctggcgtcctccccaacattaacccggtgctcctgtgcaagaagaccgcgtagaatgtgccgggctaggaggacaagtcgccctagaatgccggcaagtcccccaagaaggcatacaggtgcgcctttaccgctgtgatgttgaatgctcgcgttcagtagatctttacgactgt

SEQ ID NO: 173265 - DNA, 224 bp, Zea mays
  Clone ID: MRT4577_895C.1
gacggaggagttcttccttaattccgagagaagatagcaatattctgtttttttccttccctagacccttgcccaagtctaggcttaatacatcagacataagcgagcccacacgcgagccaatacacgacagcccaaaagtaaatattaaacccagtctggcccaacgacgcgtggatttggtcgacgagtccgggcaccacgaccgcgaggagcacttgagc

SEQ ID NO: 173266 - DNA, 251 bp, Zea mays
  Clone ID: MRT4577_89600C.1
ctggaaatgtggctaaaaagaatactgtgaatggaacagggactcctgtacatattagcactttgcaggttggtgagaccagaagcaacagagcttgtacttctaagtctgatctgagatctaatgacttcagcattgttggaagactaccaagagattttgaactatccaattatgactgctatggataacccattgaagttaaccacggacttaggacatctcaggctaagaacagctagaagctcccc

SEQ ID NO: 173267 - DNA, 315 bp, Zea mays
  Clone ID: MRT4577_89601C.1
ctccgggggttgccagtgggctttttttttatttaagggccatggccccgaagaaatctcaccagggcatgcgggtttgcttcagggaaaccccgccatttcacaggttgaggggactaccactaccagggcactttacagggctctgcagcacaccttaaacaatggaaggccacatttggcgcgcaactgtgggcaccagacaaaaacaacctctcacgccccccccccgattttaaagaagaaccgcaaacgggccccccaacgcaagcgcagaatcggttttcgcgggccccgtaacgtgaaccggggcca

SEQ ID NO: 173268 - DNA, 267 bp, Zea mays
  unsure (1)..(267): unsure at all n locations
  Clone ID: MRT4577_89602C.1
gcactgcancggncgccagccgagccgggccgggcccngcncncgccggcagcgccccaaaacacacnccgccanggccggcacgngcgcccacgacgaggaccaccgcgcgcagccggcgngggcgcaggcgccggccgcagagggccagcacgaggccgngcgcgccgccgcccgcggcgcgcacagggacgacgccgcganccaccgaccgggcaagccccagcgccgccganacggcgccngggccgaaacgacgggcgccac

SEQ ID NO: 173269 - DNA, 1010 bp, Zea mays
  Clone ID: MRT4577_89603C.1
ttccagttctttcaagcagttcttatctgaaggcgaggaatggttgaaaccatatgcggcattttgctttttgcgggactttttcgagacatctgatcacagtcaatggggtcgtttttctcagttttccaaggataagcttgacaaacttatttgtgaaggtactttacaccatgacattatacgttttcattactatgttcagtaccatctatatatacaattatctgaggcagcaacatatgcaagaaagaaaaatgttatcctgaaaggtgatttacctattggtgttgataggaatagtgtcgatacttgggtatacccaaccttgtttcgcatgaataccgctactggagcgcctcctgattattttgacaagaatggacaaaattggggttttcctacatataactgggaggagatgtcaaaggataattatgggtggtggcgagctcgtctgacacagatggcaaagtacttcacagcatacaggatagaccacatcttgggtttctttaggatatgggagcttccagatcatgctgcaacaggtttagttgggaaatttagaccttccatccctcttagtcaggaggagcttctaagtgaaggtctatgggattttaatcggatgagccaaccatacattcgtcaggaaatactggaggagaagtttggatccttttggacagtcattgcagccaattttctaaatgagtaccagaagcagtgttatgagtttaaagaagattgcaacacagagaaaaagattattgtaaagattaaaacaagtgctgaaaagtcactgtgggtagagaaagaggacaatatccgccgtggccttttcgatttacttcaaaatattggtcttattaaaaattcaaaagacttcacaaaattattttcccggtttaacctggaagacacattaaagtttaaggacctttgtgaacaccacaaaaatgtgcttaaaagatatggttatgactattattttggtcgccaagaaa

SEQ ID NO: 173270 - DNA, 839 bp, Zea mays
  unsure (1)..(839): unsure at all n locations
  Clone ID: MRT4577_89604C.1
tttcaaaaaggcgcacatatcgaggagttccaacctctgtttgcgtcgcttagccctctaaagcagacaagtcgcatacgcggactcaatgcgacgctcgtgccgtcatggacgcgctcattccacgcttctgcgaacttgagggccgttgacctatcataccgacttcacgatgactcgggcaaggccaagggcgatccaattgtgattatacacggtttgtttggcagcaagcgaaacaaccagagtgttggaaatgcaatcgcacgcatcctcaaacgccccgtctacgccatcgacacccgaaaccacggcgaatccccccacgacaatgtccacaactacaccgtgctcgccgaggacgtcgaagcctttctaaaaaagcatgagctgaaaaactcaactctgataggacactccatgggcgcaaaaatcatcatgacaatggccctccgcaacccagattgctgcgccaacatcatccccgtggataacgcacccgtcgacgcggcgctctcaagcgacttcccaaagtacgcagagggcatgcaagccgtggaaaaggcgcagcccaagagccaaaaagaagcagacaaagtcatggagccgtacgcaaaggatctagccgtccgccaattcctcctttcaaaccttgtgcgaggcgcacccggcgaacccctcaagttccgtatccccgtccgtattctgaccaaagccctgaataacatggccgacttcccgtttacgaatcccgatgaggcatcgtttcatanacctacgctgtttattcgaggcacganaagtcactatgtgagcgatgagacgttgcctattatcgg

SEQ ID NO: 173271 - DNA, 369 bp, Zea mays
  Clone ID: MRT4577_89605C.1
cccacgcgtccgcccacgcgtccgcccacgcgtccgcccacgcgtccgcggacgcgtggggaaaggtggggttttcctacatataactgggaggagatgtcaaaggataattatgggtggtggcgagctcgtctgacacagatggcaaagtacttcacagcatacaggatagaccacatcttgggtttctttaggatatgggagcttccagatcatgctgcaacaggtttagttgggaaatttagaccttccatccctcttagtcaggaggagcttctaagtgaaggtctatgggattttaatctgatgagccaaccatacattctgcaggaaatactggaagagaggttggatcctcttgacagtcat

SEQ ID NO: 173272 - DNA, 285 bp, Zea mays
  Clone ID: MRT4577_89606C.1
cgtagaatattgtgatctttgttttttctgcacaattcttatgtgggagttttttatcccccaatgcaatttgggcaggaagatgttagggaaaccccttgcttttatatgatgagtagtcctccagagctcacctaaaaagaagagctatggggagatcctgtttacaaaaagttgcaagcaaaagaccaaaacaaattggagtgaaaaaaatgataccttaggcgttcttttttaacctatggagccctgctaactttttgccgaggttaacaaaaaaagatt

SEQ ID NO: 173273 - DNA, 631 bp, Zea mays
  unsure (1)..(631): unsure at all n locations
  Clone ID: MRT4577_89607C.1
cccaatttaaaatttactacaggaagaaattcagcaggcgaagaagcaattggataaaaaggatgtcgactacgaggcagcattgtccacaaaattgtcgattgctagaaaaatattcaatttagaaaaggaaaaagtgctaaactccagttctttcaagcagttcttatctgaaaacgaggaatggttgaaaccatatgcggcattttgctttttgcgggactttttcgagacatctgatcacagtcaatggggtcgtttttctcagttttccaaggataaggtattcagaatattattctgcatttggtacttgtatcttttctctcactatagcttgctaagaacatgttgttctatttttttgtgagagcacatgtttatgagcactaagatggtttccctttgtaatgtgtttcagcttgacaaacttatttctgaaggtactttacaccatgatgttatacgttttcattactatgttcagtaccatctatatatacaattatctgaggcagcaacatatgcaagaaagaaaaatgttatcctngaaggtgatttacctatttggtgttgataggaatagtgtcgatacttgggtatacccaaccttgtttcgcatgaataccgc

SEQ ID NO: 173274 - DNA, 518 bp, Zea mays
  unsure (1)..(518): unsure at all n locations
  Clone ID: MRT4577_89608C.1
gccagggggcaccaattttccttgctgttcctccagctagcgtggcagacgcataaaaaaatatttgcgaaaaagaatcgcactatctacatgacatatgaaggagaagagactagctagggaaggagccgggagcaattccactactcaggccatccacgggacattcctccgctccgcctccgccgccgcccgtccccatccggctccagtaggctcctcgtcgtcgtcctcccccctcgtcgcgccgtcgtcccgagctcgtctggcaagcgcgcgcgcgcggcacgggagacagagtcgctctggcgaggagcgggattgggatccttgcatgcatggatgcggcgcagtggcatcaggtaagccgatctgcacggccgtctcgatcgaaccaaacaaggcgcgcgctagctgcagcgtgcatcggggccgggagccatgagtacgagcagatctctcgcctgccggcttggatcttggtgtcttgttcttggttactctagcggttcttcgcn

SEQ ID NO: 173275 - DNA, 299 bp, Zea mays
  unsure (1)..(299): unsure at all n locations
  Clone ID: MRT4577_89609C.1
gccancgcgtggttcgttaggaaaagaaatcgatttccccgnantcggtctcntcggtgctagagaaatataagccggcggcttccntcctcattcggtgaaaagnagggcggtanggnttggaggncncctgactcacgacacgagcagcagaattcgttcaggggcgtggttgcnncgagaagtccggggcttcgtggganctgaaaattgatgtctaatggagtccaaggtggcaagnagaatctagcatagtcgtnctccctgatgtacgagctccccttggtacanaatcgang

SEQ ID NO: 173276 - DNA, 1054 bp, Zea mays
  Clone ID: MRT4577_8960C.1
aaaaacttcagaatcttaacatgttacagttagttctcagaagatttcatgtgcatcataattctaaaactttagcccctttacaccaagttgtgtacatgaagaaacacaagcggctctttttttaatgagcccaaggacgaaacacaagcggctcttccgctattcgtattttttaatgagtccatggacgtttccagcaacttgacatgctgtagctaagctgtagatctctctaggagctgctctgtagccggatatcacacataaatttttttttgacaatctacgtggaccgttcaagtaccatcgtatggctttttgacaaggcccctgaacctgtgaaggtctgatctcattctgatcatagtccaagccaacgtccaatcttatagatggcattgttgtgtggctatacaacggtacatgaacgtaatgtgcaacattggtcctgcagccatagcgagcagcagctccacgtaggcgcctagataaacgctccaagaagctacgcatgttgtggtcacccacaatcaaaagctggcgatcaatgtcctgtaccgagcgtctcaatgtgttacccactcgatccaagataggtgccgcctccacttgggttcctagtctagtggtctggtcgtactccgtgtcttcatcgtcggaagaatcaatgtcggcgtagtcatccgatgtccactgctggcgaagcttacaatgagtcgcaccctggtaccaagcttggtaccgcctgtagtcactgttgttgtgcaactcatcgttttcatgcacattctcctcagccaaatcccactcttcaataaattccagatgatgttgacgaaagtctgttatcttcttttgcttccgccggtcaaatctgtcactggaattaacaatatcctatgccaagtatcagcaagcctctgcagacaaagccaagaagcaccctcagtgggagtgcctgcccatgtccattcatgtatgacatgtacctgcaacaaatgcaatccctagctccagttttacgctcctattggttgtcgcggacgctggg

SEQ ID NO: 173277 - DNA, 108 bp, Zea mays
  Clone ID: MRT4577_89610C.1
gttgaccctttggtcacacactagattctctgttatagtggaactcatcttaagacacccgcagcatactttaccaaatgatccggcccagacaaactccccaccaga

SEQ ID NO: 173278 - DNA, 173 bp, Zea mays
  Clone ID: MRT4577_89611C.1
gagaataaatttttttccatcggaattggtttaactatgttgggcgtatcctaggggggggccgatcctcaatggttcaggtggtagcacgtctatgtgtgtgccgacataacctttatcaaataatgtcactcttttggcgcgattacagaccaaaaaaatgctttacaaag

SEQ ID NO: 173279 - DNA, 372 bp, Zea mays
  Clone ID: MRT4577_89612C.1
aaaccaagtaactggcattttcctccgggttccaagttttagcaccccacccctcggtttcggcattgtcgggccccgccaggggcggcagaggttttggccagagggcggccccaagccccaccgaagaggtcctgcccgccaccttccagggcttaaccaacccgccattccgaaggctgtctagaaggggcggcttaaagcccttttccggcctattttacaagaagacccgcggggggctcaaaacctttctgaagaacgtaatccgggacgccgtaacttacaccaagcacccccgccgaaggacctgaaccgccatggttttcttttaccccctcaagcaacagggccgaaccctttacggttttg

SEQ ID NO: 173280 - DNA, 431 bp, Zea mays
  Clone ID: MRT4577_89613C.1
cccaagcgcccgcaccctccagggccgccaccttcctcgccgcctcactccctctgaggtcgcagatccgcccggttagacgaagccgcccgcacccatggcctccggtgagctcgcctgcacctacgccgccctcatcctcactctgtggctaaagcgatcaccgccgagaagaccgccaccatcgagaaggcggccaacaccaagggcgaggcctacaggccggcgctctccgctaagcccccggagaagcgcagcgcagaggaccgaacccacgccgcgggaccaggaggcggagcagcaccagaagcggcgcccgccccagcggggggcgccgcagcagacgccgcccccgccgcagaggagaagaaggaagagcccaaggaggaggcggacgacgacacgggccgcagccgggccgacagagaccc

SEQ ID NO: 173281 - DNA, 251 bp, Zea mays
  Clone ID: MRT4577_89614C.1
acctatggggtttttggggggaaaggggaggagcgagtgcataacaaattcacattagatcagcgttctagatggatctttttctccttcggttaaaggtgtcaccccccccccaaaaggaacgtgggactggggatgcttcctgagagttgggggtgggaccagccttttatattcatccttgcacaaaaaacggggttacgtgtaagagttctatgtgcttctccgacctttacaccaagggatggggg

SEQ ID NO: 173282 - DNA, 544 bp, Zea mays
  Clone ID: MRT4577_89615C.1
cgctacttcccctcctccgcgacctcgccgtcgccgcagccttggccatgtcgatcttcgagtataatggtggggaagaactgtttcgcgatcgccagcgaccggcggctgggcgtgcagcttcagaccatcgcgacagacttccagcgggtgttcaaggtccacgacaagctttacatcggcctctctgggctcgccactgacgcccagacgctgtaccagcggttggtgttcaggcacaagctgtatcagctgcgggaggagagggacatgaagcccgagacctttgccagccttgtctctgcgctcctctacgagaagagattcgggccatatttctgccagccagtcattgctggacttggagatgacaacgtaccatttatttgtactatggactgcttaggtgcaaaggagctggccaaggattttgttgtatctgggacagcatcagaatctttgtatggtgcttgtgagtccatgtacaagccgaacatggaacctgatgaactcttcgaaactgtatcccaagctctgaattcat

SEQ ID NO: 173283 - DNA, 1156 bp, Zea mays
  Clone ID: MRT4577_89616C.1
tgagagctcggagagaaggttggcaaaaaaaaaaaaaaaaaaaaggataagcccaccaggccaccgccgtcgccagtcgctacttcccctcccctccgatcctcgtcgccgacgcatccacccgaaccctcctccgcgacctcgccgtcgccgcagccttggccatgtcgatcttcgagtataatgggtccgccgtggtggcgatggtggggaagaactgtttcgcgatcgccagcgaccggcggctgggcgtgcagcttcagaccatcgcgacagacttccagcgggtgttcaaggtccacgacaagctttacatcggcctctctgggctcgccactgacgcccagacgctgtaccagcggttggtgttcaggcacaagctgtatcagctgcgggaggagagggacatgaagcccgagacctttgccagccttgtctctgcgctcctctacgagaagagattcgggccatatttctgccagccagtcattgctggacttggagatgacaacgtaccatttatttgtactatggactgcttaggtgcaaaggagctggccaaggattttgttgtatctgggacagcatcagaatctttgtatggtgcttgtgagtccatgtacaagccgaacatggaacctgatgaactcttcgaaactgtatcccaagctctgaattcatcaatagaccgtgactgccttagcgggtggggtggctatgttctgattgtgtaagttcactcagtcatccgttgtcacattttgagcaccaatcttctattcccgtgatatgtgcttttgttgggttcaggacaccgactgaagtgagggagcatgtgattaagagcaggatggactaaatcatggccactatcactataattcttagctgggttccaatgcttagaccaatgttgtgtttggattctgaagtaacattgtatcatcacagctggtatgagaatgaacggttgttttatttacccctatcttgcaagacttatgcctggattccacctgaattgtggaatactgaattgataatagcctagatctgttgttctcttacagaaacgtgaatgaggttaacatgtgctgtatcgcattctatggttgcctatcgaagagagcatagatccctgtatgctaatactctg

SEQ ID NO: 173284 - DNA, 1135 bp, Zea mays
  Clone ID: MRT4577_89617C.1
gcacgaggttcgacgcagaaccaaacaagccgggactggacgatcagccctcaaggggacgcggctccggcgtggcatcgctggaccttcttgctcaccaagaagcccaacccggcctccatcaaagcccacaaccgtcgtagtcgctacttcccctccgatcgtcgacgacgacgcatccacccgagcccttctccgcgaaatagccgtcgccgcactgccgcagctccggctatgtcaatcttcgagtacaatgggtccgccgtggtggcgatggtggggaagaactgcttcgcgattgccagcgaccggcggctcggcgtgcagcttcagaccatcgcgacagacttccagcgggtgttcaagatccacgacaagctctacatcggcctctcagggctcgccaccgacgcccagacgctgtaccagcggttggtcttcaggcacaagctgtatcagctgcgcgaggagagggacatgaagcctgagacctttgccagccttgtctctgcgctcctctacgagaagagatttgggccatatttctgccagccagtcattgctggacttggagatgacaacgtaccattcatttgtaccatggactgcctcggtgcaaaggagctggccaaggattttgttgtttctggaacagcatcagaatctttgtatggtgcttgtgaatccatgtacaagccggacatgcaacctgatgaactcttcgagactatatcccaagccctgaattcatcagtagaccgtgactgccttagcggatggggtggctatgtgctgattgtgacaccgactgaagtgagggagcatgtgattaagagcaggatggactaaataatggccactagaattattagctggtttccaatgcttaagaccaatgttgtgtttgtattctggagtaacattgtatcatcacagttggtatgagaaggaacgtttgttttctttatctctgttttacaacacttctgtttggtggaatactgagttggtaatatcctagattgcctgttttacaacacttctgcttggatttcaactgaatggtggaataatgagttggtaatattctaaaaaaaaaaaaaaaaaaaaaaaaaaaaaaaaaaaaaaaaaaaaa

SEQ ID NO: 173285 - DNA, 840 bp, Zea mays
  Clone ID: MRT4577_89618C.1
ttttttttttttttttttaaactgaagtggctgtgacgaacttgctccttgaatgcctgccatgctcatgcagatatcgatcccagtcgtcatgtataacacaaactctaaattaacctaggatactatcagcagtcagatcgaacctttcctagctcctacgcaacgcaggtggctttcatctgacagaacatctacttgctgaagatccactccagccctcgctttggcgcaccaaggagacacctgtagttgcagttgagagggggatgctccatcaactccaacagcctggcccagcgcgcaatcggtttgctgtcgcagcctcctctccggttgctgatgccacccgtgatgcggaacgccgtgacgatagacacggtcacggcaagggcggcgacgacgacgacgacgaaccgcgtcgtcgccgctggcgtcgatgccgttgcccagaagacagaccgcgccagcgttcgactccgctggtcccggcagtccggtggcacggcggcggcggcggcgctcgatgggggctgtttcttgcgcctccaaagggagttggcccgcggcagccgcgcccacctgctccgcagaaagcgggcgaacctgctgccgcgcggcggcggcccgggctgtgtggtcgccgcgggacgaccgccgcaattggatgtgacggagaggaggaggcagcggcggaggcggagcaggagggacatgcgctccccgccgcggccccaccctgggagcaagttctccgcggcggcacggatctccagcccgccacggtacattaggctcagggtcaccgaccacgccggaggtccaggcggcagcgatgcc

SEQ ID NO: 173286 - DNA, 555 bp, Zea mays
  unsure (1)..(555): unsure at all n locations
  Clone ID: MRT4577_89619C.1
gcacgaggtagaascycaaatactgctctcactgcyccactatgcctayggbaaaggyaggcgcgctgagggtgytggcggcccasctggtgsctcytgggctaccgctccyctscgctsyygcwggccygsctgcwgnscagaactgcggctgctasctaaamgyctsctgcascaagyycggctactgcggcmwgmccgchgactactgtggcgamgggtscwascwgsscccgcvcwgcctggscggcggcggcggcggcagtdgtggcggtggtgcgaacgtggctascgytgycaccmcctccyyctycamcgscmycaagamcyagsctgggascggstscgaggscaascacttctacacctggagcgcgtycctgagcgcwgtcaagggtgacccaggctttsccyatgsggggcygcaggygcagggcaascgcgmgctcscdgccttcytyscscacsctawgsaggagacggggsatttytgctaaattagcgagmttaaaaagagcaaagcytactgcgachtgaccaagagggagtggctgt

SEQ ID NO: 173287 - DNA, 452 bp, Zea mays
  Clone ID: MRT4577_8961C.1
ctttcacaaccaaaccatcaaccaaccaaccaaccatcaacatgtctgacaacctccgcaagggtctcggcgagcaggcgtcggagaagatcacccccgactcccagaagtccaccacctccaagatcggcgagaacgtctccggtgcagctgacaaggcggccagcgctgtccagcctgagggccagaagtccaccacccagaaggtcggagatgccacccgtggcggctccgacaacgcccagaaccagggcgagggtgtcctgaagcaggctcaggatggtcttagcaacgctgccgctggcgtccagaacgctctcggcggtggcaagcagtagattacttcggtagtgctgttgcggttcgactttcccttgcggcttagattggccaggtggatatgattatacccctatgatacgaattcaatgaacaaaacctttgatcaaaaa

SEQ ID NO: 173288 - DNA, 345 bp, Zea mays
  Clone ID: MRT4577_89620C.1
ggttgttggtatatacatatatatgacctaataaggaaagcagaaactctgacgatgccgggtgaaaaagagaccaaaccaactggcactcaaaggcggaaagcgggatctcacgccgaggggccatgggctttaaccgggcgctgaagaggggggtgaaacccgggaaagtggccattgtaaaggaagatataaaatacggcgaagacgctgacgcccatgcaagaaacgaaaccagggtggcgtattcagaagggggggaatgcgaccgcggcaagccgggctgtggctaaaacgccggccacaagtagtaggacggcaaacttgacggcactcccaaggggg

SEQ ID NO: 173289 - DNA, 158 bp, Zea mays
  unsure (1)..(158): unsure at all n locations
  Clone ID: MRT4577_89621C.1
taatanttttttttaaagagcttaaaatagatgggttgaaaatactgcagcgggggtccgactctgtcctgtttacagagaagatatatagataggttcatgttcaatgagtatagccgatctaaacttgctgagcttatagagagagaggtagagag

SEQ ID NO: 173290 - DNA, 880 bp, Zea mays
  unsure (1)..(880): unsure at all n locations
  Clone ID: MRT4577_89622C.1
ggccgtgcactgcactgcaccgcaagccgtcgtcaccaagagggaggaatgcggtaagcggcaagcctattccgtcttctactgtcctgttccgccgaacacgtcgccaggtctccttccgccagagcacgccacctcgaatccccctccctgctcacgtgctcggcgactcggcacctccgccccacgtctttctccaccgaccacctgccccgacccctcctcgaccggcgtcgagtggggatccatcaggactggttggggaaggatcggcatgctctacagagaagtgttgcagagcgttaaaagcagtttgggaagactatagaaatacccaaaaagatcgccccctagcttctgaatccttcaattctctagcctgtaaaagaacaaagccaggggtagctaaatacgacaaccccagcacttactcattatctttgctgacagtatggcactgaaaaatgtgatccgtgtcattttggtgctggcccatgtgagcagttgtctggctcgattagggaacatgttctctcctggcttcgtttcagcatcaaagccattgccaagctggccaattttgagtgcaggaacatctgtaactgtggctcttgttttgtcattgtttctaacctttgagcatctgtgtgcataccatcaacctgaggagcaaaaattcatgattggtctgattctgatggttccagtatatgctggtcaatcattcttttcattactgaattcaaatggtgcattcatctgtgaactgatgcgtgactgttacggngcatttgccatgtattgtttcgagagatatttgatagcatgctttagtggagaagaaagtaccattaggtttatggagggtcggcttcaatca

SEQ ID NO: 173291 - DNA, 401 bp, Zea mays
  Clone ID: MRT4577_89623C.1
cccacgcgtccgcagatagcagcatagactgcacaatgccgcaaccaacaatggcgtgacggaatatcgcgcctgccttattctcgtaggtcttactgcacgtgctggtaccgggaccagtttaccgtagtgtacacaagctattatagcatcagttctatgcacgcgtacatatgaccagcgacgccttgtgtatgatggcacccatgtactactgcgtatgcgatccaacacgcaatggctactggacatataccgctatcagcttaggctctacgacaatcatggtgcttacgacagagactacctttgctgcattgattgactccaaatataccaggcacaacaactacgacaacacgtgcgtagcacaccttgatgactactatcagcaacagata

SEQ ID NO: 173292 - DNA, 1997 bp, Zea mays
  Clone ID: MRT4577_89624C.1
gcgccacgtgttcgcgcactcagtccgcaccagcatgcaaggcgtagctctctggcgaaactatccgagcgaagcatagcagacagaacagcgctcgctgttcatgtcaatactggtaatgtgcatgctcattggggatggcatactcactcctgccatttcagatttatcagctatccaagggttgatggggccatcgacatcggtcaggaattctgtagtggaagctctgtctgccgtgatccttatcggcttgttcttgctgcaaaagtatgggacctcgaaagtgagcttcctgttctcaccgatcatggcggcgtggaccttcaccactccaatcatcggcctgtacagcatcgttcattactaccccggcatcttcaaagccatctcaccgcactatatcgtccgtttcttcctgagaaacaaaaaggaagggtggcgcatgctcggtggaactgttctatgcatcacgggcgctgaagccatgtttgcagaccttggccacttcagtaagaagggtattcagatagcatttctgtctagcatatacccttctctcccacgcgtccgcgctgggcaaacagcgtacctcatcaacaacgtcaacgacttcagtgacggattctacaagtttgttcctcgccctgtttactggcccatgttcatcatcgcgacgctggcggcgatcgtcgcaagccaatccttgatatccgcgacgttctcagtcatcaagcaatccgttgtcctggactacttcccgcgcgttaaggtggtgcacacgtcgcagcacaaggaaggggaggtttactccccagaaaccaattacatcctcatggtgctttgcgttagcgtcgtactaggcttcggagctgggaatgcgatcgggaacgcattcggtgttgtggtcatcatggtcatgctcataaccacagtcatgctcaccctggtgatgatcattatatggagaaccccgcctgtccttgtggcgctctacttcgtgcctttcgtcatcatggaagggtcttatgtcagtgcagtcttcaccaagatccccgaaggcggctggctcccctttgcggtgtccatcatcctggcgctggtcatgttcggctggtactacggcaggcagcggaagacggagtacgagatagcgaacaaggtgaccgtggagcgcctcggcgagctcctggcgaagccggaggtgcagagggtccccgggctgtgcttcttctacagcaacatccaggacgggctcacgcccatcgtcggccactacatcaagaacatgagctcgctgcacgcggtcacggtcttcgtcaccctccggtacctgctggtggccaaggtggacgagcgggagagggtcctcgtcgagaggttgggaccggacggggtgtacggctgcactgtccagtacgggtacgcggacagcctcagcggcggcgacctcaccgcgcaggtcacgggctccctgcgccggcactttgggacgtcggaggccggggcggaagaggccgcgcgcctggaggcggcgaggaccaacggcgtcgtgcacgttcggggtaagatgaggttctacgtgggcgaggacgccgggtggttcgacaaggtcatgctcgggttctacgagttcctgcacggcatctgtcgctccgcgctgccggcgctggggacgccgctgcaacagcgagtcgagatcggcatgctgtacaaggtttgatcgatcaaggttatcaaatgcgcacataaccaatatacgcaacatcaaaataagtcaatgagtatacccgtggcgtgtcatagtgtgattgtgttcaagaaattcacatgcatgaacagaacctagtaaaaagctgcgaatgaagctgcacaaattttgttttgccggtttgtatggcatgacatggttactggcaaggacctttgtttcactttttcagttctgcagcagtgcttttcggttgccttattcaaaatagaacagtttgcatgcc

SEQ ID NO: 173293 - DNA, 326 bp, Zea mays
  Clone ID: MRT4577_89625C.1
taaataattttgccgtatcacatcttaaatgtgaaaacgagtttacaaacaaaatcaatggccaagagcctggacctaaaactgccttactatcaagtaccagaaagtctacatgccacgctcaatagccaccctcaaccccacgtttagagttaccgactgggaagacgcacatacgaactagactgatacttatcgccttcagaccggcctaagctgacaggcattgcggtgagctgcccttgccatctagcaatacatgcaaacattccatcttgaggccacaaattaaccggtgacaaggcttcatccacattggaaaatat

SEQ ID NO: 173294 - DNA, 252 bp, Zea mays
  Clone ID: MRT4577_89626C.1
ggctattagagggaactgtccattttaaagaattggatgagattattgaagatgcaaaagcaggattggagagtgaggttgagccacttgatggaatgtcggcaaagaatgcacatggtatcgtaagcaggttctcagctggtatcgctgtgcagaaactgatgctctacagcaattcaatgagctgactagtggttgagttctcctgacctgcatcttcgagattcattacctggtgcctgtagatttaaa

SEQ ID NO: 173295 - DNA, 458 bp, Zea mays
  unsure (1)..(458): unsure at all n locations
  Clone ID: MRT4577_89627C.1
agcagtggtaacaacgcagagtactttttttttttttttttttttttttttttggttttttttttttttttttttttttttttttttttttttttgggntgggaaccaaacacccccggggagagaaaatcaacaaacaacaagggcaagggcccaaggctgagcgaacaccgggaaaaaaaaaaaacctaaaaaccggacactctctttacacacttccaccattcaagacaagggtggcgacagaaaaggggctaaaaccacaactagccgagccccttgcggaagacccccccgacggagcccaccaaggcgaaggggcccgccaccaaacaaaccaccccgaatgcctgaagcgcgacccacgtccccggccacgggaggaccccgcgccggaccgcaaacatttcgacggggaggaaaaaggcgaggggcccaaaaaccccccgggaccctgg

SEQ ID NO: 173296 - DNA, 395 bp, Zea mays
  Clone ID: MRT4577_89628C.1
aggaaggcagccaacttatggttttttaaacgggtgggattaaaaacccctttatttaatttggccaccttcaagaatttttttattttaatacaaaaatggctgcctttttcgactgggggtttgatttcttttggggcttgacttggtaaacattgggggggaacgaagcccccgccttcttttgggttgcatttgggggggggtaaacggcaccggtgggtttctttatccccgcggggatgggccttacccccccctccaggtaggcgaagagttcgtcgcgggttcacccctgcacggggtgggacttgaaagcccagaccaaactgcacccctccgtttgggttgccagcgacgacgctcatattggggacgtagctgccgaaccccat

SEQ ID NO: 173297 - DNA, 996 bp, Zea mays
  Clone ID: MRT4577_89629C.1
ccggccggggctcatagttttcctcaccgcagctgctctcacatgcgggagaaaaaaaaaaggaaagaaagaggagaaagatgaacagtgggtttccggtgacgaacacgcctgtgtattcatcagcctgagtgcctgactgcctgagcacaaattcctgctatgtgtagacagtagaccacgtaccatgtcctcgcctcctccgtgctcgactgagccgtccccgttcaccgcgcaagcaacccccggcaacgacgccgatcagcgccgctcccaccgccccctccgcgctcggcctacggcgccaccgcctctatccgtctcccgcattcgagccgcaacggccgacaccgcgccccgccggccctccttcccgagactgccgccgcgtccccctcatcgagtcatcggcagcaactcacggcctacggcggcgcatctggggcttggagcggcagtcgcgtggatgaccctgcccctcgaggcagcgcagtccgccccggctgcaaccggcgctcagccatcgccgctacgttccccacttcctcgcgcatcaagagtcttattcccagccattggagacctcctccgctccgccattggagaaacgtgcaagatcgtcccctttgtttctgatgggcatttctacgagcaactggtggtccgcaggtgtcgctggcctggggttcctggagactggctacctcacttacctcaagctcacgggctccgagatattctgcccacggcaactactccgtagactttgctcaacgcagcagatttcattcaactgcagctcggcgcagcagatttcatcagtaaatagatgttgcaggatggagcatagaaatgtacatttcagtattagttgaaccccaagaggttggtaaacatctaataccttcctattccattattggtgaacttctgttgctatgtattacataaacaaatctcagcaatcgaggtaaaaatttgttgtccaaacttggg

SEQ ID NO: 173298 - DNA, 374 bp, Zea mays
  Clone ID: MRT4577_8962C.1
accccccccctgcaccccgtggcgtgccacatatcaccacaagctttttcatttttgccaaccgcaacctgaacttgggtgtgggttacattatatcttcgcataagaccaccatctacataactatctactttgggctcttttctctaattattatatctataatattgttcatgactctgtcaattacaattttgatgatgattaacacaagaagaacgtggatgccaataacttgctggaaaactactactacaacatgcgcatcactatcaaggactaaaagatttcgtccaatctgacggtctatgacatttaaaaatatttattactccatttacgcggccatcaactgtctgtactctaaccatttc

SEQ ID NO: 173299 - DNA, 327 bp, Zea mays
  Clone ID: MRT4577_89630C.1
cgcctgacctacccgtacttaattcctggatccacccattcgtgctgctttgctgccgtggcccgtgcgggggagttagttcaggaacccgggcgggacatcccctcttcctccccggccggcgatgtcgtcttcgtcttccgcgctggccaaaggcaagtcggcaatcggatccccaatctcatctgccaaattccaggccactacgaaattattcttctactccttcacaggtcagagtgctaacccgaatcaaatcacaccgcactttatccccaggttctttcggagcttccctgcactcgaaacgcactccatgtcagccat

SEQ ID NO: 173300 - DNA, 257 bp, Zea mays
  Clone ID: MRT4577_89631C.1
ggccgggacctcgcctccgttggcgtctcatctcatgctgggactctggtggggtggggattgacttcgctatagcccaatccagtcagcagcagcttcccgccgccccatgcctctcgcggcggggcgatgggcgacgcccagccttctcagtccccctgttcggatcgatatgaccccacgcgcgcgtgagccctcgagcccgcagcgacagcgactggacgctggatcagtcgcgaggctcccggggactctcg

SEQ ID NO: 173301 - DNA, 425 bp, Zea mays
  Clone ID: MRT4577_89632C.1
cgcctgcgagagctgggccggtatatattggcgggacggcgagttttttagccgggggccgcacttcttttgcatgcggtctattttaaaaacaagggccatatactcgccagtaaatacggaaaataatcctgagcccatcttattccgtgtgcatgggctcaaaccacaggtatcaagacaactatagaaaaggaaggcaaacatccgattacctgagggcgtacggatcgtacgtactgaccaagctctagggcaatcgaatcaaggtctggtggagggatccggaaggcattgacatcactgacacaacacgcgacgaggcaagcgacctggatcgcgccctccgtgaccagaacgaatacagagaccgcgagattgtggacatgaatgacgagaacttccactgtatctagggcaagcac

SEQ ID NO: 173302 - DNA, 571 bp, Zea mays
  Clone ID: MRT4577_89633C.1
gccaaccagaaataagaagttacatttcacagattctaatgtgagaaaaaaaaaaaaaaaaaaaaaaaaaaaaaaaaaaaaaaaaaaaaaaaaaaaaaaaaaaaaaaaaaaaaaaaaaaaaaaaaaaaaaaaaaaacctaaaaaaaaaaaaaaaaaaaaaggtttttccttcccccgggggaccgttaaaaaggggaaattttgaaaatttcaatacaaccagggggacctcaacaattctcaaaaagggcccaatcgcccctaaagggagcttaaaaaaaattaatggcccgtttttaaaaaatccccgacaagaaaaaaccctggggctcccaaataaaattccgattgagaaaaatccccttttctcaacctggaaaaaatagaaaaaagcccacgcctcaagcacctttcaaaaaattctgcaacactaaatggaaaactaacaccccttaaaccacgcaataaaacacgggactgttggggcaaaccgcaacaagacccaaacctattgtcaagcccttaaacccccttatattggattttgcccctttctttctaacaaataaaa

SEQ ID NO: 173303 - DNA, 354 bp, Zea mays
  Clone ID: MRT4577_89634C.1
acactatataagagctatgactgtcaggactgtcacgtcatacttgaaacttcggactcgaggcttggatatgtcttgcttttcgcgcaacaagaagaggaagtgtgtgctgaagaaaagagaagcggatcataagctcgcacagaagtatcgtaccaccatctttttttttttcattctgagcagtcagcgtatcatttactttttcagtaacataattttgtattgtgggtaaggaaaagaaggaaacagtttttttccaattaaaaaaattctaaaacctgggcttcgaagcggacatgggtgtgtgctcctactttatcagcgcatacgctcgaacctatttagtgcaca

SEQ ID NO: 173304 - DNA, 298 bp, Zea mays
  Clone ID: MRT4577_89635C.1
agctcgccatggcctccctctcctctgccgccgtcaccgccccttccttcgccgcagcaagcgccaggcccgcgccgtgaacagagagaggtccttcaccgtgcgtgcttctctccgcaaggccaccggcaccgccgacgtggcaatgactgccaatgacctgcttgccggcggagccatggcccaagaagtgctgctgggcgcatgagacagcggactcgtattcaagcccagccaggtcaccgtgaaggccggcgacaccatcagattcaacaacaacgacggcttcccgcacaac

SEQ ID NO: 173305 - DNA, 579 bp, Zea mays
  unsure (1)..(579): unsure at all n locations
  Clone ID: MRT4577_89636C.1
aattaattgttttcgtgtctcttttaactttgttatcttctaaactttaaagcaggggataataatttttctatgttatatatttgatacctccatgtataaattatataatatttggtgtatgggatgaggcctccatatcagatttcatcctagggcccccaaaattcaggaacctcgctgtgcccatgcagtgtgggaaaagatgcgcgcttcctgtaatcctgtgtgctgacggcgtgcgtgcatatataagcaccgcggaacgacagagatttcaaattttgaaatggtcaaatctaacaccggatgttgtgaggaagaatctcagtgtcctcccaatagacaaatatggacacattgtcactgtgctacatcaaatggatctttcagttaccacacctttaccggaagttcgggcaaatccctaagtacgatccggaagtccaccaccttgaatcctncccctttcctcccttcttcttccctccaccaaaatccaattggagacatgcaccaacgcgacgtaaatccgagcgggaaagaatgacaccttggagagagggcttgaggaggggg

SEQ ID NO: 173306 - DNA, 321 bp, Zea mays
  Clone ID: MRT4577_89637C.1
acccactcgtccgaaaaaataaaaaaataaatatataataaaaattacataaaacactaaaaaaaaaaaaacaaatgaaaagctaaaaaaaacaatttaaatataaatataaaaaaaaaatcaaaccctatctatatctcaaagaacttatacactaatatcttaaagttccagataatgatttctaaaaatgtaatattgcatacatttcactcattcattctgactattctgaatattcagatactgtcgccctaaaattccatataaacatttatcgagcttgttagcaatatatactacttatacatccttacactt

SEQ ID NO: 173307 - DNA, 327 bp, Zea mays
  Clone ID: MRT4577_89638C.1
aaagacccaaagggggggggaaaactcaattacaaccccccaaaaaaaaaggggaaccccccaaaaaaaacccgaaacaaaacatttcattaaggggtaaaccaacatggaaaaagcccaagtttacaattggtttgcccttccaaggcccaaaaaggttttcccaaaaaaacaaaatccttttaaatgcaccccctttaaaaagtaccccctgttaaaaccaaggggccccccaaaaaggcggtggaaccatcccccgaaagacctgaaaccccaatttttttttattgaaccccccccttatttttctttgggggttaaaaattt

SEQ ID NO: 173308 - DNA, 583 bp, Zea mays
  unsure (1)..(583): unsure at all n locations
  Clone ID: MRT4577_89639C.1
gccggccgggttgcgaatcgtccctctgccaaaaaaagggcatcactccattgcacttgcagtgcagtctagctcttgcacccgatcgagccggccttcacttcacgccatgttcagtgccatgtccgccctcctctcctccctggcccggcggctggtggtgcccctccgccgcaggaagagcatcacgtcctccgctttcgccgccagacgttcgttcttcccgtgcggcgcgggccaccgcgacgtcgtccgcgacagctccttcgtcgtcgtcatcaagcgcaagacgctgaggaaggtgatgcccagcagaagggtgggggagcggaagcgcgggcgaggaggcgatgacctcgttgacgacggcgacgagccgtgcgtgtggcggcggacgatcctcctggggcgtaggtgccagccactggagttcacgggggccatacactacgactgcgaggggcagcggnttcggcagccccgcacgccgccgctgccgtcgtcgccgctgctgagccccgtccatccttccaagctccgctatatggaccgcgcataagaggaaccgcacagcagactgcac

SEQ ID NO: 173309 - DNA, 172 bp, Zea mays
  Clone ID: MRT4577_8963C.1
ccgaactccatctatctctaacccacgaacgcttgacacggtggcggtattaggaggcgatgaggcactcaaacgtctagtattcgcaccctaagtactacgggctcggttcccgcgtctgccgtgtctgagagaaccctcagggacgatcaggtagtatgggctgtggtgc

SEQ ID NO: 173310 - DNA, 279 bp, Zea mays
  Clone ID: MRT4577_89640C.1
gcgtgtgcgccaccccaaccctgctattgatctacattggcgggtggatcgaacggttaggcctgatctgcctaatcgccatgagctgtgaggtgaagcccgccgtgagggagatcatcatagaggtctagctcgtcacccgcctcctaggcaggtgatttatttggcccgatcagtacttccgtgagctcattatcggagacctctttgtccacgacatggacatatgctactactagctgctgcacctgtgcttgcacatacatggtagctagttgg

SEQ ID NO: 173311 - DNA, 2315 bp, Zea mays
  Clone ID: MRT4577_89641C.1
cgggaacgcataggacgaactaccgatgcaagctgcgatcgatcagtcaccgcatctccggttccgcgcaggcatggacgacaagtcctgctacgtggccaccggcctctccctggcggccatcctcctcgtcctccaccgcctcgtggtccgtgctggcggcaaggggaacgccgccgcgcggcggctgcctcctagccctcccgccgtcccgttcctcgggcacctccacctgctagcatcggagtgccctctccactcgtcgctggcccgcctcgcggcgcgccacggccccgtgctctcgctgcgcctgggctcccgcgccgccatggtggtgtcgtcgccggagtgcgccgaggcgtgcttcacggagcacgacgtggcgttcgccaaccgccccagactgacctcgcaggcgctggcctccttcggcggcgccgcgctggccgtgtctagctacgggccctactggcgcaacctccggcgcgtggccgccgtgcgcctcctctccacgcaccgcgtggcgtgcatgtgccccgtcatctcggccgaggtgcgcgccatgctgcgccgggtggggcgcgcggccgaggcgacagggcgcgtccagctcaaggccagtctgttcgagctctccctcagcgtgctcatggagaccatcgcgcagaccaagacgtcgcgcgccgacgacgcggacgacgccgtgtcgcccgaggcgcacgagttccggcggatcgtcgacgagatcctgccctacctcggcgccaccaacctgtgggactacctgccgctcctgcggcggttcgacgtgctcggggtgaggaacaagatcagggacgttgtcggcaggagggacgccttcctgcagcggctcatcgacgcggagcggcggaggctggacggcgacggcgacggcgacgagaagaagagcatgatcgccgtgatgctctcgctgcagaagtcggagccggacgtgtacacggacaccatgatcatggcactgtgcgggaacttgtttacagccggaacggagacgacgtcgtccacgatagaatgggccatgtcgctgctgctgaaccacccggaggcgctgaagaaggccgaggcagagatcgaggcggccgtgggcgcgtcccgcctcatcaccatggacgacgtgcccgggctgggctacctgcagtgcgtcatcaacgagacgctgcgcctgtacccggtggccccgctgctgctgccgcacgagtcggcggcggactgcacggtcggcggctacgacgtgccccgcggcacgctgctgttcgtcaacgcgtacgccatccacagggacccggcggcgtgggaggagccggacgagttcaggccggagcggttccgcgacggcaaggccgagggccggctgatgctgccgttcgggatgggacggcgcaggtgccccggggagacgctcgctctgcggaccgccggcctcgtgctcgccacgctcatccagtgcttccactgggacaggatcgatggcgctgagatcgacatgaccgagagcggcgggctcaccatgccccgggccgtcccgttggaggccacctgcaagcctcgcgaagccatgcgtcatgttcttcagcagctctgattggtctatgtgctaaacattctcatccctattctctcttgtgtgtgtggcagtacgaacagcacgtgctagctaaataagctgcgagcaatagctatccgcgtaacagtatggttcgtctaagttgttatctttcaaaagttatctagtactataaacaaattgttcgtgtcttgttcgtggaaggacccggaccgagttcagaccggagcggttcgaggacggcaaggccgagggacggctcctgatgccgttcgggatggggcggcgcaagtgccctggggagaccctcgcgctgcggaccatcagcctggtgctcggcacgctgatccagtgcttcgactgggaccgagtcgacggcctcgagatcgacatggccgcgggcggcgggctcactctgcccaaagccgtcccgttggaggccacgtgcaagcctcgtgcagctgtgcgccatcttcttctggagctctgaatctgatgctgtagtaacatcttggcatgcatatgatccctagtatgctttggctgatggtgtgtgctaaactaaataagcttgagtgcgtaataccctcgtgcgtgttatcttctgtaaaatgtgttgtacagtcgtttgcgtgaacaatcaatcagtagttggttcacacagaaaaaaaaaaaaaaaaaaaaagggcggcctcgagccgaattccga

SEQ ID NO: 173312 - DNA, 757 bp, Zea mays
  Clone ID: MRT4577_89642C.1
gcgaggcgctcaagaaggcacaggcagagatcgacgcagtcgtgggcacctcccgcctactcgccgcagaggacgtgccccgactcggctacctgcaccgcgtcatcagcgagaccctgcgcatgtacccggccgccccgctgctcctgccgcacgagtcgtcggcggactgcaaggtcggcggctacgacgtggcccgcggcacgctgctcatcgtgaacgcgtacgccatccacagggacccgctggtgtgggaggacccggacgagttcaggccggagcggttcgaggacggcaaggccgaggggcggctcctgatgccgttcgggatggggcggcgcaagtgccctggggagaccctcgcgctgcggaccatcagcctggtgctcggcacgctgatccagtgcttcgactgggaccgagtggacggccacgagatcgacatggccgcgggcggcgggctcactctgcccaaagccgtcccgttggaggccacgtgcaagcctcgtgcagctatgcgccatcttcttctggagctctgaatctgatgctgtaataacatcttggcatgcatatgatccctagtatgctttggctgatggtgtgtgctaaactaaataagcttgagtgcgtaataccctcgtgcgtgttatcttctgtaaaatgtgttgtacagtcgtttgcgtgaacaatcaatcagtagttggtttatagcaaattgtggtcttctgaaaaaaaaaaaaaaaaaaggccccta

SEQ ID NO: 173313 - DNA, 672 bp, Zea mays
  Clone ID: MRT4577_89643C.1
aaactatctcacctaaactgcatgtcctgggggggcaatggacattctatagcatgggatcctgggtgaactccctaccgtccttcagaccctacgggaagaagtgtggcgcgcgctacttctacaacccggaggagggaaactactactacggagaggggcataccatgaagacggaacgcatccggatgatccactcgttgctgaggcgctaccgccgcctcaaacagatgaaggtgaaccggcccaacccggacagctaccgcgagctctgccggaaccacgtggactactacctcgacttgctgttgtcctccaggccgggagcacgcagcatgaccatacccgcctgctcaagcgcttcaactgcctggaggactgccccgtgttccacagcccctacagtttctgccacagctatgggatggactacccaacacggagtcggcgagctcaactcacagttcaagacctctcaatgccactggttcctcgggcctgcacgacgacaagaagcgcgaagggacgggcttctgctaccccactgacgtcgtgctcgccatactcgaactgcgcgagcatcaccacagagctcggcatgctcatagctatatcctacatggggacgaagaggatgatgcttgctacactacagagacggcgatgactgcc

SEQ ID NO: 173314 - DNA, 847 bp, Zea mays
  Clone ID: MRT4577_89644C.1
cgtcatccatctctcgttttggcaaccggatcaccttccaatccaacccgcgtctataaatttcctggcacacgcgagcccggtgcgccctcagccggcaattcgtttatagcgagcacaccagcgaaccagagattcatcagagtggcgatggccccgagcgcgtcgatgctgttcctgagctaccaccagctccacaggccgacggaggtggggacgccgccgccgccgccgcgcagggaggcggctgcccccggcggcttctggaggaggatgagcgtgagcagcgtgctctcacccgctttgttgcagtggcggccggagggggaggcgacactgcacgagcgcgacgccggcgaggagatcaagtcatcggcgccggccgacgctgataaggagctggaaagcaagttcgaggaggcgttgcgcctcagctgctggtcttcatgagcatccatccatcatggggaacggagagacgcgagcgtgccgccgaatcgaagcgacctctcctctaaacagccgtcctgtatatcttctccgtgtatcaaaatccacccttttgctttagatttttgtacatttgtaatcgtcacatccgctcaaatatgttatatatattttagtttggagcatagtacattagaaatcgtcacatccgctcaaatatgttatatatattttaagtttggagcataagtctgtacaggtgcacaaatgcacaaacatagttcctaggactgggcgttcggttcttcggttcggttcctcgattctggtagaaattcggttcttcaaaaactagaaccgaaatagtaagaaaaaggactagaatgcccctagggtg

SEQ ID NO: 173315 - DNA, 118 bp, Zea mays
  Clone ID: MRT4577_89645C.1
gccctttgtctgttgtttagaatggatccagggtccaaaacttcattccttatcaccaaaagtaagccccaaaacttaccgtattgcgagacgcaattgggggcagcaaatgccagga

SEQ ID NO: 173316 - DNA, 497 bp, Zea mays
  unsure (1)..(497): unsure at all n locations
  Clone ID: MRT4577_89646C.1
aattcggacgaggcacagccagtcctctccgtctcttcgccgcccgccgacaaataccgccgcattcaagcaagagagccgaccaggagaagatatagtgagagtgagagcccgaggagggggtggcgcgatggggctctcgggcgcgacgatctcggcgccgctcggctgctgcgtgctgcggtgcggggcagttggcggaggtaaggccctgaaggcggacgcggagaggtgttggctggcgggatgtagccgattcgttgggggaccgaagttgagttgttttgggaccgagaagcacgacgagacggtggcggttttggcggctttgggcgtggattttgcggacgaggaggactaccgcaagggcggcggnggcgagctgctttacgtgcaaatgcagtcaaccaagcccatggaaagccagtccaagatcgcttccaagctatcgcccatatntgatgaaaatacagtgcttgatttggttatcattggtt

SEQ ID NO: 173317 - DNA, 343 bp, Zea mays
  unsure (1)..(343): unsure at all n locations
  Clone ID: MRT4577_89647C.1
tctnctgctcatgtactggggcaagccgttctagacgactccgcccatcatgtcctgagggcgagggcaggtggnggttttttttcatgttgtgtctcatgtttggtgctttgaacgtttatttttcctacatttcttactttttttttttcttgatttctaattttttcttttgttttttattgcttcatccttatatacttcgtcagtttatatattttctctttcatttcttacctttattttccttaattttttttttgtaataagtttttacataatatcatttctctaattatatttaattatattaaattccatatttatttttttcttaatttat

SEQ ID NO: 173318 - DNA, 275 bp, Zea mays
  unsure (1)..(275): unsure at all n locations
  Clone ID: MRT4577_89648C.1
cgcgtccgacatcgagcacaatctattaacaacacatgccctacctctccgcctccgcggcactccccgcaggtcgtctctacaaagcgggccgcctctcattcctncgccattttatcactccacttcctgagcctccgctccttctcctgctcctgctcacgcgctctcttttctttcttcttcataactgtgacgtcgtactcacttatgatcatgatcatattcatactcatacggcaccgctgacattctactaactgctcgtgatctcg

SEQ ID NO: 173319 - DNA, 591 bp, Zea mays
  Clone ID: MRT4577_89649C.1
gtggacccgagacttgcacgattgtcggtgagcaattgaagctgtcccgatgaccggtctcgcccggccccgctacgaacgcccgctaggaacaacggcgaagcttcactgcccgactccgagtcctcaacagagacgaggtcgaggatcgactgcggcggcgttcagccgaacccttccctcactagtggcgatggaattgagtgcgacaaaagaaggcatggggagttagggtttgacgctgcgttttatagtcaccaggaaggttggttgagttgccagctgcggtccatcgagcggcgaacttggcgaaagtttgttacaggggaggaggaagatctacatcgctcgcctaacatgtgggtttcgtgtgacagcgttcgacgacatgaacacgcccatcgcagctagtgagactgacaagcaggcccatgcgtaagtgcaagggtggcatggcacttgcgcggtgtgtggctgcgcaggtggtcccacttgtcgtcgtgcaacgcagtgaaggcgcatggctgaccagcggacccagtggtcggcgtagacatccaactgggccacgtcgcggggagaaagttgggc

SEQ ID NO: 173320 - DNA, 287 bp, Zea mays
  Clone ID: MRT4577_8964C.1
gacccacccgcccggtggcttctgccaatatggtgagagtcacatactgccgaccacaccgagccgccgccacgcatcaactccagattatcaaacaacatggccggactcgacacccacctctttacctcgcagtccgtgaactagggacaccctgacaagctctgctacccgatctgaaatgctgctctggacagctcgccttgctgaggaccccgacagcaatgttgattgtgagacctgcaccaagaccaacatggtcatggtctttggtgagatcaccacca

SEQ ID NO: 173321 - DNA, 309 bp, Zea mays
  Clone ID: MRT4577_89650C.1
ttctatagcagccgcaacaaacccagccggcaaggaggaatttatcggatccatgaccgctgaagcaagtgacaaagtggggccagatggtgcgctaaaaatcgaagcccccacgccaatagagaccacagccgaagttgaagaaggaatggagattgaccgcggatatattaccccacaatatgtgacaaacctcgagaaaacaacagtggagcaagagaatggaaaggacatcaataccgaccagaagatcacaagcataaaggaaatccttacgaggttgcagacgaccacacaggtgaaagcccc

SEQ ID NO: 173322 - DNA, 1385 bp, Zea mays
  unsure (1)..(1385): unsure at all n locations
  Clone ID: MRT4577_89651C.1
aacgctaatctttttgggagtactgaggtccctgcttnctgagatactggggtggaatataatcaagatgcctctggttttcctcgacaaacagaggatgacaacacggtggagtataatcaagatgcctctggttttcctcgaccaacggagggtgggaatgcggtggagtataatcaagatgtctctggttttcctcgaccaacagaggatggaaaaacggtggagtataatcaagatgcctctggttttcctcgaccaacagaggatgaaaacacggtggagtataatcaagatgcctctggttttcctcagccaaccgaggatgaaaacacggtggagtataatcaagatgcctctggttttcctcggccaacggaggatgaaaatgccgcgtctgctacgggagataattctggcttccaagaaaacaacacgggttctcatatggatctggatatgatgaatgactatgaagtgaaggaatgcaacgattttgggagtgcgattcatggcgttgatacagattttctgaactatggtgacgacgacaacgacgacgacttcgtcgacgccgacgagccaaatcccagtgagttccagtctctcgacaacagcggctggtcttctcgcaccaggggtgtcgcgagatatctcaagactctgttcgacgaggagtccggtctggggaggaagagcgtcgccatcgaccatctggtgcgcgggaagacgcggaaggaagcgtcgaggatgttcttcgagaccttggtgctgacgacgaaggactacatcagcgtggaccaaccgaaccccttcgactttgtgagcgtgaagccaggcccgaagctgctcatgtcagagttctagttcaacaaagtcagcgtaccctggcgcgatacattccctcttaccattgtatccatcatcacaccgaccaacaacaacaccgcagatatccccccccccctcctcttccaaaaccatttttgtgtatgttgttgcagttcccctcccctgtagcatctggtgcgctgatccgttgttgttgccagggcgtctgtccgagtaggatggtggttgtgttgtaccgtcggctatccaacagtatatagtagtagtatgattttagcgacactcggtgaagcccgccatgtaatctgctagggttcatgctcccctaagttactgtcgctttagactggctaaagcccgtagaggaattgtatacgagaaggacagggacagcccttagatgatgaatgatgtattgatgtgcctgttgactaaaaaaaaaaaaaaaaaaaaaaaaaaaaaaaggtttttttatttttttttttttttggaaaaaaaaaaaaaaaaaaaaaaaaaaaaaagggggggccgtt

SEQ ID NO: 173323 - DNA, 3723 bp, Zea mays
  Clone ID: MRT4577_89652C.1
ggcaccgaggcccacacgcacctctacaaacctcttgccctgagaaacttcgatccttgaatgcttttgaacctgccagaagccgtgtttcaaggcgatacctgatcactcctgtgagcacaaaagagcagaacccctttgcaagaccaaccccagaagaaaaaccaggaatacttcaacaattcccaatgtcttggcctagacgaaaagaatttggtgatggcagttcatcacaatacttggcttggaccttggaggaggaattaattcttgaaaaggaccactcaattcatctcgagtctgatgatggtattattattcaaggtcggtcattcggtcccttctactgatatggagattgatgataacaaaagtacaaacataacagctgaaggatacagcaacatggacggtgggccttctagtcatgtaaagttaggtccactgaatgcagatgacctaggaggaaacagtatccgtaactggactggttacaatgtacagactcctgatttgaatgatatattattgcataataatgaggatattgcaggcccatcaactttcgtactatcaacctagcccatttacttgtgatgaacctgcatcaccagagttcattagcgctcaggccccagctacacctggtttaatggaagagacagttccttccagggtccatgaaagtcctgttctgagtccacagagaaaagcatcaccatcaactaatgatgaaaccgtaaaggctgggactccttctgctgcagagtaagagcgttgctatcgagcatctggtgctccggatgatgtggaaggaagcgtcgagactgatcttcgagtccttggtgctgacgacgatggacttcatgatcgtcagccctccgatccccttctacttggtgagaataatgacggtccaacagcccctgctgacggtattcaagtcgaagctagcgagcttacccctgtcgccactcatggttcttcccaattgtatcatgaaccgcgacctaccgaaccacctactgaaccagttcctgttgctttatatgtttgtttgttattgttgtttagttatcctggtctatgtaggatgaacctcgtgcaggtgcttgagtagtatgtcgactatgttgtactaagggcagtttatatgatttagtgacacctgttgagattactaggtgaaccgatagcgatgctgccctacctcccaacctcagaacctgcagagcttgagaaattgcagacggttcctaatagcgagttcgattatccgattgatatggggacgataactgcggaaaacggaacaattggatctgatggaagtaacataataggcagccttacaagcagaaaaagacacctggaatatagcttaccagctttagagagtgagaccactaaaaagttgcctagccgaccacatgttaaaagaaccaatgattttgttcctcatgatgatgatctactggcatctattttagtcggtaggacccctgggttcacacttgatacaacacgtctgctatgaaagataattctggcttccatgaaaacaacatgggttctcatgggtacctggatgagaagagtgcagataaactaaacgatggcaatgattttgggagtgcaattaatggtgttgatacagattttctgaactccgaccattctgacggcggcgacttccacgaggccagcgacgttgatgataaacaaagcgagtttcaaagtctagatattcgacgtgggtctcctcgcatgcggggcgtagcagcataccacaatacactatcggacatatgagactattgtacaccctgctgtgcagagaatggaactacgtggtcaattagacatgcctgaaacaataccagaatatagaaatattgctgggtttggttctgctactattgatggcccacttcacataccagatgggattcaatcagatgccatgttgtcaggcgcaaatgttgcatatggcgctacagctgcttttggtttgcaaattcctcctgactaccaggttaaccgtgcatctaatgattttgttgtcggcactcagtttcaagaggtggctaaaccttttattggtaatgagcacgaagtggcacttcctgacagagagcatgctcaagtagatacattgtatagtgaccattttcaaggtgtcccatctgatttgcagaggagtaatgatgcaaacatttctagtcaagatgtggttctagataactctggccaagcttgtgctcatgcagtggacggcatgacaagggagcttactcattttgttcatagagacgctaatctttttgggagtactgaggtccctgcttctgagattactggggtggaatataatcaagatgcctctggttttcctcgacaaacagaggatgacaacacggtggagtataatcaagatgcctctggttttcctcgacaaacagaggatgaaaacacggttgagtataatcaagatgcctctggttttcctcgaccaacggagggtgaaaatgcggtggagtataatcaagatgcctctggttttcctcgaccaacagaggatgaaaacacggtggagtataatcaagatgtctctggttttcctcgaccaacagaggatgaaaatacggttgagtataatcaagatgcatctggttttcctcgaccaacagaggatgaaaacacggtggagtataatcaagatgcttctggttttcctcggccaacggaggatgaaaatgccgcgtctgctacaggagataattctggcttccaagaaaacaacacgggttctcatatggatctggatatgatgaatgactatgaagtgaaggaatgcaacgattttgggagtgcgattcatggcgttgatacagattttctgaactatggtgacgacgacaacgacgacgacttcgacgacgacttcgagccaaatcccagcgagttccagtctctcgacaacagcggctggtcttctcgcaccaggggtgtcgcgagatatctcaagactctgttcgacgaggactccggtctggggaggaagagcgtcgccatcgaccatctggtgcgcgggaagacgcggaaggaagcgtcgaggatgttcttcgagaccttggtgctgacgacgaaggactacatcagcgtggaccaaccgaaccccttcgacttcgtgagcgtgaagccaggcccgaagctgctcatgtcagaattctagatcaacaaagtcagcgtacccctggcgcgatacattccttgttaccattgtatccatcatcgcaccgaccagcaacaacaccgcagatattccccccaaccacagtaccacaccctccctcccttccaaatccatttttgtgtatgttgttgcagttcccctcccctcccctgtagcatgtgctgcgctgatctgttgttgttgccagggcgtctgtccgagtaggatggtggttgtgttgtaccgtcggctatccaacagtatatagtagtagtacgattttagcgacactcgtgaagcccgccgtgtaatgtgctagggttcgcgctcccctaagttactgtcgctttagactggctaaagcccgtaggaattgtatacgacaaggacagggacagcccgagatgatgaatgatgtattgatgtgcctgttgactatgtgaggactgacggttttaactcaatataattcaagtgacctttcctgg

SEQ ID NO: 173324 - DNA, 736 bp, Zea mays
  Clone ID: MRT4577_89653C.1
cgttgctgtcgctattaattccttcctctgctgacagattcttcagagattggggcttttctgatacttagtgccatcctcctcaccattgtgtcccatgaaagccatgacaggattgaagaatcctattctatcagagttggatgtctgtgatcctgatgcatcttcatcgtcacgcttctcctctaggccgagcgcgctgtcgaagttcttttcgatgttcttcacgctctcgctgatcttgttgacggctccagcgatgtcctgcaggccgccgagcgacaccttcccggaccaccacgccatccctgtcctcggccctccgatcgccaccggctcacggcctccacctcggcacctggcgccctagatctccggcatagatctgatgacccgcgcagccaatccaccgcccacacccagtcgtgcgcgggcgggagcaggatctggccaggacaacctcgccacgctgaccaaaccagctgagcccgccagacaacgagagcgcgggcaaggggtctgagctgacgcggccgcaaagcggggggaagcacttcagcgagctcccaccgcgcggtggcgtctggcgaggtgggaggagagatgtagctgcggcctgcgggggggcggcaggagcgcgtagggttgggtcggggagccacaccggagaggggagagagagagagagagagagtgcgttcggccgttggcgcgtgcgggcgccgcgtcggcttcg

SEQ ID NO: 173325 - DNA, 1308 bp, Zea mays
  Clone ID: MRT4577_89654C.1
cattgggattgtcgacctcggggccggccgggacgtacattcgggcgccaagaaagagttgagtgcgctttgtcttggactcgccgaattgaggatggcaggacaaggcatcacgtccatgcttgccgccgctgcattgctcgtcggaatctttgcgtccatccctacagcggtgcagtccatcggcgtgtgctacggcaccaacggcgacggcctcccgtcggcggccgacgtggtgcagctctatcggtccaacggcatcgccgggatgcgcatctactcccccgacgccaccattctacaagccctccgcggctcgggcatcgacctcatcgtcgacgagaccaacctcgactccctcatctccgacgcgccggggtgggttcaggccaacgtgcagccttacaaggacgacgtcagcttcaagtacatcgccgtgggcaacgaggtggaaggcggcgacacgcagaagatcctcccggccatgcagagcctcagtgacgcgctctcggcggcggggctcggcaacatcaaggtgtccacggcggtgaagatgagcgtgctcgccaccccgtcctcgccgccgtccaccggcgcgttcgccgacccctccgtcatgggccccatcgtccggttcctggccggcgtcggctcgccgctgctggccaacatctatccctacttcgcgtacagggacgcggcgggacgatcgacctcaactacgcgctgttccagccaagcaccacggtggtgagcgacggcggcggactggtctacaccaacctcttcgatgccatggctgacgcgatgtactcggccatggagaaggaaggcggctccggcgtgcccatcgtcgtgtcggagagcggatggccgtccggcggcggaggcaccggcgccgagactgtagacaatgcacggacctacaaccagaacctgatcaaccacgtcggcaacggcacacccaagaggtctgggccgcttgagacctacatattcgccatgttcaatgaggacaagaagcagggggacgaaacggagaagcattttggcctcttcaacggcccggaccagtcgccagtgtaccagattagtttctccacatgaaagttctacactgcacgattgaggtgttgtacctattaacgccttcgatgagtattactgtagaaaatacaaccgtacctggcacccatatatatctcttcaataaatccaggctatgagctagctataacaaaagaaagtaggttctttttgggaaaaaatctatatttacccattaaaaaaaaaaaaaaaaaagcggcc

SEQ ID NO: 173326 - DNA, 552 bp, Zea mays
  unsure (1)..(552): unsure at all n locations
  Clone ID: MRT4577_89655C.1
acaagggggataaacattgccacgcaagagtccatgaagctcaaagcattaagttcgaattactataacaccaccctattctggaacaaatagggctggacatttgagacgtgggtctttggggagggggtttttttaacggctgttccaaanggaaagggggggggggattatgtctaagggccgctgggtcttggatgttttcagtgggattgttcntggccgttnnancntgcccctccgatttgnnccantntccgggctgcgcgtnctcctgntggnnncnngctcggggggggttgggtgggtcgttcacgcgtggggggggtggctggggggaggggttgggggggtgtcgggtggggggggggggggggtggagaggggggggtgggcgggtgggggggggcccggggggggcgggggcggtggccggggggggggtgggggcgggggggcgggggcgtggggggggggggggggcggcgggggggcggggggtgcgtgggggggggggggggggggcgggggggtggggcggggggggggggg

SEQ ID NO: 173327 - DNA, 178 bp, Zea mays
  Clone ID: MRT4577_89656C.1
cggaatcccgtgtcgagcaggcgtacgcctccacatatactattatcaccttcaccgtcgtaacctgaggagtttaacataccacggaggatttcacattagtgtgactacacaccgcctccttacatttaaggattctaacagactagcacagcgctctctaatgaccatgatagta

SEQ ID NO: 173328 - DNA, 507 bp, Zea mays
  Clone ID: MRT4577_89657C.1
gccggccggttccggattcactcctcatcttcttcttgatgatctcaatattactcaaacccaataaaccttcaaaatggttaactttaccgcgacccttgttgctgctctcgctgtcttcgctcccgccgccgaggccaagacttgcaagaagagcttgacctactgcggttacattcttcttcagagaggaaactactacgaccagatccgtggggccctctcagatgctggcaagcctaacaatgaccccaactggatcaaccaatcccggttctattgtgttggtggctccgacggatccatccgctacgttgaccattgctccaactgcaagaatggaggaaacggccacagcgacttctgctagatatcacgcaatgataacaatctgcaagggcagccaacgggccaataaaggatactatttatgtccagataaactcttaagattatgttaaatactcaacttggaaactccaaaaaaaaaaaaaaaaaaggccccta

SEQ ID NO: 173329 - DNA, 178 bp, Zea mays
  unsure (1)..(178): unsure at all n locations
  Clone ID: MRT4577_89658C.1
gagcttttgntctttaccactaaagcagcagttcctaaatcttgcnctatcatctggagaacaaattnagattcttggctagtanttgggggcacaaanccagttactatnttttaaaagatctccaggtaatcttgcngagcagnactgtagtgtngtccactgtactgtagtgctt

SEQ ID NO: 173330 - DNA, 327 bp, Zea mays
  Clone ID: MRT4577_89659C.1
gttatgtcttttttttttttcttttctggagggggggaaaaacccccgaggaaaaagggacctcgcttgcgtttccctcccttaaacaacccagaccttattgggccagggatttattttggccccccacctaactggcaggtaaagcaacagggtttttttttcctggagacaaaaattgggggggggctttctgggtgccgccccaataaaaacctttctttgggctcccgggccatggttttctccagccggttaggttttttttagaaagcgttctgttttttaatttttggcggaaaagggttttcccccccaggatttttt

SEQ ID NO: 173331 - DNA, 206 bp, Zea mays
  Clone ID: MRT4577_8965C.1
ctcgagccggccgggccgggtcttctcactcgtatattcgccagtgggcgtgccgaacttagaaaaccgcctctctatctacaggcgaggggaattaagaaagtggaggggaacgaggaggacgttcgccatgggcgccaaccgctagtcggagcgccagccgatcggtacggcggtgtagggtacggaggagaaggactacaacg

SEQ ID NO: 173332 - DNA, 275 bp, Zea mays
  unsure (1)..(275): unsure at all n locations
  Clone ID: MRT4577_89660C.1
ctcatatcttctctctctttttncnntaggtgaattcttcatgtgtggggggggtgacacancnnnatcnncccattcacatggacactctacagattggttgcctcccagtgcggcgacatcactcatcctctggaggactcaccgacaggccagacggtggcacatttcatcacggattacttcggctttcatcacagactacctgtggtttgtcacatgggagctcgttgatccttccttgctttttgcgtgactgttcattttttccatca

SEQ ID NO: 173333 - DNA, 366 bp, Zea mays
  Clone ID: MRT4577_89661C.1
agacaaccatccataacgacgtttttaataacccagggggaaaggggggggggcataaccagaaaggtttacaacatcaggggttgcaaaccacaccgggggcaagggccgcacaaaagcctgacgatgaccggattaggatacttttaggacttataaacattataaccttccttgcccttataaaacttaacaccaacctccttggagtcctttttgagcgctggcaaatccttaagggccttaaaaaaattggcctttttcatacccttaccgacataccaatgcacaaagggacccttggggtacatgagggccaacttgggggcgatgcgggaaaacacctccacaacactgggggagttg

SEQ ID NO: 173334 - DNA, 637 bp, Zea mays
  unsure (1)..(637): unsure at all n locations
  Clone ID: MRT4577_89662C.1
aattcggcacgagggttggggcgagggtcgtgtgcatagcttgtgctggccgagtagtcccgagagccatggcggccgcgggtgcgcgactaccattagctctgctgcttcccctgttcgttactttcttcgcctcccccgcctccgcgactgacaccatcaccgccaactcttccctcagcgatggccagacgctcgtttcagcgggcggggtgttccagctgggcttcttcaccccggccagctcgacggcgaggttcttgggcatctggtacatgggcctcgctccccagaccgttgtctgggtcgccaaccgggaagccccgatcaccggcaccacggcgagcctggccatcaacgccaccggcagcctggtgctcgccgacccctctgggcgggtgttctggtcgtcgccgcagtccaacatgagcagcactggctcccctgtcggggcgcagctgctggacagcggcaacttcgtgcttcaaggagggggtggcgccgtcctgtggcagagcttcgattacccttccgacaccctgctcccgggcatgaagctcgggtgggacctgaccacggngctcgaccggcacctgacgacgtggcggagcaccggcgacccgtcgccgggcgacta

SEQ ID NO: 173335 - DNA, 126 bp, Zea mays
  Clone ID: MRT4577_89663C.1
cttatacttgttaggttatatcaatagtgtgccctaaaatcaactgaattattcatacccctgaggatgaggaattgcctaaatcctgcgatccaaagtagactcactatgtcgaagacctaacat

SEQ ID NO: 173336 - DNA, 564 bp, Zea mays
  Clone ID: MRT4577_89664C.1
caacttcattccttttgacgtgtgtaggttgctagccagtttgcatataaataaaatataatataaggatactgggcagagaagctaactgcatttgttcgtccccatgtcaagaccatggaaatttgagggtttcccagtgtctgcaaaactgctgatatttatattgggcggaattagcaattagcattgcatgttcgtcgctgctttgagcttacctgctaaggaatatgtagttttcaccagatataactgtgtaaacattaaaccatattgcaattttgcaaaatcctgtgtctggcttgacgaagtcggtgtctgttttcttggttactcaatgctaaatcactagtcaatgattaggaactattttgaccttgagataaggtttttttccccttccacatatcttctttgtattgcgtgaacactctgttagcctgattttggggttttaacagatccaatcagtactgataattggtcaaactaaatatatttttctctctcttgaagtaacgcattttcctttttgtttaacaacacattcagatatagtccacc

SEQ ID NO: 173337 - DNA, 518 bp, Zea mays
  Clone ID: MRT4577_89665C.1
gccacgcctgctgctgggcctcctattgttgaaccaattgtgaacctgactgcggagctgacacctaagttgaataagaccacaaatggactcgcaaaaggactcctgactgggctgctgcctgagaggtcaggtggaggatcttgaatgctatatgcaatgcgagatacaactagtgataagaatattgctatggataagcctctcgttgacgaacacatccccaagagcatcccttggggcactgctttctacactgttaacaagggaacaaataggggaacaggtgcatgcagaggtgcatccactgatgttgtagatcatacacttaaccatacagaatgtgatcacaaatctgggcacagtggtgtgccttctagcacatctgccaccacattacatcgaacctaacatttggagatgaactcactgattatgtcactgcacatcatcatggacaccgatgatatcgctgctgatacttgtcctggaactgaggctgataaggaagctcatct

SEQ ID NO: 173338 - DNA, 307 bp, Zea mays
  Clone ID: MRT4577_89666C.1
atggggttgtttttttatttttggttggaggacgaacaaacaagaagctgacgtagtgccaatcacttggttatcgcttccaattctttatatatcaaagggacactctgacctacaggtgttgacccttttgttacaccaaactgtaaataaaaaacttgcttatgttctccacaatcaaggtgttttgacctcctttcaccttgaagacgcttttgattaatgcctcctgggtggggggcctgtttgaatcgcccaaggcagtcctggcgtacactggcatgcctggacaaaacagcaaagttgc

SEQ ID NO: 173339 - DNA, 459 bp, Zea mays
  unsure (1)..(459): unsure at all n locations
  Clone ID: MRT4577_89667C.1
aataataataataataataataataataataataatgaaacaggaaatcatggagctggttgttgcgactcggatccgccgctaacttaattacaatcacaatcgcactggttcacggtggaattttcatcatcagcttgtagtttgtacaccagttgctcacgaatcatggaatttacaggaccagagaggcgaatccggctggaatcaagtgggcgccaacccatgcataacccacaaccaccaccaatcattctcgttaaattcaaacgacaggagaaaacaagcaatagcatacaggtagtgataattgattaaagggacagggagggagatgaacattttttttttggtgtgtctcaaatcaacaacggcgtgggattaacggatatgaacctcctgtttcngtcggtggaagcgtaagcggcgagatcagcccgcgcagcgtgtgatggcggt

SEQ ID NO: 173340 - DNA, 227 bp, Zea mays
  Clone ID: MRT4577_89668C.1
actgggatagctgacccttggggctgaagagcttatttaaattttacttgggagtgggaccacgtacagatttcacattcggaaaaccgagttttttttgtgaggggagagaggtatggaatataacatgtgtagagaaacatttgtcatttgtgaccaaaactccggagaaacgttagcgggagcgcgggattttacgtggaaggggagggtagaaaatgttggtg

SEQ ID NO: 173341 - DNA, 471 bp, Zea mays
  Clone ID: MRT4577_89669C.1
tgcacgcacgcgtacgctcgctaggaatttggatcgagagcatctgatccactttttttctctcgacacaatagatgttgtcggggggcgtattgaccggaaatggggcctagcgggaggaggaggagcgcggtagcgcttttctcctggcacccggccacggtttgtctgtggctagcgctcgatcggtctaactgacccttgcccaggctaagaatgacgtgacacaagttacccacaatgcctacttcgacatggagatcgacggcaagcctgtatgccagattgtcatggggctttttgggaagactgttcataatacggcatagaacttcctagctctttgtacaggagagaaaggggttggctagagtggcaaaagtccttcactacaagggaagtaagttccacagaatcatccccagctttatgctcaaggacgagactttactctcggggacggcaggggtt

SEQ ID NO: 173342 - DNA, 344 bp, Zea mays
  Clone ID: MRT4577_8966C.1
agaagccacaaccccccttaattacagcccccgaaaggataaaactgggggaaaatcctattcaacatttgggaaacgggaacggcgggggaaacactttttggagcggaaggttgccgctgagcaccaaccttccctttttggggcccctttttttgggcccttccaaagggcattgaataaaccaaaccccgggtttttggcaaagaaatggattggccccccttccccgggccggaaccccaccggggttgccctcaaggggacccacaaggttaaacttgggggggaaatttaccgggtcaatttgccctacccttggccacacacaaaaaatttaaacc

SEQ ID NO: 173343 - DNA, 373 bp, Zea mays
  Clone ID: MRT4577_89670C.1
gcctgcttgtgtgcagtgcaggtcacagcctcacaccatatcgctctgcggtgctagctccaggcctttatcaagccttccctggccccttgataattccagagagagagagatagagagaaggcgcggcaaggcgtgggctgtgggcacacatggcgagtgaggaggtctccaccacagtgtgtgccgacgccgaccaagaagcagcggcggcggcggccatgaaggaggaaggaggaaggggcaagaggcggaggaggaggcagcctaggaagggagaggaggaaggcggcaggaggaagacgtacgcgctggcgagctaccacgagctgtccgagtacatgacggagaacgagtgcatgctcaactacta

SEQ ID NO: 173344 - DNA, 281 bp, Zea mays
  Clone ID: MRT4577_89671C.1
ggtaaatgaatgctcggttacaacgtgctaaatcctttgccaatgctaattctcaacagggagaacatcagtgaccggcatcctattcaggcataggcagtgatgttctccctgttgagaattagcattggtaaatgaatgctcggttacaacgtgctaaatcctttgcatctggccaaatttgtaaataagcactgggtgatgcccatcagtaaacacatgatgctactgctgttaaactaaatgtggcaaatttcataatgctaggtattgttctcggt

SEQ ID NO: 173345 - DNA, 460 bp, Zea mays
  Clone ID: MRT4577_89672C.1
acgaggcgtgtatcactaccagctaacaacaatacactccctaagggtagtatcgcaagccttctagggtctccaacgactgacactccctatccatccgcctggactaagtagtcctagtgttaggtaagcgggccctagcgttataaagcagtgctattccatctacatccacaggaataggtagaggaggtgcgggcatcaactcagggcttgggtcaatctcgataggcagcatcttcagaggattaacattagcctcagaatcttcaacctttgcacatgccgagtcaagcagctattcataacgtgcaagacactcagatggtgttcgacctagaatacggggaatcgtcctacagtgagtaagcatgactttatcaaaatgaagtaacttcacagcatcctcgcatgcccactcggtcgacttgacggacagatcgagtcactcataccagcg

SEQ ID NO: 173346 - DNA, 394 bp, Zea mays
  Clone ID: MRT4577_89673C.1
aaaacaaacacaaaaaattggggatggccttttacgagagggggccctacgggtctaatccttaaaccatccaaccacctccgggaagaaacagaaataacgaaaaaacggcccaacacacattttaaaagggggggaacaaccattttggttaggtcacccccaaccaggggtagggggaatcacacaaagggtccatcacctgcaaaggtaagccgggggagcggggggtccctcagggggggcgggctccattgggtggggggggggggcctttggagctccctggggggggggggtttcgccatttgatcggtggtgctccgggggctgggggtcaagagcttgggtttttgccggggggggggtctgggggttaggaacgggctttggg

SEQ ID NO: 173347 - DNA, 505 bp, Zea mays
  Clone ID: MRT4577_89674C.1
ctcgaggccggccgggccgggatgacaccaacctcctctggttcggagatctctcaccacttaccgagcctatagtatatacgcctctttcacacagatttatatctccaggttctagattcacacttgctctgtctccagcaaaggtagccatggtgacgagaccgatgtcgtcaagatcctccaccccgctgatgaacacgaacctgaacttcaagatcgcgatcatgctcaacctcaaattgatcgagatgttgataaccgtcgtccagttctaccagctagtcatcgaggaggaccctgactagatcaatgccatgatcgagcacgatgtcgtcgactacgtatgatctagaaccggaacgacgtcaatgacatcctcaagacccgcgtcgtactgcatagacttcaaggtactccgactgcatctaggataagctacatggtcttgctagaaaaagtacatcatacactatcgacgaagtactgcttctacatccataga

SEQ ID NO: 173348 - DNA, 638 bp, Zea mays
  Clone ID: MRT4577_89675C.1
caaaattgaccaattgattatcaaatttacattttaaatatmarcagcacgacaatgyygttccatgaaccgtacatcaatctggaccttaggwacgtggaacmmaattgaccaattgcattatcaaatctattcaatttcctataaaattgaaaagcgaaatgctgctycytayctcysrcastagmsacacagkgggsskagtmkgaytttgcgmaamyygcgacttccytctcgcgcggcgttgccagtgcatgaagcatttctctgcgygccctcgaggctgctcgaatgggtagcatctgatgcgcgcgcgctggtctcttctttcactttcacgctcatcacgcatcgcyagcgtgaccactgcgacctctacgcccacttttccyttcagcaaatacgcttcctytcacgctcaccayagtgacgcwtagcggcgacaaatgtwaccctcgcagscgggcttccygcacgcccgggggggatccacttagttactargagcaggccgccaccmgcgggtggaggctccacgctytttgtctccctttaastgaggggttaaatttcgatgcyttrgcgyamatcatgkgtcataktctgttttcctgttgtgaaaattgtttatccgkctc

SEQ ID NO: 173349 - DNA, 419 bp, Zea mays
  unsure (1)..(419): unsure at all n locations
  Clone ID: MRT4577_89676C.1
acccacgagtccgagataaaatgcctcagggttttgatacttccgttggtgagcatgggacacagctttctggtgggcagaagcaaagaattgcgattgcaagggctattctgaaagatccaagaatcctactattggatgaagctacaagtgctctggatgccgagtctgaaaggattgtgcaggaagctctcgacagggtcatgacaaacaggacgacagtcatagtcgcacaccgtctgagcactgttcgaaatgctgataccattgctgttattcatcagggaacactggttgaaaaaggtccacacagtgagcttctaagagatccagaaggagcttatagccaactgataaggctacaggaagcanaccagcagaacaatgggaaaggttgatgcaatgctcgtccaggcaaa

SEQ ID NO: 173350 - DNA, 1333 bp, Zea mays
  unsure (1)..(1333): unsure at all n locations
  Clone ID: MRT4577_89677C.1
cattgggtacctcgacgccggccggggcacatcccattcccctcccctcgtctcatctcaagagcgactagagagagagaggaagagaacaagcgataagctcatctcgcacgcaagatgcgggctccaaggggcggaggcggctgccgcggcggccaggagcatgtggaactgatccctggcatccccgacgacgtggccgtggactgcctggcgcgcgtcccccacgcctcccaccgcgcgatgcgccgggtctgccgcggctggcggagcgccgccgccgcgccggccttcgcgtcggcgcgcgccgcggcgggcgccaacgaggacctcgtgtacctgatgcagttcgggaacccgtccggcgacgacgggcccaaggacggcgacgacgggcccggcagcaccccggcgtacggcgtggcggtgtacaacgtgacgacgggcgagtggcggcgggagcgcggcgcgccccccgtggtgccggtgttcgcgcagtgcgcggcggtggggacccgcgtggccgtgctgggcggctgggacccgcgcaccttcgagcccgtggcggacgtgcacgtgctggacgccgccacggggcggtggcgccgcgccgcgcccatgcggtcggcgcgctccttcttcgcctgcgccgaggccggcggcaggatctacgtggcggggggccacgacaagcacaagaacgcgctcaagacggccgaggcctacgacgcggaggccgacgcctgggacccgctgccggacatgtcggaggagcgcgacgagtgcgacggcatggccaccgtggccggcgaccggttcctggccgtcagcgggtaccgcacggcgcgccagggcgggttcgagcgcgacgccgagtggttcgacccggcggcgcgcgcgtggcgcaggctggagcgcgtgcgcgcgccgccctccgccgcgcacgtcgtcgtccgcggccgcgtctggtgcatcgagggcaacgccgtcatggagtggatgggcacccgccgcgggtggcgcgaggtggggccctacccgccggggctcaaggccggcacggcgcgcgccgtctgcgtcggcggcggcgagaaggtggtcgtcaccggcgcgctcgacggtgtgggcggctgcggcggccggcacgccctctgggtgttcgatgtgacgaacaagaggctgganccgtggtgcccccgccgccgggttcgccggcttcgtgttctccgttgcgtccgtccggatctgagaaaacctagatcttcttcgnnnnnnnnnnnnnnnnnnnnnnnnnnnnnnnnnntaaaggctacaaactagtgctagtgctagt

SEQ ID NO: 173351 - DNA, 339 bp, Zea mays
  Clone ID: MRT4577_89678C.1
ggccggggcaagattcccacaacggggcggcgtgcaaaagctcaaggccgcgcccgcacccgcgacggcggagaccctggacgcgcacttcgcgtcgtgcgcgtacgataaggggctccgcttcagcgcgcaactcgtgacgcgggcgctcaccgtgcgccgcgcatcgccgctggagctcgcgcacctcatccgcgcctctctcctccgcccccgcagtgccggaccctctgttgttagcgaccacgacgacagaatagatcccgatcacattctgcatgctggggcaccacgcgtgtgacaccctgaccctgggcctggacacgaggaactccacgg

SEQ ID NO: 173352 - DNA, 158 bp, Zea mays
  unsure (1)..(158): unsure at all n locations
  Clone ID: MRT4577_89679C.1
ggccgcttttttttttttttttttcttgggggtgtgggggccagnancggcaaaaggaacagcaaccgaggcgcactgtgtcataaagaccaaaaagggaaatgcaacctaaagcagtcacagggacacagaggggaacaaaacgggacatcaagagg

SEQ ID NO: 173353 - DNA, 247 bp, Zea mays
  Clone ID: MRT4577_8967C.1
actttccaagaaataaaccttcatacccagccagcttcatagtttctttcgctgtaccacacagacatctatgatttttggagcaaacactgatctgtattgacaagtttacacgtttgtatgtggaatctgaagagctgtactgaaatgttacatcccaaaaaaaaaaaaaaaaaaaaaaaaaaaaaaaaaaaaaaaaaaaaaaaaaaaaaaaaaaaaaaggcccggccgccgcccaatgacccct

SEQ ID NO: 173354 - DNA, 220 bp, Zea mays
  Clone ID: MRT4577_89680C.1
gtatattgtaacatacatgtttgtcatgaaattacatacaccacatgggaacatgtcgggttcagccacggagtgacaagcgccttcccgacggaaattggcacacctgcatcagctctgcgtttcggtgtaccatgctacacatccaagctcgacgggccattatccaagacggggtcagtagcgaagggctatatacaggtcgttggacctgctctac

SEQ ID NO: 173355 - DNA, 359 bp, Zea mays
  Clone ID: MRT4577_89681C.1
atccgatcacgtcctccggccactcgtccctggcagatgctctcctgctcgaatctggacatggtgtcggccagaccgtcttcatctacgagggatacgcactcgccccacacgatctttcgtcggtacctggctggccgctagctcaggaacgatctcatgaaaattctgactgaatgcggctaatccttcagcagtacatgcttgagcagtaaaatgtcacggacatgaaggacaacctcgccatagattgcactggagctagactagaaaattgagactgccaagactagctcttcttgtgtataagagctacgacactgcatgactcgacaggtcatcactatttgtgctgaacg

SEQ ID NO: 173356 - DNA, 222 bp, Zea mays
  unsure (1)..(222): unsure at all n locations
  Clone ID: MRT4577_89682C.1
cacatggagcagctgtatcagcgcatcgtgcgcctgggcgaagcccacagcgcgcagctgnnccagtgggggtacgctcgcgctgtggttcgcttcataaggtcacatttccacctgattatgtcttggatggatgggagatgtgttctggtgattccaagggagggaaatacacccgggttaaggcaggccaggtcactgcaacattcctatgtgcaaacg

SEQ ID NO: 173357 - DNA, 121 bp, Zea mays
  Clone ID: MRT4577_89683C.1
gtgatcacccagttagtattttctgtcaacaggtttatttttcgtcatggcctccaccacagcgaaacaatggcccagaaggggcggggatgcgacatttgaacgggcacaaactcaacaa

SEQ ID NO: 173358 - DNA, 1533 bp, Zea mays
  Clone ID: MRT4577_89684C.1
ccggggaggttctccagacccccaaccaaccaaaaccctatccgccgcccccgcccccgcccttggctgaggacatgtatccaccgctcggggacgcataggttgtgttacgagtgggagaaagcttcttcagtacgtgctgatctctccgccacacctgcacaggagtggccatagatcgccggaacgcgcctccgccgccggacgcggcggcggagaaggatgagagcacccagggtctacaactcccggaggacatccgctgggagcggctcgacaaggcgcgcttctttgtcgttggcgccgggctcttctccgccgtctcggccgcgctctaccccgccgttgtcctcaagacgcgcctccaagtcgcccctgcggcggcggcggctgagtcagcagcgctcccgctctccgccgtcgcggcggcgactgccatcctgcgccaggagggggccctcgccttctaccgcggcttcgccacctccctcgccggcaccatccctgcgcgcgcgctgtacatgggcgcgctcgaggccacgcgctccgccgtcggcccagccgcgctcagcttcggcgccgcggagcccgctgcgtcggcggcagcgggtgcagtggcgggcctcgccgccgccgtcgccgcgcaggtcgtgtggacgcccgtcgacgtcatcagccagcgcctcatggttcagggcaacccctgtcctgcctcccgctaccatggcggccttgacgccttccgcaagaccgtggcttctgacgggctacgcggcctgtaccgtgggttcggcatgtccatcctaacctacgccccctccaatgctgtgtggtgggcaacttattcactgtcgcagaagataatttggagtggaattggctgctacttgtgcgattatggtgttggtgtccaggaaattgatctcggtgatggggattctttgctgcagccaggttgcaagactgtcatggtagttcagggagtgagtgccgcgatggccggtggtgcatctgcgtttgtgaccatgccactggacaccatcaaaaccaggatgcaagtcatggatggggacggtgagccaattacggtggggaggacagtgcgtaggctgatcaaggaaggtgggttggctgcttgttacaggggcctaggcccgaggtgggcgtccatgtcattgtctgccaccaccatgatcaccacctatgagttcctcaagcggctctcagacaagggccaggggagtgatcttgcatgatgtttgataaccagtatagacaacaagtgatcaggtgcatttgctttgtttctttatcgtttcatttccagcatgttatgtgttgaaaaaaatggtgggctaatgtttgtagataatttttgtttgctcttataatcgagttttccgacatggtgcaatttatgttggttatatattgtagttctcatatcatgttgttctagttgcatttattggcatcaaattggtggttatgtcttggtatgattcagttttgcttactcaaacctttgtttgt

SEQ ID NO: 173359 - DNA, 726 bp, Zea mays
  Clone ID: MRT4577_89685C.1
cgggctaccttcgttcattttaaatttgtttgactggcttttcaaaaaaaatcgtaattattattaatttttactgtgatatcgtttagtatataatatattttaaatatggctttgaattttccattttcttgcaaaaaaattgaataagatgaaccggtcaatctcggttcaaaaagtcaaacgaattataaattgtgacatgtgagtagaatagaatataccgtggagtaaagcaaataattcatgtaaccttctgaggctgggtatgttttaatgttgcctttttaaacaaacgtgttaggtgttatttcacctagaacctcttgtaatttggtacgcattttgattgctttggcacattttgctgctcgttactattgtgttgtttgctttacaagttcaacattgtcttcctggttacaatttatcaatgcgtttggtaccagtaaaccttattttataacttaattcgtgcacctcaaaatcttatttgaacggaatctggcatgaaaatgaccaaatcccagtttcgaacctatttcagaatgtatttacctacagctgagatttctgcagtttcagtcttcgcgcgggacaataattggttccgtgaatttcatcttactttttggtcttcggaattgttgtacagatagttctatatcttctgttgctggtcaaatcgtaacagcaggataaaatattctgctatataaactactc

SEQ ID NO: 173360 - DNA, 1137 bp, Zea mays
  Clone ID: MRT4577_89686C.1
ctaaggtttttttttttttttttttgtgttggctgtagctcaagcaagcgtaccagtgtactgcgtttttttctccatgatgaataaaataatgaatgaatcgatcaatgtatacctcccaaaaagaaagaaagaaagaatagctaaaacggcttgtgatttgagacggtgtcgtgtcgcacgttgcacgcgacggcctgtgcccacatcctgagcaggtccttcatctccgctgccgactgcaccctcactagcgctggccgctgccacgcctccgacaggtaaggacgccggggactggtcgtctgcttcttgctgcgccgcggctcatttccactactgccgccgccgggcgtcctctgctcagcctcggccttgtgcgagtgcctgagcagccccatggccgtggcggacgtggggacgggcatggacggcgcccggcgcagcgccgatctgcctccctccgccagccttgttcgcaggacgccctcgtagatggagctccagttgaggtcgtcgtcgtcatccttgttgttgttggtgggcaagggcaactccgtcgtcatcccgacgcgagacgacgggagcgacggcgtccggagtagctgccggcctcctagcctggccggcggccccgccgaacccgaggccttctcccctgtggctgtggctgtggctgtggacggcgacctgggcaggtgcggcggcggcttcttcttcttcttggcgctgctattggtgacgagggtgttgccgaagaaccagtgctcgtccagcaggtccagcgccggggctatcgtcggccgggcggcgtcgtgatgatgctccagcggcggcggcgagctgcagctcatgatgatgcctgatgctctctctctctcgtctctttcaagtcttgtccaccagcttagctgatcctggtatggtaggaacaggatggggatcgggggaggtctcatctggttttgtcctgcaactggtcgccggtactacttgagctggctagccaagccatgcatgccacatgggattccttcgttgcgtgctcggctcgcacatgattgattgctacatcatatcgatgcggatgacgaggcatctatcctattaccatcatttcctgatacatactatttt

SEQ ID NO: 173361 - DNA, 433 bp, Zea mays
  unsure (1)..(433): unsure at all n locations
  Clone ID: MRT4577_89687C.1
tgtgatttgagacggtgtcgtgtcgcacgttgcacgcgacggcctgtgcccacatcctgagcaggtccttcatctccgctgccgactgcaccctcactagcgctggccgctgccacgcctccgacaggtaaggacgccggggactggtcgtctgcttcttgctgcgccgcggctcatttccactactgccgccgccgggcgtcctctgctcagcctcggcctgcacgtaatggaatctcgtcagtcactggagctggatcgggtaacaagcanctagggaagggaagggaaggaaccttgtgcgagtgcctgagcagccccatggccgtggcggacgtggggacgggcatggacggngcccggcgcagcgccgacctgcctgcctccgccagccttgttcgcaggacgccctcgtagatggagctccagttga

SEQ ID NO: 173362 - DNA, 170 bp, Zea mays
  Clone ID: MRT4577_89688C.1
gtgttctaaaaaaaaacaaacttgttgaaaacgggcgagtggggcaaaccggtggaatacccctggaattttctgtctgggacgtggggggaacccaaattgcctttaagggagataaattaaagcttggggtactcaggggggaaggggtactccagggggaaaaaggg

SEQ ID NO: 173363 - DNA, 674 bp, Zea mays
  Clone ID: MRT4577_89689C.1
atctgcaaccacaccaacagacagagccgcaagaaaaagcagagcatcacgtagccttagcaggcgacagagagagagagagagaacgaagtgtctttagccacctagcaacacaccaccccccgtacgcacgcatggcgcgctgggccattgccatccacggcggcgctggtgtggaccccaacctgccggagcaccgccaggaggagggcaagcgcgtgctggcccggtgcctgcaggttggggtcgacctgctgcgcgccggcgccacggcgctcgacgtggtggaggccgtggtgcgagagctggagacggacccctgcttcaactcgggccgcggctccgcgctcacccgcgccggcaccgtggagatggaggccagcatcatggacggcaacggccgccgctgcggcgccgtctcgggcgtctctacagttagaaacccggtctccctcgcccggcgcgtcatggacaagtcccctcactcctacctcgccttcgacggcgccgaggatttcgcccgcgagcagggcctcgaggtgatggacaacagctacttcatcacggaggaacacatacgtatgctcaagctcgccaaggaggtcaacagagtcctcttcgactaccgtatcccgctgcgcggagctgacacatgcatggcgctggcggccgcg

SEQ ID NO: 173364 - DNA, 172 bp, Zea mays
  Clone ID: MRT4577_8968C.1
attgactaccgaccagcggtctcctttcccgcaagcatgggtgtacgacacgcggatacgactcgcgtcgtccaacataggatcgagctcagagacacagactagcagcagaaggatgtcgacgtcggcggataccgacccgatggtgacggtgagcgagatgtggcaggca

SEQ ID NO: 173365 - DNA, 535 bp, Zea mays
  unsure (1)..(535): unsure at all n locations
  Clone ID: MRT4577_89690C.1
aaacacaaacaatacctgaattgcatttatanccttcggcttgacaaaaggcaaaaacccgagtgtgacgtgcaagtgaatacaagtcagcgtgaacagtacggggttactgttcatctatttataggcaagggacgcaacccggtagagattacattcatgccctcgacaagtgactataatcatgacacaaactatcctggactgatcagtcttttcctctttaggtcggtgcagcccttcgtctcaaggcctgtcactatgtcgaagctccctggatcgcagcttcggcctgtaccttcatgctatgtctgcttgtgccaacttgcttagaggaccttcggcaatgaagcaggcccccaacaataacttgagtttaatgctaaaacatggctctctactagtaataattacctaaccaactaaaagcaactgctctgagcttcaccccacatacaactagtccactttagccaaacaggacaattgctgagtacattgatgtgtactcacccttgcttaaaacaccaaaaca

SEQ ID NO: 173366 - DNA, 583 bp, Zea mays
  Clone ID: MRT4577_89691C.1
acaagtaaactccattttttttattattacttctaatattgattggtaatcaacaaacaactggctgatacataactaagcatatttgggagcatcccaaacatgatctcatttggtaccccctttacatgatcttatctgataccccctttacatgctgcaccccttgctgctgccggaaattctagggccggacatggctgagattagttgcagcgtgagaccaccagacctggctcgggagagagagtggtatgcaatcgttccggtactggatgctaagaaggttgagatgacggtgcaccgtaggattccagagaggggtttactctgagaaccgagactgcatggagacgcgctcggtgtacagcacgtccttcggcttgttggactactcccacaaccccggtagggcctacctgacgatgtggatgctctacagcgcgtggcccgcgcctttcacccgatgtgacttgcccaccagcactttgtgatagccgaattgcttccccgactggcagttgcgtacgctgtctgtcgaacaaaatcgccttgtgccggttgaccttggcgatcctgatcg

SEQ ID NO: 173367 - DNA, 409 bp, Zea mays
  Clone ID: MRT4577_89692C.1
ctcctggctctcgctgcgagcgccacctccacgcatacaagcggtagctgcggctgccagccaccgccgccggggcatctaccgccgccggtgcatctgccacctccggttcacctgccacctccggtgcatctcccaccgccagagcacctgtcgtcgccgatccacctgccaccggcgatccatgtgccgtcgacggctcatctgccagcaggcaccatgccactaccgctactcaaccagcccggcctcagagatcatccgcagtcacacccatgcccaggccaacagttcatttactataccgtgccaactgcatggaacctgcgaagttggcggcaccccgatcctgggccaatgcgtctagtctgtgaggcatcacggcagcccgacggcgacgccctactga

SEQ ID NO: 173368 - DNA, 587 bp, Zea mays
  Clone ID: MRT4577_89693C.1
ctctgagcggttgaggttggggctggggttgagctcgggttgggttcctcctggggcaggagggaaaggcgggagccagggcgtcagggcctgcggacgatgtgtgtgtgaaagggcgcgtcagccataagaagccatatgcgtgcgagccggtccccaccgtccccgcggcgttgtcaccatcatcatgaggccactggagcagcctcaggcgctgctgccggggggccgggcgcggggtgcgtcgggctctgcaggttggcactcacacccagcgcgcaggatggcaggcaagaatagcacatttcaaacctacaagaaagaagtgtgcctcccccgtcattcgatgcaccctggcccctgggccatctgctgtgaatgccagaccagattcgggggccgcctgcctgtgtccagggtggaagcagcactgccttactgggtccctctgtccctgagaccccgaaagcagcacccctgctggatgcatgctgctggcacaactgctggcggatctgcggtgatgagtgcctgttgtccaagttccagcagctccaggccccctaccaggaccagctaccggctcc

SEQ ID NO: 173369 - DNA, 661 bp, Zea mays
  Clone ID: MRT4577_89694C.1
cccacgcgtccgcggacgcgtgggctgggatgggggccgcctcagcaactgatcccatgcagacgcagctgctggcgagaatgagaatgaacgacgtagcaggtggtgggctccagtgggtgtcatcagagcctgacaactacaccaacgacgacggtggttatgcagcaggaccagcagctggagtgcagcatcagcagcaggttgttggcgatcagcagcagcagcagcaggagaacaaagcgaatcagcgcagcaaaaacaacaacggcggcggcggcggtgggtcgtcggtgtacagctactactggaccaacaccagcaacagcgatggggcagaggggtagtgtgtgcctctgccagtgccagagccacaggagacgaaatcgctgctgcaaactccctcgcgacaaagaaggggacgcgattcaccaccgttaagcactagctcagtttgtagaggataggatgcatattcgcgtttgattaatcagcgttgtggtcgtgatggcaagtcatcacgcacatcgccctttttgttcaaatgcatgcgttagttcgttttcatcagagtttacttgctgcagtctatcatcgccggcagagattagttaggtgtctatgcttttatattcatcagtagttctggataataatgtct

SEQ ID NO: 173370 - DNA, 191 bp, Zea mays
  unsure (1)..(191): unsure at all n locations
  Clone ID: MRT4577_89695C.1
ataatcaacaccctcctagccntactactaataattattacattttgantaccacaactcaacggntacatagaaaaatccnccccttangagtgcggnttcgacccnatntcccccgcccgcgtncctttntccataaaantctgcttagtagcnatnaaccnncggaggnnttgannngganntgcccc

SEQ ID NO: 173371 - DNA, 470 bp, Zea mays
  Clone ID: MRT4577_89696C.1
aaacaaggaaagaacggcggggcttttttcccctaccttggacaaaaaagggttttaacaaggggggggaccacaagatctctcgacaggccttttttttggaagaacggggtctaggggccgccctcggtcctgggaagaaagaatgtttttcccttggaacccccaactacgttttcggggggccctggtataaatttaacccaaaaaacataaaggggaagggccgcccccccccctgggggtttatttttcaacgaaggggccccccctaaactaagggtcaacacaaaaaacaggggggccggccccctgggggtgtttcaaaatcgttcacaagaggaagcccctgggggcccggacctcccccgtcagggcccaggctgcaacggggtggggggccccccgggaaatctgcccttccttgggccccatcctgcccgggaaatccctgttcggggggggcaccc

SEQ ID NO: 173372 - DNA, 611 bp, Zea mays
  unsure (1)..(611): unsure at all n locations
  Clone ID: MRT4577_89697C.1
ggtaccctccnggtctcggccggggcatccgctttctctctgctcgatccctatcccactcagcacccaccagatcttagcgatctccgccgatcgccctgtcaggcaattcctggcgacaaactcaggcttccaaggctacaggaggaagaagcacgcacagcatgaccggctggcgtgagatgtgtccgtattgaagactggttctacacacgccgtcgtggctctcacctacgcgtctcttgaagaacaactgaggcacatgactcctgtataagttggatcatgactaacgccacaactaccatgctgttacgcatgctcaaagacaatcctacgccgcgctgcccaccgacacagcgccccatttccacggagccaatgatgatcttgatcctgtctgcggcctgtactatagggggtcatcacatcgcgctctgcgcccaggaggcttactacatcatcagttccagccctggcacacctggagccagcctatgaacccgttggatctgctgtatctttatcaagatagatgctatgctgcgctacgttcctatgccagtgttctatttttaattcttagctacgagattgagctaccatgtgct

SEQ ID NO: 173373 - DNA, 717 bp, Zea mays
  Clone ID: MRT4577_89698C.1
cctcgaggttcggccgggatagactccactaataaaccatacacaccacttaccccggccggaccggcaggcagcacaggatggacctatgcctcttagagaaggccctgctggccctgtgtcaccgcggcctgtggtggccatcgccgtgtgcaagttgaccggcaagcggtaccgccttccaccggggccccctggcgcccccgtggtgggaaactgactgcatgtgggcgacgacctgaaccaccgaaacctgatggccatggcgaagcgactcggcgacattttcctgctgctcatgggcgacgcaacctggtggaggtgtcgaaccagcagctggccaaggaggtgctacacacgcacggtgtggagttaggctaccacaccctaaacgcggagctagacatcttgacgggcaaggggcaagacatggtgctcacggagtacggcgaccactggcgcaagatgcggcgcatcatgaccagcgctcttcttcaccaacaaggtggcggcccacaaccgtaccaggaggtaggacgaggcctcaataaagcaagacgacctgaggaaagacccttatgctagtcggaagggacgaggcgcgccatgctgggttcttgaacaaggggctgtctgacttcaacttggcgctggacctggggtttctgaccaaggctaggaagtacaccttcttcaagcccaagttcatcttctacg

SEQ ID NO: 173374 - DNA, 344 bp, Zea mays
  Clone ID: MRT4577_89699C.1
agtgcagatcactgacctcagcatggttcaacttcctgatgaactacggcgtgaccaggtgggctagctccccgacgcggatgctctgcacgttcttctacttcgtaccctactactccatcctgagcaaggcatctctcaagtccgacgacatcaacttcagcgtcgatctgctggagctcatgaccgacctgaaacctatccacaagtcttcattgactagggccgacaagagcctggctctatgggctacgtctactctgctatacatcccactatatgtcacgagactctcggacactacgctgcagtgcaagatccctacaattgagacgcatatcatg

SEQ ID NO: 173375 - DNA, 477 bp, Zea mays
  Clone ID: MRT4577_8969C.1
ggccaaaggatgggccttcattaaaaggggaacaatccccaaaccatagtcgaaggggccaagcctaaaaggcagtttttttaacaaaaaaagacatcactttttaaaccccccagggaacatagtcttaaacccaggctggggggaaagcctttttgccggcagcagcaaatccagctggaatgactttgaccacattgaaccccacagtttttgataggggcctgcactggccaaagataacatgggccccttccttcacacggaaacatggggaaatgtgacctggaatgttggaacgccccttttcatacccctgggatttcttaacaaaggggaaatagttcctgcaaacaatgatgggtctgttcatcttaacactggggcatgttccaacaataattctgcctctgataaaaacggttccagggaatggacatttcttgtcaatggaggtcccttcaattgcttccctgg

SEQ ID NO: 173376 - DNA, 132 bp, Zea mays
  Clone ID: MRT4577_896C.1
cacgaccagcatagtatctaggtgaacttgcgacttggaacacagcatacggcgattggcagaagcttttaaggggctgggcaaccctttgagaattattgaaggggttggggcttcctccggcccaaaatt

SEQ ID NO: 173377 - DNA, 208 bp, Zea mays
  Clone ID: MRT4577_89700C.1
acaatacaagaggtgctgtgagtcaccatgtcattatgatgtacgtcacccaaatatattctactacctgggggggggcttgcttaacattacagcattggcccaacccttaatcccttccaccctatgaaaaaataatacaacgttcctgtgcacctcaagacctaaatttccaaaggccaaactggtttttcctatcctttactcc

SEQ ID NO: 173378 - DNA, 683 bp, Zea mays
  unsure (1)..(683): unsure at all n locations
  Clone ID: MRT4577_89701C.1
aattcggcacgaggttatgccatcatgatgacaagaaatgaggatctaacttggcaaatgagggcaatacgggtgctacctatgttcgttcttcctgttgtatcctctgtcatatattcaacagttgttaacttcacaagaatgcgtaagtaggcagaaagccctttaaggaaacactgtttgtagtctaacttgtagaatataccaattttttattttcacttctttttatgcaattttataagagggtttttggttttctcacctattaaatttgcatggtctgtagtaaaaattgtgatgggaattttattcagagtttgtaaatatgtggctccagaatatattgtttataacacagcttgtattttgttttgaatgttgctcaatttctttttattatgtgtcatcattttgaaacttgccagttgtcaatttgggaaatttttttgaacgtaatggcaggagctctgcctctcaattaagaagaaaggaatcaacctagttntaagggaaaccgggcctaaaacctatacaggacgcacaaacaaaccagccaacaacaaccccacacacaatgaccatcctgagtcatcgttgccgagctcaacacaagtgacgggcagcttcgactctccagacaggcagcacatggccgaaggaaacacgacgacgactaaaaa

SEQ ID NO: 173379 - DNA, 199 bp, Zea mays
  Clone ID: MRT4577_89702C.1
cgcatgttcttagcttttctgtcatctttcggcaactatttatttgtttgactgttataagatgttatgcaacatctactccatttgaagtaattgtcttgtgtagagcaaaaaaaaaaaaaaaaaatataaaaaaaaaaaaaaaattaaaaataaaaaaaaaaaaaaattttaataaaaaaaaaaaaaaaaaaaatag

SEQ ID NO: 173380 - DNA, 485 bp, Zea mays
  Clone ID: MRT4577_89703C.1
gtgtttgtttggttttttttttttttttttttttttttttttttttttttttttttttttttttttttttttttttttttttttttttttttttttttttttaaaaaaaaaaaaaaggttttttttttttaaaaaaaaaaaagatttaaatgggggggggggggggttattaaaaaaaaaattccttaaaaaaaacccaaaaataaaaaaaaatttcaaaaaaaaaattgcccaagggttattcgggcgggcggccccttaaggcccctccccccgaattccgggggcaaacttaattttctttggcataaagggaaccccctttgggtggatggcccaaaagttttttttctcaaaaaagcccaaaaagaaaacctttggggccttttttaacgcgggcaccgggggagacttaaaaccggggtcctttttaaaaatcttcgcaattttcccggaccccttggttgaccccgaaattccccacc

SEQ ID NO: 173381 - DNA, 356 bp, Zea mays
  Clone ID: MRT4577_89704C.1
ataatgtctctgatactgtctttcatccgttttactgctatcgctagtgcatcaagtctaggtggaacataataaaacacagggacgcgtacaaagtctgcaccacaagcagagtacaaacagaggctattaattgcgctgaaccaccaatggttgagacgtcaatgaataggtaaactattaacttgctcattttcgagctccttctcattgattgtattctatgtaaggactcgacgatggacgtcttgcacacacgaatccaatcattgtagttcgaaaacttgaaaacgtactcgaataagtggtcgaactggtcatgaaaattgccggccactctagcaggtccaacatta

SEQ ID NO: 173382 - DNA, 311 bp, Zea mays
  unsure (1)..(311): unsure at all n locations
  Clone ID: MRT4577_89705C.1
gctnnngctgcccagaagggggnngaggnngangcncnngcnaaggcaaaggcgggggaaaaggangaggcngacttcgcancaaangcngcagcncaggccccgaggaaagccncaccccgngngaccaangaagaagnccagaaggcngcngcngcncncaagggcncngaccaccgccgngcgaccaacgnnagngcnagannggangcccagcagaagaagcnnaaccnccccanccnncccaccacgacaancggnncgnncccacaaaccgnngagcncaggagggnccgccgngagnacaaggc

SEQ ID NO: 173383 - DNA, 537 bp, Zea mays
  Clone ID: MRT4577_89706C.1
cctgacataaacttggcgatgtggcaaccagctgcaggcccattctatagggctgcagggatgacctacctgcggtacgctaatatttgcgcagatcttatgcgtagtgtgatgaaggagcccttcaaggcaaaagccatgcagcggagtgctatcaacttcagatcaaacacttacggtgctgatggcaaacagtccccaagtgtgtttgtggagctgaatgaggtgcctcagactaagccctagacataaatcgacgcagcatggcttgacattgcaccagcagacatgtcgcggactggggctggagggtgtcgtctttactggcagcaacttgccctgtcgatggccatgccctagtcagcactaatcagcacgctgcaggcactagtaggattgtctaggtgccatgtagagtgtcatcaagaggcagattgaggatacgagcccacactctgtgttgaaagaaaccacgtagcatttcgcttgtccatgtgtaaacatatcccagtaaaaaaaaaaaaaaaaaaaaaaaaa

SEQ ID NO: 173384 - DNA, 178 bp, Zea mays
  Clone ID: MRT4577_89707C.1
ctggggatgattgcttgactttgaacgcgctcctcctccacattctatgcgggatggtttgaacctcttcatttgcctctccgtcccttgcgatcaacaaaatacttagcgccctagcgatgcttaagtgtatcaaggaacacaacatgtataaaagattatctgatgaacataaaaa

SEQ ID NO: 173385 - DNA, 624 bp, Zea mays
  Clone ID: MRT4577_89708C.1
cgggccccccctcgagtttttttttttttttttttttttttttttttttttttttttttttttttttttttttggaaaacaaataaaaagcccgagggatatccaaaggtcctcctttaaggaaaatatggaagctttaacagttttttggaggctattctccctaccccctcgttttgccacggccataaggaacagggggcaccgcctttccgttgttcgtcgcccaaaggccaaagccatccggggcctgcctagttgcaaaagccaccccagtttgcacggaacaatttttaccattagcagcaagcaaatccaaccggacgggtttgaaggcatccataaccacccaacccgaaaggggagcattttgaacacacccaacccaacacgggggctgtcccgtcaataaaatgcaaaaatggttccagtcctgggaggttggaacaccgtatcctcccccatacctggttacactataaaaaaggatggttagctgggggttgaaaatctggacgagcaggaggacaccaggatctcgggttcctccccctcacattccatcgtcgcccacggccttttcctgactgatgatcctttctacaagaacacgaaatgaaatca

SEQ ID NO: 173386 - DNA, 272 bp, Zea mays
  Clone ID: MRT4577_89709C.1
attgagccagatagctactggctactctcatcaacatcaacctcttgcattaaaccaattgggcgcactgaacccaactgcttatttgcagcaggaaatactactaacatttagccagctgagatggaggacaccgcgcgttttttgtgacacattaacaacaggtggccttgtaccaacaatttgggggttacccggcaacccttttacaaatacaacaatgggtgccctttgatcaacaaggttttggcgaccgagggggcatctatcca

SEQ ID NO: 173387 - DNA, 206 bp, Zea mays
  Clone ID: MRT4577_8970C.1
gatgctgcctctctcctcccgtgctcgcacgattgcttacccaactgccgtagcgtagcctgtacgcggcgctagccagatgccaggtttttcagcatgggcctggggaaggaaggcatcctacatggaggagggaacccttgagagcggcatggagtacaggactgtatctggtgttgctgggcctctggtcgtagggggtaaag

SEQ ID NO: 173388 - DNA, 320 bp, Zea mays
  Clone ID: MRT4577_89710C.1
ccggccggggagattaccttagcccgcctgaagagtgatcatcgttcccagaactatctcatcataccgataccggcctcaacggcctctttttcccagcctcacaaccaattcctggttcgggcgatcgcagttgagcatgcgccacgacacagaggtgccggaggaggagcaccccctgcagcaaggctgctgcttgcttcccgggcgccgatatcgatcgaagaggagcacggccaccacaggcaccacctgaagagaggaccgcaggaggaacgtgagaccgggaataactctgcgcacccccccccatgcctgtg

SEQ ID NO: 173389 - DNA, 538 bp, Zea mays
  Clone ID: MRT4577_89711C.1
atccgcctacagtgtgaaaatgctgctactctagtgctcttgcaggcataaccatgcgagtcaccctgcaaaacgatagaggagcaacagtgtgagacacttctatgcagccagcacatgctctgccgctgacatgatctttaatagacagggaccatgcctttgtcacttatccacgttgtgcagctctgatgggaatggcctgcttgatggcacttttgcatcattaggtctctctggcgatgatcggactctgggagacgcatacagccacattggacaggcttgtgatagaggaacaatgctgacatacatgccttacatcactacaattagatcagcacataaagaacactgccttaaatctgcaaaagatcattgtctatgtatgccacgatgccaacactgctggcatcctgaacgtcacgcccatcgagaaggcaagtgcacacagatatctatttgattgtctgtcactgacaccatttcagatagagactgcagttggtcctagagggagtggacacaaacatcactg

SEQ ID NO: 173390 - DNA, 594 bp, Zea mays
  Clone ID: MRT4577_89712C.1
cggcattcgcacaccgctccgacgaacgtaccaactaatcccccagccgatctcgtctccggtcgactccagctccccctcctccggtcctcccccaccgccccaagatgcagatctttgtgaagacattgacaggcaagaccatcacccttgaggtggagtcgtctgacaccattgacaacgtcaaggcaaaaatccaggacaaggagggcatccccccggaccagcagcgcctcatcttcgctggcaagcagctggaggacggcaggacccttgctgactacaacatccaggaggagtccaccctccaccttgtcctccgccttcggggaggcatgcagatctttgtcaagaccctcactggtaagacaattacactatgatgtggagttcgtctgacaccatcgataatgtcaaggtgaagatccaggaaaaggagggtatccctccttaacagaagagactcatatttgttggaaagcagcttgaggatggaaggacccttgctgactacaacatctagaaggagtccacactacacattgtactttagatttgaatgaggtattaatatttttattaaaaacaataatg

SEQ ID NO: 173391 - DNA, 511 bp, Zea mays
  Clone ID: MRT4577_89713C.1
atttcccctattcgtctctgcttgcgacccctccgccgccgctgcaacctcatctcggggccttccaccgctcacgagaaaatgccgaatgatatccgccagatgcgcgctttgctgttcctccgcccgtgtgcaaggtgtccgggatatggaaacctcgaggcatgatcatgtcgtcatcctcggtgatcattgctcccctgacttgcactccctctcctgattccattgtgagaattgcaaacacgtggatgacctctctcctcccaagatcgagcggccactaagtgtgatagtgtacatgtgagcggctattcgcccctctatagcttctttatctttagcaaaccatgcttgttctgtaaggcttctctcttctctactagacgtgtacgtctttctgacaacttctagctgtgattatggaccatgaagaagcccccctaaggaccgctagctccaactttctatgcctctattgttgaaaatgtgctctcttgagccactcatg

SEQ ID NO: 173392 - DNA, 207 bp, Zea mays
  Clone ID: MRT4577_89714C.1
ccccaacaacccggagacgcaaataggagccgggagactcacgcaacacaataagggaccatcgcaagtgcgaggagaatagaaacactggcatgaatgcagaaagctaagcggacggaggccaatatggaacatttcctgcaaccaagcaccggcccaatcataagggcgacggcataatcaaagaggcccgccggccgcagaaag

SEQ ID NO: 173393 - DNA, 307 bp, Zea mays
  Clone ID: MRT4577_89715C.1
gatgacaagtggtggtttaatacagcacacaccactggggataacacagcacataaaaccaaaggccgcgtggaaaaagccttggcgtcagctgtcaacgcaacaggcctagccatgcatctacattgaaagaacacgtatttagtactggaaaggcaagagctgacacggtctggtcggagcgcatgacagacctgcgagcggatcaagtatctggaccccatcagatcacctgcctatcaaggtgaaggtcaccataaggaagggccctccctgacgggtagcaggacaccgaaaccacaaagtc

SEQ ID NO: 173394 - DNA, 508 bp, Zea mays
  Clone ID: MRT4577_89716C.1
ggaactctaaaagggtgctgcaggcgtcggagcctgaatattgcatagcgctgtgatcgtaccgtggccgactcatggatctagatattccctgatggacattatatgcctgcacgaactccacacataatggtggctagaagatatacatgaaatgaccggcggggacagagtagatccatctactgaacagtgttgaaaccacagactacacaattgatgctgctgcaaatcctttagcaatactttataagtccacggagcaacgcgactgcgcttgcactcttgcaagctgatggcataacaactgtcctgctcggtggatttcccctagccttagttctcatgactccctcttcactaactgacttcgttccagctaacgtgccctacatagtgagagccgacagcccagtaccccgcatgcgtgacgctgccctaaacaatgccaccaacccctatcacaagcagctcgtagcgtctcatgaccttcaccgtgacgaacaca

SEQ ID NO: 173395 - DNA, 397 bp, Zea mays
  Clone ID: MRT4577_89717C.1
ccggttataatccattatgagactatattattggtatatcttagcacaatctattttgggtccggtggattcgtaattggggccggttcggtagtggtgtcatggttaatgacttatggtgccgcatcaaaactgaaagcctcctatgaatgcgcacacaggattgtgctactcctcgatgctggtatcaaggtctctagtcatgatccattgtggaactgcattgatgtgtgaccttccgtggaacttcccttgaaataatttctatgttgtttgtccaacaatattataatattattcttttttttattgggtcgccccttttatagatcctaagtttacgtattcttgcattttacgatttatcttttttattttgttactataattttatatt

SEQ ID NO: 173396 - DNA, 587 bp, Zea mays
  unsure (1)..(587): unsure at all n locations
  Clone ID: MRT4577_89718C.1
cccacgcgtccgatttatttgtagaacaacactctgtgttggtgtcaagatctatagagcaggcatttctagtaagtataggcttgagatgtgatgtttaccttctttatctaaataacattattgtaatgagctgtcaatgttacaagactacagaacaaatgcactgcattctattttagctaataggtttattctttggaaaagaaaatgatgtgctaattagcttagttctggggacttcaggggttccatgccggcctaacctattggaacgacttgttagttgttattccattgcatccaaagtccacatgttattttgttaagctccataatgctgtggcatcgtgttgcgaaaacattaattgggagaacattagtacatgaatacttgatcttcatagttcagttttcgtgcatgtgcacttgttagttgcgaaaatgaactaatttcccttggngaaatangtatcccttggaaaaatggttttgccanactaccccttanaggaactaattcctggcatatggtgctcagtgggcagtgcatcaggactcgaaggaagcatagcatcatcggtttt

SEQ ID NO: 173397 - DNA, 271 bp, Zea mays
  Clone ID: MRT4577_89719C.1
gtgaaggtgtaaggtgctccgcgacgcaacggtgacaagggaagttcagctagagtggaggctgcaccggtgggacaagacgaggttcatgtccgtgcttcggcggtatgcgacaagcggcaacccgaggcattggtaacttgctaagacatttgtcccatggtctccacgcattgcgtgatcaaattcaccaggttaaccgcgcaggcatgagactttcccttctactgtctaaaccgcgtcagcttttgcgggttcttcacctttaggg

SEQ ID NO: 173398 - DNA, 638 bp, Zea mays
  unsure (1)..(638): unsure at all n locations
  Clone ID: MRT4577_8971C.1
gaggctgggtagcgccgtgcagggtacccggtgccggnaattcccggggtcgacccacgcgggcggggagatcatcancatccacatcgggcaggccgggatccagggcgggaacgcctgctgggagctctactgcctcgagcacgggatcgagcacgatgggaccatgcccagtgattcctcgggtggggtcgcacatgatgccttcaacacgtgcttcancgagactgggtccggggagcatgtgcccagggccatcttcgtggaccttgagcccactgtgatcgacgaggggcgcactgggtcgtgccgccagcgcttccacccagagcagctcatcgcggggaaggaggacgcanctaacaactttgcccgtgggcactacacgggggggaaggagattgtggatctatgcctgggccgtgtgcgcaagcttgcaaacaactgcgctgggctgcanggattcttggggtgcaatgcgtggtggtgggggactggctctggacttgggtcactgcggtgggggcggctttcangtgattatggcgagaaggctaagcttgggttcaccatttatccttccccacaggtgtgaacagcggtgtgggagccatacaacagtgtgctctcgacccact

SEQ ID NO: 173399 - DNA, 315 bp, Zea mays
  unsure (1)..(315): unsure at all n locations
  Clone ID: MRT4577_89720C.1
ctccccttcttcccctcacccccaccctacccgggcacccggctgctgccaggagaggagggccgggtccggaccaccacccctctcttccccgccacctactcttcttctccctgtcctttctctctctactagtactaggtctagggtcgcctcgccgccagccaaccacgcgcgcacacgccccgtccggccgtacccgctcttggtggggcactgcacacaaatactactgtctctcctcgcctgctgccgacttcgcggcctcgtcgccctgccctgtccnccntgggcgatggcttcgggccttcttgg

SEQ ID NO: 173400 - DNA, 353 bp, Zea mays
  Clone ID: MRT4577_89721C.1
atcccaccgtcgcggatgcattttactcaataattaatgtggacaagactacaagctctgtttcgccaacactgacgcataagcccgctcaacatcttcaatcatggcgtcagtcgacttggcagctgggctagccgacagctcactttctctggcagtggtgtctctgctgctctggtatgtgccgctccacaaccccgagctagtcgaggcactgctgctttccatgacgtagtggaaggggttcacgggcgggacgatggccatctccccctccagcatccgcaccacgctgctcatcgtcggtcgcgccgacggctggaactgcacgcaccacagcgccaccttgcaca

SEQ ID NO: 173401 - DNA, 2317 bp, Zea mays
  Clone ID: MRT4577_89722C.1
ctccctcctccacctccccttcttcccctcacccccaccctacccgggcacccggctgctgccaggagaggagggccgggtccggaccaccacccctctcttccccgccacctactcttcttctccctgtcctttctctctctactagtactaggtctagggtcgcctggccgccagccaaccacgcgcgcacacgccccgtccggccgtacccgctcttcattccccactgcacacaaatactactgtgactccgtgagggagcaacaggaggaagaagcaggggggagaggggaggggaggggaggcattcgtgctccttttttccttcctactgtacgagtacaggactgcgctgcctgtctctcctcgcctgctgccgacttcgcggcctcgtcgccctgccatgtccaccatggacgggtaccctcggccgattattattacatgtacttcttttggctaaaaaaagatgagattttgattaatccccgcgcatgttttttttttttgtttttcatctctgtttcttgctgtatttacgccgtaccatggcgctgatgaattggtttccatgtgattgtgccggctgtgggcgcagacgaaggctacgggcctacttgggacagcgacgacgaatacgacaacttcatacgcaagatgaacccgccaaggatcgtcatcgacaacgagtcctcggcggaggccacaattgtaagggtagatagcgcgaatgaatacgggatattgctggaagtgatccaggtcatgattgatctcaaccttgtcataggcaaggcatatataacctcggatggtggatggttcatggatgtcttcaatgtgaccgataaggaagggaagaagatcaaagatgaggcaaccctcacacagatcgaagactacatcagaaagtccttgggcgcagattcaagatacattccttcccgccggagatcggtagacgtcgccgccgcagctgaccacaacatcatcgaactgacagggacagacaggccaggactgctctctgaggtcagcgctgtgctcaccagcctcaagtgcaacgtggtcagcgccgagatctggacccacaacacccgagccgcggccgtgatgcgggtcactgacgaggacactgggctggcggtcacggacgccgagaggctggagaggatcagggagaagctgtcgtacctgttccgtggaggcaatctctctcgaggtgccacagtgtcgtcgaggactgccaccacgcacaccgagagaaggctgcaccagatgatgctcgacgatggcgactacgagcagctccagcggcaagctccgggacagtctcagaggcctaacgtcaccgtgaggaactggaacgacaaggactactcggtggtgaccatcagatgcaaggacaggtccaagcttctgttcgacacggtctgcactctgacggacttgcagtacgttgttttccacgcgaacatcgatgccaaggacaatcaggcttaccaggaattctatgtaaggcatgtgaatggatcgccaatgaacactgaaaccgagaggttgcgagtcatccaatgcctggaagcagccatcgaacggagggtatctgagggtgtgaagcttgagctgtgcaccaacgacaaggtcgggctgctatccgaggtcacccgcatcttccgcgagaacagcctgacggttacgagggcggaggtgaccacgcggggcaggatggccgtgaacacgttctacgtgcgcggctccgcgggagaggccgtcgaccagaaggcgatcgactccatcagggaggccataggccacagcctccaggtgaaaggacaggccgagccgccggagccgcagaagaaagagtcccctacgtggttcctcttcgccaacctgtttcgccccaggtcgctctacagcttcgggttcatgcgctgatcgcgccgccgtcctgtcctggccattgcttccaagaaccgccgtcgtgcagtaagttcaccaccgttcacacgaagcaatccaggacatggggggatctttttcagaaggtggagaagccttcgttgggtcctagcagtgcaggtttggcatgtaggtagagcatggcatgggtggtgttcatatatccttcgtcgccgtcgtcgtcatcaggatcatcatctgtgtcatcagcatccgcgtctgtaaatatgacagcatttgaccatttgtacatataacgtgtaaactaaaggacgtaaatataagctgtacagaatatagttaaattccagatttgttgcgacgtcgtaaaagccggcgcctttttctc

SEQ ID NO: 173402 - DNA, 416 bp, Zea mays
  Clone ID: MRT4577_89723C.1
gaagaatctagtgttgggtggacgagggaacagggtggctgctccggccaagggcgccacagggctagcgaccgtcgcaaagggcccgcaaatggccaatgaagaacacacagactgacgcccaagagaggaacccaacacacggatcccaccaaagaacagggaggcgaaacgcaccaggcatacgggaaactatataaagagggagaggcaaatgtgccacaaaagctggaacaagcgcagcgagcaccgcgctatgaaagaacaggccaagcaggcacaggaaggccgactcccttactggcctaagccgaacatacccgcaaaggaggcaacaaagactgccaaaccatgctacgcaacaaacaccaacgaaaagcgggatccacggacaagggcctgatcgaacacggacc

SEQ ID NO: 173403 - DNA, 1051 bp, Zea mays
  Clone ID: MRT4577_89724C.1
ttgggtacctcgaggccggccggggcaaagaagcgcaggccggcacaactccctcctccacctccccttcttcccctcacccccaccctacccgggcacccggctgctgccaggagaggagggccgggtccggaccaccacccctctcttccccgccacctactcttcttctccctgtcctttctctctctactagtactaggtctagggtcgcctcgccgccagccaaccacgcgcgcacacgccccgtccggccgtacccgctcttcattccccactgcacacaaatactactgtgactccgtgagggagcaacaggaggaagaagcaggggggagaggggaggggaggggaggcattcgtgctccttttttccttcctactgtacgagtacaggactgcgctgcctgtctctcctcgcctgctgccgacttcgcggcctcgtcgccctgccatgtccaccatggacgaaggctacgggcctacttgggacagcgacgacgaatacgacaacttcatacgcaagatgaacccgccaaggatcgtcatcgacaacgagtcctcggcggaggccacaattgtaagggtagatagcgcgaatgaatacgggatattgctggaagtgatccaggtcatgattgatctcaaccttgtcataggcaaggcatatataacctcggatggtggatggttcatggatgtcttcaatgtgaccgataaggaagggaagaagatcaaagatgaggcaaccctcacacagatcgaagactacatcagaaagtccttgggcgcagattcaagatacattccttcccgccggagatcggtagacgtcgccgccgcagctgaccacaacatcatcgaactgacagggacagacaggccaggactgctctctgaggtcagcgctgtgctcaccagcctcaagtgcaacgtggtcagcgccgagatctggacccacaacacccgagccgcggccgtgatgcgggtcactgacgaggacactgggctggcggtcacggacgccgagaggctggagaggatcagggag

SEQ ID NO: 173404 - DNA, 200 bp, Zea mays
  Clone ID: MRT4577_89725C.1
aaaaatataaaaaaaaaaaaaagaataatgatagaagatgtacaaatatataataaagaaaaggtcgggcattggcgtgattgatataaaaacaatcgttccgcgtcagagaaaaggagactgccttagtgcagtatggccatacagaagttctggttctgttagtacctgaaggtaaatatatgggggggttgcttcaa

SEQ ID NO: 173405 - DNA, 374 bp, Zea mays
  Clone ID: MRT4577_89726C.1
tcgatctaagcttcggctacaacaaaagaacgaggaggggtcattttgaaccgcggagcagttaccaccacggcaactatggccgattctccctgccaagagcaactcatcctgcaactcctcaagaacgagaaagcaggctgcctagcctaagcgatagcgcacacagcctaatctggggagggacacacgagctctgacagcatcaagaaccttgggatgaacatgaagggcttcggccttccaccaaagacatcatgcacaaaagaaatacttaagggtggacagagggatacaaatatcagtctaaacaactaggttggatgccacaacgagccatcaggagcatataagagtgaagtgtcaaaaagggg

SEQ ID NO: 173406 - DNA, 380 bp, Zea mays
  Clone ID: MRT4577_89727C.1
cgacccacgcggccgttaagccctaacaaagactgatttcggcgattatgacaagaagcccccggagggcgacgccgacattttccttaaggccaagggacacgacagcaacgaggagaactatcgcataaagaggttcacccagctgaagaagctgatgaacgcttattgtgaccgacagtctgtggacatgaatgccattgcgttcctgtttgatggccgcatgcttcgcggagagcagacccctgattaactgtatatggaggacggctacgagatcgatgccatacttcaccagaccataggcagctttcctagcaccacttaaaagcatcagtcgcagagcttcgttttgctctccgccctgcgtagtagtaaac

SEQ ID NO: 173407 - DNA, 267 bp, Zea mays
  Clone ID: MRT4577_89728C.1
acagccttcgttcttttttttttttttttaggaacacaaaacagggggccatctaacacatgggtgtggacaaatccgattattataatagcaccaaccaatacaaccggttatgacaagcgacccttacatcatatcatgtgctatgcgctgattgctgggggctacatgaagacattaacaagagcggttacatatataggccatagcaaagctctgtgagggtgagaacatgcagaagcatcttactcatcttgggaaggggaa

SEQ ID NO: 173408 - DNA, 561 bp, Zea mays
  Clone ID: MRT4577_89729C.1
ggcgccaaagaggtaagcacgcgctctgtctccgtgcggtagagggacagcagcgtcaatccggcggtgttatgcgccatcggcggtagtcttcaagtgccaacgatggacctaaggatgcgtctgccgttatcgtagagatcacctactagcatgtggtccttgccaccgtgggggctggcgacaaccagctgattgaacacaggcattctgaggacatgtaccatggcgtgttcgagagaatggctgccatgttattgccaaacatatgttggcacaatagggcaccaacatacatgcaaaagagttgatatttctacatgaggtacttcgcaccaaaggtattcgttccatgtgactcatgcatttgagcaatgtacaatgacgaattcatggcttacaattttattcactagggcgattcatacccatgcgttgcacaggaaacctgcatacaccgtaaatggctggccctccctgatattgttaactatactgatggatgccactggcgtgacatgaagctatgtgctttcttaatgaggaatgtatccccacatt

SEQ ID NO: 173409 - DNA, 150 bp, Zea mays
  Clone ID: MRT4577_8972C.1
tccggaattcccgggtcgacccacgcgttcgcggactcctcggcggacgcatctgctgacgcttctgccgtcgcttaggaacccatcgttgctggtgccctctcttagattgcttatgagccatagctcaatcttaaagatttgctgctg

SEQ ID NO: 173410 - DNA, 305 bp, Zea mays
  Clone ID: MRT4577_89730C.1
ccgggccgggacataagcgaacaaacatcgagtacagtcggctaggtaatctggtggtacgacgacatggcggccaccagcagcaagtcgtcgtcgtcctcgagctcggcgcagcgggcagctgccgcactgctcgtggccgccgccgtggcggtgtccgtcctggtggtgggcgcggcggcggtgtgcgacatgagcaacgagcagttcatgtcgtgccagagccgcggtggccaagacgactgacccaccagctcgctccgtagcaccttattccggatcgactagtctaatcatagacatca

SEQ ID NO: 173411 - DNA, 527 bp, Zea mays
  Clone ID: MRT4577_89731C.1
ctctagagagttattcatgtgcttctcataagcactttggtccaaattgtttgcattcttcactagttcatcatggttgggattcttatgaacatactcctttttctcttgcttgagaacaattctcaagttatggtgccaatcaataaagatcatagtagtgagtttttgtttgtcaagaattgattacaaattaacaccaataagacccttagatgtcatcactacaacaaaaataaaaagcaaatttcagcactttgtttactttaatctttcattaaacaatttaacaaaatattctcccactatatgttttgcaattgtcttcccactaacgacatatagtggacaagaaccatgttcactaagttatagcgagcttggcaacattactagaaacataatgacataggtaagaaatatttgctaatcacatcttatgtgactctttgtttcgatatatgtcgcttggcaatgttggtgcatctgattatggaattatacaattttccaaaggctttccaaac

SEQ ID NO: 173412 - DNA, 741 bp, Zea mays
  Clone ID: MRT4577_89732C.1
gccggggccccagggcctttctggttgagtttttttgagccaaagccatcttagatttaaagcccatccaagaacttcaagattatggatacccaggcctcccatactaagtggtctgcaaactctttcccaaccaacagagcaatgacctcttttgatatcttttctgcctttccataagaagcccctccgaattttgtcaatagccttgatcacccatttagggcattgaagcactataaggtgatggataggaatggttgtgagcactgatttaaccaaggtcagccgacctgctgtgtgaatgagggcagatttccatcctggtagtttatcagctatcttgtcaatgagttctaggaaagtatttttggggagtttcttgactgaaaggggcaaacccaggtatttgaatggaaaagccacctcagtataaggaaataactcctgagcagccaccatgtcttgttcctcacaatgaatgggcgtcatactgcatttgctcacatttgtaacaagtcctgaagcatctccaaagattctcagaatttctttgaccaccccgagttcttctctacttggctgcaagaacatcaccacatcgtcagcatgtagagagatacgttgcccatttcctcttctaacactgggtggtaaagactcaattcttgggctcttaaacaagagaatcagcccatcctaccaatataaataacatgggataaagggatcctcctgcct

SEQ ID NO: 173413 - DNA, 363 bp, Zea mays
  Clone ID: MRT4577_89733C.1
gaaacagcaagatccaaaattatgtggggacaggaggtgtaaaaaaacaggaagtaaggaaatccaaaaaaacaaaaagaatgaaaaagaataaaaattgggagggagaaaaaaaatgaatcgacattattttataaataaatagaaggcaagagtttaaaaaaaagaaaaggaccaagagtgccccacacattatagtgggtaaagaaaaggtgaaaaacatgggatcaaggataaaaaggagagtatgaatgaaattggtttttttagggagaaaaaaaaaaatttaaattgacagtaaggtttaaagatttttggggggcaaaaaaattaaaaagccgagcatgggggaagagtgtcccc

SEQ ID NO: 173414 - DNA, 276 bp, Zea mays
  Clone ID: MRT4577_89734C.1
cctgtgttttggctgagactgattcttcactgtggccttgtgagaaaagctgcctaaccagttctgggccctggctagttacaaccatgtgtgagttgtttacagtacgcacaggtatgggctgaagggaaacaaagcttaagagatgactagaaaggcttgctgaaattgctatgggagggccccaccctccaagccatctccgctcacaccccgctcggtttcagttctgcagcttggttatgcgacattctcttaatcctgttttgaatctgg

SEQ ID NO: 173415 - DNA, 190 bp, Zea mays
  Clone ID: MRT4577_89735C.1
accaaccaagcaacctaacccacaccaaaccttaaacaacacacccaaatacacactcgactgcccatttaccaaccaacaccgggccgatcaaaccacagcagcaactacaacagcttatacggttcttgcttccactaactcgcacgccttgccaccacacaatcaccaattaggcctgaccaactat

SEQ ID NO: 173416 - DNA, 402 bp, Zea mays
  Clone ID: MRT4577_89736C.1
ccaccacgcgcgctgtcttaccgggagacgtacacatataccgcctgtgcatctggttcacacggtaaggggcgccctcactgtagcgtctgctgacctgtacgtgatgcacggtgctcccgcatcaaggagcccatattggagaccgccaacacgcggcgctgcatgctacccgtatactacccggtggacaaggtctactgatacgtcttggacgacatcgagtcgatcctgacgatctagtccctgacagagacctaccatgtcgcgcacaagagtgggcccatcatgaagacgcctggcatttagcccagaacaactgagctctacttctcgttcatagtctcacaccttcacgacaaagtgcaagcgacctccatggatcagctccaggccataaat

SEQ ID NO: 173417 - DNA, 326 bp, Zea mays
  Clone ID: MRT4577_89737C.1
aacaaggggcaaaaaaggggttaggattatcgccctcctcaaggggccaaaaaaaagggcgggccccggacaacgggtttttttcccgggggcccccggggggaagagttggaagggtaaaaaaaaaacccccccccggggggtccgggggggccaaaaattgaatgggaacaggagcagcaatcccgaaacaaaaaaccacagtgcaattagggggggggttgcccacaatacacaaaaggaaccggcgaattgggcggaggttttcgattttggccacgggcgggcggggaaaccaaaacctttgcggggggcctggggggggc

SEQ ID NO: 173418 - DNA, 488 bp, Zea mays
  Clone ID: MRT4577_89738C.1
ataaaaaaaaaaaaaaaaaaaaaaaaaaaaaaaaaaaaaaaaaaaaaaagagaaaaaaaaaaaaaacccaaaaaaaaaaaaaaaaaaaaaaaaaaaggttttgctctggggcgacccccctttgggggaaatttgtggaaatccccatcactggggggggctttggagtttttttttgggggccccattgccctttagggggggggatttcaaaatactgggggcggtttttcacagcggggggtggggaaaacccggggtgtcccccatttaaatcgtttgggaacaaacccctttttccccaggggggataatagaaaaggggcccaccccgatcccttttcaaaagatttgcccaccctatggggaaagggccccccctttgtcggggcatataaagcgggggggggggggggttctcgcgcagggagccctttacttttgcgggccctttagccccctctttttgggttttttccctttttttt

SEQ ID NO: 173419 - DNA, 127 bp, Zea mays
  Clone ID: MRT4577_89739C.1
ctcactcgttgtcccgcatgtaatacactttacacactaggagcatacgttcgggacggggtcaattcaattgtccacacccaccacactgctctcaagtgctgaggatgtaacgcttcccaagacc

SEQ ID NO: 173420 - DNA, 775 bp, Zea mays
  Clone ID: MRT4577_8973C.1
gatctatcactcccggttcaattccattccccgaaatccctaggcccccacctccgccccctcaccctagcgccgcgagcgtgccaggcggacacagcgaacaaggcggcgccgcggcggggtgctcgcggtcagcgtgcgaccttcctgtagcgagtaaaggcggccggtgtgcgagcggcgaccaaaaggcgggcgcaaagtcgcggctccacggcacctacctttgcggccaacgcgatctcggccgcgcgaccgacgaacattccgcgggagggcctagggggaatcgggatgacaactgttggagcaagcgcaaccactaactcaagtacgagtgggcgtggcactcaacaagcctatgtccttttctgggagtcgctgaatgctgatttgctgaagctgattgctgaccgggtactctctagcgacctgctgcactatgtctggttccgcgcggtgtgcaagaagtggcgtgccgccactcattgccctcttggccgtggtgtggttgacccgcgctttcacccacggcaatggacgatgtttccggagggcaatgggcttcaccccggtcatcctgcattgggtggctacatccgcttcctcaatatccacaccggcgtcttcatccgtgtgcaccccccgtgcttcgaggaccattcagtgctcgactgccctgatggcctccttctcttgcagcgcaagaaagacgcagctatctgcctcctgcacccccttcacggtgatgttgccgagtttcctccccttgctt

SEQ ID NO: 173421 - DNA, 1583 bp, Zea mays
  Clone ID: MRT4577_89740C.1
ccggccgggccccctccgccttctgctctctctcgcctctggtgcgcagagctagctctcttgaagcctcgagactcgtctcgccgctgctctgctctgctccccagctctgccgctgcgtgcctgcgtcagttgttgcattgcagccagcgagccttgagctgctagctctctcttcaccacagttcacaggcatggagttcgaggatcgctgccacaaggtccaggagcccaagttcgactgcctgctcttcgacctcgacgacaccctgtacccgctgagctccgggatcgcggaccatgtcaagaagaacattgaagattacatggtcgagaagctgggtattgacgagagcaagatcgagaacctgggaaatctgctgtacaagaactacggcaccacgatggctggcctcagggcgatcggctacagcttcgattacgatgagtaccacgccttcgtccacggaaggctgccgtacgacaacatcaagcccgaccctgttctcaagcacattctcaagtcgcagcgggtgaaaggcgcggaccacgcgctggagagcatccacaacgtcagggaggcgctgccggggctgtgggaggaggccgagaaggcggaggacgtgctctacgccgagcgcgtcgccatggagacctcggtcaccgcgtaaacccctctccccaatcctccgaggagccctcagccttcgacatcgccggccacttcgcccgccccggcaccgccacccagccccccaagacccccgtcctgtgcaagcctaatgaatactccattggccgaggcgctcaggatcgccaacgtcaacccgcacaaggcggtgagtttccgagctgtggggccgaacacaatttccattcctgcgcctgacgtcgcatccacaccttgaagaaacattttttattattttttattctgcttgaccatcttctccctgacgaaagctttacctgagggagctcctgcagatcttcttcgacgacagcgtacgcaacatccaggccgggaagcagattggcctccacacggtgctggtgggcaaatcgcagcgggtgaaaggcgcggaccacgcgctggagagcatccacaacatcagggaagcgctgccggagctgtgggaggaggccgagaaggcggaggacgtgctctaccccgaacgcgttgcgatggagacctcggtcaccgcgtaaaacccctgaatgcctccggtgcaccgtcagccgaactttctcgacatctccaggaccgcatcaacgatcacatgtcactcgctccccgagccagggccggtgatgatctcgcgctggaactgaatccaccagcaatggccgggccgaggatcgatttccgacagcaggaagggtgcagcatgtaaagggggaacagatgagatcatgtttgtttgggttggtcccccgttgtatatgtagttatgtatcagccagtcctttgtttgtaaattaccagtatttagaagtaataagaaaatgggggtttacgtgtacgtttcctgtgctctgtcatctgaagcaataaaactggttagcaagaccggaagagcgac

SEQ ID NO: 173422 - DNA, 258 bp, Zea mays
  Clone ID: MRT4577_89741C.1
attacacattattttcagacggttggttgtttgaattgaagatatgaaaaatgcaataggctactattagaaactacatatgtgggttaaaaagactatgcatgggggcatgggatgggatgaaaaggtcctagaactacacagagtacttgatgaaaacgggggagagcgtggacttagggacggccccgatgacgctatggttcttgtcgccgtccttgaagatgaacacgggggggatgctgtggatgccgcagg

SEQ ID NO: 173423 - DNA, 234 bp, Zea mays
  Clone ID: MRT4577_89742C.1
gggaccctcgggccggccggatggcacgattactcactctgctcacgcgagcccgaggtgcgagagtgcgacgccagagaggcagatatcacatatcagtggggcaatataaaataaaacaaaaagaaataaaaactgcatcggcatttattccgttgggcctcgcttccgatgcgccggagctcgcacgcgatgggagcgcaagggtttcggctgctgctgcttctgctgctc

SEQ ID NO: 173424 - DNA, 185 bp, Zea mays
  Clone ID: MRT4577_89743C.1
atcattgaagatgatgggcggttaaggatcgcaaatctaacttcatggaattcatcatatggttacaacggtgtcttggtgtgtacgctgccatcgactgtgggatccacatacactgcctgtgcccaacacgtgtatgcttgtacggggctacctccttgctgactacaatgatagaccccatg

SEQ ID NO: 173425 - DNA, 210 bp, Zea mays
  Clone ID: MRT4577_89744C.1
ctccacgtaccgatccccaattcccaagtcgcgccacgcgccacgcttccttactacacaaccgaatgcatcttccacccccacacctccagtaacctatatggggggccttttttactgaggaggcgggaccttcctaaacatctataaatattaccactccattcatcctcccctacaacttactctaatatctgattactaccacat

SEQ ID NO: 173426 - DNA, 256 bp, Zea mays
  Clone ID: MRT4577_89745C.1
cggacgcgtgggcggacgcgtgggcggacgcttgggaaaaaaaaaaaaaaaaaaaaaaaaagagaaaggtaaaaaaaaaaaaaagaaaaaaaaagcctgcctatttatatgatccaagctttcgatcccttgcatgcgacttcttacctcttctctagtgccacctaaattcaattaactgcccctcctttaacaacttttaaactgtgaaaacccttactttccccaacttaatatcctttcagctcatccccct

SEQ ID NO: 173427 - DNA, 267 bp, Zea mays
  unsure (1)..(267): unsure at all n locations
  Clone ID: MRT4577_89746C.1
accggtcctgaattaattccnnngcctaccgctcacttgtctgcggccgcccttctttttcttttctcggaggaattatctcagggactttgtcattagctagccaatctcacagcacaaaaaaatggagagtatgaattggaaaaataaaaactcccctattccaaacaggccctgaaatcatgacagactgagaactgactgcttaatttattcctccacaggtggatactcacccagaacatatctaatgcccatggaagatcg

SEQ ID NO: 173428 - DNA, 340 bp, Zea mays
  Clone ID: MRT4577_89747C.1
aggacattattcgactgggttgggatcatatatacctacacattgccgcttaccagggctggggcgagtgccatctgagcaaatgcagctgtgccctgtgcatggttgaacggcagatcgtgataatggaggggatcatgtgcctgcgagaggccgtctcctatactatgcttacctacttcgtccattaatacggcttggtgctgtaccgcacgtggcccaaggaagaggcgagggccagccgtcattcacgccctgcactgacatagaagaggtgagcgatgtgtaggattatcgcatgctttggcggccttgcactggcataggatttgtctagggc

SEQ ID NO: 173429 - DNA, 634 bp, Zea mays
  unsure (1)..(634): unsure at all n locations
  Clone ID: MRT4577_89748C.1
gnagcgttaagagtcaaaatgaagctttcttcgttgttggtcttttgtgcattgtcgctgtgcatgctgcaaattcagaggagataaaagaacgtttcggatttgcaggcccattaggaggaggcttaggtggacatggagtaggcttaggtggacatggagtaggcttaggtggacatggaggaggcttaggtgtacatggagcaggcttaggtggacttggaggagttccactaggtggagcaggtgttggtggatttggtagtgcacatggtggttcgtttggtaacggtttcggtgccagcggattacaaagtaatgctcatgatagtggtagtcaacaatcattttcagcccagtcagtcatgtccagcaactccaattatgatcgcggtcaaaacttgaatagtggaaacgttcacggaggttcgttcggacagaaccaaggatacaaccatggattgggctttgtgggtcgttaaatgatttatgcatttattaatttgttattcaattttcttcaaattcattgctgtagcaaatataaagaagcacacaacaatcaacagttcgaattcacaccatattttttttatttctactcaaatttgaaatattcccataaaaacataga

SEQ ID NO: 173430 - DNA, 3007 bp, Zea mays
  Clone ID: MRT4577_89749C.1
ctcgcctaacccaagccggtcctccccgactcccggcgacgaccaatttctccctggtattgcatctctctgtgtctctgcaccttatcgctatccatttccttcgttcaagcaatcctgctccagcacggcggcgttctgggccggcgattaggcgatgctaggttcccgtgttagtccgtgtcttagttggtggtttcctgcgttaagtgatttccctgagctggataagcatccatgatggggtggttaggtgtacttttgccgtgagttgcttggccactgtgaatctagtctggctggaggttaactgcttgttggccatgggtggccgcatcaggaaatagcagaggctgaattttcgctcttagttgtatgtagaaacaggaattttgtctgggaatcttagacatcgaatcttggtattctttctaggtgggtcatggatatacttctctttgcaatttatgcttccagcttccttgcaaagggaatttgtgttcatgagcacatgcatgtagaacagtcaaatatggcaggcgcagttctcctggattcctgatatatctgaataggggattacaatatgtaaatcatgaaggaaacaatatgatgtttaatgcaatgtattgatggtactttgcagaagcagattagctttctggtgcatggttcattgattggtggagccatagagaatcaccaattacttttgaatataactgaacttcataagtgcttgacttggagtccaaaccacgttagttcatctaattccttactggccagaaacgagaaacttttatttgtcatgcacacgctgggtcatacatgctgcgcaatacgacagacagttgcatgtcattttcggtatatctcggcttgagtagtatgatttgtttggataattggttgtgaggtgatgacttcagcattaattattgtatctgatggagtgtcgcgacccatgcagatgccctggaggcatcaattgcgttgagagctgactgttttgatgctgagtggttgagttgcgcattctgggtggttgtttctagagggatatagtgagctgcaagctgttagacctgcgaataattgctttatttgatggtgtgtctaaacttgaacggatacactatagctactaatcatcttgagtgctgagtttttatggcaaagtggaagtttgtcactactcactagatgttcagccaaacagccacgtatttgcggctgtgcagcctcatgcagagttacagagaagatgagataacagtaaattctgagattttgtatgtgactgtgtttcccactgatatgcgtggcagaaggtgatgtcatgtccccctaacggcagattgttgctgtgcatggttgttaagcttctgatggaactgaatcaaagtgatagtgtttctttcaagtagagtatgctagctcttaaatcttagatagtacacttacatctgatcagtaatcttgatttttcttttgcagttctcgcccctccaacccttcatgatgcttagataatatacagtgctgggttttagcactgttttgagtttttaaattgagctaaggcttcagtgttagtcttgaaagatgaacggttcaagtggttcccaagggcatcatgtcagtggagagaagaagcaagtgtgtcatgttagccggcccattcttaacaatggaccaaagcaccgtccattgacccccatgaggcgatgccgtggtgtagcatgtgtagtgattatactgtcaacagcattcctgttggtagtttacttggctcctattactacttttgctgtgcggctgttcagtgtgcattacagccgaaaggcgacttcctttctatttggaatgtggttatctttatggccgttcttgtttgagaagataaacaaaaccaaggttgtcttctccggtgaaaatgtgcctccaaaacgacgtgtattgttatttgctaaccacaggaccgaggttgactggatgtacttgtgggatcttgcactgaggaaaggccatttaggatatatcaagtacatacttaagagcagcttgatgaagttgcctatttttagctgggcatttcacatttttgagtttatcccggtagaacggaaatgggagattgatgaagcaattattcagaacaagctatcaaaatttaagaacccgagagatcctatctggttggcggtttttcctgaaggcacggattatactgagaagaaatgcatcatgagtcaagagtatgcttcagaacatggcttgcctatgctagaacatgtccttcttccaaagacaaagggcttcatttgttgtttgcaagagctgaggagttccttagatgcagtttatgatgtcacaatagcatacaagcatcgactcccagattttctggacaatgtgtatggcgttgatccttctgaagtccacatccacgtcagaatggttcagctccatcacatccccacaacagaagacaagataacagaatggatggtagagaggtttaggcagaaggaccagctcctggcagatttcttcatgaaggggcactttcctgatgaaggaactgaaggagatctgtcgacgccgaagtgcctggcaaacttcttaacagtagtatgcttgacggccatctgtttgtacctaactcttttctcatttgtgtggttcaaggtctatgttgtagcaagctgcgcttacctctcatttgttacctattactccatactaccaccccaactgataggttcaccagagggtgatgtcaaggccaaaaaggttgtgtagatgttgatgtaacttgccatgaaaactgtacatccgcaaacgatttttactgctggagtttctgccttgtgacaaaaaaaaaaaagcggccctttctgcagtaggaggtatgaatgtatgatagtgcgtatgtaggaattttctgtgattcatcagcgtgccgggccctatctgaaggcagtaaactgattttagaaaa

SEQ ID NO: 173431 - DNA, 351 bp, Zea mays
  Clone ID: MRT4577_8974C.1
actacgcttcctctttaattcagtgtgtattgcaatgttctcaacaaggtgggcaccacagtgggccctattgctacgatgatttccgggatgactaacctggataacgatgcagttaatgcactatcaattctgcttacagctgtgcttaccacttatatctgcatttacatcatttagataactcgttggttaaatcctaatttgcatcctacttttcattgcgcactgtattgccaccttaccctgcactgttcctgccaatggcatatcctgctacttctctgtgtagtggtagagtttgtattagggcatacaactgcagattcatctccagcgtgcaacgaatgg

SEQ ID NO: 173432 - DNA, 456 bp, Zea mays
  Clone ID: MRT4577_89750C.1
ttatcgcgaggaagccaacggtaccagtcggtagcataatggcaagggagacaacgaaagagcatgcaatgtagagaatagcagaaactggcccgctcaagcttctgagatcatacaccaagtagttgatagagtaaaggaacacataaagggccactgttccagaagcaaagaaagctttccaccaccttttgtcatcagtcaagattgattgaagatccaggggtgcgtctacacaaaatgacctgggagctcaaatgatatgaccattgcatctcgaaggcctttcacagagcagtgctgtttgtaatgtagctttattaccgagagtctgagactactgtgccttgaaatgaattagatattacagcagatgtgttttgaagtatgacacacttttgttacagcattttgttgtcctgccaatactgtaggaaaagtcttgcgttattaaaa

SEQ ID NO: 173433 - DNA, 486 bp, Zea mays
  Clone ID: MRT4577_89751C.1
cccgcgtccgcccagcgttcgtggtagcgtgggcggacgcgtgggcggaacgcgtgggctaagccacgttagttgctgttgtgctcaccttggcggcgtgtttctgtcatgggcttctgctcacctagcatgggagcccggggcggctccctgctgatcatctgggcggtgctgatactggacgcgctgctccccgcctctccggcggggctggggcgggtcgcgcttaagaagctgcccgtctaccagatcaggcggtgaccacgcgcctctccgctgaggagaggaaaactacttctaactccgcggattcaacgctatagggtcatgcggtgaccacgactcaagacgaatcgctcttaagaactacgtgaacgcgcactactttggggagattggagtgcgcttgccgcagcagaaggttaccgtcattttcgataccggcaggtccaacctatggttgccggcctgaaggtgctacttgct

SEQ ID NO: 173434 - DNA, 137 bp, Zea mays
  unsure (1)..(137): unsure at all n locations
  Clone ID: MRT4577_89752C.1
taaaccatnncntcctcctcggtccgcaactctctcatgcttcgatcaccatcaccgtctctctcatcctcatctaaccaccacagcacctactccttctcattccctaacccaccactcttcccataccttcattc

SEQ ID NO: 173435 - DNA, 380 bp, Zea mays
  Clone ID: MRT4577_89753C.1
tgctatctattcccttccaaggaatggcttcccgtcctcagcgatgggacgtcctccttctttggtggttagccggcgggggggcctagaggactgactcagaagtgagacagaaccgtggcgattgataactacataatttaatctcatatttgattggtcaccgcgtagtatcacgaaggcagatatactaagtcagtcactatgtatacctataccgaaaacgaagtctatatcatgtagcgttcaccttactacttgaggttgtggttgtcttcagcagcaattgcttaggcttccccggcacgccttcttagtaataacaataccattgtcacttccagtttcactggatccatatcgctagctcactgtagact

SEQ ID NO: 173436 - DNA, 509 bp, Zea mays
  unsure (1)..(509): unsure at all n locations
  Clone ID: MRT4577_89754C.1
aaaaaaaaagganaaaaaaaaaccatgtgcgaccgctcaagacgaccgttttcaaataggctaactttttgaatacccttctcacgagctgaagacaacatctaccagcgactagcgagcgagagagaacacacgcatgtagctaggagcggcgacagcggagacggagacgacgacctcaatgatctcctcgaaagatctggaggaggagacacagagactgccgcccctcgaccgacgcgcctcctccttccccgccgcctgctccaagaagaagatcaagaccgaccagccctacaccattgccgcgcgccctgacgtcgacgtctaccccaacgccagaaagggcaacggcaaggtgcgcgccactacccccgccgaactgagaactgccgccaaccgccgagcgatacagcccaatctacaacgaggatgactggtctcccaccgaaaacgtctacctcgacggaaccactgacattctgatatgccacgacaccctcactgca

SEQ ID NO: 173437 - DNA, 411 bp, Zea mays
  Clone ID: MRT4577_89755C.1
ccaaaaaatttttttcccttattttttttcccttcccattaaaaggggtaattaggggaatgggtaaaacggccccccaggggggggggggaaactcctttcctaatggccgttaaaggggaaaactagggggcttgggagtttgtaaggggctcctttccattttttccaaagaaaaaatttccccaaaaagaaaaaccccccggcatttttttttaaaggggaggaacctggttttttaaatttaaggcccaaaattccccaaagttggggggttaccggggccccattaaagcccgaaagccccccctggggttttttttccaaaaaaaacttcaaaaccaacccctttttccccgggacccggggaaagggccccacctgccttatttgggggaaaaattttttttt

SEQ ID NO: 173438 - DNA, 560 bp, Zea mays
  Clone ID: MRT4577_89756C.1
gccggccgggttccccctcctcttcgttcactcgttgcgtgaggctcgctttgtccgctagtgcagttgctgtcttctccctcttccgccagtcttgtgtttttttttccttcccgtcttcgtttccatgcatgatggtggaattgcaggtcttggttcagagctggtagtttagccttctcttgtgctaaaaatctaggtcagctaggtggactgttcttcatcagaatgcaggcctctggttgaaaagctatacaataggcctatggtccagctcggttacgtacctcagctgctcttcatagggccggccgggtgtgctcctaataatccagtaacaccatgatactatcaaataatgaacacagatcagatacagtccaactgcttatacatgctatttgtaagctatttgtactcaaaagtttatcgttgtgtttacatgcatgtttggtctagctacacttttagagtctgatactaaacgtctgaactgtacgtagggcgcccaaattagtttctgatctttctgttcctattactacgatcgttgggaactt

SEQ ID NO: 173439 - DNA, 754 bp, Zea mays
  Clone ID: MRT4577_89757C.1
ctgtgcggcgctcgaggcggccgggtcggaacctcctcttcgttccactcgttgtgtgaggctcgctttgtccgctagtgcagttgctgtcttctccctcttccgccagtcttgtgtttttttttccttcccgtcttcgtttccatgcatgatggtggaattgcaggtcttggttcagagctggtagtttagccttctcttgtgctaaaaatctaggtcagctaggtggactgttcttcatcaggtgcgtactcagttcagtgactaatttatcatttttatttttttcttctcccgtcgatgttgtgatcaggcctctgctactagaatgcaggcctctggttgaaaagctatacaataggcctatggtccagctcggttacgtacctcagctgctcttcatagggccggccgggtgtgctcctaataatccagtaacaccatgatactatcaaataatgaacacagatcagatacagtccaactgcttatacatgctatttgtaagctatttgtactcaaaagtttatcgttgtgtttacatgcatgtttggtctagctacacttttagagtctgatactaaacgtctgaactgtacgtagggcgcccaaattagtttctgatctttctgttcctattactacgatcgttgggaacttattcttctccaggtgtgagaaatcagtataattaatttcctgcacttagtttttttctccattgtttgccaaaaaaaaaaaaaaaaaagcggcc

SEQ ID NO: 173440 - DNA, 661 bp, Zea mays
  unsure (1)..(661): unsure at all n locations
  Clone ID: MRT4577_89758C.1
tnttttttttttttttttgtttttttttttttttttttttttttttttttttttttttttttttttttttttttttggggggaagggaacaccgaattatgatttccggggggatacgggggagcaaacaagaaaattacagccccaaagttccacaaaaccataggattgggggggggaaaggatcgaaagttcgggaacaaaatttggggggggggggaaattttctgggtaaggagccaggggaaaacatgctgaaaaaatataaccatctccaaaagtttttaaagggggaaaaggctacggaaaaaaggtataccctcggaaacactttgagtttcgaaaaaaatgcttattttggtgaaaacagcagggaaattgatctatgaagccttaaaataaaaaaaaccgaccctcgccaaaaagttggggttttttttgaggaaaggaaaaaagggcgccaaaaatttctaaaaatctgcattgatggcaccggttccactaaggacccccaaaaatttctttttattaggagcaagcttaattgccaccggaaaactaaaacgggcaagccatccatgaaattttttaaaagtcttggggtttgaatcagggcaaaattgacccatgggccaatttggatgctcaagcaggttacaaa

SEQ ID NO: 173441 - DNA, 452 bp, Zea mays
  unsure (1)..(452): unsure at all n locations
  Clone ID: MRT4577_89759C.1
tgtgatgaaataacattattaatatgttgacgatattgttatgaaattaacgtaacacgaaaaggatcgtaacggatttaataacgcgcgcgactgcgcgaaacaacgtaaacgatgagcgtgaacgacacgtggatcagcacgtaaccacgtgcaaaaccgtgtgtgcggtacgcgaggatcactaactacatgtcgtgcttatactaaataccaaatagatattaaaaacaatattacattaatttgggttgacatctatttgtaaaaangctcgggttgataactataacttataatttagttttaactagtgcgacaacctgataagcattgaataaataagtaaataactaattaaataggtgatatgatgaagcaatactatatttctaagttgattttagttagcataatattttgcgtaagctattataattattcattaacta

SEQ ID NO: 173442 - DNA, 283 bp, Zea mays
  Clone ID: MRT4577_8975C.1
aaaggggcaaaaaacaaacctacatgggggtccaaaaagaatttccatttaagcaaataaccaggcagggggggttttattaaaccctcccaacacgtaaaaaacggggttctaattctaaccaaaaacaatttttgttaaatttgggggggggggccaattgtttaaaccaaaccaatttttaatgggggccccctcgttccctagccccctaaaaaaaaaaagaaaaaccttcaggccttgagggtggacaggaaaaaactccacaagagggtttttaaat

SEQ ID NO: 173443 - DNA, 209 bp, Zea mays
  Clone ID: MRT4577_89760C.1
aacacaggatactgaatttgattgaaattttccaacaaatatgcgttacatacatgatagtcctatattggactgcgagattgatcaagggaacatttatcaatctatataaagcgacagaattaataatttacaggaacgaacttatttattgatgccatgacaataataatgatgatcaccaagctcagactcagcctttatccaag

SEQ ID NO: 173444 - DNA, 287 bp, Zea mays
  unsure (1)..(287): unsure at all n locations
  Clone ID: MRT4577_89761C.1
caagaagacggttngnctcagatggtgtcaaagcgacattcaaagagcattgatcttgttgaaaacagttacaaacccttaacagtgtgaggtgcaacacgaggggcttcaccaagaagacggctcacctctgatggtctagcatttatatcaaagagcacaaatattactgaaaaaagtatcagaccttcaacaccgtcaatgtcatcacgagggatgtcaccaagaagacggttggcctctgatggtatcaatgctgtattagacacagaatttgctgacaaaaa

SEQ ID NO: 173445 - DNA, 636 bp, Zea mays
  Clone ID: MRT4577_89762C.1
gcggagagcatagcagacggccggccggacggggggacgaaccaatccaaccagccaagctcgtcagcacgcggcgcagcagcccagctacccttgccgcaagataaaccatgggtggggtacttggtttgatacagattgatcaatcaactgtagccatcaaggagacttttgggaagtttgatgcgatcctgcaacctggatgccactgcttgccatggtgcctagggcagcagattgctgggtatctttctctgcgtgtgcagcagcttgacgtccgatgcgaaaccaagaccaaggacaatgtctttgtcaacgttgtggcatctgtgcagtaccgtgctcttgctgacaaggcatctgatgccttttacaggcttagcaacaccagggagcaaatccagtcctatgtctttgacgtgatcagggctagcgttccaaagatgaacttggatgatgtatttgagcagaagaatgaaatagcaagggctgtggaggatgaacttgaaaaggcaatgtctgcctacgggtacgagattgtgcaaactctgattgttgatattgagccagatgaacatgtgaagagagccatgaatgagatcaatgcagctgctaggatgaggttggcagccactg

SEQ ID NO: 173446 - DNA, 360 bp, Zea mays
  Clone ID: MRT4577_89763C.1
tcgcgatctagaactagataagacctccatcgtattcgatttcaccacaggcagctcatcaggctcgtcatccttcccggaggtctgaaaggacccaggggcgctcaacctgttcgcctggggcgtgctactgcccatcggcgccatcgtcgccaggatctgcaaaatggcaagcacgagcacgaatatgccaaggcccctgtgcgcggggacgtcggcctggatcttgctgtacaaggatactccagccacgacgccggctaggcccaggatgaaccccacgaactggatgccggcgtggaggtagaaccacagatggtcccatcttctgtggtaccttgctgcgaaggccccgattgg

SEQ ID NO: 173447 - DNA, 405 bp, Zea mays
  Clone ID: MRT4577_89764C.1
gctgggtgaccaagcttccatcgtcggaggggcaatggagttcgtgaaggagctggagcaataagtccagtgcctcgaggcgcagaagcggaagctgctggttcaccagaccgtggcggtggtagaagcctgcatacgcgacgccaatgcgcgccagcagcagcggcgccagggcctgctgcgcggattcggcggcggcggcggcgacgacgagcaactgcagcatgggcttgacgaccgaagacaccgcgggggaccaacgcgctgccgccgcccccgttcgcgcagttcttcacgtacccgcagtacgtgtggtgccactcggcggcgcgcgaccccgcggaggaggaggacgggcggcggtcatgggtggccgacgcacatgggaccctggtggagacgcac

SEQ ID NO: 173448 - DNA, 139 bp, Zea mays
  Clone ID: MRT4577_89765C.1
ccgtggagcgcgccgagccggcggcggtggcgcacccgatcaaccctttcctcctgcacaacctcatcatgagctcctccaaccacggctgccgcctgctcaaccacgcaggccacggacacgtccactccgcagcccc

SEQ ID NO: 173449 - DNA, 303 bp, Zea mays
  unsure (1)..(303): unsure at all n locations
  Clone ID: MRT4577_89766C.1
aatcatgacacccgcactaacgagcaacacgggttttttactgatttttacaaanaancatcanaatcaaacgactctgagattcacatccaatatgccggaaagttatccggtgatcacacatctagatccctgcttcagcactaccaataccaatgaaccagacaatattacctgaaaaaaggacataacgattatacacatatgaacaccaagccaagagcacacccccactggcattcaactctaacgaatactctgatagtgaacatcaccaacaaaatgggcagacacagaccacca

SEQ ID NO: 173450 - DNA, 1478 bp, Zea mays
  Clone ID: MRT4577_89767C.1
cattgggtacctcgaggccggccggggaacgcgacactcgcaatcgcaaagtcgcaagcgggtcgcaaactcgcaatcaaggctgctcccctccgtctccgtgttcgcccctcggttcaccgcccgccgccgccgagacctcctcctcgccggctactcctgaccccacaaaggcagcgctcggaggtggccctctgtcgggtggagtggtggacacatccgcgcccatggccaacggcggcgctgcggccggcaagctcaccgtcgccgagaccttctccaacctcagggagcaaggcaagagtgcattcatcccgttcataactgctggtgatcctgacctggtaaccacatcgaaagcattgaagattctcaattcctgcggttcggatgttatagaggttggcgtaccatactcggatccactggctgatgggccagttattcaggcttctgcaacacgggcgcttaagaaaggcactacacttgattctgtcatagagatgctgaagggggttacacctgagctttcttgccccattgttcttttcacatactataatccaattctgaaacgtggtgtgggaaacttcatgtctactatcaaacaagctggcatacatggacttgtagtgcctgatcttcctttggaggagacagcgttgctgaggagcgaggccattatgcacaacatagagctggtgctgcttacaacgccaaccacgccgacagatcggatgaagggaattgcacaagcttcagaaggatttctctatcttgtgagcgctgtaggggttacaggtgcacgctcaaatgtaaacttacgtgtagaacaccttcttagggagatcaagaaggttacagacaaaccggtagctgttggtttcggtgtatcgactccagagcatgtgaaacagatcgtgggctggggagcggacggtgtgattgttggcagtgcgattgtgaagcagttgtgtgaggctgctactcctgaagagggtctggaaaggctcgaggagtacgccaggagtatgaaggctgctatgccgtgagctgatctcactccccgtcacaggcaaggtaattagaacatggttttagcaatattctgggcatgggtttggcatccagaactcatcttagtgctgtacgggtcgttctccggtggtgagaacgaagtctggctttgcctataatagaaaagggttaaactgagttagtgcgacattttgatggaaaagtgagtgattgcgagatatcagttcatgcttattggcagattttttttttggctgaaagattgaaatgttagggatgaggttgccctggcctcttgagaggataggaataagagaggataagttcgttatgatttatatggcttttcgcttgaaccccaccagctggtgtccatggatgcgggcagagcagtgtctgattggctgcactgaaaatgacattaccttcagacaaaaaaa

SEQ ID NO: 173451 - DNA, 577 bp, Zea mays
  Clone ID: MRT4577_89768C.1
aattcggcacgaggaataaccgaggcaaaccttactcttgtatttttgtagaggctgcatcgaatctaagacctttggctcagtgtaaaggcttctcaccactgggtgggtttttaagtgattgaaatcaaattatggttaggtttgcattgcttgttatcttgacaagtatcatgttctattctcatcaaatcattactatgcatgcatatatatattaatctggttgtcatcactttttccaacaactagaataaaattcacaaaactaccacattcgtgtcctaattatcccaaaactaccacttctagtgcctatttcatgaaagtgtcactataggtttcctcttcacagacttactatttttcctccagttttttaagcgtgtggacccactcatcagcgttacatagtgcagaacagaatggctccgctgttttgcactgtataattctgacaagtgagcctgagtgcttaggaaatggtaagactgtcttcaacggtatcttctatattcctctatatctatcctttacagatttcttaaaagaatccctcatctatatcccattccta

SEQ ID NO: 173452 - DNA, 1393 bp, Zea mays
  Clone ID: MRT4577_89769C.1
cgctgtcaggccacagattcgtcatccgactccgatgaggctgcatcctgtcgtcctcgactgttgactgctgtcgaggtatgctgcgcccgccatggagaatcagtgaacttttaccagagcgtcgacgcgtcctccatggagaatgctgcgcccgcggcggcagcgggggaggcaagaagaaagggatgccggccaagaacctcatggccgagcgccgccgtcgcaagaagctgaatgaccgcctctacatgctgcgctcggtggtgcccaagatcagcaaggcttctgcaacacgggcgcttaagaaaggcactacacttgattctgtcatagagatgctgaagggggttacacctgagctttcttgccccattgttcttttcacatactataatccaattctgaaacgtggtgtgggaaacttcatgtctactatcaaacaagctggcatacatggacttgtagtgcctgatcttcctttggaggagacagcgttgctgaggagcgaggccattatgcacaacatagagctggttcatacccactctcatctttgcatgcaccacttgcacaaagtttgttgcgtacttgtgttgctatctgggtgctaactaaattcttactcgagatgggacctatcaaatcttcagcttgggctctgcccattccagacctgcaaatatacacagttgcaaaagatcttctgggcctttgcagcaacccagccctagaagcgggtctagctacttgggctcacacatgtcaacggggtttgtccagtccactaaattcaggataggttacatcaaggccttttttatttctttttgtaacctggtttggtaccacacctaatagctttgcttattaatcatggtggaccaatcaacagaatagatatcttgagtgtaatgtacttggtattgttataaaagcttcctttatcgaagaaaatcttgagtgtcagccatataccattttttattttgcatgattgcttgcaggtgctgcttacaacgccaaccacgccgacagatcggatgaagggaattgcacaagcttcagaaggatttctctatcttgtgagcgctgtaggggttacaggtgcacgctcaaatgtaaacttacgtgtagaacaccttcttagggagatcaagaaggtatattttttggtgtctatgacatgtggggccagtggcatacaaatggttatcttcctggctttacaggttacagacaaaccggtagctgttggtttcggtgtatcgactccagagcatgtgaaacagatcgtgggctggggagcggacggtgtgattgttggcagtgcgattgtgaggcagttgtgtgaggctgctactcctgaagagggtctggaaaggctcgagga

SEQ ID NO: 173453 - DNA, 577 bp, Zea mays
  Clone ID: MRT4577_8976C.1
ccggccgggaaaaaaaaaaaaaacatgcctttcttggctaaaggctaaaataaaatgcagtatctgcagtttagtatccgatatgtaggccacatattcactttaattttaaatttattttttatggagatggtccactttaattttaaatttactttttatggtgaggattcatcacactgttggaaccgatgaccacgtggtcaattgggcccaagcactaggatgtgggagtgtttaggtgctaaacaaaacagtaggcaaggaactgtagcgtcttgttaagcatgtcccgtcatcgtaaagtgtgagggtatttataggtaaataggtgggtgacgtgcccttatgaggacaattatgcccccggttacctgctacagacccggaatatcccccacgaggtcattacaggccactacgatgatgttaaatacaactcgattagatacacagtaaacgctacccagagagggcttacaagtgggcccgaatgagcaacaacacgcaacatgggcccagccatcgaacgacgtggttctcgcctaattagaaaaaaaaaaaaaaaaaagcggcc

SEQ ID NO: 173454 - DNA, 367 bp, Zea mays
  Clone ID: MRT4577_89770C.1
gagtaagggatttttatttcattaagataatgaagtaacccagtttatgcctcacaggattcaaccaactaaatcagaacacagagaaactaaaaaaattgtcatgcaagacaatgtgcaaaggaaagatgattgagttttgccatcaggatcttttcaacttaagactgtatcctatcgctaaactttcacccattccatgcgaagatatctagtaaacaaatttccatcttcgtgcatggagctttgatcctttgttgctcctccattccccataaattgctccaaaatcggcatgagcccacatgaccttcacctcaatcgtcgtccatcgtctctgtgctccacacttgcacaacacaagccg

SEQ ID NO: 173455 - DNA, 333 bp, Zea mays
  Clone ID: MRT4577_89771C.1
gggaaaccaaaaaaaaaatcaaaattttttagcaaataaaagtgtgagtcacaccaaatttgcccatacaattttttttttttcaactggagaccaggaccaagccccttttttaaaggaaggtgtgacttaacgggggttttgtttaatataaagtcccttactaccaatttagggctttttatcctggaggccctttggaattttcaataggcacttttaattgaaaatggcataatattttttaagttaaagaatagccttttaacaaaaagcataaaccttttcctaatttttttaataaaaaacaagttttttgtacagtgccacaaa

SEQ ID NO: 173456 - DNA, 301 bp, Zea mays
  Clone ID: MRT4577_89772C.1
actcgtctgtgaggtttttatttgagacttcaaacttttttaatcataacatttttacattagttttgcggtcagaacgcatgctttcaacaacccttttttttggggaggacaaaaaaaaaaacagggcataccggccatacgggaagggaacacaggcgcaggttattgggcaaaattattccaggggtgctacaacctatactcccaacacttttttaaaaaaaagggtcacggggggtccccgggcggccagagggggccaaacctttcaagggtttttaaaaaaaatttccctttt

SEQ ID NO: 173457 - DNA, 304 bp, Zea mays
  Clone ID: MRT4577_89773C.1
aacggggattttggtcaaaagaggtaatgaaatgacctttttgaaaaggtttacccccccggggaaaaaggaaaaaccctattccaggtaaagggttggggggctctacctgggggggcttccaaatggggtaatggccataaattggggaaggggtcccgggccccctctggggatcccctttggaaggggggctacaagattgcccttcacaaaggttttggaaaattttaaggggccaaacctaaaccccgggctgccattttaaaccttgccccactttttggaattaaaaaggaaacct

SEQ ID NO: 173458 - DNA, 334 bp, Zea mays
  Clone ID: MRT4577_89774C.1
gttcacccatcgagcggaaggaaacgggctccaaagcctctaccatgattctccacagagaaacacactgtccaggaaacaaaagtgacaccacgcttgattggacacacaccacctcaaggaaagttagcttcttaaccagggctgactgactcatagcaatccctcacaccactaaaaaagcgaccccccaatcattgatggaacaagaccttgccaaggtgccttaattcaactcttgaagctaaaagcagggatcaacccccgccacctatcaaaagcatactcttttttgcccctccgggaagggaaaaaaacaatgaaatgtgcaggg

SEQ ID NO: 173459 - DNA, 536 bp, Zea mays
  Clone ID: MRT4577_89775C.1
gcgcctcttcctcttcttggccgccgctggctcgccgccgccacctcggccgcagcagcagcacgcgacgagcagtgacgcgagagcaaagaagagcgcgttgccgacggcgatcccggctacggcgccggggctcaaccccggcctgcggctgagcgactcctgcgtggccagcgccggcgacgacgaggcgacggaggacgatgccgccgggttggacggcagcacggacgaagacgaagtcgaagacgaaggcggcgtcggcgcgggctcccgcggcaggaactcgcagtgcggcagcggcggcgcgggcccgcagaggccggcgttgccggcgaatgaggcgaggccgaacctggcgcgcatggcgtcgggcagccggccggagagctggttgttggaggtgttgaagtccgcgaggcggggcagcgcggcggccacgtcggggacgaggcccgtgaggaggttgtcctggagcctgagcgtgacgagcgccgtgagttccgcaagcgcgggcgcgggcgggacgggcccgg

SEQ ID NO: 173460 - DNA, 371 bp, Zea mays
  Clone ID: MRT4577_89776C.1
ttaatttacccaatgctatctccattcttgagtcgaaccgttcatcttcttactatgaccgtcagcaggtcccctgcagtccggatcatgatggatctgcacgccaactaggtgccctataccgctgagaacttccgagcactgtgcacggacgcataaggccttgtacaagtgggggaaggcgctccactacaagggctccaccttccaacgtgtgatctcctatttcatgtgccagggcggatacttcacccgctgataacagctccggttacgagtacatctacagcaagaagttctcttactagaagttcgggcgcattgcacacctcctcctttgtgctcttcatggccaacatctgtcatcaaca

SEQ ID NO: 173461 - DNA, 227 bp, Zea mays
  unsure (1)..(227): unsure at all n locations
  Clone ID: MRT4577_89777C.1
ctttactctcttttctactctctctcctaccaaaaacccatgcccttaagaaattttaaattccttttcaacaccaaacaannttacacccacttcattggcctccccccttttgttgtctccttcctattctccctattaaacaagcaccaacttttccaactctacattaacaacccatctttcaactacgtctgttttaaaaccccccttttttttccaacaac

SEQ ID NO: 173462 - DNA, 1107 bp, Zea mays
  Clone ID: MRT4577_89778C.1
cttaggaacatttgtgtgtcgtcagcattgtctgtcttaagagtacaatttgactatgtatcctcatgtctatatttgaaaagagtagacacaattctcacttttaactttcagatatactctggtgctcggcctttgttggagaagacaatgaaaattttggttgagggtttggtcgacatctttcttagtgtttttcatgagaataagaccaaaggtattaggttgttggatgcaaatggtttttgtcaactcatgcttgagcttgagtattttgagactgtgctacacacatacttctcacccgaggcacagcaggctatgaaatccttacaagagaatttgttggaaaaggcctgtgaaagtattgcagaagccatggaaaatcctggacaccaacggcgaccaacccgtggcagtgaagatgcatcgtcagatgatagacagccatcagtatcacctgatgatttgcttttgcttgctcaacagtacagtagtgatctgctgcaaggggagctggagaggactcgattgaacatagcctgcttcatggagtcagcccttcaatcaacgtctgcgccagcaggctcaaagcctgctgcatattcttcttaccatgcgcaagtaccacagcacgcccccattcaaacgtcctcgcctagttttagaaggcagcagactggtacaagctctcctgtagtctccagacggcgacggtgagcgtagtgcatcttccctggaatttcctaccacccctcatgtttttttttatttcttgtaattatcatcctgttgtcatgtgttatgaattttgatccattcttttggtgtcgtaagataaaaatggtggtcaagtgcttctgcacgggaacataaaattgtataatatgcccacgaatcaaatactgccttgctgactgaagatagcaccccagctgtatttgctgcgccagtctccttcggtcctcactgcttgtttgtatattcatttggacagtttatgtatcccgacatttgttaatgttgtatcaggtggttcaactagcatcgggataatttttttaaaaaaaaaaaaaaaaaaaaaaaaaaaaaaaaaaaaaaactcga

SEQ ID NO: 173463 - DNA, 3638 bp, Zea mays
  unsure (1)..(3638): unsure at all n locations
  Clone ID: MRT4577_89779C.1
ccagggagcacgcgtgcaaaaatactaagccttcaactttaaggaagattctctccaactctggaaaagggccacacttagtttcgagccggccgggacacactacaacagagcgcacgcgcagtcatccatccaacatgtggggacatcaagcaggcggccatatggctgctggtggcgctggtgcagctgttgcggcggtgctcacgacggttctgcagtcctcgttgagaagttgacgacaacggtgaccggaggacgacccaacgtcatgggaacacacgcgctctctccccttcccatctcctaattccgccccagatccgagcccggcgcccgagttcatggcgagcgacagcgacgtcgacgaggacgagctcctgcagattgcgctgcaggagcaggcggcgcgggacctcagccaccagcgcccgcccgccgccaacaagcccgtcgtcaacctcgtccgcccacccgcccccaatgcccgcggcggcaacgccagggccgggggcgccgcagcgaaggcgcgccagcccagccgcggcggcgacgaggacgacgactcggatgttgagctgctctctatctcctctggcgacgaggacgacaatccccgcgcccgtggcccgccgccgccccgcgggggtgggggtggacgcgccggagcgcggagggccgcggcacgggacgatggggacttcgacgatgaggagcccaggagctggaagcgcgtcgacgaggcagagcttgctcgcagggttcgagaaatgcgtgaagcaaaggtggctcctaacattcaagaacttgatcagaaagcagcagctgcagcagctgctgctcgaaaggccttcacgagtgtacagactttaccaaaaggagttgaggttttagatcctttgggccttggtgtcattgataataaatccctgcggttgatcactgacgcttcagtaagttctccaatttcaagggagaagtctcaaggtttggaccccaatatgcggcaagaattcaggggcatgctttataagtccatggaggatcctcatcttgatcttgctgagattgagaacattgttcgtctattgttggagttggaacctgaaacagatccagtgtggcattatttaaatattcagaatagcaggattcatggattgtttgaaaagtgtactcaagatcatgactcgagaatggaagttttgcaaaataaaattcgtgaaaaagtgctctctgattcgaagtggaggcagctgcaacaagattcaaataaatctctggaagttgattctaccattggtgattctcctcgaattgatcagttgtcaacaaactttatggctgaggaagctgatagtttaagggccacctacattcgtaggctaacttctgtactgatccagcatgttccagctttctggagattagctttatctgttttcagtggaaaatttgccaaggcagcttctggtaacgtagtttctgattttgatgtgaatgcaaagccgactgcaaataagaatgatgaaaaaggtggagaagtaaagtacacaaaccacactcttgatgaagttggtagtatggttcaggctactatatcggcttttgacactaaggttcagagtaccttccgtgattttgaggaatgcaacattctttgtccatacatgagtgacactataaaagaaatagctaaggcctgtcagactcttgaagggaaggattcgtctccaactgctgtaaaaatgttgcgcacacttcattttgaaatgacaaagctttacattctacggctttgttcatggatgcgggcaacaacaaaggagatatcaaaagatgagacttgggttactttatccacccttgagagaaacaagtcccagtatgcgatttcatgcttgcccctggagttccgtgacataacagtttcagctatggaccgaattgatactatgattcttaatctgatgagcgagactgcgaagtcatatgacatttctcaaccacttcaggaaatcaatgagtctgttagacttgcatttttgaattcctttctggactttgctggttatctggagaggtttggaggtgaactaaccgagaacagaccaaacaaagaaaacaattatgtctcaaatggatacataaatggtactagagaaacatttgctaacacagatggagatttgcacaaaaagctgctggttgttttgagtaacattgggtattgtaaagctgaactttcagaagaactttacagcaaatatagacacatttggtctccagtcaggaataatgaggagcgaagttctgacatgcgagacctgaggacttctttctctgcacttgaagagaaagtcctggaccaatatacttttgcaaagtcaaacttgatcagaagtgctgcacaaagttatcttttggattctgggatttattggggagcagcgccaatggtaaagggcattcgagatgcaactcttgacttactgcacatccttgtagcagtacatgcagaggtatactctggcgctcggcctctgttggagaagacaatgaaaattttggttgagggtttggtcgacatctttcttagtgtttttcatgagaataagaccaaagatattagattgttggatgcgaatggtttttgtcaactgatgcttgagcttgagtattttgagactgtactgcacacgtacttctcacctgaggcgcaacaggctatgaaatctttacaagagaatttgttggaaaaggcctgtgaaagtgttgcagaagccatggaaaatcctggacaccaacgtcgaccaacccgtggcagtgaagatacagcatcggatgacagacagccatcagtatcacctgatgatttgcttgtgcttgctcagcagtgcagtagtgatctgctgcaaggggagttggagaggactcgattgaacatagcctgtttcatggagtcgacccttcaaccaacagctgcgccagcaggcccaaagcctgccgcacattcttcttaccaagcacagcatgctcccgtccaaacgtcctcgcctagttttagaaggcagcagactggtacaagttcccctgtagtctccaggcggcgccggtgagcttagtgcatcttcccatcattggcgtagcctcttcccggagtttccttccttttcccccctcacatgtgtgctttttttttaatctcttgtaattgtcatcctgttgtcatgtgttacgaatttcgatccattcttttggtgttgtataagatgaaaaggaggagtacagtactggtgctgctgcacgggatcatggaattgtataatatcgacgagtcaaatattattgctgcctgaagataccaccacagctttatgtatatggaattctggagttgtcggtctgcgccaacttccttcctgcggtcgtcaccgcatgtttgtacattcgtcgcttggacagttttatgtatcccgggatttgttaatattgtatcagttggttcgtggttgttgatatgtccagaaataatgatctgtggaggtaattgtcgtgctaaaaaaaaaaaaaaaaaaaaaaaaaaaaaaaaaaaaaaaccccaaaaaaaaaaaangggcggaacaatataaaagaaa

SEQ ID NO: 173464 - DNA, 372 bp, Zea mays
  Clone ID: MRT4577_8977C.1
ctgatctttttcgtccaccagcatggaggagaagaggaagctgcagtggcggcgagggcgtgatggcatcgtgcagtaccctcacctgttcttcgcggccctggccctggccctcctagtcgcggacccgttcggccctagttccgctggccgaggtcgactaccggccggtgaagcacgagctcgcgccgtacggggaggtcatgggcagctggcccagagacaatgccagccggctcaggcgcgggaggctggagttcgtcggcgaggtgttcgggccggagtccatcgagttcgatctccaaggccgcgggccgtacgccggcctcgccgacggccgcgttgtgcggtggatgggccaggaggccgggt

SEQ ID NO: 173465 - DNA, 264 bp, Zea mays
  unsure (1)..(264): unsure at all n locations
  Clone ID: MRT4577_89780C.1
gtgaaacggtttatttaaatagaacattcactagtccatccaggacaattagcacgcgcacgcgacggttagcttatatataagcgcgttatctgactagcagatcatgttcaataaatgcatacatgcaaacatggatgggatcatctctggtgcttgcgctagtgctgactgactgactggctggntgggctctatgactgatgaggtcaacggatgtgtgaaatatatatgtgatctcatcacggactgaaaaaagccggg

SEQ ID NO: 173466 - DNA, 456 bp, Zea mays
  Clone ID: MRT4577_89781C.1
gccacacttagaaacgcccagttgccatcctgacgaaccatctatatcaagggggggcatcaccgcggctcggttcggagtgtggacagatccctcgtgatcgatccgtccgcgggatctcgctcactccaggattggagagccgctgtctgctaccgccctatccagccatggtgttcccgtgcggatcgcggttcttatacgctgaggaggagagagacatgaggaggggatggcctatgcctaggaggcgtggtgcatcgctcgagctctttcgttctgcatggaacagaacgactgctcattcctcgccgtgcgacgcctattcggcgtgaccattcagcagcatggtcaccactcttcgtcggatgaggtcgaggacgtgtccacggcgaggatcggtatggggcttacctagtgcgtgtgctctcaggggacggagagcgactgtctcct

SEQ ID NO: 173467 - DNA, 390 bp, Zea mays
  unsure (1)..(390): unsure at all n locations
  Clone ID: MRT4577_89782C.1
agaaaaaccccactttatttagatcagaaaattcatacatagttaacggaaccatgtgctatagctggaccgtaccaaagaagtactcaatattatacgatcacaattttgactgtactgaacggggatggaaaacatcgtggaatacacccgcgaaacaccgagggcgaaccttgacctattattcgtaagttgctatagcggagcaacaccgacaggcgggtccatgttgtagtccagttcctattccttcacaatatttagttccctgggatcaccagaggtgaactgaccctactgcgagaacaagcccgntcgcatcgacaaccttactctgagggatgtggctgatcttgagccggccgtcatcggtcaggtaccagtcgaata

SEQ ID NO: 173468 - DNA, 195 bp, Zea mays
  Clone ID: MRT4577_89783C.1
gcgggaacgcctccgggaaccggcccgcaataccggggcggaccacacccttcgtgttgtagcggcgcccttgtttttagggctcagggcaaatgaaaattacctggccggaagctaggtacatgttggaagctgctgtccaacagattgtgacagcctaacaccaaaccttgcctatgtcagactaagggttta

SEQ ID NO: 173469 - DNA, 417 bp, Zea mays
  Clone ID: MRT4577_89784C.1
gtcgggagttcacgttaagtttaatcatattactatcagaggggggaccagcttacgagagttaccttgggaaccgcgagcaagccgatcagctactatatgttgtgaatagccagcactaggtgtaccacatcgggcgctgtaaaggcggcgttagctgcgttcatctccaccctcattttgggatgtcaccgcccagggcgttgagatggccttcagcaagctgaccggtggcagaccgacgaccccggaggacctgatcgcggtggcagtggcgcacgcgttcgcgctgttcgtggcggcgtctgtgggcacaaacatctgccgcgggcacgtgaactctgccgtgaccttcagcgccttgttgggcagaaacattaccctgttgcgtgggctcctgtactgggaggcgcatct

SEQ ID NO: 173470 - DNA, 393 bp, Zea mays
  Clone ID: MRT4577_89785C.1
atggcggcactggccccgagccccagccccaccggcgggcgcggtcccggcagcgggtgcgatccctgcgcaggagcgccagccttgcatggccccggcgagggcggcccctacgcggacacggccctcgacctcagcccctgtagcgcgctgcgcgccatcgagcggtaccgcatcgcgctgctgcccacaacgcccccggtgctggtggccatgctcaagtccgaggaggcgcaccgctgcgacctctcctccctcctcttcatctgcatcggcggcgcgcccctcagccacgaggtcgccgagcgcttcgccgccatcttccccaacatagaaccctttcaggttttgtttattctttcggctaccatggaattcaaccacaacttctga

SEQ ID NO: 173471 - DNA, 391 bp, Zea mays
  Clone ID: MRT4577_89786C.1
ctgttcatatttttggttcagaaagcaaccaacaaaggttgggcggttaagaaaaacctgacaaaggggactttgggtgtaccgcaaccccccacgccccgagttggggggggcccccccggtgccaaggccagtcttttaagcaagggggcccgttttaaaactaagtggaaacgaacgggggggggggccccttttttttttttttttccccccccattcaggagggaccggcggggggtttccaccttttgaaaaaaacccggggggctccccttgaacaggttttgggggggggcaccatacccccaagggggggggccccccccggggggggggccgtctatgtggggggaaacacgcccgatgcatcccgggtccttgggccccc

SEQ ID NO: 173472 - DNA, 568 bp, Zea mays
  Clone ID: MRT4577_89787C.1
tcgatactgttgtggggaaaataccaggacgctgagggcgttccatactttctggcttactgacatgtaaaacaaaggacggtggtgtctgaggagatacaaggagcgcagactaagcccgtccgaggtatctaggagatatcaactggtctacaatcgaggatcctactggtttcaacctgggatggtggtttgatacaaacccattcttgaagaattttgtcctgtcaaaaacgttccacatggtctgatgaagatgacccaattttggagaaagctattggaactgtaattgagtggtattctgggctataaacctatcacacatgattctaacaaagaaggctacgatggggtaaatgaatacgaaggctatcactaaaaccgaggactgggacagttttttcaactttctcaatcccccgcatgtccctgaggatgatgatgacctcgatgaagacactgctgttgagctgctctgtctaatggcatcatgattgtgacattggtactctcctaagggataagattatccctcagtcgctgggctggtttactggtgatgctt

SEQ ID NO: 173473 - DNA, 373 bp, Zea mays
  Clone ID: MRT4577_89788C.1
aaaaaaaaattataattggccttgaactttggagggttggaggggacaatacaccagagcaaagccccaaccaaacttgtggggaaaacgtttgacaaaacactggaaaattgaatactggcttactggacagttttggtaggtgacaaacctttaccaacaacattatgatccggggaaaagggcggccctttttttttgcccctcatcttttaaatttaaaaagagggggggggggaatagcttttggggggggatcttcaaaagtttttacaggttgggctttttttcccacggttttttaatggcaagcccccaaggtagtttttttttgtttcttggggacaggcctgatggaggagccccttgaatt

SEQ ID NO: 173474 - DNA, 174 bp, Zea mays
  Clone ID: MRT4577_89789C.1
gggaatatgacactcgagaaggcgggttatgtttggaatggggtcttacacggcatccgacaaaaaattcgttactgacgctatccgattccgactagatccagattcgacacgaggctggccaccaacgagcgctgaatgaagcagggttgtattctgttcaaatacggaggg

SEQ ID NO: 173475 - DNA, 318 bp, Zea mays
  Clone ID: MRT4577_8978C.1
atccgcaaggtgattgattaaagacagaattagtacccatatgaacaagataaatcacgctatattcatatatgacaccggcagtaaaggaggccaatgaccattgtcaccaaggtcttctaccaaaaggccactttttctgacgaacttgggaatgaggagatggattctcctctagcctgctctgtgtaggggtcccgaccttacagttacattacagcatactagaagagctcctagtttctaatagttgccgttgcagagcacgctgtagagggtgcttaatcttagaccgttctgctcggaaggggccgcgtc

SEQ ID NO: 173476 - DNA, 238 bp, Zea mays
  Clone ID: MRT4577_89790C.1
ttttgacttttttattgccaaaagcgtcctcatcttatacgggtaaagaatgcgttatacatacgtacaaagaactcttgggcgaaccgtgtggagagcaaagagcttttgaagagcacgaagcggatgtacctacacattgctctagatgcggtcaaaagatgcgatctggggcattgtacgagatattacggtagtagctgaccaccttagttcttcgaacgaaagttgatccatt

SEQ ID NO: 173477 - DNA, 1732 bp, Zea mays
  Clone ID: MRT4577_89791C.1
aattcggcacgaggcttctcggcgtctcctctgattccttcctctcctctcgccccacgcccctctccatctgctcccgctccgcctcgcctagggttttgcccccaaacctagcctcccccgaatctcccacgccatggacgtcgagggcgaggtccccgccgccgccgcggcggcggtggcgaacggcctgggcggcgcgggcgcggaggaggcctctccggcgccggtctcggctgagcagctcgacgtggaggcgtacgcggcgcagtactcggggcggacccgcctcgtgcgcctcctctttgtcgccgaccggtgcggggtggaggcgatgcagctcgaggcgctgcggatggcttacgacgagatcaagcgcggggaggacgtgcagctccaccgcgacgtcgtcaccaagatcggcggccgcctcggtccgcgctacggcctcgaccaggcgtgggtcttcagcgtctcccgccgcgccgaccagcgcaaggagaagctcgagagcgagctcaatggatacaggactaacttaatcaaagagagcatcagaatgggctacaatgacattggtgatttcttctatgcccatggccaactttcagatgctttcaaaagctacatcaggactcgggactattgcaccacttccaaacatatagttcagatgtgcatgaatgtgattctggttagcattgagctggggcaatatgcacatgtttcaaactatgtcagcaaagcagagcaaacccccgactctctggatcctaccattgttgcaaagctgaaggcagctgcaggattagccaacttggaaacaaagaaatacaaatttgctgctcgtaagtttgttgagacaggaattgaactaggaaacaacttctctgaagtcatagctcctcaagacgtggcagtctatggtgccctttgtgcacttgcttcttttgaccgttcagacctgaagagcaaagtcattgacaatatcaacttccgtaactttctggagctggtgcctgaagtaagggagctggttaatgatttttatgcaagtcgctatggatcttgcttgggtcatcttgagaagctaaagcctaacctgctcctggatatccatttgcatcagcatgtagagactctgtatatggagattcgccacaaagcgatcatacagtacacacttccttttatatctgttgacctcaacacgatggcagccgcctttaagacttcggtctccatgctgcagaaggagctggccgcactgattactgaggacaaaatacaggcccggatagactcccacaacaagatcctttacgcaaggcatgctgaccagagaaatgcaactttccagcgtgtccttcaaaccggcaatgactttgagagagatgtcaagtccatgcttctgcgtgccaacctcctcaagcatgattacattcagaagacaagcggaccaaggaagatgtaaagattgcgggcgtcgctgctaggcaaggcttcctgctgcatgcctctccactttttttttttgaagaattgttctgtgacataaaagggaccgaagtctgtctaaatgccctctccctctttctttttattggttgatgaaagttattgtcgaagtaatgtatggttgagcatctggatgtgattatttgtcatgctcgttttctaggcaaaaaaaaaaaaaaaaaagcggacgcttggtcgacccgggaatccggac

SEQ ID NO: 173478 - DNA, 593 bp, Zea mays
  Clone ID: MRT4577_89792C.1
ccggccggggcctttgtattcagcttgctccaaacgccgatgcatccaaaccgatccaaaataagcaacaacagccaggtcctgctcccgtagtacctacaccacgtacgcacaccatagcaacatgaagatcaggatggcggccgccaatgcgtactcccttgaggaggcggacaagcacaacaccaaggatgactgctgactcgacatcggacgtaaggtgtacaatgtgaccaagcttcttgaaggaccaccctgaagagatgatgatcgccctgctcgtcttcctctgccaaggatcgctacccatgatttccaaagatgtgcaacatatcatcctatctgtccatgccatgatagacgaggacctacgcgcaataagaatgaagtcgtcaccatacccagtccaagtgtatgacactcgccaccaacgagtcgcgactaccactcggcatataatctggtatgctcatcatctccactctaacacgttttatgccaccatgtctataatggctatacattgtcactcactcgatatacgcccttccccgaatgagactagccagtctgagccccagtatggattacta

SEQ ID NO: 173479 - DNA, 1139 bp, Zea mays
  Clone ID: MRT4577_89793C.1
gaatttgctcggaggcgcaccaacggaggcacctgcccgcagaagttcgcccaggaagtgtgcggcaaccgagctggtggccaaggggagggagtcggctgccgttctcaaggccatgctcggccagcttcctgcggcggcgacgccccatgatggtctccgggatctggccgagcaggtcctccgctgctgcgaccgagctctggcggccttgctcagaggcgcggcaacggaggaggctgcctgcagcagttcggccaggaagcgccgcaagcagccagcagagcggcagggcggcctggctcctcctcctccttctcctgctgcgacgggatccaagaggatgaggatgagccgtggagagcgggggacacgagcggagaagaaagaaacaatggaggacggcttcatctggaggaagtacggccagaaggacatccacggcagcaactaccccaggctctacttccgctgcacctacaaggacgaccgcggctgcgaggcccggaggcaggtgcagcggtcggacaccgacccctgcgcggcctacctcatcacctacttcggcgagcacacctgctgctgccgcgacgacgccgtcgaggcgccagcgccattcgtcatcgacttcggcttgagcgccgctgcctgtgacgacggcctgcagctgccgcaatacggttcgccttggccgtcttgcgacgacgacggcccgggcccggtggaattgcaaacgccgccgccgcgcacatcagctgatctgtgcagttcaccgccggaggaggagttgcgggctggcgcgtgcgacgtggctgagttcgtcgccgagcagtcaacgacggtgacagcagagctcatgggtaggatgacctcgccggagtgggacgggtgcttggactgggagttgggcgaaggcgacagctcactcgacgttgacggtttcgacagatactacttcgattacagtgatctgctttagagcctgtacaatctattaatctaattaaataaggagtttttttgagcggtctctagaagagacagattcttcgtcaagagttcgagagttcgtctccactcaatttctatatatatatatattatattttgactgtaaaaaaaaaaaaaaaaaagtccac

SEQ ID NO: 173480 - DNA, 384 bp, Zea mays
  Clone ID: MRT4577_89794C.1
gaatttgctcagaggcgcggcatcggaggaggctgcctgcagcagttcggccaggaagcgccgcaagcagccagcagagcggcagggcggcctggctcctcctcctccttctcctgctgcgacgggatccaagaggatgaggtaattactactatgcagcatagctccttttgagctagttaccagcttaagtatacaacgtataatcatctactactgaatctgcaggatgagccgtggagagcgggggacacgagcggagaagaaagaaacaatggaggacggcttcatctggaggaagtacggccagaaggacatccacggcagcaactaccccaggtctgtctgtctgaactctgaaccaacatccgaatcaaccaagac

SEQ ID NO: 173481 - DNA, 284 bp, Zea mays
  Clone ID: MRT4577_89795C.1
ctagcaggtagtcggacagctcctctgaggcggcttcggccgcggcggctgggagggtgccgatgtggaggacgggcgcgttggcgggcagccccgagcgaagctggtaagcgacgaggtgcctctgccgtcgcccacgccgctccgcctcccgcgcgtcatgtccgtcgcgtccccggcctcgcccacctcgccgcccgcgcccgccccgccgcgccgcgtcatcgtctcccaccgcctgccgctccgcgcgtcgccggacccggtgtcgcccttcgcgctct

SEQ ID NO: 173482 - DNA, 422 bp, Zea mays
  Clone ID: MRT4577_89797C.1
attggcttctttttttgtggggttttttttttttgtgtttggtgggttttttctttaaaccatatgccccagggtttccaatcgcaaaaaaaaaagaaaggcctaataaaaaggtaccccccgggcctttaaatgggaaaggggctgctgcctaatattttccaggggggggtattttgggggccttccccaccgtgaagcccgcgttggcaacgaggttggggcccttggcccactgggactttttggcgcccaggtccgggggggggttggcccccctctccacctggggcccggggcccgccattttgggtatgcccttttccaagaaccgcctgggactctgggggggggggccggggaaccattctgtcttggtccccatacaaaggggtttggggatttatgggggcaaaaagggt

SEQ ID NO: 173483 - DNA, 1273 bp, Zea mays
  Clone ID: MRT4577_89798C.1
cattgggacctcgagccgggagggcacctcggccgttcttatcccagtaagcttccgatcgtctcccacacccgaccgcctgccaacccgacacactcgtcgcgtcgcggagcttctctcctcgcctcttcatgcgccatcgccgccgcctccacctctgcgacgcccacagataggcaggaggaggagggggcgatgccttcgatctcctgccacaatctcctcgacctcgccgcggccgacgaggtgcctctgccgtcgcccacgccgctccgcctcccgcgcgtcatgtccgtcgcgtccccggcctcgcccacctcgccgcccgcgcccgccccgccgcgccgcgtcatcgtctcccaccgcctgccgctccgcgcgtcgccggacccggcggcgcccttcgggttcgccttctccgtcgacgccggcaccgtcgcttaccagcttcgctcggggctgcccgccaacgcgcccgtcctccacatcggcaccctcccagccgccgcggccgaagccgcctcagaggagctgtccgactacctgctagccaatttctcgtgcctgcccgtgtacctccccaccgacctccaccaccgcttctaccacggattctgcaagcactacctctggccgctcctccattacctcctcccgctgacgccgtcgtcgctcggcggcctgccgttccagcggacgctctaccactccttcctctcggcgaacagggccttcgccgaccgactcaccgaggtgctgtgccccgacgaggacctcgtctggatccacgactaccacctcctcgcgctcccgaccttcctccgcaagcgcttcccgcgagccaaggtcggattcttcctccactcacctttcccctcgtcggagatcttccgcaccatccccgtgcgggatgacctcgtccgcgccctcctcaacgccgacctcgtcggcttccacaccttcgactacgcgcggcacttcctgaccgcgtgctcgcggctgctcggcctcgactaccagtccaagcgcggctacatcggcatcgagtactacggccgcaccgtcacggtcaagattctccccgtcgggatcgacatgggccagctcagatcggtggtctcggcgccggagacggaggatgcggtgcggcgggtgaccgaggcgtacaaggggcggcgcctcatggtcggcgtcgacgacgtcgatctgttcaaagggatcgggctcaagttcctggcgatggagcagctgctcgtggagcaccgggagctcc

SEQ ID NO: 173484 - DNA, 745 bp, Zea mays
  unsure (1)..(745): unsure at all n locations
  Clone ID: MRT4577_89799C.1
aattcggcacgaggcttttatccccagaaacttcggcaaaagtgatcggcccgtctcccactcccaccccgaccgaccgaccgccgaacgaacccgacacacctcgtcgcgtcgcggcgcttctcttctcttcatgcgctatcgccgccgcttccacctctgcgacgcccacagataggcaggaggaggacgaggaggcgatgccttcgctctcctgccacaacctcctcgacctcgccgctgccgacgaggtgcccctgccgtcgccgacgccgctccgcctcccgcgcgtcatgtccgtcgcgtccccggcctcgcccacctcgccgtccccgcccgccccgccgcgccgcgtcatcgtctcccaccgtctgccgctccgcgcatcgccggacccttccgcgcccttcggattcaggttctccgtcgacgctggcaccgtcgcgtaccagctccgctcggggctgcccaccaacgcgcccgtcctccacatcggcaccctcccagcggccgcggcggaggccgcctcagatgagttgtccaactacctgctggccaatttctcgtgcctggccggtgtaccttcccaccgacctccaccaccgcttctaccacggattctgcaagcactacctctggccgctcctccactacctcctcccgctgnacgccgtcctcgctttcgtgggcctccctttccagcgaacgctctaccactccttcctctcggcaccnagggcgttcg

SEQ ID NO: 173485 - DNA, 1178 bp, Zea mays
  Clone ID: MRT4577_8979C.1
cccctacctcaagttcgcgcacttcacggccaaccaggccatcctggaggccgtccagggctgcaagcacgtgcacatcatcgacttcagcatcatgcagggcctccagtggccagcgctgatccaggccctcgcgctccgccccggcgggccgccgtcgctccgcctcacgggcattgggccgccgtccccgccagggcgcgacgacctccgcgacgtcggggtccgcctcgccgacctggcgcgctccgtgcgcgtccacttctccttccgcggcgtggccgccaaccgcctcgacgaggtgcggccctggatgctgcaggtctcgcagggcgaggccgtggccgtgaactccgtgctccagctgcaccgcctcctcgccgacgctccctcgtcgggcgacgcccgggcgcccatcgacgccgtgctggagtgcgtcgcgtccgtgcgccccagggtgttcacggtggtggagcaggaggcggaccacaacaagccggggttcctggaccggttcacggaggcgctcttctactactcggcggtgttcgactccctggacgcggcgagcggcggcgcgggcgacgcggcggcggaggcctacctggagcgcgagatctgcgacatcgtgtgcggcgagggcgcggggcgcagggagcggcacgagccgctgtggcggtggcgtgacaggctgggtcgcacggggctggccgccgtgccgctgggggccaacgcgctgcggcaggcgaggatgctggttgggctcttctccggggaaggacactgcgtggaggaggccgaggggtgcctgacactgggctggcacgggcggccgctcttctcggcgtccgcgtggcgcgcggaagagaacaatcagagtgacagcaggagcaggagcagcggcagtgaggagagcaatatcagctgcagcagctagagcgtcgctactttactgtaaattccttcggtgagaggctagtagcggggtttactgtaaaatcgcggtgcccgcgatccaaatggttcgattgagagagcgtcggcatcggtcgtaaatggcagactgaaaaaaaatgacatggaattctgttaggcatgtcgtcgttagctgaataaacggcactgaaacagcgtccctggaaaaacgccattgcaatgcagtcgtagaagctctaaaa

SEQ ID NO: 173486 - DNA, 792 bp, Zea mays
  Clone ID: MRT4577_897C.1
cattgggtacctcgaggccggccggggcaccaccctcttatcctgtcctcccacttgcctcgcacccccaaattccacgcctcctcctcggcgcagtgctcccctcggcgttgccctagcccccgctggctcgccgccgcttccagcgcgcgctatgccatgagcagagacctcgaggacgggcacggcgccgtcggcaacgttattgcggcagcagcagctgcaggaggggaggcggtgggtgccggcgaggccggggacgcgcacgacaacgacgtggtgatgccggggttccggttccaccccacggaggaggagctgatcgagttctacctccggcgcaaggttgagggaaaacgcttcaacgtcgagctcattgctttcctggacctctaccgcttcgacccatgggagcttccagcaatggcggtgatgggcgggaaggagtggttcttctacgtgccgagggaccgtaagtaccggaacggagaccgcccaaaccgggtgacggcgtcggggtactggaaggcgacgggcgctgaccggatgatccgaggcgagaacaaccgccccatcgggctgaagaagacgctcgtgttctactccggcaaggcgcccaagggcgtccgcagcagctggatcatgaacgagtaccgcctcccgccaccacccaccgacgccgacccattgattcccaagtccgagatctctctctgccgcgtctacaagcgctcaggcatcgacgacggccacgggcagtcatcctccagcacccaagcttcctcagcgcgg

SEQ ID NO: 173487 - DNA, 1830 bp, Zea mays
  Clone ID: MRT4577_89800C.1
gccgtgctggtgcagatcgccaaccctgcccgcagcgaagggcgcgacgtgcaaggcgtgcaggacgaggccagggccatcagcgcccgggtcaatgcgcgcttcggcacccccgggtacacgccgatcgtgctcatcgacggcccggtgacgccgcaggagaaggccgcctactacgcggccgccgagtgctgcgtgctgagcgccgtgcgcgacgggctcaaccggatcccgtacatctatacggtgtgccggcaggagagcaccgcgctcggagacgacgcgcccaagcggagcgccatcgtgctctctgagttcgtcggttgttccccgtccctcagcggcgcgatccgcgtgaacccgtggagcgtggagtccgtggcggaggccatgaacgccgcgctgcggatgccggaggccgagcagcggctgcggcacgagaagcactacaagtacgtgagcacccacgacgtcgcctactgggcgcggtccttcgactcggacctgcagcgcgcctgcaaggaccatttctcgcgccggcattgggggatcgggttcggcatgagcttcaaggtggtggcccttggcccgaacttccggcggctctccgtggagcacattgtcccttcgtatcggaggacggagaatcggctgattctcctggactacgacggcaccgtgatgccagagaattcgatcgaccggacgccgagcagtgaggtcatctctgtgctgaatcgtctgtgcgaggaccccaagaacagagtgttcatcgtgagcgggcgtgggaaggacgagctgagtaggtggttcgccccctgcgagaagctgggcatcgcggcggagcacggttacttcacaaggtggagcagggacgcgccatgggaggcctcagcattggccgccgacctggactggaagaacaccgcggagccggtgatgcggctgtacacggaggcaacggacggctcctacatcgagcacaaggagagcggcatggtctggcaccacgacgaggcggatccggacttcggttcctgccaggccaaggagctgctcgaccatctcgagaacgtgctggccaacgaacccgtggtggtgaagagaggccagcacatcgtggaggtgaacccccagggcatcagcaaaggcgtggtggtggacagcctgctgtcgtccatggtgaggacggggaagccgccggacttcgtgctgtgcatcggcgacgaccggtcggacgaggacatgttcgagagcatcgtgtgcccggcctccagcagcggcggcgtgaggctcccggccagcagcgaggtgttcgcgtgcacggtgggcaagaagccgagcatggccaagtactacctggacgacacggtggacgtggtcaagatgctggacggcctggccagcgcgccgtcgccgccacgacggcccgggccggcggcggcggtgcagctccgggtctcgttcgaaggctcgctctgagggggggaagggaagtaaaacacacagcgctagcggtaaacagcaaacgtcgagcaaagaaaaataaccagtgatgatgaacaggattcagacaggtgtggcgtaggattagctgcagttacaggatcgacagttttttttttggtttcttcttctacattgctacccccaaaatcgttcgtgcctgtatatatgccgttaatgataatgtgcgaagaatgtttggaccacctttgtatatggtagtagctgacgatgacgatgatatcatcagaaggaagaaaaaaaaaaggaagagaagttgattcattcaaaaaaaaaaaaaaaaaaaaaaaactcgagaagggg

SEQ ID NO: 173488 - DNA, 3458 bp, Zea mays
  Clone ID: MRT4577_89801C.1
ccgacgaggtcggcgttaaggagggcgcgacgaaggtcatcccccacggggatggtgcggaagatctccgacgaggggaaaggtgagtgatgaaagaatccgacctttggctcgcggaaagcgcttgcggaggaaggtcgggagcgcgaggaggtggtagtcgtggatccagacgaggtcctcgtcggggcacagcacctcggtgagtcggtcggcgaaggccctgttctccgagaggaaggagtggtagagcgtccgctggaacggcagaccgccgagcgacgacggcgtcagcgggaggaggtaatggaggagcggccagaggtagtgcttgcagaatccgtggtagaagcggtggtggaggtcggtggggaggtacacgggcaggcacgagaaattggctagcaggtagtcggacagctcctctgaggcggcttcggccgcggcggctgggagggtgccgatgtggaggacgggcgcgttggcgggcagccccgagcgaagctggtaagcgacggtgccggcgtcgacggagaaggcgaacccgaagggcgccgccgggtccggcgacgcgcggagcggcaggcggtgggagacgatgacgcggcgcggcggggcgggcgctgccgacgaggtgcctctgccgtcgcccacgccgctccgcctcccgcgcgtcatgtccgtcgcgtccccggcctcgcccacctcgccgcccgcgcccgccccgccgcgccgcgtcatcgtctcccaccgcctgccgctccgcgcgtcgccggacccggcggcgcccttcgggttcgccttctccgtcgacgccggcaccgtcgcgtaccagctccgctcggggctgcccgccaacgcgcccgtcctccacatcggcaccgaggccagcacatcgtggaggtgaacccccagggcatcagcaaaggcgtggtggtggacagcctgctgtcttccatggtgaggacggggaagccgccggacttcgtgctgtgcatcggcgacgaccggtcggacgaggacatgttcgagagcatcgtgtgcccggcctccaatagcggcggcgtgaggcccgtggccaccagcgctgtgttcgcgcttcctctcggcgaacagggccttcgccgaccgtactaccgaggtgctgtgccccgacgaggacctcgtctggatccacgactaccacctcctcgcgctcccgaccttcctccgcaagcgcttcccgcgagccaaggtcggattcttcctccactcacctttcccctcgtcggagatcttccgcaccatccccgtgcgggatgacctcgtccgcgccctcctcaacgccgacctcgtcggcttccacaccttcgactacgcgcggcacttcctgaccgcctgctcgcggctgctcggactcgactaccagtccaagcgcggctacatcggcatcgagtactacggccgcaccgtcacggtcaagattctccccgtcgggatcgacatgggccagctcagatcggtggtctcggcgccggagacggaggatgcggtgcggcgggtgaccgaggcgtacaagggacggcgcctcatggtcggcgtcgacgacgtcgatctgttcaaggggatcgggctcaagttcctggcgatggagcagcttctcgtggagcaccgggagctccgcggccacgccgtgctcgtgcagatcgccaaccctgcgcgcagcgaggggcgcgacgtgcagggcgtgcaggacgaggccagggccatcagcgcccgggtcaatgcgcgcttcggcacccccgggtacacgccgatcgtgctcatcgacgccccggtgacgccgcaggagaaggccgcctactacgcggctgccgagtgctgcgtcgtcagcgccgtccgcgacgggctcaaccggatcccctacatctacacggtgtgccggcaggagagcaccgcgctcggagacgactcgcccaagcggagcgtcatcgtgctctcggagttcgtcggttgctccccgtccctgagcggcgcgatccgcgtcaacccgtggagcgtggagtccgtggcggaggccatgaacgccgcgctgcggatgccggaggccgagcagcggctgcggcacgagaagcactacaagtacgtgagcacccacgacgtcgcctactgggcgcggtccttcgactcggacctgcagcgcgcctgcaaggaccatttctcgcgccggcattgggggatcggcttcggcatgagtttcaaggtggtggcccttggcccgaatttccggcgcctctccgtggagcacattgtcccttcgtatcggaggacggagaaccggctgattctcctggactacgacggcaccgtgatgccggagaactccatcgacaggacgccgagcagtgaggtcatctctgtgctgaatcgtctgtgcgaggaccccaagaacagagtgttcatcgtaagcgggcgggggaaggacgagctgagcaggtggttcgccccctgcgagaagctgggcatcgcggcggagcacggttacctcacaaggtggagcagggacgcgccatgggatacctccggattggccgccgacctggactggaagaacaccgcggagccggtgatgcggctgtacacggaggcaacggacggctcctacatcgagcacaaggagagcggcatggtctggcaccacgacgaggcggatccggacttcggttcctgccaggccaaggagctgctcgaccatctcgagaacgtgctggccaacgaacccgtggtggtgaagagaggccagcacatcgtggaggtgaacccccagggcatcagcaaaggcgtggtggtggacagcctgctgtcgtccatggtgaggacggggaagccgccggacttcgtgctgtgcatcggcgacgaccggtcggacgaggacatgttcgagagcatcgtgtgcccggcctccaacagcggcgtgaagctgccggccagcagcgaggtgttcgcgtgcacggtgggcaagaagccgagcatggccaggtactacctggacgacacggtggacgtggtcaagatgctggacggcctggccagcgcgccgtcgcagcagcggcccaggccggcggtgcagctgcgggtctcgttcgaaggctcgctctgagggggaagaggagaacacacagcgctagtagcagcagtaaacagcaaacatcgagcaaggataaccagtggtgatgaacacaacgagattcagcagacggcgtggtgtaggattgattagctgcagtttacaggatcgacattttttttgctttcttctacattactaccccaaatctttcgtgcctgtatatgcccgcatggtaatatgcaaagaataacgtttcgaccaccaaccaccattgtacatgtagttgacgatgacgacgagatcagaaaaggagaagtggggaaaatgattctttcactctaaaaaggag

SEQ ID NO: 173489 - DNA, 668 bp, Zea mays
  unsure (1)..(668): unsure at all n locations
  Clone ID: MRT4577_89802C.1
ccggccgggagcctcatgccacggaccgagtgacacaggctcccattttaaagcgccaattaacgacacttggccatgggaggcagacagatccggcccgcaagggtcttccagaccgtgacggaggagctcaaccacaacattctcggcaagaagtcggtccctacgccgccatggtacaacatcatgcaaaaagtccctcccgccgagaccctcgtccgaaacgtcacccctctaatcaaaccaagccgtgaaagtaccaccaagatcaagaacatcttccgacccctaccaataaggtacttggaggacgaactacgaggcatcttctaccgcgaccatccttgggagcttgcgaggccccgtgttattctcgagttggacggaaaggattaccagcactgcgattggtccaagggcttgaaacagcccaacactcccttgacgggcgaaagtgttgtccagtactggatgtggttacttgagaatgggaaggagactgtgngtaatggtaggagaaagagaaaggtaaatggacnagggtacgagcatacgaccatgtccgncatcaattttatcgtctacgtncagaggagcagatcgagaagcgagtggctcaagaagaagccaggtacgtangcgcttactttggncaaccccgcatcgat

SEQ ID NO: 173490 - DNA, 235 bp, Zea mays
  Clone ID: MRT4577_89803C.1
gcctgacgacatactgctcgtattcgacacggcgcccatgatcgtctgctctatcgggcacaccagctacctaggctggcaggaggggcagcgcgctcgggctctgatcgtggacccggagctcgaccggtgcaagcagcacgacatgatccgggtgacgtagaaactttagctgtcgacggcttatcaagctcttcacgggctataactgggtggcgctgacgcggcacttata

SEQ ID NO: 173491 - DNA, 122 bp, Zea mays
  Clone ID: MRT4577_89804C.1
gccaggcgcacacccacaaaaagctttggctttctttatccagtcgttactcgagcgctcagggtaacacgaatgaagcctgagtggatgccaagaggactcattagagcgatctggacaca

SEQ ID NO: 173492 - DNA, 253 bp, Zea mays
  unsure (1)..(253): unsure at all n locations
  Clone ID: MRT4577_89805C.1
gagccggccggggcacgaccgacacgcccgtccactcgcctcgccttcctccgaaccccggcgaggaagaggaacccgccgccgccgccggacgcacttccgatggcgcgcacggagccatcngctccgctgccgtccccgagccccttggaagttctgcgccgcggacgtccgacgggattggcgtaacaggacgcctcgcatgctccgaggaggaggcagctcctcttagagcactgatagtcactgagct

SEQ ID NO: 173493 - DNA, 3225 bp, Zea mays
  Clone ID: MRT4577_89806C.1
gggcatgtattccacgctcttcatcctctgctccgcgggggcggtgcgccgcagggtcgtgctcctgttcgccgccgaggtcgccttcgtcgtcgccttggccgcgctggagctcaccctggcgcacacgcactaacgcaggtccatgcacgatggcattgctatcgtatttattgggacggtactgtaccgatgtaccgtattctcgcatgctcttgaactgtggttgcggaatcagttgcttcatactactgggcgcgtggtgaaatatcacatgatataccatttctcactgtagtctcttcactgaagcgactgatgcgctacagccttggatctgttgctctgggttcacttgctgtatctgttgttgaatgggtgcggtttatactacaatgccttcgtcgcaagttgaagctagttgattctgcccgagagagctgctttcgaaaagcgacggcctcctcttctgattgctgcctgtggggcagggccgcgaactgggcggccgggtaggaaagccttaaacctctcttcctgctgcccctcgctgttcgctgcctcccctccactctccactgttcactcccagtccccaccagcaccaggcacagatcactcgcttccccactcgctcacgccaaaaccaccgcgccgaatccgaatcgagtcgagcaagcaaggagctagcgcacgcatctaggctaggcgagagcaccaaaggaggcgccgcgggtggcggcggaatgggagggcccctcggcgcgatcatcggccgctacccgtcggcggccggcggcgacgagcagctgggaggcggcgccggaggcggcattatacgccacgaccgcaggtgccgcgacatcgccgttctcgtgctcttcgccgccttctgggtcgccatgattgtcaactccagcttcggcttcaaccagggcaacccgctcaggctgacttatgaactggactacaaagggaacgtttgtggcgataagcatggcaacccaaatttgcaggagctggatgttagatactggatgaatccgaatcaagtctaccaaagtggactcaagaacagcaaggttaacctggctgatgccaaagccatctgcctgatggagtgcccaaatccagctgtagatggattgaactatatttgtgattatccagaagggaacatagacctctctgttgatgattggatcaatagggactatgactattatgagtttctcacaccagacatgaagaatagctcacttcaactccagggtccatgctaccctataatatttccaactgtaaatgtctattggagctgccaatttattgcacgtgcatccaatgtttctttgaagcactggcatgagacgggtggtgtcagcattgatgaaaatatcctcattgataaaacagtgcacaaggccatcgattctagatctgctgtattaaagagatatattgcagacattgggaagtcctggcctgtgttcatcgtttgtggtggaattctccctgttttcctgtcagttatctggttgcttatgattcgttatttcgttgctgccatgacttggattacagtagtcctcttcaatgcccttgttatatctgtaacgatgttcttttacatcaaagctggctggataggcaatgaccccttaactgttgtcattggtgaaagtgatccatatgttcacataagtggacgggaaataagtcaccttcatactattacaatcctaatgacagcagtaatgatcattgctttcctgtcctcaatagctattgtccgccgtatactgatagcaacacctgtcttaaaggttgctgcaaaggtcattggtgaagttcaggcactgatagcttttccacttttgccgtgcctgatcctttctatcttgtatatgttctggttttctgctacactccatctcttcagctctggtcaagttgtccgaaatgattgcaatactgattgttgttcatatgatctgaagctgggaaaagtaaattgtgacaactgctgtgggtacagcatccattacacccctcatatcagcattgccattctatttcacttatttggttgctactgggcgactcaattcattctcgcatgctcttcaactgtggttgcgggatcagttgcttcatactactgggcgcgtggtgaaatatcacatgatataccatttctcactgtagtctcttcactgaagcgactgatgcgctacagccttggatctgttgctctgggttcacttgttgtatctgttgttgaatgggtgcggtttatactagaatgccttcgtcgcaagttgaagctagttgattctgcccgagagagctgctttggaaaagcgacgtcctcctcttctgaatgctgcctgggttgcatagactggaccctcaagtcagtaaatcgaaatgcctacattatgattgccatcaccgggaaaggtttcttcaaagcttcagtgctcgcaactggattaataatgaagaacattctgcgcatcggaaaagtcaacgtcattggagatgtcatcctcttcctgggaaaactctgtgtgagcctattctgtgcgcttttcgcctttctgatgttagacacccacaagtacaagtccgcacacaacaagatatcctctccagttatccctgtcctggtaacatgggccctcggctacgtagtcgcgaagcttttctttgcggtggttgagatgtcgatcgacaccataatcctctcgttctgccaggacgccgaggagcaccaggggaacgcgcagtatgcgcccccagctctgatggaaactctggacgaacagggcgaactgcagagactaactcaagggccttgactgtcttttcctcttggtagtagcatggaaacttagcggcagcctaatgttttgttaccccgttccgttctcttggcttgtgaagaggtttgccatttttgcttgctaccctaattccatgtacaagtctgaatctgacatgttctcctggcccaattggcatgtgtaggcagcttatctatatatgtgtgcagtgtgctattgctgataaaaaaaaaaaaaaaagcggcctccgtttccaacttccaacatcataaatttaaccaaatttatatagtaaaacaataacatttttgatccctaaaaaaaaaaaaaaaaaaaaaaaaaaaaaaaaaaaactcgaggaggggggccgtgtacc

SEQ ID NO: 173494 - DNA, 419 bp, Zea mays
  Clone ID: MRT4577_89807C.1
acccacgcgtccgcggacgcgtgggtaagaaatcttttgctcaaatgtagctaattagcacttcatacattctggatagaatcgattataccatttcgtcatctgacttgtttgaagaactttggtcttcctttacagacatagaaggtgctctcaaagacatcgaaggtcttcctttaccgtttcgtcatctgcaatgtgcttatagtatgagagttgcctgctaattcctctaaatatagcattagttcagcttgtagcttcatattacatcaggtaatggatggcatcagaactattctctgtaatgatggtataagagctcacttgctaattcttctgaacattccctgggttcagcttgtaactttagttagatcaatggatatcatctaaactattcttttctttttttcttt

SEQ ID NO: 173495 - DNA, 453 bp, Zea mays
  Clone ID: MRT4577_89808C.1
acagttatccctgtcctggtaacatgggccctcggctacgtagtcgcgaagcttttctttgcggtggttgagatgtcgatcgaccccataatcctctcgttctgccaggacccccaggagcaccaggggaacgcgcagtatgcgcccccagctctgatggaaactctggacgaacagggcgaactgcagagactaactcaagggccttgactgtcttttcctcttggtagtagcatggaaacttagcggcagcctaatgttttgttaccccgttccgttctcttggcttgtgaagaggtttgccatttttgcttgctaccctaattccatgtacaagtctgaatctgacatgttctcctggcccaattggcatgtgtaggcagcttatctaaaaaaaaaaaaaaaaaaaaaaaaaaaaaaaaaaaaaaaaaaaaaactagtctagaacgcgaa

SEQ ID NO: 173496 - DNA, 1031 bp, Zea mays
  unsure (1)..(1031): unsure at all n locations
  Clone ID: MRT4577_89809C.1
ggtcggccgggatcgagtcgggcaagcaaggagctagcgcacgcatctaggctaggcgagagcaccaaaggaggcgccgcgggtggcggcggaatgggaggccccctcggcgcgatcatcggccgctacccgtcggcggccggcggcgacgagcagctgggaggcggcgccggaggcggcattatacgccacgaccgcaggtgccgcgacatcgccgttctcgtgctcttcgccgccttctgggtcgccatgattgtcaactccagcttcggcttcaaccagggcaacccgctcaggctgacttatgaactggactacaaagggaacgtttgtggcgataagcatggcaacccaaatttgcaggagctggatgttagatactggatgaatccgaatcaagtctaccaaagtggactcaagaacagcaaggttaacctggctgatgccaaagccatctgcctgatggagtgcccaaatccagctgtagatggattgaactatatttgtgattatccagaagggaacatagacctctctgttgatgattggatcaatagggactatgactattatgagtttctcacaccagacatgaagaatagctcacttcaactccagggtccatgctaccctataatatttccaactgtaaatggtaatattaatcctgccgtcattttaaaagttataagggnttagatagtgtggcatgacttatttattctgaaattcatactgtaaccggagataagcatttcaattttcttcccctttagtctattggagctgccaantattgcacgtgcatccaatgtttctttgaanactggcatgagacgggtggtgtcagcattgatgaaaatatcctcattgataaaacagtgcacaaggccatcgattctagatctgctgtattaaagagatatattgcagacattgggaagtcctggcctgtgttcatcgtttgtggtggaattctccctgttttcctgtcagttatctggttgcttatgattcgttatttcgttgct

SEQ ID NO: 173497 - DNA, 275 bp, Zea mays
  Clone ID: MRT4577_8980C.1
cgagacataaggcattggtgatgtttgcatctaccctcctgtaagcagcactttaacgtcttatgtcttctctgatgatgtcacacttaaaattatcatgacaaacatgaccagagcaaagtgtaacgcccaacactttgttcgctcactgcacgctgtctctgacataaagagtgcgtggatggcttgggaaaagtaccatctcctggccatcccctcgattaaccaagctattcatgtattcttatgccagagcagtgtcaactcctggaggt

SEQ ID NO: 173498 - DNA, 389 bp, Zea mays
  unsure (1)..(389): unsure at all n locations
  Clone ID: MRT4577_89810C.1
aaaaataccttctaattttaaaaaaatcccaaactttacacaaccctatcatttaagaaacaaggccttttttaaaaaaaaaaccaaaanttccntccacttcccctctttttacaacttactatctatcaatacaccttcctttcctaacttaaatttcttacaataaatccttgtttttccctcttacatcatcaaattaaacacccccctccttaccccttcttacatattctatatcttactctacatttccacaccccccttatcttcacattaacccccacccttaaatccctttcattacccaccttaatatacactttaaaaatccccctttctccatcttttcccttaattaaaaaaatttttctccaaccccctttcca

SEQ ID NO: 173499 - DNA, 216 bp, Zea mays
  Clone ID: MRT4577_89811C.1
ctccttttttctccttttttcaattttccttctaacaaaactccacacaaagaacccattcatataaacaaatcttcaataattccctaattatcacaccacataaaacctcatctctgttaactcactcaaacttataccaaatttcaaactatactctacacattaaaagttacataaaaaaccctattcttaataaccataatataaaaacta

SEQ ID NO: 173500 - DNA, 264 bp, Zea mays
  Clone ID: MRT4577_89812C.1
atacagacagaggttctccttaacaagggcgcatgtgtatacaaacgcactcatagacatcttctgggctgacttcatgtcctggtgacctttcgccaacggggattgcggctccacccttgggtggaagacgccccgactatagctacccttcggcagtggccgtaacaggttaccctggagtcggcccagtggctgacttatgcgaccacttcctctgctagggacctcgcacaggaaccctggtcgcgaggagatcccgag

SEQ ID NO: 173501 - DNA, 230 bp, Zea mays
  Clone ID: MRT4577_89813C.1
aatatttttctcttttttttttttttctttggggttttttttattttttttgagggaaacacggaaacccaatactttatttattggacgcctgacagggatggtgccaattggaacaaatcgttattagccccgggacaatagcgtgggcctccaaaacctctcggggcggaaaaaaacagaaaaaatgaacttttgaaccacccacccgctttttatgggctggaccc

SEQ ID NO: 173502 - DNA, 193 bp, Zea mays
  Clone ID: MRT4577_89814C.1
actgtcatgggatcccagccaccgccgctagaagaagagctcggcgattctcaggtcccgcgagaatatgccgaagcagatccatgagattaaggacttcctcctcaccgcgaggacgaacgatgcccgctcagtgaagatcaagaggagtaacgatgttttcaagttcaaaggtccgctgccccaagtacct

SEQ ID NO: 173503 - DNA, 2591 bp, Zea mays
  unsure (1)..(2591): unsure at all n locations
  Clone ID: MRT4577_89815C.1
gacctaaaaaagttggttccttgtactatcgaggaatttgccaagagaattgctggtgctgaagaaagtacgtcgtcagaatcttctgaaactcctgagtcaccagaagaagagaaaaggcctttccaaaggggagatagggtcaagtatgttggaacctctgcagtcgttgaagcagatcagaggatcattttggggaaaatacctactcaagatggctcaaggaatgcctatacttttattagtggaaggggtctatcaaatggacagcgtggggaggtatatgaggttaatggggatcaggttgctgtcatatttgatccttctatagagaaatcacacaatgcccatgaagatgtaactaacaaggaggaaaatggatcagcaactgtttactgggttgattctcaggatattgcgcatgatcatgataccgaatcagacgattggcatattgcacttgaagcactttgtgaggttttgccatctctactgccaataattgtctactttccagacagttctcaatggttatctagagcagtttcaaaatcagatcgcagagagtttgtgcaaagagttgagaaaatgtttgaccggcttaccggaccggtagtattgatatgtggccagaacttactggcagcagcacccaaggataaggaacaacctgcactgatgttccacaatctctctcgcctgtcttcactgccatccccactgaagcggttggtagggggcctgaagggagaaagatattcaaggtccagtgacatatcaaagctcttcaccaatagtctaactgttcctcttccagaggaagatgaacaactacaactttttaataatcagattgaagaggatagaaaaattatgatttcgaggcataaccttgttaaattgcacaaggtgcttgaggagcatgatctttcttgtgtggagcttttggatgtgaagttggatggtattgttttaacaaaacaaaaagcggagaaggccgttggttgggctagaaaccactatctgtcatcaacaactcttccttctatcaaaggtgacaggttaatcattccccgtgagagtctggatatatcaatcgagaggctgaaggaacagggtataacagctaagaaatcctctcaaaatctgaaggttttggctaaagatgagtatgagcgcaatttcatttctgctgttgtgcctccgaatgaaattggagtgaaatttgacgacatcggtgcacttgaggacgtgaagagaacattggatgagcttgttacacttccaatgaggagacctgaacttttttcgcgtggaaatttgttaaggccctgtaaaggtgttttgctttttgggcctcctgggacaggaaaaacactcttggcaaaagcccttgcaacagaagctggagcaaattttatcagtataactggttctacactcacatcaaagtggtttggagacgcagagaagctcacaaaggcccttttctcctttgcgactcgactagctcctgttatcatatttgtggacgaggttgacagcttacttggtgcaagaggtggtgcatttgagcatgaagcaacaagaaggatgcgcaatgaattcatggcagcttgggatggtctcaggtccaaagagaaccaacggatccttattcttggtgcaacaaatcgtccatttgatctggatgatgctgtgatacggcgtttacctagacggatatatgttgaccttccggatgcgcagaaccgaatgaaaattctaaagattttacttgcgaaggaaaaactagaatctgattttaagttcgatgagcttgcaaatgccacagaaggctattcagggagcgacctaaagaacctatgtgtagctgcagcatataggccagtccatgaactactagaagaagagaaaaagggacgtgtgagtaacgaaaacagttatctgagacccctttgcttggatgattttatccaagcaaaagctaaggttagctcgtctgtttcttatgatgcaacaagtatgaatgaattgagaaaatggaacgagcagtatggggaaggtggcagcaggactaaatcaccatttgggtttggcaactgacactacagtagagatttaccaatactgtatctttgtaacatttaggctgcctcttgttggtagattagggagtcagttccatttttttaccatgagcttatttgaacaacctcgtaatcaccccgtgcaaacaaaaaagaatctagttaaacgccaattttgcctactagttaatggtcggaaataccagtgtagaatcagaaatcggctacacactacaaaataatgtatctgagctactctgggtaagcattaagctttaacaagatgtaaacggcttaagaattttcagttaattcatactagttctcagcatggaattcagtagaactaatttagtattgatagctagtcgatggctggaatcttcaggatgtctcctattgcccagaaactttgttcgtatcaaaagaatggaagagaatagcttgctagtagtattgtatttttggtccttacatgtataanatgtgtcggttactttt

SEQ ID NO: 173504 - DNA, 295 bp, Zea mays
  Clone ID: MRT4577_89816C.1
ataccttcagcacggtgatgaatcaccaaagccagcctggcgataaacaaacttcattttgttactttaggggactataggacctgcaacatatcccaaacaacaactcatttgcgacggagacaccgctggtcaagtggctttacgcaccccaaagaaatccttgtcaccaacaggcccacgtggggatccaaaatatgcagcttgctcgataacatcagatagcgtactctgcactactttgcaccgagtgagaaacaagagtagttgaatcataccctgagagataaccgaa

SEQ ID NO: 173505 - DNA, 465 bp, Zea mays
  Clone ID: MRT4577_89817C.1
cggtccggttcttgaaggtgtgcaatcttgggctatagggagcggtaggagaggggggggcagccatggcaaggggggggggggggggggaattgggagccgggggcaatagcggacaaagggggggccggggggagaagggaaaaaggccaggggagccaaaagagggagcaaaaaaaaataaaaagcgggaagccaaaggggcgaaataaaggagaaaaaccaggggagccagggggagcaaagaggaggcaaaaaaacggggaaaggcggggggcgaatggaacgaaaaaggggggcaaagaggggggagagggacggggaaaaagggggggcccttgagcgcccgggccggagagagaaagagaaagggggtcaagccggtttgccccagggggcgaaaaaagggggagaaggcgggtaacggcgggatacaacagaagctgacaaaagggggggaagggg

SEQ ID NO: 173506 - DNA, 645 bp, Zea mays
  Clone ID: MRT4577_89818C.1
aattcggcacgaggcaagaaaccaccttcccccctcgctccaatcccaatccttctccgcggaccaatagaacccaatccgatcactccccacgcagtttccccatatcgaaagatccgatcggagtccggcagctaattcaccggggaaagatgaaggtcgacagggagatggagattctgctgaacgagatccccctcctccaccacgtcggcctcctcggcggcagcgaggccggcgcggacgacgacgccgacctctccttcctcatccacgagctcgccgcgatgggcctcgtcgacggcgacgacgagctgccggcgccgggcgctgccaccggctacggcttccccacgaaaggcgagaaccttgtcgccatgcactcgttctccatggccagccactacgcgcacatgcgctctctgtttgttcccgtcaccttcgacgacgccgccgctgccgacggctgggacatccggtgctccccgccgccttatgtgcctccgccttctcccgccacgcctagggcccggtgcaagagcgtgaggaggaagaacgggtcgggtgatgacgacgagccccaagaagtgcggagccgccccggcggccaagttggcacggcgaagaccctggcccggcctgcgc

SEQ ID NO: 173507 - DNA, 210 bp, Zea mays
  Clone ID: MRT4577_89819C.1
ctccgaactgtttcttttaccctcccgccacccacacgagctcccatggccgggaccgagatctaagcccgtcttcacccaaccgccgcgcgccatgaggcctccggccgccgagcccgcctcggggccgcccgagctccagccgatccgacagctgagacggcggttccagaccaaggacgaccgctcgccgctggcgaaggtgctcac

SEQ ID NO: 173508 - DNA, 379 bp, Zea mays
  Clone ID: MRT4577_8981C.1
tgggaccctcgaggccggccgggccgggaccacctccgacagcactccaaacacttgggccggcactgcctcaattgtaacgccgccatgatctcctcctcagatgtgcgcgcgaaatgcatcccgctggacccacaacagcacatgctgggccgactctcctcgatcctagccaaggagctgctcaatggatataatgaggccggcgaacacctgggaagaaatctgcatggcgcgcgagctccatcgttaaatatgaaatacctccgctttcttcgcgagcggatgataagccatatggcccaagggctcatctacttcctgggccccaccaagatgctgatgcgcatcatgcgcgggatgattccgcaccataccc

SEQ ID NO: 173509 - DNA, 279 bp, Zea mays
  unsure (1)..(279): unsure at all n locations
  Clone ID: MRT4577_89820C.1
ctcggtagtcgtagtcacctgcgtcgcatcccgagcacgcaaccatgnctcgactgtcagccaccgccgcgctcctcctcgtcgtcctctccctcctcaccgtcgcgcactgcggtgccctcgcaggctgagcagagcacgacaccgagtcggaatgaacagacgccgcgagcgcgaccaacgaaacattgctagccaagcgccaagcagaaactcagccgaccgcgaccccgacatgaagaagcgcaaccagatgaaccacctcctcctcggcgccat

SEQ ID NO: 173510 - DNA, 301 bp, Zea mays
  Clone ID: MRT4577_89821C.1
aaaaaaaaacgctaatggaataaaattcttttggaaaggatgggccccctggaatttaaaaaggcctaaagaccaagtttaagcccgaactttgttaaggatcacatttagctggccaaaaataaactcaggggggggcaattccgaattaaatctcccacaactaacacgggagggcagttaattttccttgtgggggtgatcgagaaccacattgtaccatgtcgggtggcagggatattcaaaatcaatttccttaacctccctccggtaaaagaacaaatctccacaccgttttggg

SEQ ID NO: 173511 - DNA, 420 bp, Zea mays
  Clone ID: MRT4577_89822C.1
ggggggaacatttaaactggggggcggccattggacaaaaaacatttgtttacaaaaaaagggctttcttaattttgacactgggggggggtttcaccttaaccattttttggggggttccctaaaatagaaacactggatgactgaacacgatttaaaggggagcgggaaaattacagggggatttgggtaattttttggggcaatttttttttttaattggggggtataaaaagagggatttttaaagttggaccaaattttccacttggttgaaacaccgttattttgatttgaaaaagaatataacaaaaggggggggtgaaaaaaaaaaggtttgaaaggggggaaaaaattttcttttggaagttttgaaaaaaacttaaggggttgggggaaaaaacgggggggggttttttt

SEQ ID NO: 173512 - DNA, 437 bp, Zea mays
  Clone ID: MRT4577_89823C.1
cctcgaggggttttttttttttttttttttttttttttagaaaaagaaaaaggttcctttttttttgcgaagaggacttgaacctggatgaaccagggcgcgacggcgtgaccctaaagggggcattgagggacacttcccaccacgccgtgacgggcgctttataccggcgactagtagcaggcttctcgtgataataacacggcgaaacaaggccttgaaagctttggtttcttctcgccgggccactcgcggcctggattaacatgaagaccctgaaggtcttgccctctaaggtctggccgaagcgccaggcccgcggagccgcgttccaggaggggcaggtgcgaggggccgtgctggccacgcggaaggagagcgcctggcccacgaggatggcgctaaactgccagttctgcccccagttacgggacatg

SEQ ID NO: 173513 - DNA, 590 bp, Zea mays
  unsure (1)..(590): unsure at all n locations
  Clone ID: MRT4577_89824C.1
agaaaatggctttcatcaagtagtgttctcggtgttgctcccggtagttgtctccatgctcgtggcaacgacgacaatggcggatcaccgtggccaggtggtttatacccccgggcagctatgcgctgccggacggggctacccgatgtacccgctgccccgctgccgggcgctggcgaagcgccagtgcgccggcggtgccgtggacgagcaagtccggcaagactgctgccggcagctcgccgccatcgacgacagcttctgtaggtgccccgcgctgagccacatgttggttggaatgtacaaggagctcggtgcacccgctaaagggcaacccatggacgaggtgttccctggctgccggagaggcgacatgaaacgcgtggcggcgagcctcccggcgttttgcaatgtagacattcccattggcattnggtggtgtttgctactggctgagttatcctatgaaccccgcgactggccactaagaaatagctaccttgtgtgtcttgtgtggtacctatataattagtgtttccttttgcttggaaacaatatatgtggtgaataaatgatgaactctgatagtc

SEQ ID NO: 173514 - DNA, 116 bp, Zea mays
  Clone ID: MRT4577_89825C.1
cccacccgtacggccacgcgtcggactagtatttctattatgaggggccggtggtccactctttcccccacacgttggtctacccgacgttgttagtcggcaaggtctatttctgc

SEQ ID NO: 173515 - DNA, 234 bp, Zea mays
  Clone ID: MRT4577_89826C.1
gcgactcccccagcgcgagttcccaatccgcaaagcaggcggacccacctattgtgcgagtgaagggcccgatcgtaattcaacaaatgccacgcgcgcctctgaagagccgctgcaccgcccccgtaacgagcacaaaaacagtaccgatatcgggacctggtgccatacgacatcgacggaacgcgctgccacaagaagacatagccgtcggaaaagagataaacaagggtg

SEQ ID NO: 173516 - DNA, 516 bp, Zea mays
  Clone ID: MRT4577_89827C.1
tcgaggagcgagcacatgaacggcgtgagcgcgaggtgcggaacggagtccacgactgggaggtggaacagcagcgggtggcgcgtagcggagcgcgacactttgcggccgcgggggaagccgagctcgcggtacagctttccagcctcggcaagggggatccggtgcggaggcgggagggaagccaggaacgagcgcgcccggtggaggaagcggaaggccgtatcgcggtcgagcacggcgtcgagggccggaacgcgacgcgcggcctccggctcgataggcgcgacccgtgggctgttgagcttcctcaggagcttctttctccgcttgcaggggagcagtggcaggagcgaggccgacgcttccgcgaccgctgcagaagacgcagaggtgggcgccggcacgggagctggggcaggaaggaggagcgttctcgtggcacagaagaggcggcgcgccattgctggcggcggtggcggcggcggccggtgagtgatgaccacgtgtcgtgcc

SEQ ID NO: 173517 - DNA, 625 bp, Zea mays
  Clone ID: MRT4577_89828C.1
cctcgaggccggccgggatactgtttagctcgccatggcctccctctcctctgccgccgtcaccgccccttccttcgccgcaccagcggcagcccgcgccgaggtcagaaggaggtccttcaccgtgcgcgcctctctccgcaaggacaccggcaccgccgccggggcaatggctgccagcgccctgcttgccggcggtgccatggcccaggaggtgctgctgggcgcacgcgacggcgccctcgacttcgagcccagccagatcaccgtcaaggccgtcgacaccatcacattccagaacaacgccgacttcccgcacaacgacgacttccacgaagacgaagtgccgagaggtgacgacgccaccaagatgctcacaagaggtactacctcaacgcaccaggtgagacctactccgacaccctcaccgagcgcagtgaacctacggtctactactgggagccgcatcaacgaaccggaatggccgtcaagatcaccgtcgactaattaagctaggtatctatcgatacccatacatgtatgaggtgtcgcctactgcatcgcactccaccgatgtgtccatctctacatgcagttcgtctttcacacgacaaccatctgctac

SEQ ID NO: 173518 - DNA, 369 bp, Zea mays
  Clone ID: MRT4577_89829C.1
atgaagccactcgatgaagaggtgcacgcaagagatatgcaggccccatggttttccatcccgcttaccaaactcggcctgaaaaagaaagagaccaaactcatgggaactacaaataaccaaattctgaatttgaagcacgatgagatcctctacaattacttccagggggcgcagggtcctatagaaggtgcagaaaaaacatttctaggaccagtcatatacagcacaacgtattgtatgaactgtagtggcggacccagcaggcgggcaggcggggcgagcgcacccctacgtgctgctagtcctacgtaccgcataacaaaatatttagaagccttgatgactaattgtgaaatagagttttag

SEQ ID NO: 173519 - DNA, 336 bp, Zea mays
  Clone ID: MRT4577_8982C.1
acgccacagccgtacttcatgcacgttctggaagggagggacctgatctggactgcggcgacccacagactgtgggcatgctccaccgcccgcgccgtatctcgacgctgggccatggttgactgatctgctaccaaagaacggttgacgatgcttagccaggcttctcgtcgggacggccgacgcagtcaccaagtacgacagcagcgccgtccagctcaccgtcttttgcccgggcgacgaggcgagcgaggacttgaacatatattttaataaccttaccgtcgtcctccaggtggcgctactcctctaccacggtgtggaacaacactactg

SEQ ID NO: 173520 - DNA, 139 bp, Zea mays
  Clone ID: MRT4577_89830C.1
aatttcccccttgtgcggtccaatccgaggcaccataggaggagcgagcatcaagagctaagcctgcggcgcctgatgagtgagccaactgacattgatggcgttgcgctgagtgcccgctcttcagtcgggatacctg

SEQ ID NO: 173521 - DNA, 1591 bp, Zea mays
  Clone ID: MRT4577_89831C.1
cgggattacaaaaaaaaaaaaaaaaaaaaaaaaaaaaaatccgggctcttctcttccaccaaaccaagtgcggccagagaaatttctcccaaatttcagatcaaatcctcgaaatctccgacacctagccccccggagacttctcctcaacagtgtcgcgatccgtctcgatccggcatggagcgcgtcttctccgtggaggagatccccaacccctactgggttccgccgcaccctcaatcggcggccgccggcgctgttgctgcaccagcgggggaggcggcggggctgatgaaccggtgcccgtcggaatggtacttccagaagttcctggaggaggccgtgctcgacagcccggttcccgtagccggcgccagtaggggcagcgttggagctggagttgaggctgcggagagcaagacaccgggggccgcggcgccggcggctgcctcgagctcggttgttgaccccgtggagtacaacgcgatcctcaagcagaagctggagaaggacctcgctgccgttgccttgtggagggcttctggtgcagcacctccagatcattctccagctggttcttccttgccaagtgtggatgttccacacgcaggccctcttaaacccatcggaggtactggaagtctagttcaaaacaagctacctggtgctccaggcgggggatcaagtccacatgtactacaaaatgccgatatccctgttaagcaaaccactagctcttcctcacgtgagcagtcagacgatgatgacatggaaggagatgctgagactactggaaacggaaaccctgttcaacacagattacagagaaggaagcaatccaaccgagaatcagccaggcgttcgagaagcagaaaggcagctcacttgaatgaactggaggcacaggtagcacagttaagagttgagaactcttcgctcctaaggcgacttgctgacgttaatcagaagttcaatgaggctgctgttgacaatagggtgcttaaggcagatgtcgaaaccttaagagcaaaggtgaagatggcagaggactcagtgaagcgggtaactggcatgaacacattgttccctgccgtgtctgatatgtcgtccctcagcatgccattcaatggctccccatctgactccgcctctgatgccgccgtacccatccaagatgacctgaacagttacttcgccaatccaagcgagatcggaggcagcaacggttacatgccagatatagcttcctcggttcaagaggacgacgatttcgtcaacggggctcaggtcgccggcaagatgggcagcactgactcgctgcagcgggtggcgagcctggagcacctccagaagaggatgtgcggaggcccggcttcatcggggtcgacctcctaggttcctactccatcggatatgataaaggccctgatgcccacggcaagaatatgataaattaacagtttcacatactttgtagtggacattgctaatgctgcgatgcgcattcgttcgttgtggacttacgggtctactgctattgatttattgttcgttctccatgtggatctcgtgtgtccatttgacgtgtact

SEQ ID NO: 173522 - DNA, 220 bp, Zea mays
  Clone ID: MRT4577_89832C.1
gggagggcggcccccccttctgcaagcgccccgtcaatcgtatggccgccttcactgaccaagtgctttctcatatccatgtatacccagaagctcgtaactggcgcgtgcacgagctccgcccccgccccgtccgaggcggaagaaggggacagaacgccttcggctgacgctgcgaacgcggctgaagagctgtacagcctacatgacacctttttcc

SEQ ID NO: 173523 - DNA, 438 bp, Zea mays
  Clone ID: MRT4577_89833C.1
ggctcgagcgtttttctgccttcttggacgaggactactgttcatggtctccctgcatacagggctaccactggcgatgcgtctgctccgctgaccccgctgctggtacggcgtccttcaccgtctctcttccctacagcagcacccgcgagcccctcaacgcctcgttcaagctcagcctgctggaccgaggaggcctgccggtgccgtccaggacccgagccaccttgttccagaactgcctgatccagcagatgtggcagtgggagtgtccgggcttcctcaccagggacgacctagagcggcacgagtactacctcgacagcgacggcggccgctgcttccgcgtccgctgcgacatcgccatcaagcccttcgccgcggccacggccggcgacggcgaccccttcgtcgcggggcccccgttcgacgaccttc

SEQ ID NO: 173524 - DNA, 302 bp, Zea mays
  Clone ID: MRT4577_89834C.1
agacgtacgcgtccgcattgaacatgtactataaccagtatcaccttatctgcttctgcttcgcccatatggatgggttgcatatactcgcaggatggatattcttactggatatgcacgtctcattattgcatcactatcttgaacatacattggttgatcatcatgactaggacaatctgttcttgcttacgtacgtttccctgagcctatctctttactgccaagattatctactactgttcttgactgtaacatctccaactttataaaagcaattaagcaaagagaatcctattcta

SEQ ID NO: 173525 - DNA, 235 bp, Zea mays
  Clone ID: MRT4577_89835C.1
aaagcaacaaaattctatctctttttattcatcatatttagatgggggcccggcctacaagttaatggggccggtcctccacaaggccggccggccacatgcccccagcagcttattcatggggcatattattagggtaattgattgaagaaaatgttttattccccccacccccccctcttaattagttgaaccggatcgggtccccgggctgctcgcgatctaaaactagttc

SEQ ID NO: 173526 - DNA, 2864 bp, Zea mays
  Clone ID: MRT4577_89836C.1
gggttgcagaagaaaaaggcaaaaacaatccgccgacttggagaaaccctagaatcaagcgcggaactccgtcatgctgcgtgcggcggcggctgccgccgccatattcccggcgcgggtcgccgctgcgccggctgctgcggcggcggaggaacttaggtatccgctgctcagggttattgggacgctgaggggcagccgcggctcggtgctgctggggaggagggtgcgtttctgctccaactcctccgcgagcgactccgaagtggcggcggcagatgcggaggcgaatgccgaggatgcgaccgctgcggaggaggaggcgggcagcaaggcgtcttccgccatcgtgccgaccagcaccaatatcgacgattgcctctcggttatagcgttacctcttccacatcggccactctttcctggattttacatgccgatcaatgtgaaggaccaaaagctgctgcaagccctaatagaaaatcgcaaaagatcagctccgtatgctggtgcctttcttgtgaaagatgaagaaggtactgaccctaacatcgtgactggttcagattcagcgaaaagcattgatgatctcaaagggaaagacttgctgaagcgtcttcatgaagttgggacgcttgctcagattacaagcattcaaggggatcatgtagttctacttggtcaccgacgtttacggataactgagatggtcgaagaggatccacttacagttaaagttgaccatctaaaggaaaagccctacaacaaggacgatgatgttatgaaagctacatcattcgaagttatatcaactttaagggaagttctaaggacaagttccctttggaaggatcatgtgcaaacctacacacagcacattggtgactttaactaccaacggttagcagactttggtgctgctatctctggtgccaacaagttgctttgccaggaagttcttgaggaattggatgtatacaagcgtttgaagttgacccttgagttagtaaaaaaggagatggagattagtaagctacagcaatccatagcaaaagcaattgaagaaaagattagtggagatcagcgacgttatttattgaacgagcaacttaaggcaatcaagaaggttgaagttacagatactgctcttcttgctctcattgaaaactactgtcgagaagctggagtgaggaaccttcaaaagcagattgagaaaatttaccgtaaggtgtgtaaaataacttctgcatactgatctgccccctctatcagggaaggggaaaatgttggctgattgttgataatggttaagcaacctcaaggcattggtatggtataaaaggttactgttagttttagagtcaatgcctccattgatatcttatgctcgccaatataatgatgtcatacagtctttgctggtcgatataatcatactgacttttaaaatgccttgcaaactctttacctctgcagatagctctgcagcttgttcgccaaggagtatcgaatgagccagaccatgagtctgtcagtgcctctgtaactgaggaatctggtaatggtgataacaccacaacaaaagatgagattttgaaggatcctgctgtagaagatgcttcagtcaccaacaatgttacaaatcctgcctccgaggaagctaatgaagaaaatttgacaagtgaagcagcaaaagaagacagcacatctaagggcaacaagggcactgatggagcagcggacaaggcaattgagaaggttgtggtcgattcatcaaaccttggtgattttgttgggaaacctgtgttccaggctgagcgtatatatgagcatactccagttggagtggtcatgggtttagcttggactgctatgggtggttctactttgtacatcgaaacaaaaaaagtggaggaaagggaagggaaaggtgcacttgtgcttacaggacagcttggagatgtcatgaaagagagtgctcagattgcgcacacagttggcagagctgtattactggagaaagagccagataaccatttttttgcaaactcgaaggtgcacttgcatgttcctgcagggtccacccctaaggatggccctagtgctggatgcaccatgataacatctatgctgtccttagctatgggaaagcctgtcaagaaggacctcgcaatgacgggtgaagtaacactaaccggaagaatcctcccaatcggcggggtaaaagagaaaacaattgcggcaaggagaagtgcgataaagacactcatatttccggcagcgaataaaagggatttcgatgagcttgcttctaatgtgaaggaaggcctcgaagttcattttgttgacacatacagtgaaatatatgatttagctttccagagtgacgccgggacagaaacaagctgagatgatttagctttatgggattgagattttttccccctagacccacgacagaaacaagtccgtcaagaggcaggcaaaccagaccattgtaaccaagatgggtggagttaattgatattcacgagaaaaatgaaatcctttttttttgcccccaatataacatcattgaatttaagagatttttggctaggttgtacgtactagtgtggttgcccatctaggtggtatagcctatattattagtaggaataagaaaagcagcatggatgcaccatctgttatttatatttattgatttaagagtgttctctaaaagcagcaggtatgccccagttgttattcattaaatttgtttcagtgagtgttagttacctttggatactgtactgtgcgtcatcaatttataggatgttttgattttttttggatacacaaacttctatcattatgcatct

SEQ ID NO: 173527 - DNA, 3597 bp, Zea mays
  Clone ID: MRT4577_89837C.1
tctgttaaatgatagacagcacatctaagggcatcaagggcactgatggagcagcggacaaggcaattgagaaggttgtggtcgattcatcaaaccttggtgattttgttgggaaacctgtgttccaggctgagcgtatatatgagcatactccagttggagtggtcatgggtttagctcggactgtccgccgacttggagaaaccctagaatcaagcgcggaaccgccctcatccaccatgctgcgtgcggctgtggcggcggcggaggagctcaggtctccgctgctcagggtcattgggacgctgagggacggccgcggctcggtgctgctgggtaggagggtgcgtttctgctccaactcttccgcgagcgacaccgaggcggcggtggcagaggcggaggcgaaggccgaggatgcgtccgctgcggagggtgaggcggacagcaaggcgtcttccgccatcgtgccgaccagcaccaatatcgatgattgcctctcggttatagcgttacctcttccacatcggccactctttcctggattctacatgccgatcaatgtgaaggaccaaaagctgctgcaagccctaatagaaaatcgcaaaagatcagctccgtatgctggtgcctttcttgtgaaagatgaagaaggtactgaccctaacatcgtgactggttcagattcagcgaaaagcattgatgatctcaaagggaaagacttgctgaagcgtcttcatgaagttgggacgcttgctcagattacaagcattcaaggggatcatgtagttctacttggtcaccgacgtttacggataactgagatggtcgaagaggatccacttacagttaaagttgaccatctaaaggaaaagccctacaacaaggacgatgatgttatgaaagctacatcattcgaagttatatcaactttaagggaagttctaaggacaagttccctttggaaggatcatgtgcaaacctacacacagcacattggtgactttaactaccaacggttagcagactttggtgctgctatctctggtgccaacaagttgctttgccaggaagttcttgaggaattggatgtatacaagcgtttgaagttgacccttgagttagtaaaaaaggagatggagattagtaagctacagcaatccatagcaaaagcaattgaagaaaagattagtggagatcagcgacgttatttattgaacgagcaacttaaggcaatcaagaaggagttgggtttggagactgatgacaaaacagcattgtctgcaaaatttagagaacgtatagaatcaaagaaggacaaatgtcctcctcatgttttacaagtcattgaagaagagcttaccaagcttcagcttttagaagccagctctagtgagttcagtgtaactcgtaattatttggactggctgacagtgttgccatggggaaattatagtgatgaaaacttcgatgtccaccatgctcagaaaattctcgatgaagaccattatggtttgagtgatgtgaaagagaggatactggaattcatagcagttgggaagttaagagggacttcacaaggcaagatcatatgtctttctgggccaccgggagttgggaaaaccagtattggtcgttcaattgcacgtgcactgaaccgtcagttctacaggttttctgttggaggtttggctgatgtggctgaaatcaagggccatcgacgcacatatgttggtgcaatgccagggaagatggtgcagtgtcttaaatcagttggtacagcaaatcctctagtgttgatagatgagattgacaagcttgggaagggtcattctggggatccagctagtgcattgttggaactccttgaccctgagcagaatgttaatttcttagatcactaccttgatgttcctattgacctatccaaggttctatttgtttgcacagcaaacgtaatagagatgataccaaatccattactggataggatggagatcattgctatagctgggtatataactgatgagaagatgcatattgctcgggactatctagagaagaatacaagacaggcttgtggcattaagcctgagcaggttgaagttacagatactgctcttcttgctctcattgaaaactactgtcgagaagctggagtgaggaaccttcaaaagcagattgagaaaatttaccgtaagatagctctgcagcttgttcgccaaggagtatcgaatgagccagaccatgagtctgtcagtgcctctgtaactgaggaatctggtaatggtgataacaccacaacaaaagatgagattttgaaggatcctgttgtagaagatgcttcagtccccaacaatgttacaaatcctgcctccgaggaagctaatgaagaaaatttgacaaatgaagcagcaaaagaagacagcacatctaagggcaacaagggcactgatggagcagcggacaaggcaattgagaaggttgtggtcgattcatcaaaccttggtgattttgttgggaaacctgtgttccaggctgagcgtatatatgagcatactccagttggagtggtcatgggtttagcttggactgctatgggtggttctactttgtacatcgaaacaaaaaaagtggaggaaagggaagggaaaggtgcacttgtgcttacaggacagcttggagatgtcatgaaagagagtgctcagattgcgcacacagttggcagagctgtattactggagaaagagccagataaccatttttttgcaaactcgaaggtgcacttgcatgttcctgcagggtccacccctaaggatggccctagtgctggatgcaccatgataacatctatgctgtccttagctatgggaaagcctgtcaagaaggacctcgcaatgacgggtgaagtaacactaaccggaagaatcctcccaatcggcggggtaaaagagaaaacaattgcggcaaggagaagtgcgataaagacactcatatttccggcagcgaataaaagggatttcgatgagcttgcttctaatgtgaaggaaggcctcgaagttcattttgttgacacatacagtgaaatatatgatttagctttccagagtgacgccgggacagaaacaagctgagatgatttagctttatgggattgagattttttccccctagacccacgacagaaacaagtccgtcaagaggcaggcaaaccagaccattgtaaccaagatgggtggagttaattgatattcacgagaaaaatgaaatcctttttttttgcccccaatataacatcattgaatttaagagatttttggctaggttgtacgtactagtgtggttgcccatctaggtggtatagcctatattattagtaggaataagaaaagcagcatggatgcaccatctgttatttatatttattgatttaagagtgttctctaaaagcagcaggtatgccccagttgttattcattaaatttgtttcagtgagtgttagttacctttggatactgtactgtgcgtcatcaatttataggatgttttgattttttttggatacacaaaaaaaaaaaaaaaaaaaaaaaactcgag

SEQ ID NO: 173528 - DNA, 2011 bp, Zea mays
  Clone ID: MRT4577_89838C.1
atcaaagaaggacagatgtccttctcatgttttacaagtcattgaagaagagcttaccaagcttcagcttttagaagccagctctagtgagttcagtgtaactcgtaattatttggactggctgacagtattgccatggggaaattatagtgatgaaaactttgatgtccaccgtgctcagaaaattctcgatgaagaccattatggtttgagtgacgtgaaagagaggatactggaattcatagcagttgggaagttaagagggacttcacaaggcaagatcatatgtctttctgggccaccaggagttgggaaaactagtattggtcgttcaattgcacgtgcactgaaccgccagttctacaggttttctgttggaggtttggctgatgtggctgaaatcaagggccatcggcgcacgtatgttggtgcgatgccagggaagatggtgcagtgtcttaaatcagttggaacagcaaatcctctagtattgatagatgagattgacaagcttgggaagggtcattctggggatccagctagtgcattgttggaactccttgatcctgagcagaatgttaatttcttagatcactaccttgatgttcctattgacctatccaaggttctattcgtttgcacagcaaatgtaatagagacgataccaaatccgttattggataggatggagatcattgctatagctgggtatataactgatgagaagatgcatattgctcgggactatctagagaagaatacaagacaagcctgtggcattaagcctgaacaggttgaagttacagatgctgcccttcttgctcttattgaaaattattgtcgagaagctggagtgaggaaccttcaaaagcatattgagaaaatttaccgtaagattgctctccagcttgttcgccaaggggtatcgaatgagccagaccaggagtctctcggtgtcactgtaaatgaggaatctaatagtggtgatagcatcacagcaaaagatgagattgtgaaggatcctgctgtagaagatgcttcagtcgccaacaatgttacaaatcctgcctctgaggaagctaatgaagtaaatttgacaactgaagcaccaaaagaagacagcacatctaagggcaacaagaaaacagatggagtagcagaagatgcagcagacaaggcaactgagaaggttgtggtagattcatcaaaccttggtgattttgttgggaaacctgtgttccaggctgagcgtatatatgagcagactcctgttggagtggtcatgggtttagcttggactgctatgggtggttctactttgtacatcgaaaaaacaaaggtggaggaaagggaagggaaaggtgaccttgtgctgacaggacagcttggagatgtaatgaaagagagtgctcagattgcgcacacagttggcagagctgtattactggagaaagagccagataatcatttttttgcaaactcgaaggtgcacttgcatgttccagcagggtccaccccaaaggatggccctagtgctggatgcaccatgataacgtctatgctgtcgttagctatgggaaagcctgtcaagaaggacctcgcaatgacgggtgaagtaacattaactggaagaatcctcccaattggcggggtgaaagagaagacgattgcggcaaggagaagtgcgataaagacgctcatatttccggcagcgaataaaagggactttgacgagcttgcttctaatgtgaaggaaggactggaagttcattttgttgacacatacagtgaaatatatgatttggctttccagagtgacgccgggactgagatgatttagctttacattacaggattgagattttttccccttctctagatctggttacaggctaaataccaaagaagtttgtcagcagaggcagaccattgtaaccaagatgagtggagttaattgatatttacgagaaagaaaaataatatttctttttttggccccaatataacatca

SEQ ID NO: 173529 - DNA, 479 bp, Zea mays
  Clone ID: MRT4577_89839C.1
cccacgcgtccgtggccctagtgctggatgcaccatgataacatctatgctgtccttagctatgggaatgcctgtcaagaaggaccttgcaatgacaggtgaagtaacattaactggaagaatcctcccaatcggcggggtaaaagagaaaacgattgcggcaaggagaagtgcgataaagacactcatatttccagcagcgaataaaagggactttgacgagcttgcttctaatgtgaaggaaggcctcgaagttcattttgttgacacatacggtgaaatatatgatttagcttttcagagtgacgcggggacagaaacaagcttagatgatttagctttacaggattgagatttttttgtttccctgaactggttacaggccaaataccaatcggaggcaggaagaccattgtaaccgagatgagtggagttaattgacagtcacgagaaaaagaaatattttttgctccccagat

SEQ ID NO: 173530 - DNA, 2268 bp, Zea mays
  Clone ID: MRT4577_8983C.1
accctagagagctcggtcggacaaacccaccacccacaccggccggccgggagagccacgaagttactgcgcgcgtacgtcgccggttccctttctcaccgcacgtcgtcgtcatggacacctcgcaccactatcatccatggctcaacttctccctcgcccaccactgtgacctcgaggaggaggagaggggcgcggccgccgagctggccgcgatagccggcgccgcgccgccgccgaagctggaggacttcctcggcggaggcgtcgccaccggtggtccggaggcggtggcgcccgcggagatgtacgactcggacctcaagttcatagccgccgccgggttccttggcggctcggcggcggcggcggcgacgtcgccgctgtcctccctcgaccaggccggttccaagctggccttgcctgcggcggcggctgctccggcgccggagcagaggaaggccgtcgactcctttgggcagcgcacgtccatctaccgcggcgtcacacggcaccggtggactggcaggtacgaggcacatctgtgggacaacagctgccgacgcgaagggcagagccgcaagggccgccaagtatatttgggtggctatgataaggaggagaaggctgccagggcgtatgatcttgcagctttgaagtactggggttctagcaccaccaccaactttccggttgctgagtatgagaaggaggtcgaggagatgaagaacatgacgcgacaagagtttgttgcttcccttcgaaggaagagcagtggattctctcggggtgcttccatctaccgaggtgtaaccagacatcaccagcatggacggtggcaggcgaggatcggaagggtggccggtaacaaggacctctaccttgggacgttcagcaccgaggaggaagctgcagaggcctacgacatagcggccatcaagttcagaggcctgaacgccgtcacaaacttcgagatcagccggtacaacgtggagaccataatgagcagcaaccttccagtcgcgagcatgtcgtcgtcggcggcggcggcggcgggtggccggagcagcaaggcgctggagtcccctccgtccggctcgcttgacggcggcggcggcatgccagtcgtcgaagccagcacggcaccgccgctgttcattccggtgaagtacgaccagcagcagcaggagtacctgtcgatgctcgcgttgcagcagcaccaccagcagcaacaagcagggaacctgttgcaggggccgctagtagggttcggcggcctctactcctccggggtgaacctggatttcgccaactcccacggcacggcggctccgtcgtcgatggcccaccactgctacgccaatggcaccgcctccgcctcgcatgagcaccagcaccagcaccagatgcagcagggcggcgagaacgagacgcagccgcagccgcagcagagctccagcagctgctcctccctgccattcgccaccccggtcgctttcaatgggtcctatgaaagctccatcacggcggcaggcccctttggatactcctacccaaatgtggcagcctttcagacgccgatctatggaatggaatgattcgggccgcccggtcgtggctgctggtcggcctccgctcgccgctggcgtctcgcatgtgcgaaaagggtggggagaagccatgagaacacgagactgacatgggcgctctcgcacaaaagacataaagcggggggactgaaagatcagaggtaccagtagacagtagtagtatgatggaagagacagtaagcagcgagtagtgtgctgcaggatacactgaccatcgatctgctaacaacaaaatgatcgttgcagctagctatagcatatttgcctttgcccttttgtagctttggtctggtctctctctctctctctctctttttttcagctttgttgctccccagcgtcctgcactgcatgccagctgctttgaagctttctctttctactgacatggttctgcaagtgccatcatagctttagtcagccctgtacaatggatgcaggaacgtcgtctttgaattggatctctgtagctcatctctccccctagctcccccactttgttttcttttttgtgctttcctttctgctgcctctgctagcgttatgtgtactgaacaagttcatcaaacagatatagcacccttgcaactaaaaaaaaaaaaaaaaaaaatttggagagtttctttaaataagactttttttttattttatttttttt

SEQ ID NO: 173531 - DNA, 569 bp, Zea mays
  Clone ID: MRT4577_89840C.1
aaatcttatgacctatcatcagagagagagacatctcttcatctcattgtgtcctgcggctcctaattagatcgagccaagccagggagcgcctagtgctgctcctagaactcctgcttgctcctccgacggccactgcgcgagccgctcagcactagcagccgcggcgtgtgactgcctcgacacaaggccttatgtgacatacgtagccgcccctgctgggctacgcgaggggacaactgcaaatactgtgaatgatgcactcgtgattggtcatgctgcagtaatgaacgtatacgctacatcatatttactccagatggttgatgccactcacaaatgtttctactctcacgcgcacccccctgacgacgacgtgactgactctcatgagatgctgttcgagagacgtatgacttcagatgtccatggatgcgttgatgctatataatcccgactgatagaaattcttgcggtccagataacggaaagaacggagagcggaaggatctcgtcgtgccgtggacgtctgctatggaagaatagcagatctgcgcgctgaaagatgt

SEQ ID NO: 173532 - DNA, 314 bp, Zea mays
  unsure (1)..(314): unsure at all n locations
  Clone ID: MRT4577_89841C.1
cgatagggaagtattcgngtacgtgtccgactgcagtggacaaggcatggcgcggagaggcggcgcccgaaaaggtcgccgcacgaagactgcaagctgtgcgtgaatgccctgcctccactccggcgctcatccatctcgagacatgcgtccaccaacatcgcgcgagacccccaaacaagcgctaacaccctcaagactagcctcctcctcataggcaacctccataccactgatgccaacactagcactgctggtcaagacgctcccgtacatcacattcttctctgtccctgcactcgctgagcaccaac

SEQ ID NO: 173533 - DNA, 195 bp, Zea mays
  Clone ID: MRT4577_89842C.1
tcgagcagcagcagcagccgccatggaagccggcagcaagaagctccaggcgtgcatcctcacgctgttgctggtgctctccaccgccgtgactcccatcctctcgctgtcagtgccagacgacgaggtaccctgcgactgtaataaacctaaggctcccaagccgtcgtacccgcccatgaccaagccctctcc

SEQ ID NO: 173534 - DNA, 787 bp, Zea mays
  Clone ID: MRT4577_89843C.1
gaccctcgaggcttgccgggacgagttgtggcatcctaactgcaatacgaataacatatacatcactgctggccacgactcgatcatctcatattgcaaggtctcaaagcagagggcagattgtgttgacagtgaggctggggaagttctgtccatgggatcaataacatgagcgacatctttactggaaagtgcgtcgccaagatctcccccgctgaccctactctcacaattgctcctcggaggagaggcgacgatagcagatctaccatccgcagtactgtcccggaagctcttgaggacatcactgctctcttctacgacgaggaccgcaatgaaatctacaccggaaacagcaagggcctggtgcatgtctggtcaaattaaccttgacatccaccccctaccttgtacatacctcctgtacctgcactcgtatttcccctcgtaggcggctaggcggctttgtttccgtctcaatgtatgttgattgaggccaatactagagtacccaaacccctagggctgatttaataaccaaggaattggaggggattgtacgggaggaatccactcgctatttaaaattgaatagcgaggggattcttctccatggatctcctccaattcactggtaaccaaatcagaccttgtagaacagagatgtaatttcatgtctgattatagcgggagtgtaacttccttgacattatatcattggtaaaagaatctgatgtagagtaatgttttttgtggaaaaatgtttcacataaggggggtgtatccc

SEQ ID NO: 173535 - DNA, 650 bp, Zea mays
  unsure (1)..(650): unsure at all n locations
  Clone ID: MRT4577_89844C.1
tgcactcgtatttcccctcttagcggctaggcgggtttgtttccacctcgtacatgtggattgaggtcaatactagagtacccaaacccctagagctgatttaataaccaaggaattgaaggggaacataggggaggaatccactcgctaattaaaattgaatagcgaggggattcttctccatggatctcctccaattcactggtaaccaaatcagaccttatagaacagagatgtaatttcatgtctgattatagcgggagtgtaacttccttgacattatatcattggtaaaagaatctgatgtagagtatttaaaaaaaaaaaaaaaaaaaaaaaaaaaaaaaaaaaaaaaaaaaaaaaaaaaaaaaaaaaaaaaaaaaaaaaaaaaaaaaaaaaaaanaaaaaaaanannnnnaanaaaaaaaaaaaaaaaaaaaaaaaaaaaaaagggggggcccttttggggttttnngttttggtgcccggtgtttgcggctttttgttttttttttggggcccccttattttatttagggggccgggttttacaccgggggggtgggaaaaaccctggggttccccccttttatttggttgggggcattcccccttttcccggcttggggtttttggtgaggggccccccc

SEQ ID NO: 173536 - DNA, 697 bp, Zea mays
  Clone ID: MRT4577_89845C.1
gtagaacaacactctgtgttggtgtcaagatctatagagcaggcatttctatgggcagtgcatcaggactcgaaggaagcatagcatcatcggtttttgtgtttcattaattctcatttcaagatggcatctgctggcctaaagccaggggtgcctgttattctacgggagctggagccatcctcagagatgttcaagcaaggagcgtcccttcgagtcacaggaagtctccagtcattcgatgtggagtccgcgactgccaccattcaagacggcagccctgtttgatgctagcgagaagtaacaatgctccaccgatcgttgatggcttgcaggcgattctactcgcgcgcatcggaaggaacgtcgatggcctcgacatgaacctttaccagcaggctctactcatccgacggcagcacgaagcaaagctgctgagctccaggagagcatgatctgcttgctatcttggagcaggaggcgcatggtggttgtagttattaggtttctttgtttctcaacagtgcaattgcatatgtaaacgtgaagagaactggaccaagaactggttaattgagagggtctgctgcatatgatttgcgatctctcttgccctccaaagggctgccatggcatgtgtagatgtgactgccaatttgtgatcatcttacttgcagcagaatgctggttttatttt

SEQ ID NO: 173537 - DNA, 801 bp, Zea mays
  Clone ID: MRT4577_89846C.1
ctctgtgttggtgtcaagatctatagagcaggcatttctatgggcagtgcatcaggactcgaaggaagcatagcatcatcggtttttgtgtttcattaattctcatttcaagatggcatctgctggcctaaagccaggggtgcctgttattctacgggagctggagccatcctcagagatgttcaagcaaggagcgtcccttcgagtcacaggaagtctccagtcattcgatgtggagtccgcgactgccaccattcaagacggcagcgtaagtctgaaggttgacacccagcatctgagggatgtcagtttccgcacgaactcggtgtaccaattcattggtgaacttcagatccgtgaagttgatgatgcgattctactcgcgcgcatcggaaggaacgtcgatggcctcgacatgaacctttaccagcaggctctactcatccgacggcagcacgaagcaaagctgctgagctccaggagagcatgatctgcttgctatcttggagcaggaggcgcatggtggttgtagttattaggtttctttgtttctcaacagtgcaattgcatatgtaaacgtgaagagaactggaccaagaactggttaattgagagggtctgctgcatatgatttgcgatctctcttgccctccaaagggctgccatggcatgtgtagatgtgactgccaatttgtgatcatcttacttgcagcagaatgctggttttattttattgacatgagaacagccttgtggatcatgtttagatcattgctatgaaaaaaaaaaaaaaaagtcatg

SEQ ID NO: 173538 - DNA, 274 bp, Zea mays
  Clone ID: MRT4577_89847C.1
aaaaaaaaaaaaaaaaaaaaaaaaaaaaaaaaaaaaaaaaaaaaaaataaaaaaaaaaaaaaaaagaggaaaaaaaaaaaaaaaaagggggggcgatttataagggctctcacttacaatcctcgttgaatgctacaggggacattttcggaaaagtgtaacaaaaatgaatttattcgcgctttattttaaaaacgttatggatagggtaaaacttgggggtttccaaattaattgggttgtaggaaaaattctttttagcagttgggcttat

SEQ ID NO: 173539 - DNA, 665 bp, Zea mays
  Clone ID: MRT4577_89848C.1
gccgggatcaggtccaagtctcactgtctttgctctcgacctcattcttcctgaagatgcctaatgctcctccacctcctcctaaggacaaggataaagatggagataagaatggaggtggccagtgtgggtgatcactgatcaagtttgtgaaaaataggagcttacctctcatgcagcatcaccacagctgcttatgttatgtaggtgattatgttgtggttcttcactgtatttgtggcagtaaagaggtgatcaagtcatttggattggtgggcagagaagactattcagataggtgcggatgtactgatcgggaggcaaataaggtgagcgagattggatggaattcattgcaatagcgtattggatgactaccaagtctgtgtgttgtacctaaattacacacgaaatgggctcatctgtaaagtttccatgccatatatgtgaatatgcgaggtgccaagagagatgcagcatgctctttgtgctgttgtgccatgggaataagggtgagcctcttagggcttcatcatgctctttgtgctgttgtgccatgagagtaagtgtgagtctcttagggcttgtttagttgtatggggattaaaggggattgagggacatacaattccttgctagttaattttggagggggattgagaggc

SEQ ID NO: 173540 - DNA, 247 bp, Zea mays
  unsure (1)..(247): unsure at all n locations
  Clone ID: MRT4577_89849C.1
cgcgccccgccgctaaccatcatcgggcgggggacctcgtnncggccaccaccctggttccaggaacgctgcctcgannccgctctggcggcacnncggcgccggcgggnaccccgtcgtcggctggcgagnngtcgtgctgnnttcgagcacctccttctgtttgctttttttatcgnnccgacccgcagccgtgtgttttttgggggcggggctcgtancgagtattatggccgtnncctgatcg

SEQ ID NO: 173541 - DNA, 193 bp, Zea mays
  Clone ID: MRT4577_8984C.1
aaaatactacatgggaatggtttaattttttaaaaaattaaaaacctgccaccatatacatgcttgatggggtcaattaacaccccccagaaaaaaacaacgtcctacttgggaacaaacaaaaccgctcttccattgtccatgccttcctttcccacagcttaatctgtacctgcatttttaaaaacctcca

SEQ ID NO: 173542 - DNA, 399 bp, Zea mays
  Clone ID: MRT4577_89850C.1
aaacagggtcccaatttgggtaagcaataggggggacaaccctccataacgccgggcgggagggcccgggggcaaaggggggggggcaaaaccgggagggcttacaacatgggggggggcaaaccaccccgggggcaagggcagcccacaagcctggcgaggaccggataagggtacttttaggacccaaaaccataaaaaccttcctggccctcataaaactcaggaccaacctcctgggaggccttttggggggcgggcagatccccacgggcctaaaagaactcgcccttctccatacccttaccgacataccagggcacaaaggcacgcttggggtacatgaggtcaaacttgggggcgatgcgggagaacaccccccaacacgggggggggggg

SEQ ID NO: 173543 - DNA, 492 bp, Zea mays
  Clone ID: MRT4577_89851C.1
ggcgggcacgtgcaccaccgaatccctctcagaactttttttttcttagtgctatgctactgtgcgatcgtcaggtataacaaaatgtatattcttaaggggtgtttggtttgcccctgctaaaatttagcccctatcacatcgaatgtttaaacctccgttcagggtattaaatgtagtcggattataaaactaattttctctcttttgtaaagcaagtgctgataacgtgtaaagtagaaactgtgcgagaatgaaatgagaacctctgtttctttattgaataaagcaatgtatttatccaaaaaaaaaaaaaaaaaaaaaaaaaaaaaaaaaaaaaaaaaaaaaaaaaaaaaaaaaaaaaaaaaaaaaaaaaaaaaaaaaaaaaaaaaaaaaaaaaaaaaaaaaaaaaaaaaaaaaaaaaagggggggccctttttaagggattcaaattttatttacccggtctttcgcaacgcaaaactttttttt

SEQ ID NO: 173544 - DNA, 252 bp, Zea mays
  unsure (1)..(252): unsure at all n locations
  Clone ID: MRT4577_89852C.1
ctttcatttattaacccacacaaaaagctattcttgctctcaacaagcacctagagaactgtattggtattaattcacatgctccacctcaatttcccaaactcattctttcacccacggatcatatccaaactcttctttgacccaagctacattataacgctgtnctcactatctatacttcctgataatacattactacacctacctgtacatttgactattttcttccctgtaaatgtccacatctat

SEQ ID NO: 173545 - DNA, 372 bp, Zea mays
  Clone ID: MRT4577_89853C.1
aaaaatgagataaaaatttgacacattataaccatccgttacagatttgttacataaataaataaataatctacctagccaattactggcgatatttacaataccttttactataaaatgtcatttgaggtggtctaagaacccaatatccttatgggaccagccttttgattatgtcgatgcctatgatgggaacattattttgaatttaattcgctgattttctttttttgaggggttcttggtgattgggatgccctctttagggactatccttttgtagcttggatggttttttgtggagttgggcaattttttggttttctcctttaggttttggtactctttctgtttattcaattagtgttttta

SEQ ID NO: 173546 - DNA, 393 bp, Zea mays
  Clone ID: MRT4577_89854C.1
atctactttactctactggctggcgtgtatcaaactccaagagcatagcggactatttcattattatctcagggatacaacagatgggatgctcattttaaggattgcatcgtaactgtagggtatccatgcaatagccactgctcgtagagatatggagcatccctttctgggaactaagctgtatgcaacttagaatgtaagggtgggggtagatgctcatctacactacacttatgtgatgggtggatgctatggaaccactcatgatgctaacgtgtcactagaagctctacaacctgtgtgtggtctttgagcttcacaccgctgattttacctaggtgatgactgatatctatcagaactggtattcttgtgtgcatttcatgaggg

SEQ ID NO: 173547 - DNA, 277 bp, Zea mays
  Clone ID: MRT4577_89855C.1
ggagattatgctgaagcttgtctagggtcgatatatagatcaggtgctcttggaattgaaagagtatgctacagaggtggatgttgactatgtgcggaaagcctttcctgctagtggaatatgtgctattaaattggatagagctgctgaaaggtgccttatcgttttgcttgagctgattaagataaaagtcaattattgttgtcacgaagctataatagttatcaaagacatcattagacgctaccctaacacgtatgatgtatattatcgttta

SEQ ID NO: 173548 - DNA, 301 bp, Zea mays
  Clone ID: MRT4577_89856C.1
gagaccctactcagctagtacctaccggttatatgttctcatgtctgctgacagatccgccggagccggtggatacgatacgggcgcgtgctgctgaggaagcctcccatgagattgccatagtttacactcacatgggaagccatgtagatcaatagcaacgctctcgcgcactctatgaccacgtagcctgtcaggcgctgctgcactcactatgctggtccattcactgaccgtgaacgccatgcatacctgaaaggcgacgtaccacgttgtgcatgcgatgaactggcacccgttc

SEQ ID NO: 173549 - DNA, 407 bp, Zea mays
  Clone ID: MRT4577_89857C.1
agccatgaaagtaactgaatttaatgcttgtcaagaggaaacacatgatgtattgagggcacgatcatggatagcatcttatatcacatgtactggatggaacccggaacgatgggttgatggcacgacaaggcaaggtgcatcaaacagaactgcctgaccgggataaataagaccatggctgaagaaggcatttgccaattggatacagcactagttggggattaagtaatctgtaggaaatggtgcttgtactccaactagataacctcatcttgactgttgaatggaagaacctgtatcaaggttgcaccaggcatagtctcaagtcggtcagtaagaccttgctcaaacagatgatccacacgttgcttccggccataccgagcattatacagcaccagagg

SEQ ID NO: 173550 - DNA, 267 bp, Zea mays
  Clone ID: MRT4577_89858C.1
tgttattaatgccaattattctgtagttgcactactggtttaaataaaccaaactttgatcggttacatgacaagtacacgcacacggatgtctgtggagaacattccaggctaccggtcaaaagaagctggggatgtatacattgctggtggaggcgaggatgtagttagctatgatatgaacgaacgagctccatgcgaggacctcaacaaggttgaagcccacggggtaacaggacttgaacaatgccgcggacttcttggacc

SEQ ID NO: 173551 - DNA, 493 bp, Zea mays
  Clone ID: MRT4577_89859C.1
ggccgggatgagagtcgcagccgcagacacgccacagccgccgcgctcctcgcccccggtctaaagctctgcgcgagcggcgcccgcgcgcgcgtctcctgtccctcccgctcccgcctcccactccaccgcgtcaccgccatggcctccgcccccaacccctccttccgcccggaggaggtacgctcgcctcccgacctcgagctcccgaccactgcgctctacaagttcaaggtgatcttgtgccacctctcgccgaagatggacaagaatcagaagatcaagcacctcctcgtcggcatcgacaaggtgccctccgagggcatcaaggtcgcccatctcccatagatatgcaatggcccgtattcaaatgacagcttcccagactacgcggaggacattgtaggtgacgacgatgcggccccttcatgtttaatgatgtacgaggccgatcacagcttactacgcactcttgttgagggggacataactg

SEQ ID NO: 173552 - DNA, 955 bp, Zea mays
  Clone ID: MRT4577_8985C.1
gtcgaagaccaagaagtggcttatttataccaagcattcctcttatggctagatccaatctcctggtccctgcagaaaggaaaaagaatttcacgttcttcctttcaggaagggaggattagggaagtcctattgattactgctttctccagaccgccgggaaaagcatgaaaaaaaggctcgaatggtacgatccctccgtcaccccagaatgttaggtttttttttttcgttcttggtctgtgaagatgcgttgttaggtgctccattttcccattgaggacgaacctcaacctgtgctcgagagatagctctccatacactgataagggatgtatggattctcgagaagagaggagccgcggtggcccccccccggaccgcccggatcccacgagtgaatagaaagttcgatctacatgggatctcacctgaatcgccccatctatcctcctgaggagaagtttgtttggtttcaaactccgattcaaacaggaggagtacgccatgctaatgtgccttggatgatccacatcttcgggtcaggcgctgatgagcacattgaactatccatgtggctgagagccctcacagcccaggcacaacgacgcaattatcaggggcgcgctctaccactgagctaatagcccgtcgcgcgggcctcccaaagggaggcctgctacgccaaaagcgagaaaaactccatccctttccttttgacatccccatgccgccacacggggggacatggggacgtcaaaaaggggatcctatcactatcaactaatttgttccgacctaggataataagctcatgagcttggtcttacttcaccctaaacgaaagaagacttccatatccaagtttagctcagacgtagctgccttctttttgggcgtgaagcagtgtcaaaccaaaataccccctacgcataagcattagtcctcccccggc

SEQ ID NO: 173553 - DNA, 369 bp, Zea mays
  Clone ID: MRT4577_89860C.1
agcagtggtaacaacgcagagtacttttttttttttttttttttttttttttttgtatatataaatattactaataaaaatattcatatcaaacaacaagtaaataaaaagatatatattacagtattacattaaaactttcttctaacatgtttaaatatggtcgagctataaatatgtcgtggttgctaactcttcaacatttcacagaactattagaccatatactgatagtctgacaactatatatatacacctagggccgggtcttgtgaacctgggggaccagggcgatcgcctgggccgacactgacagacaagttgaattcagtcctctaaccccgcgtactctgcgttgttaccactgct

SEQ ID NO: 173554 - DNA, 199 bp, Zea mays
  Clone ID: MRT4577_89861C.1
aaaaaataaaaaaaattttgcactttttgccccagtgaaacggggggcgccctgagcgcggtgtaaaccctgtcaacacggtgtgaaccaagcgagaggcctaagcaggcccctctcgaatctctcgagtataaaaaaaaaaaaaaagaacatagagctccagcttgctccaccctttagttgacggtttaatgagggc

SEQ ID NO: 173555 - DNA, 270 bp, Zea mays
  Clone ID: MRT4577_89862C.1
tttttttttttttttgttttaatttataggttttggaaaagggcaaacaaatctatctttaacattattttttggctacacctaacaagttgattattcaccaagggtaaaaactaaatccccttcacccaaggacatacatccgatattaacccacatgcctccaaccttaaccaaataaataacctgtggttaacacccccaaaaccaacatgggtggaagtgtcaccttccttaaactacaaaatggttgattaatacatggggacc

SEQ ID NO: 173556 - DNA, 391 bp, Zea mays
  Clone ID: MRT4577_89863C.1
tttctcaaggcgggccgggaggacgtcatttcccccattacgagaatcaaggccgtatgtctcgccctattcccagagctcgggagttcctcacaccagccagcacagcgacccgcaccgcgagagacggcgctacttggagaccaccaacgcgcgagtgtcaggagatgagcaccggaggactaaagagcgccatcccgatcacataggagatgacggcactgaaggcgggaacgcgtgatgcgatgttactgcacgcgaacatcgcatccgatctgatggcgaatggctgcacactcaaccgcggcacatagcgatgatgcctgcagcaccatacctccaagagacagttgctcggcatcaccgtcccagtgcaatgatcgatgaccta

SEQ ID NO: 173557 - DNA, 122 bp, Zea mays
  Clone ID: MRT4577_89864C.1
tgttatgcccgccatcctccatttctttttaacgattatctcctctctaacaggggggagtcattgagctggttagcctgcctatgaataaacatatctacggatataaacttactaggctt

SEQ ID NO: 173558 - DNA, 243 bp, Zea mays
  Clone ID: MRT4577_89865C.1
ctggggggttttttttttattattaattttgacctgtttgtttttattttccaacagcagtcccagtttttgttctccagaatagccatccgtgtgagacggctgctggccccttaggaatacaacatggtcaggcaccaggtcacacaggcacaacctccggggggggagcagctcttggcgcccagtgaagacccccccaagggaaagagggagccatacttagggagaggaaaaaccaga

SEQ ID NO: 173559 - DNA, 647 bp, Zea mays
  Clone ID: MRT4577_89866C.1
gcccccccccctgcgagtttttttttttctttttttttttttttttttttttttttttttttttttttttttttttttttttttttttagagcatttcacaggttttcctttggaacaaaaatttcaatttaggcttttagtctaaaaaacatgtcccttacaagaatttagcttcgttcggggcaaactttttcatcataccctgatccaattgggttgggtcttgggcagtctatcaattggggccccaacgttttttgtcccaaaggaaaggcctcatccccccaacttgggggaggctttttatgatcaatcctacccaaacccaaacgggagcaatggcaaccaaggaaagcatccccggcctattaaacaaaaacctttttgtccgggaggggaatgcaagctgctggacctgctggacccattgtctgcagctcaatgttggggtcatccctcgctgttttttctccccccaaatgggatttggtgggggggcttaaatcggctagcatgctttccgggagtataaattgggctggggggggcaaccgaaacatgagctctgctcacccttttggcaattttgccctggaccaattggatataggatatgtggcctctttttcgagcattttcctcaaga

SEQ ID NO: 173560 - DNA, 233 bp, Zea mays
  Clone ID: MRT4577_89867C.1
cgtaatgttgccttgttctgcacctacaccttgggcttccggaacgagtaccagaacctcctcctggccatcatgctctcggctacattcaacatcctcatctggcaatggtgcctaatacggtttggcaagaagacggctgtatacgttgggatctcttctgcagttcctcgtctcatctttgtggccctcatgaagagtaatctaatcgtcacttacgtggtggccatagc

SEQ ID NO: 173561 - DNA, 566 bp, Zea mays
  Clone ID: MRT4577_89868C.1
cctgggaaactccaactccaaggctccaacgcatctgcacttccttctcctacaaaatcgcagcagcacttcttcctccacttcccaaatcaaagcaggaccagcgcgcgcgcagtgatctagggcgaagcaaagcgaggaacagggaccgtctcgttgggcccggaaaactggcgagatcgatggacgctgccgcggaggcctcaacgccgtcgtccccgtcgaagctgcgcgacaagctgcgcctcccgccctcgccggccgccgctgccgcggtgaggacccagcggccgcagcgggccacggccaccgcctgaccgcccatcgcttagagttaagatcgtgctccgcgatgtctctctctttttggtttgtttgtttgtttggccctcctctcttgcaattgtacgatctactgagcgagcgacatacagctacttacttttagtgaattattatcgtgttatagatacagtgtactcttgtaacatgtaggaatgttccgatgtgttcagtacgaagcgggagtgatgaaccctagaaattggggctttgattccagaaag

SEQ ID NO: 173562 - DNA, 568 bp, Zea mays
  Clone ID: MRT4577_89869C.1
cattgggtacctcgaggccggccggaactccaactccaaggctccaacgcatctgcacttccttctcctacaaaatcgcagcagcacttcttcctccacttcccaaatcaaagcaggaccagcgcgcgcgcagtgatctagggcgaagcaaagcgaggaacagggaccgtctcgttgggcccggaaaactggcgagatcgatggacgctgccgcggaggcctcaacgccgtcgtccccgtcgaagctgcgcgacaagctgcggaccacggtgtgctgctgcttcggcgtggagagggctcggtggcggcggcggcggggggcggcgacggccgcgggcgagttccgctacgacccgctgagctacgcgctcaacttcgacgagggcgaggacgacgacgcctacgcggaccccgccgcggccttccggtacaggaacttcaacgcgcgcctcccgccctcgccggccgccgctgccgcggtgaggacccagcggcagcagcgggccacgggcaccgcctgaccgcccatcgcttagagttaagatcgtgctccccgatgactctctct

SEQ ID NO: 173563 - DNA, 500 bp, Zea mays
  Clone ID: MRT4577_8986C.1
aggtcgtggaccgcggcgcgacgtcgtgcgcggcggcgggggccatctacacgctgctggcctgcttcacggggttccagtgccactggatctactcctgcacgtaccgctccaagatgcgcgcgcagctggggctccccgacgtcggctgctgcgactgctgcgtccacttctgctgcgagccgtgcgcgctctgccagcagtacagggagctcagggcacgcggcttggaccccgcgctcggctgggacgtcaacgcccagaaggccggcgccggcatgatgtacccgccggcggcgcaggggatgggccgctaattacgctacgaccagctccatcggtaaactgatatgtgttgtgttgtgttgtgtcagccagatcatcggtaaactgatatgtgatataatgtcagggaccggcatgcccatgtgtttcaagatatttcacgttcgagtcctttctgtcagctcactatccgaatgaaaaccattttccttgtg

SEQ ID NO: 173564 - DNA, 475 bp, Zea mays
  Clone ID: MRT4577_89870C.1
ttaaacatactgtatatttttttcactttctataaggtgttactcacgattccatggtaaagaagtcagtgaagaattttgtattgactctgaggtgtttttaggtcctgagagatgtacaaggtcatagtaccactcaaacatttaaggacatattgatgaagtattccttagaagcgaaattagtgttgcgtataatgttttacaatatttatcagtcagacctaccaatatgtatatgtatttgttgttagtttagaaaacctcttgtgtaggccaattgcaattagttcaagtattgccacaaaggtttttgaagtttttggtgcaggatataactcctgcgctcttgtgaggatctgtgcatagttgttaaggtgttgcttaagcgccaagacgagttaagggctaaggcgtccgcctcgccttgctgtctggagtaaggcgtccgccttaagcttcaagacgtcgccct

SEQ ID NO: 173565 - DNA, 343 bp, Zea mays
  unsure (1)..(343): unsure at all n locations
  Clone ID: MRT4577_89871C.1
ccggagtgctgtcctccgccgatccctgacctaccgcgagtcgcacatgagcaccgatagatctctggccgccacattactactgttcctccgcgccgcccgcacctactacccgcacgatatgagcctgagcgcgcgccgactagatggggttcgtgcccttcgtcgggagggtgctctatgtactcggtttcctcctctccgcctaccangagtggaggggggggcgnttctaatgttgaaccancagctaaggcccttcgccccaaattcaacgtgttggtcaaaaatgtatctgctcatctgagagaagctgtgccacacattgagttgaaccatccga

SEQ ID NO: 173566 - DNA, 472 bp, Zea mays
  Clone ID: MRT4577_89872C.1
ttagggttctggctcccctcccaatcggcttgcgtcgtggtcatggtccacctggccaccatacgcgcaaccggcaccgggatgaacccggccaggaacctgagcaccgccgttgtctacaacaaggacaagacttggtatgaccacgtacgtgctgcaataaatgttagtgtggttgctatgcctgcacgtgacatgcgtatgtgagtgagccttgactttaacgaccttattgattgcgcatcggattaactgggtgggcccgctcgtgggctctgccatattggtcttataccaccagtacatatctcctggcgggcgcatatcaaggctatgagatcctttatgagctacatatgatgagcagagactgaataaaggccttgactggactgcgtgctgaaacatctgctgatagatatatctaccatgctgagaggcttataggcgctctcgctaggtaagagaataa

SEQ ID NO: 173567 - DNA, 247 bp, Zea mays
  Clone ID: MRT4577_89873C.1
cgccaagaattcattaacccattagatagctgggttcgcaaacaacgttcaagcggttaaacacatagacaccatcgaagagagagtgggatagaggattatttagccaaataaaaaagaatcagaaacgcgggcggaatggcagtggaaactccctatgggttggtgcggcagatggggctccagagctggtcaaaaaacacaccatggccggtaagataaagccccattatcatggtcatggggt

SEQ ID NO: 173568 - DNA, 1502 bp, Zea mays
  unsure (1)..(1502): unsure at all n locations
  Clone ID: MRT4577_89875C.1
gccggccggtccgggactctcacttcctgccagtgccaacaagtcccctcttcttcgtctccaaagagacaaaacccaagagaggatcgtacgtcgtagggatcttgttcaatggcggacgcggacctgacaccaaaccactcgctcctcctcaagatgcctgcggcttcggcccacgcccactccccaagcctctcgagcctcctgttatacggccaggagagccatggcgaagcagcgcctgcaaacgcaaatgcaaatgcggcagcagcaacggtggaggacgccgcctcacttgagacctcttctgcagtggttgacagtgcatctccaatggagaggaagaggaaggctacagcagaagacagtgctgcaatcagctctcctcaaccaaaggactgcaagcaggagagcaagagcaggagggggaagaggccccgaaaggagaccgaggagaagagcagcactgatgaagacgaggcctccaaggggtacatccatgtgagggcgaggaggggccaggcgacagacagccacagcctcgcagagagggtgaggagagagaggatcagcgagaggatgaggatgctgcaggcactggtccctggctgcgacaaggttactggaaaggccatggttttggacgagatcatcaattacgtgcagtccctgcagaaccaggtcgagttcctttccatgaggattgcctccatgagcccagtgctgtacgggttcggaacgaacagtgaaggccttcatgatcatcacgcaccanagatgggaggcgtgtcgttccaggaagccgccattgcagtgccagcaggtccagcggcagcggtgagccaagctagcagtaggccggctccatctgaagccaccatgaacaccgcttgcactaccacgccctactcagtctcactgcaggcccaggcttccatctcattctctccctctcaggaaaacggcggcacttattacctggtgcagcaagcggtgggggagcaggcaacgaggcaggaggagctgctgctgagccagttggtgttcagcaacatgtgctcgttccagtaggggggcagggcaggcaagagtgtttgcgcgagcggaagcgaggaaagagacccccacccacacacccatgcacattgagtcattgacaataggtactgttgcaagctaagtttcattgattgggaggccgacgactgaaaggaggaaatgatgctgcaagatttggctagtaggagcgccagatgagtttcagatccgagcggcaagcggagcctgctgtttgtttgcacattttgagagactttgtagtttgtaatgtttctagctcctgtatgacgattttctcggcggctgcacctgacctgcccaccgtcaccagctcaccgttgtagtagtctccgatgagcaaatcggttgttaatacgtaagagaggagagctatttttgttcttaggcaaacaatgcttaactgtttcattattcaacgaccc

SEQ ID NO: 173569 - DNA, 292 bp, Zea mays
  Clone ID: MRT4577_89876C.1
ccaacaacaagatttatatagcattgccacccactggcacacaccactagaaggccagcctaaccttttagctcgcgcggaggatcaagaaaggcgcgcacgcaagcaggcatgcaagaatagagccgatggaccgatagctggcacgctacggcgaggtcttccaagatgatggtggcggcaggatataatgtccttggccctgggcgtgtctgcctccgaggcgaggaacatcaagaccaggacgaccgagaagaaggactacccctcggtgcagccgcagaccttcccg

SEQ ID NO: 173570 - DNA, 415 bp, Zea mays
  Clone ID: MRT4577_89877C.1
ggggaaaaaaaaccgggggggggcacaaaaacaaaagacccgccccagcaaaaagaagaccaaaaataccctagggggccaacaggacccccgcgggggaagggggaggcccaggaaaataacaaaaggattgggcccaggaggagggaaaaggccgggcgggcccggggacggggcccgggaaaaaacgggggaaaacaaacattggtaaaaaaccctgagggccaaagacatcctgggggaaaagcccgcccccaacgggaatttccaaaaaaacgccaggctggggaaaaatggaaaccctgccctggaggggaattcccgagccaacccaaacatgaccaaaaaccttaaagggggaaagcccaaccaagggggggggggactggacccgaccaaggaaaggggcaccctt

SEQ ID NO: 173571 - DNA, 561 bp, Zea mays
  Clone ID: MRT4577_89878C.1
acgcccacgcgttcgtagatcgcgagcggaccgcccttttttttatttttttgtgtgataatatataagggggttcggttctctccaaaaacctaccaccggcaattaacaaccagcataggtatataagaatacacagtactagttcatgtttagggtctcggcatgcatgcaggtcatcacattttgggctcatatcatcagcttgcgcacaaccctccctatcgatcgattcccggccggttcgtgtcgatgatcagttgagggcaacatcgctgtagtcctcgtcgatcaccgtcgcttgctcctcgtcggggcgctccttcgccttgagctcctcgatcctctcgatggcggtcttgagctcccaccggttgtccacgttgctctcgcagcacgccatgccgaccctgatcagcttcaccatctcctccttgtcctcctcctcctcgccccgcaggtcccggtccaccacggtgttcagccactcgccctccggcgtcgaccccacgacggtcaccaggtcggtgttgcccgccgccggccccggattctgtagag

SEQ ID NO: 173572 - DNA, 348 bp, Zea mays
  unsure (1)..(348): unsure at all n locations
  Clone ID: MRT4577_89879C.1
tggcctgcanactcctgcgcctggctatgctggcgctgacgtttgtgggctgttggccggtagactagctccagccaggctgcaaagtactgtttcggaagtatgcccagccgaaagccgtgatgcggggctgaggctcctggtaacttgttcgcaggatggtcacgggtcccacgcaagcatcactggccgagcaaactcctacaggccaccttaggagttaacacgtccgataggggtggatcatcccgtgcatgtgcagagccggcccgatttgagagatggcctcgttcctgcccaggacaccttcggttttggtctatgtgcacaagttattgccccaacgag

SEQ ID NO: 173573 - DNA, 751 bp, Zea mays
  Clone ID: MRT4577_8987C.1
gggggaacaaaatcatgttttaaattaaaatattgggctgggccaacgggttggtatttacattttttccgaagggggtttccgtttcccacaaattttcagggggggggggctccattttcccattggggacgaacctcaacctgggctcgagagatagctttccatacactgataagggatgtatgggttctcaaaaagagaggagccgggggggcccccccccggaccgcccggatcccacgagggaatagaaagttcgatctacatgggatctcacctgaatcgccccatttatcctcctgaggagaagtttgtttggtttcaaactccgattcaaacaggaggaggcccccatgctaaaaatattactagttttttttagtttagtttttcttttttttggtatttttataatttttttcttatttttttttcttttattatttcttgttatttatttttatattttatttttatttacttattttctttttttgtcgcgcgggcctcccaaagggaggcctgctacgccaaaagcgagaaaaactccatccctttccttttgacatccccatgccgccacacggggggacatggggacgtcaaaaaggggatcctatcactatcaactaatttgttccgacctaggataataagctcatgagcttggtcttacttcaccctaaacgaaagaagacttccatatccaagtttagctcatacgtagctgccttctttttgggcgtga

SEQ ID NO: 173574 - DNA, 330 bp, Zea mays
  unsure (1)..(330): unsure at all n locations
  Clone ID: MRT4577_89880C.1
cactttttatacgcantgatacctttttctttgctcctgctcctgctgcccggtcctcgccgggggagactctgttgacttgacaagcaaaccccgccttttttagggagaggggttggggctcaacacaagtttgccaccggttttttttttttccgggaaaccacttttttttgggttggacctccacaagggggtaaactttgggcccgcccccgggggttttttttttcaaagcggctaaaactcttacccagggtcttcaggggggggggatagaaccaatacccgccttgtggggggaaaaactgggggggctgtggttttttt

SEQ ID NO: 173575 - DNA, 335 bp, Zea mays
  Clone ID: MRT4577_89881C.1
atatattatttttttttttttttttttttttttgggttgttttttttttaagggtggagaggttaatccccacccaccacggaaaaaaatctcattttgtttgggggcgaaagggtttcacttaattttttttggggcccaaacccctcgggttcttctctggcctttttttgaataaactctgcaaaaagtagtatattaattcaaaaaccccttttatgcttttgaaggaccaaaagaccttgtacgatttcttttacacgacctttctgttgaggtaaaaaaaaaaaacccccccccccaatttattatgcccccacaaaaacagggggttt

SEQ ID NO: 173576 - DNA, 396 bp, Zea mays
  Clone ID: MRT4577_89882C.1
tcgagcggccgcccgggcaggtacaagctttttttttcttttttcaagggccacactggtatatctgcgtgtatagttctcctgtgttctatcctaaggggtaagccgatagctattcattaaggcaaccctatagaaaatcacgcaccctcgcacattcttgcggggcgtggagtgcttccttactaccatcatcgcctaagaggacgtcctcctgccttattggttcacacacaagagcatactcacgcctgatatacagtggctcttaaaaccaaacgccaaaaccctcttgggggcttttgctgagatttttcacaccaatggcggcccttgcgggcgtcttttaggggcccacaccccccttataaggagttttataaaaaactggccgcc

SEQ ID NO: 173577 - DNA, 467 bp, Zea mays
  Clone ID: MRT4577_89883C.1
accggtcggaattcccggctcgcccacgcgtccgacctactgtacatataagtacttttgatggccaacctgtctcccatatgaggtggcctatttatgctagacggcctgtctgtgagtactgcttcctaaaccgtaaatccgctcatgttacattcagctatccataataccttcaagattcacatattgccatgaacagattccatatgcagagacctgattatggaggcctataacatcccattggattgcagcattcagacaccaccttaataaggttctacttaggcaacatccagaaccgtcattcttttgagaagcctgggacgattaacgactcaagctatgaatactctttacctgcgacgacttgtgctcacgatatgaagcagctatgctccacaagcagtctttcggtgatgtacatggagctcttgcatagagtagtgtatgtggcaattatc

SEQ ID NO: 173578 - DNA, 437 bp, Zea mays
  unsure (1)..(437): unsure at all n locations
  Clone ID: MRT4577_89884C.1
agcacacccagccagccagcgcaagagaccgagaggcgggagacaagggcaccggcagccccggcggggggaccaccaaacgggaccgcgccacgaagcgcacagcccaaagcgcgagggcacgcccgcgaagagggcgaggagcgagagggcgcggagcaacaaccccaaggaggcgaagaacgcggccccaggggggaccaagggcgcaggcgcgccgcggaacgccgcagaggacgcggagaccgcgccgacggggcccgcgcaggcgcacgcggacgagcgcangaacacgaagggcaccgggcngagccccgggcgcaacaacaaccagagggcgcggagccgacaggaggcccacaacaccaaggggcccagcgacaccanggacaccacngaccgggaccaggacgagggaaccaggggccagcggcacc

SEQ ID NO: 173579 - DNA, 373 bp, Zea mays
  Clone ID: MRT4577_89885C.1
caaaatcgcagcgagcgagcgagcatgttgttctttgttcgttcttccccggagcacacgtcaggaacagtgccgagcgagctcttgtctttcgtggagcattagtttaatgattggggaggcaacttgtcagcagatttcttgggagcaacaagcactccagctagctgtggtggccgtcttctctctactgtcattcagagacaagtaagtacgcgcgttgtcctagtattttatgcgcgggagagggagagagagagagagagaaaaaaaaaagcaagatgctcgctcgcagcatgacgctttgtttcgcaaaaagtgcagtgcagttcagagttcggacacctaaaagtgcatctgtgtttacgagcgc

SEQ ID NO: 173580 - DNA, 839 bp, Zea mays
  Clone ID: MRT4577_89886C.1
aaaaccctcccctgttctgacttctgatgttcgtcctcacagccaccaccagcaccaccacggccacctcacttctcctccgatgccgtccactcccctcgcctaaaactgtaacacttgccacgcctcctgctatcctccccttctgcatccgctcccgcttctccgcctccgcctccgcctccgcctctgcatcctccgtctctccccaaagccgtgcgaccgcggcagccgctgcaggcaaatccagggagaagaagccgccgaccgcgagggcgaagcgggccgacgcagtacctgcagcggcggcgcctggaatgtcggcctccggtggcggctccgctgggaagcgcacggtggcggacgtgctgatggggaacgcacgggccgccgccagcaaggcgaagaaagcagcgccgtctccgaagaagccgcaggcgaagaccgacggcgcagaggtcgaaccggaggctgcagcggtggcggagaaaccgccttcgccggcgaggtccaagcgggcgtcgtccccagcgaagtcccccaaattgctgcctgatgggtctacctcgtcggctaagtccaagggtccagccgcgctcgctcaattggatgcggcgaaggagaatcccccgtcgccaaagaggtcaaaaccctagccgctaaatccgacacccagccttctggtgaaggtgttgttgggcttgggcacaccgatgggaagaaggggtcaccctccccgaccaaggctaaaggccaagcttcccaatcagaggagaagaagcgggccgcttcacccaagaaggcgaaaaccacagattccccgaaaaaaaaaaaaaaaa

SEQ ID NO: 173581 - DNA, 615 bp, Zea mays
  unsure (1)..(615): unsure at all n locations
  Clone ID: MRT4577_89887C.1
acggggggataaaaattgtttactaggggccaattgtagctggaggataaaacaaaagcgcgtcgggtcaatgcgtcggcagtagtaccactttcgagttggccacgcattttggttctacaggacatgatcacttccattccacccccatggttgcttggccacaatccaactacctcgctttactttggtggtatgggcacaagctacagacattctactaaagtccacatccggaatggtacgcccagccgtacatgggagcccgcggatatgaaatgcacagagaagtagtaaccgcaaaggcatttgggactcaccgcgcaacgccgtcgcgaggttgccgttgttgacaaaatccgggataacgagcttctcgtcgggggaccagtagtaggcgcgcagcctcacgatgttgggggggcgcacgcgcccgatggcgcccgcctccgcggcgaactcccggtatcgctcgggcgccgcggtgccaccgccgagccggcgcacagccacgggggtcgtgccgttgcccaccaccaccttgtacacgatccccttaccgcccttgcccagcacgtacgccgacgacctcaggagntcgtccagttccatcct

SEQ ID NO: 173582 - DNA, 630 bp, Zea mays
  Clone ID: MRT4577_89888C.1
gatcctactgcgcactgctcgattcgtctacttagcgcagttgcagtgacttcagatagcgtacatccgttactcgtctctgcgacggatcctgatcgaccagatgcaactcaccgagttacaattgtgacctaccctgcctcctacccaccgccaggaagacaggcctgctgagcaactccgccggagtacgtctcagccacgcgagcggcggaccacgccagacggcccagagacggtaggagatgccgaatacgtacagcagcatacaaccatcgactgctagtgaagcgatgacggctaacgtttctggaaaggaagctgcgccgacatctgctgatggtgcgtcgtcgacatgcgcctctgacgacatatcatacgatcgatcgacgacggccagtgcatgctactgagctggtgacctgctggtcacagtgccagcatgaggagctgcatccatgagatgctctagcttttgctgcgtgattatacatcacccctctcgaatacatatatagccacaatgacggactcgaagctgctacaaatacattactgtgggtatagtatcagacatatgcaccacactttgaactcctacccatgtcaagatctggtatgaaattgtcg

SEQ ID NO: 173583 - DNA, 294 bp, Zea mays
  Clone ID: MRT4577_89889C.1
tggcggtggagtcggactacttcacggtttacggtgtcgtattcctgaacgacacgcggatgggggaacctggctccaagggcggccagacggtggcggtgcggctgttctggaccaatacgcagatctactactgcaccatcgacagcggacagtacacgctgtacaaccacaatgtcctgcactactttaagggctgcctcatctggttcagaatcgacttcatcttcggcttcagccttaacttctacgaagactgacttatcaagtctgaagttaaagacgtggcggttc

SEQ ID NO: 173584 - DNA, 1937 bp, Zea mays
  Clone ID: MRT4577_8988C.1
tggcttatttataccaagcattcctcttatggctagatccaatctcctggtccctgcagaaaggaaaaagaatttcacgttcttcctttcaggaagggaggattagggaagtcctattgattactgctttctccagaccgccgggaaaagcatgaaaaaaaggccggaaaggtacgatccctccgtcaccccagaatgaaaggggtgatctcgtagttcttggtctgtgaagatgcgttgttaggtgctccattttcccattgaggacgaacctcaacctgtgctcgagagatagctctccatacactgataagggatgtatggattctcgagaagagaggagccgcggtggcccccccccggaccgcccggatcccacgagtgaatagaaagttcgatctacatgggatctcacctgaatcgccccatctatcctcctgaggagaagtttgtttggtttcaaactccgattcaaacaggaggagtacgccatgctaatgtgccttggatgatccacatattcgggtcaggcgctgatgagcacattgaactatccattggcttcctcgaggccgggccgggattcctgtcggcaaggcgaacgcgagagccgaccgtctcagtgtgcgcgcgaagaagagaaggaggaggaggaggaggaagaagaagaagaatgtatccggccaagcccaccgtcgccaccgccagcgagccggtaaccgggatggcggcgccgccggtgaccggcatccccatcagcagccccggccccgcagtcgcggccagccagtggtcctcgggcctctgcgcctgcttcgacgactgcggcctctgctgcatgacgtgctggtgcccgtgcgtgacgttcgggcggatcgcggagatcgtggaccgcggcgcgacgtcgtgcgcggctgcgggggccatctacacgctgctggcctgcttcacggggttccagtgccactggatctactcctgcacgtaccgctccaagatgcgcgcgcagctggggctccccgacgtcggctgctgcgactgctgcgtccacttctgctgcgagccgtgcgcgctctgccagcagtacagggagctcagggcacgcggcttggaccccgcgctcggctgggacgtcaacgcccagaaggcggccaataataacgccggcgccggcatgacgatgtacccgccgacggcgcaggggatgggccgctaattacgctaccagctccatcggtaaactcatatgtggtgttgtgttgtgtcagccagatcatcgcgtacgtacgggtatacttgtgatatgtaatgtcagggaccggcatgcccatgtgtttcaagatatttcatgttcaagtcctttctgtccgctcactatccgaatgaaaaccattttccttgccatgtggctgagagccctcacagcccaggcacaacgacgcaattatcagggggcgctctaccaatctgaatttttttttcttttttttttttttttcttttttttcaacgagctaatagcccgtcgcgcgggcctcccaaagggaggcctgctacgccaaaagcgagaaaaactccatccctttccttttgacatccccatgccgccacacggggggacatggggacgtcaaaaaggggatcctatcactatcaactaatttgttccgacctaggataataagctcatgagcttggtcttacttcaccctaaacgaaagaagacttccatatccaagtttagctcaaacgtagctgccttctttttgggcgtgaagcagtgtcaaaccaaaatacccaataagcataagcattagctctccctgaaaaggaggtgatccagccgcaccttccagtacgggtaccttgtttcgacttcactccaaacgcaagcctagccttaggcatgcccctccttacggtaaaggcggatgact

SEQ ID NO: 173585 - DNA, 287 bp, Zea mays
  Clone ID: MRT4577_89890C.1
aaaatgttaaatcttttttaatttaacgccagcatttttgacatttgaacgccttttcacccataaaagttagaaacattcaaacggggggaaatttatgtctgccccaacttggttacggagaaactgaggcaaaaaaccggattgggtccaggggcaccaaaaaaaccaaaaccgggaaagggagaaatggggagtcctgaggcaaacccccagaggaggagagtcgcccccgggggaacaaccccctcagccgggggggacacattttaacacctggtccgccc

SEQ ID NO: 173586 - DNA, 645 bp, Zea mays
  unsure (1)..(645): unsure at all n locations
  Clone ID: MRT4577_89891C.1
cagagagtggctctgtggatcccgacancagcaacaatagagtaggcaacgacgtggagtcacaacgttagttgttgtctgctctcttggcctttccaatgagcatgaagatgatggaggggctctttgatgcggtctaattaaactgacaatcatataacaaactacaactaggaaagttacacactatatggtccaacaagtcctcttttttcctgatgattttgtttcatcttaccaatatagtatttcctgcctcagtgcagagcagtgtgttcaacattgttcttggctgaaacattttcgcttaggaccatggctgctggtagtggtggccacctaagatgaccccactgtgttggtggttgatgctatgttgctaacctccttgctgtcaggatttgcctggtgattgtctctttgtatagaaaatgttacctgatcagctggtggcaccactgcagctcctgtaatggtttaccgtgtacattgcataggttcatgtatatatatgctaggtccttggtacatgcctacaaggtacagttccattctgttcgagagatgtacttatgcacacgggtctctgtaacatcgatgcaataatggccgggtgactgtaagtgcacataccgacgcggccgc

SEQ ID NO: 173587 - DNA, 278 bp, Zea mays
  Clone ID: MRT4577_89892C.1
gcacccacagcttcagcggcgcaaggagaaatttgccaagtgtgtgatgtctcaacatacacatcggccgagcgccggcccataccgccaaatctatgagtgtcttatggcacccttaacttttctgcccacacatacaaagaaacagccttggacactactcacaaaacaagggtcctcccgttgcatcacatcctgcaccatctcatttggtcggtgtgccaagagccaacactcaacacactgatactgcactgctcgccatgccatgaatgcac

SEQ ID NO: 173588 - DNA, 374 bp, Zea mays
  Clone ID: MRT4577_89893C.1
ccacataaaaaccgggaaaggaacctttttatttcgggggggccacatcccccatccaaaaaaactttattatggaatcccatcaaaaaaccaaccaaaaagaggccccccccaatgatgtgttgttggaaggaggctgctgggtttgcaaaaccaagtggaacaaaggccaacaattgttgaatttgaaaaagggtggcggggttaccccaaaactgctggaaaaacggcaccaactgttgttgggcaaaaaaggaaccccggcttgctgaacctagctggctaaagggaagaagaattggctgcggcaaaaaaccaggggggtccagggcacccaattggtaaaagggaaaaagttgttgttgttaaaagaa

SEQ ID NO: 173589 - DNA, 419 bp, Zea mays
  Clone ID: MRT4577_89894C.1
ggattgtgcggttaaacctagaagaaggctcgattattgtttgagcttcttcttggattgaagctctttgaggtccttcatctggagcaccttgttgccgacgctcttgccctgcacccatgggtcctgaaggcactggctagctgtgtatctcttcttggggtccttgacgagaaggttgcgaatcaaatccttagctccatcggagacgtcgccccagctgggatcgtcaaagccggacttgacgtccatgatcttcttgaagagtgctggtgcgttgtcggcatagaatggtgggtaaccgcaaagaagaatgtaaatgataacgccgactgaccacatgtccaccgacttgtcgtaggactcgcaagtcaacacctcgggagcaacataacctggagaacccgacgatgtcatga

SEQ ID NO: 173590 - DNA, 1105 bp, Zea mays
  unsure (1)..(1105): unsure at all n locations
  Clone ID: MRT4577_89895C.1
aggtgttgtttgttttttgccctcaatttttaaaatntacgtatgataattagttaggcaatataggctacttttcgttctcacggttctccgctcgccagtcccagtctctctctctcctctctgtgtctctgttcgctctgattcattccttcattcgtttttctctttagtgtctctccttcggctgattacttttcataattaagaaagacataacaaatagaaataagatattttagtcaattattagtctagataagtcttaaatataacaaatctataatatattgttattttttttagaatattatatagtatcttatttattattttgaatataagttttaataattagtctatatagnttatgaacaatataatattaaattagataataataatattaacaattaatatagataaaaaatagaaaataataataacaaaaataaaatttttcttttttatctttttttttttagtttttgtttttttttttctttcttttttgtgattaatttgtttttttagaaagaatattttgtagtttttttttgttttttttttttgttattttttcatttttttttttttgtttttttgtttattttatatctttttttttttttttttttgttcttttattcttttttttttttgatattttattttttttttctcttttttgatttcttattttcttttatgtttttttattcttttttgtttttttctttttatatattttttttttttttgattctgtttttttatttttttttttttattatttttttttataatgtttttcatatttatatgcttatttttttttttttttttagtttttttttttttttatatattttttttttttttttttaatttttttttttttcttttttttttttattttcatttttttttttttttttttttaaattttctttttttaatattttaatcatattttttttatatatttttttttttatttttaattgttaatttttatatttttttatcttttttttttttaattttttaggaatttttatttttttttttttttttgtttttttaattattgaaattttttttt

SEQ ID NO: 173591 - DNA, 1472 bp, Zea mays
  Clone ID: MRT4577_89896C.1
gcgtagccactacccagtagtacccagtagccatctccatccagccatccaggctcaaaccctagggaatctacccagaaatcacaccccaagcagggtcctatcgtatcaagaagccgtcgcgggggccggatcgccgcggctcggagagaagcggagagaaaatcatctggggaaaggtaaggattcggaggcgggatcaggagctgaaagaacttggtagaggtggcctatactcggagggatcgggttgtcagggagcgaaatcaaggtgaggtggaaaccgaggaatcgccaagagaggaggagaagtgcaacagtgcccgaggcaccaaaaattcgttgcatagatccaagagaagaacaatagaaatctgggcagaacgagagcagaactgactacaagatgcctcaattgagaactgccagcaggccggcgctcgccagcaactctgctgctggtttttttatcaggagaagggtagcatcaccaggaacttcccaggcaaagggcgccgccaagccgctggctcgacgggtccgaacacctgcagcgagggctaaaccaaagaggagaagccccctacctgactggtacccaagggtcccactccgtgacatcacatcaatcgtaaaggctcttgagaaaagaaatcgcctagaggaggatgcggctcggcaacacatccaatcgaatgaagattcttcacagcctgtggatccaacaactgcagaacatagtgatcctgattctcaaagcacgcaaactcaagaaacaccgggtgctgttgcttctggtccaagctcaacttcagctgttgcaaaccgtgtgacttctgtggctgagggcaagcaagaggcaacggactgctccttgcaggtggctccatccaagccaaatgatccatctcccgctgatctggagaagaaactgtcaggttcgatagagcagattgaaaagatggtgaggcgccatatgaaggaaactcatccaaaggctgctcagccttccaaggtagttgtccaaaggcgcatactgatgtccatgcgatgagctcagcaacgatttctcttgtctgctgcgttcttggccgctagtcaaggtatgtctagggatggggattcctggttctctgcttgaggacactgtggtaggagtaagagggatttctagcttctctgcttgagagcatggctatctgttggtacaacttgccatggtatgcttactgcatacgacttcagttggcttcaccagaaacgaaccactgttgttcacgtctttctgtttgtgaagtataagacttcactgcgtagtagtaaggcgtactagatatttgtggcgtttagttcaccgaaaagatagagcagttacgagttgtagtaacagcttgaattcttgacacttcaattgatacagttagccttgcttattgttccagttttggaaaaaggttgtgcaaaaaaaaaaa

SEQ ID NO: 173592 - DNA, 1027 bp, Zea mays
  Clone ID: MRT4577_89897C.1
taattcggcacgagggcggccgccgcaaacgccacgacctgcacccccgcccgccgcggccgccgcgaacgccgcgacctgcattcccgcccgccatccagcccgcaccccgccatccagcccgcaagccgcaattgccactcccagatcccgtcatccgcctccatcaatgccctcctcctagatcccgtcatccgctgcgaatctccattcagctccccctcgcgctttcgtcgtcgccgtggaccgctcgctggcgctgacctctcccaagcgcggcatggtggtacccagtagccagtagtacccagtagccatctccatccaggctcaaaccctagggaatctacccagaaatcacaccccaagcagggtcctatcgtatcaagaagccgtcgcgggggccggatcgccgcggctcggaaaggagcggagcgaaaatcatctgcagacagataaggattcggaggcgggatcaggagctgaaagaacctgttcgaggtggcctagactcgtagggatcgcgttgatattgggagaaatcacggagaggcggaaaccgagcaatagccaataggggaagggaagagcaacagtgcccggggcaccaagaattcgttgcatagatccaggagaagaacaatagaaatctgggcagaacgagaacagaactgactacaagatgcctcaattgagaactgccagcaggccggcgctcgccaacaactctgctggtggtttttttatcaggagaagggtggcatcaccaggaacttcccaggcaaagggcgccgccaagccgctggctcgacgggtccgaacacctgcagcgagggctaaaccaaagaggagaagccccctacttcactggtacccaagggtcccactccgtgacatcacatcaatcgtaaagcgcgattccggcagaggagtagacggttccaacaaatttggtccaacaattgtttgtttggccgcttgggctccggtctctcgattcttcgtagctaggtgggagggcgccgga

SEQ ID NO: 173593 - DNA, 360 bp, Zea mays
  Clone ID: MRT4577_89898C.1
ttagcggggtggaggcggcaccggaggcctgggcacctatggctgcgacagcgccgaggaacagtaccaacacacttgctaagaagacgtgcggagttgcgaggaccagctggccgcggccccaaggcatggggcaccgttagcggtaccaaggacaccgctcacaccgaaggatacagccagtgacgcggaggcgggcgacatcatgccccaaggcaggagactcacaggcaaggccaagacggccatcctggagaccacgccctggccggctactactccatgcaagacctcaaggacagcaagggcaaggccaccacgctggcgaccaccagcagagtgaagaaggagtgcacctac

SEQ ID NO: 173594 - DNA, 648 bp, Zea mays
  Clone ID: MRT4577_89899C.1
ttttttttttttttttttagtaggcccaattgttcacaaattcatcatcatgccaaactcatcatcaacccaccagattctgaatcgattcatgaatttggaagctaaagcttgtgcgctagggaaaggcggtgccacgtgcagcatgcagatgggcgggatatttcaacattgcatggactcgtttgacaccacactactgcacgtcccagacagggatgggcaggcaggtcccgaactgctcgacctcatgctcatgcagatcgtccatctgaaaccctccgttgacgccgccatggactcctgctcccgcgatgtcgttgaggtccgctgccagcgcgtcccagtcgaactcgccgttgccgccgaagcagccagcctccgcggcatcaccgcgaaagctggctttagcagtagtcctgatgccgtcgtcgtcggtgttgttgagcacgccgatctgctgcaagaactcgctgaggtcgatctggggcttgtccgcaccggacgggcaggcgccgccctcgcacggctcagcgtcgtcgaccgtcgtcctcgtggcgaccgtggtcaccgcctgctccagggcgtggaagcaggacatgggcgcaggcaaggccgcagccgcgcgggtggtgacggtcgagcagg

SEQ ID NO: 173595 - DNA, 538 bp, Zea mays
  Clone ID: MRT4577_8989C.1
ggtttttttttttttttttttttttttttttttttttttttttttttttttttttttttttttttttggttttttttttttaccaggggggtacaaaaaaaaaatggggggcggtaaaatggtaaaaacaaaggacaaaaacagggggggggagagaggaagccggatcaagccaaaaaaaaaggggcacctttcggaaaaaaaaagggaacgcgggtaaagttcccggggggaaatttccccggcctcaaaggcccaaccggggggggcaccatctgacgacgggccaggcagggaaaaaagcccatctagcaagggcaaaaacccaaggggggttgagcgaacaaaccccgaaaagaggagacaacaccagggcctggacaaagggggcccccccggggggccggttccgcttttggcccccttccccgcccgggagagaagaaacaaaacctgaatcccaagggggaaccgggggccccctaccgattgggggacccgctggaaaaaaaaaagccgattttgaagggtccggggc

SEQ ID NO: 173596 - DNA, 405 bp, Zea mays
  unsure (1)..(405): unsure at all n locations
  Clone ID: MRT4577_898C.1
ttcctttaggcaaaactttttgaccatcttacgcacagangcaacaaactattacgggcagcaggggaccccataaaacccaacgacaggacaacactacaacacatagctagataactgccaagccaaatacccgtaacagcgagaccaccataaaaaaagcttacacaacatagccaacatgcaaatcattctagaactgacaagaagcacaggcataaattctcaaagcgggctacacaagtgtccaccgagcactcgcaatgcccaacaacaagaatcgaacagcccaacatgcaataaaaaggccccgagggcaaggaaacccaaccacacaaagagataccgcggatgacaaaactcaagatacccaacccgaaggaaccccccctagaacaagacaag

SEQ ID NO: 173597 - DNA, 476 bp, Zea mays
  unsure (1)..(476): unsure at all n locations
  Clone ID: MRT4577_89900C.1
gtaagctcggaattcggctctgtgttcattgagccaccttactttatcgacttcangatcactggggaagagggatcttataagcatgcagccttttatccctggagccgcgcgcatgaggccttgcagctgttctgatgtatgcataaagatgcccggcattgcatatacgaggctctgctgcatcctgcatttgaatcatgcatgtgtgttactgacatgtccatatttcgtggctagttgcccagctgactctgaaaatcaagcatctgccaactgttctacacaagaaggtatgcaaaatcctgggctccaacgcatgcgctgttttacttgaacatccggcggcaatgcttttggaacactataatcttgattcgaagaagtaatccgtgcgtcctgttctgatgcaggataaacattctagaaaggggcttcaggagatggtccaaaggaggaagaaatacctgaaatac

SEQ ID NO: 173598 - DNA, 320 bp, Zea mays
  Clone ID: MRT4577_89901C.1
ttttttttttttttttcttttttttttttttttttttttttttttttttttttttttttttttttttttttttttaaaaccccaaacttaataacccaatagcaaagggggggaataaagttttacaacgtaagttgtaaaccacacaacgacagatagataaaaaccgacagaaacataacacgataggacccacttagggcaaatcacaggatagcaggggcacacaagcccgacaaccccgggccagtaaagggtttagtacttgtcacccttggcgccgtcctcacccttgtaaaactcaacaccgacctttttgt

SEQ ID NO: 173599 - DNA, 193 bp, Zea mays
  Clone ID: MRT4577_89902C.1
ccacgcgtccagcggaatcgacggcatccggcgtggctgggccaatcggcctgaaccacctctgcccggcccagattcaacacaatccaggcccagctcatgttccagcaccagcatcagatgggcctgcaccccgcgttcctgcgcccgcgggcgcagccgattaagcaatccgggtcgccaccggcacaat

SEQ ID NO: 173600 - DNA, 294 bp, Zea mays
  Clone ID: MRT4577_89903C.1
aatcgattaacaactggggagctttatttggttctggcttattctagattacaacatttggcacaaatgatgggatgtaactaatttcagaagtaaatttataaatgagtgataaaatgggatgcagtagcatatgctgtagacaacagtagatactagacaataagagcatcacggaacaaccttggaagccttcatcttatcgatccaagcgttgaaggagttgacggtgttacggaagccgaggaacccatgctccttgctcttgttcatgttgccaaatgctcaatgtcg

SEQ ID NO: 173601 - DNA, 215 bp, Zea mays
  unsure (1)..(215): unsure at all n locations
  Clone ID: MRT4577_89904C.1
tttttttttttttttttntnntntttgggggttttttttttttttttttttttcagaatggaacgatttaaaaacttaggccttccaacatttttttggcgacagaattcagtccaatggtccacaaaaaccaaaagaatttggttgttgggaaaaacacccccttttgcgaacaaaattaatttgaagggaaagatttaacatttttttggaac

SEQ ID NO: 173602 - DNA, 560 bp, Zea mays
  unsure (1)..(560): unsure at all n locations
  Clone ID: MRT4577_89905C.1
atatctgatgatttgtactcgcattccccttcttgacatcagaatggatgactgcaattcgagttactgatgtgcgaaggcaatgaaagagaagaaaaaaaaactgtgccccacccatatcgtgaacccgctgccgactcggctgcaggagatcctcctctgacagcccccatggaggcgactatgagcgcgcgagcgaacacaggagctacatgaagtaggttatctcaggaagcgccgaaagatgtaggcaaaaatccaagtattgtgatggctgattgtgttatgacgacagacagacatggatgagttactagttcttctgatgagggtgacttccttgtagagtatgtcccgtcccatcccgtcggcaccgcttgccttgtgtgcaatagatcggcttggatgcctgcacttcaacaggtgntctatcgggttgtcatagatatatccagagttttgtgctaggagaaagtcatcagtcgatttgtgaacctactatgatggagttttatttgctgctaatatcgacctacctattaagcaaatgaagattactg

SEQ ID NO: 173603 - DNA, 386 bp, Zea mays
  Clone ID: MRT4577_89906C.1
attattttaaggggggggtataaattgagagtttttttttttttttaaaaaaaaaaaaaaccccccccgaaaaaaaaaaaagggggggaaaatgcccaaaaatgcccacccaaggtgaaccaccccggaaaaaccgaaaagaaaaacattcccggggaactaaaaaaaacaaaccaaccaggaaggccttaaaggggccaaaattaataaaacgacccccaacccagaggagcggtctaaaaaaaccaccccctaaagggggaagaatataaaaaacttggaacaaaacccgggataatgaaaaccaagggtcaatagggaaaaaaaagggaaccccaacccccctcaaaaaaatgggtgtattggacccaccaaaaaacattata

SEQ ID NO: 173604 - DNA, 495 bp, Zea mays
  Clone ID: MRT4577_89907C.1
atatacagattcttacttcaaaaacaattacaatgacgagcggtcatttcaatatgtaaggactcttgacatatcttggtacgccttacattgctaggaaaaaaatacttagcatcatattttgattcattgcccattgaatgtcactttgccataatattgccactttgccatcaaaatcataactggatatttctctatgaaaagtgcaaaacctaaatagatatacaaaatccgcattctcatttttaacttgctaggcattttattacctccggtggataccatgaactaaatcggacacccttgcaaatctatcaaattccagtgttgccatccagcttaagactcacaggacaccgttagaggccaaagatgccatcgtatccttgatagccactcctctatgacattaacgatgcacttagataccccatatctgctaaaatacttattttgattaaacatagagattatttccctggcagctggtct

SEQ ID NO: 173605 - DNA, 315 bp, Zea mays
  Clone ID: MRT4577_89908C.1
aaacaacacacacataaaaccaacctttttaattttttcaccccctcccaaatcccaaggtgctgggtaattttcaaaatcattccatcccctctccactaaaaaatctttttccctttttcctttatcctcatgttaatgttctctgatatctcttatacctcaaaaaaataacataaattttcaaatttattaacttaaccacctttaccgtgaacattgtgctaatcatcgtcttactactcaaactaaaaaaactaaaaatttacctgcctctatataagatccaatcttacatactccttacattctaca

SEQ ID NO: 173606 - DNA, 366 bp, Zea mays
  Clone ID: MRT4577_89909C.1
ctgtgcggcgctcgaggcggccgtcaatctatacggcgaccatcagttcccttgtacactctcctatcaagcacaggcacagcacacagcagcacagccatggctgctcccagactcgccgccgccagctgccacgctctgcgcggagtgctccacgacaagctccgcgccgttgagctgcagctgcgggcgtgccgccgctccctcgccggcgcgtccggctcttcgacgacgacggcatgcagcctctgagccctctgcaccgcagtcaagcacttgatattgttgctccattattaggatcgtctgaaacaaaatgtctatgctactatacttatatggaagttttaaatacagatttgatcg

SEQ ID NO: 173607 - DNA, 596 bp, Zea mays
  unsure (1)..(596): unsure at all n locations
  Clone ID: MRT4577_8990C.1
tatggagtgcacacacagtcatacacagggggggggacgagtagagatacctaccgtctcctatattgtgtgtgtttgtcgtgtcatctcctatctcgatcatggcgcaggcgcacgtggcggcgaggttcatgacggaggtggctctgttttttgtggtgtcggtcatgcggcagaggaggaagaaggtttgctgattttggacaccatcgccgaggacgacgacagggagcagcagctggcgtgcgggccaccgtcggaccacggnttcgcggcggcgtggtcgctgccgacgccgacgccgacgccgccgcagccacgggagcgcgcgggcgggttcgtggcgaggggcctcgtcggcaagtacttgtcggacgcccacgacggctgccaggccagtggctgggagggtgggcacatgctaggccaccggcgagccgtgcatgcgcaggagctgcacgaggtcggagcttgaagaggggggagagagaacatcatctagctgcatgcagggagattgttttgggntgggtncgnccctggggggggccattncanncgtgcgcccatgcctgcatgataatttaattaccttt

SEQ ID NO: 173608 - DNA, 1098 bp, Zea mays
  unsure (1)..(1098): unsure at all n locations
  Clone ID: MRT4577_89910C.1
acaagaaatcggcactcgcntccaaccccaacccccgttcccgtcctccattcgcaaaagctaggcgattacgccatgcacgagccgacatgtcacattagtgtgcaccacgagaatatgttcttctccatcgtccataggccaaccacgcgcccacggctagcttaattcgccgcaccatcagttcgctcgcaaactctcctatcaagcacaggcacagcacacagcagcacagccatggctgctcccagactcgccgccgccagctgccacgctctgcgcggagtgctccacgacaagctccgcgccgttgagctgcagctgcgggcgtgccgccgctccctcgccggcgcgtccggctcttcgtcgacgacggcagccgccgtggccgcgctcgtcttcgccgccgcggcgttcccgcgagccgcggccttctttctgccactcgtggcctccacctccctctgctgcacggcagcgtgcctgttcgccgccgtggagcggagcgcggccaaggaggctgtagaggccgtggtcgtggacggcgaggggaaggccgaggccgggctgctacaggtgatcggcgaggccaacaccagcgcgtacggcgacaggctcggcagcgtccaggtgggatgcttcatccgcaggtccgcgaggcgaggcgtggacgaggacggcgaggaggtcgtgttcgccggcacgctggcgccctgcgcggcgggcttcgtcggcgccggtcacgcccagcggcgcggcgccgcgctggaggaggagctcacggcgatgcgcgtggatcggctcgccgaaggcgtctggaacagctacttcggcgggtggtctaggtggcaccacatcgacacggcatgcagcctctgagccctctgcagctgcagtcaagcacttgatattgttgctccattattaggatcgtctgaaacaaaatgtctatgctactatacttatatggaagttttaaatacagatttgatcgaattttgtgcttgttaaaacgatgtattgagtttggaggtctttgttgtatcactaacaattagtcgaaaaaaaataatatgatttaaaaaaaaaaaaaaaaaa

SEQ ID NO: 173609 - DNA, 522 bp, Zea mays
  Clone ID: MRT4577_89911C.1
ctctatcgtgcacacgctggcagctccggccgcggtcgctcgcctacctggccatggccgcggcggcgcccgctcgctcacaaggttttggtgctggcgcggcggcgtccgctcgcacgcccgcctggccgtggtcccggtgccggcgtggcggcggttgcgcctgctcgtggcttgaaggtggctgtgctcgcacgcgcttgttcgacggcgacgcccaccctcacatgctgggctgcggtggtgcttgcccgtgcgcgatgtggtcgcggtggcgcacgtccgcgcgctctcagccgtgtggcagcggctggtgctgcacgctcgctcgcccacggagtggtggcagcggcgtccgacatgcgcgcttgcctgcgaggcggcgacagggtccatgctctcctgtgatgaggcaacagcggcggggacaaggcccacacattcgctcgtacatgctcgcagcgacgacctacgttccatcgagcggtggctactagcacgcgcaacacatggtgacttgtg

SEQ ID NO: 173610 - DNA, 292 bp, Zea mays
  Clone ID: MRT4577_89912C.1
cccacgcgtccgcggacgcgtgggtggtcccttcgtccgcgcactcatcaagggcgactcattttcgggactgcacccatcctttaggtacccagccggatagactctgagctaggactccacactgaacaagctgtgcaccaaattcacaaaacactgcgagtgtaataacatagacaatatggatgaaccatcgagtataaaataggaagctgataaacaaggaaaaatttgcatatcatacatgaatgcagatcgttcggaagattaattgaaatgcaaatcaaacaaa

SEQ ID NO: 173611 - DNA, 491 bp, Zea mays
  Clone ID: MRT4577_89913C.1
tcgacaagctgtagagactgtgtacggcctgatgccccatagctggaaattattggccaccgcctggagctaaccatcgcaggtgttgtctgcacatcatactgctcatgaaagccaaacaatgcacccattctaaggatgatggttggaacctttgaaacaactggaattgaaagtgtttgccccagcgtaagcatagagagtaggtggtagtttcttatgccaatttttaccagtctcggtcatcttctgtaatttgttttttcttctgtttcttttcttttggcaacctttgttgtactgtggtatggcgcattatctttgaaaagactgcaaacttttggcattgtgcaattatatataatctttttttttttgaaatggatgacttttgactttgtaatattggcatatgaagctatcttccccttttaatggagtagttgacgtccacaaaaataagtcattgtcagcttgaaacttttgacgag

SEQ ID NO: 173612 - DNA, 861 bp, Zea mays
  Clone ID: MRT4577_89914C.1
tcgggatctttctcctctctctttcagtttctagatcggaccgacttcatctctatcgtgcacacgctggcagctccggccgcggtcgctcgcctacctggccacggccgcggcggcgcccgctcgctcacaaggttttggtgctggcgcggcggcgtccgctcgcacgcccgcctggccgtggtcccggtgccggcgtggcggcggttgcgcctgctcgtgtatagtggatgtgcagcctccctgccttggtgcttgcacgcaacttcttcttctctctcttctattactgatcgaagcagcgtccgcgcagggcttgaaggtggctgtgctcgcacgcgcttgttcgacggcgacgcccaccctcacatgctgggctgcggtggtgcttgcccgtgcgcgatgtggtcgcggtggcgcacgtccgcgcgctctcagccgtgtggcagcggctggtgctgcacgctcgctcgcccacggagtggtggcagcggcgtccgacatgcgcgcttgcctgcgaggcggcgacagggtccatgctctcctgtgatgaggcaacagcggcggggacaaggcccacacattcgctcgtacatgctcgcagcgacgacctacgttccatcgagcggtggctactagcacgcgcaacacatggtgacttgtgcgaggttctcacaagctcatgagcatggctggtcttaccgccatgtaaggatgacaacatgtccctattcctttctatctaaaaacaattcctttgataggatggatgtcgctttttatttcttgattctgtttgttttgcatctcattcggcttcaagccagcgattaaatctgctaaagagatgttttttttctc

SEQ ID NO: 173613 - DNA, 172 bp, Zea mays
  unsure (1)..(172): unsure at all n locations
  Clone ID: MRT4577_89915C.1
tcaagaaccagacctntcgtcccaggtacatggatccatccaccaacatgcgggntcanagcgtgttgcgatattgccgccagtatgcgctattctttatagaccaggatgacatcaggaagtaattctccttcaccgcctgaccctagctacatctcagcgtgcgagccac

SEQ ID NO: 173614 - DNA, 301 bp, Zea mays
  Clone ID: MRT4577_89916C.1
tatctgcctctattcaccgacaaaacatgagataagacacacattaatggtctatattctctatgaaacaacccactctaaatgtgagcctgactttcaaagggttgacccacaccttattggtccatccattacaaacatggctgcacaaattcatatagaggatgaaccaaccacttgacaacatgttgcgaatgacaaagatatcccataaaaatcttatgaaccactgcagagcctatactatgcatatccatttcaacctacatacttagcaccatgcaagagtcctctatataaa

SEQ ID NO: 173615 - DNA, 373 bp, Zea mays
  Clone ID: MRT4577_89917C.1
tcgcggattatggaaatgccaaggcatagttgagttggtggtgttctctgagatcagatgtggcacaaatagtttttttttctatatgtatccacatcaactcatcaatgtactagccttatgtaatttcaactgttggattgtgggattttgctgcttgtttgcagaacagcatccagcgtgctctgtacctcaatgtgtgtcaagagtgggctcgaagatttggcgtcagcggaagctacaaaattgttattccaaacgagttcggaaatgctgtatccttgcacagttgcaccgtgaatctggaaacgttgtagccctatatgatgtgaatcaaaaaaaaaaaaaaaaaaaaaaaaaaaaaaaataaaaa

SEQ ID NO: 173616 - DNA, 1049 bp, Zea mays
  Clone ID: MRT4577_89918C.1
cttgactgaaaagttaattgcatctgaatcttcccttaaaagtttggagacttctctcaattctgtatcaagggaaaaggaagatttgggaatgcaacttactgatgcccttttggacatggaatctgaaagatcaatttggacagcaaaggagaaagaatatgtagaagctaatcatagattgaacatctgccttgatgagaaccacaaactttcagaagatttgatgaaggtgatgcaagagctagggtgttgtagagaacaatgcaaaacaatggaggataaactggtgctttccatgaagagtgacatgaatgagaaagtaacggaatgcagcgaggcttgtaaagcatccgaccaaattgtggagaatggaggaaccattcctggtgctgcgtgtgaaaatatgagatccatggtcgctgaagcagaggttttgaaagagaattgtaacagaaagttaatacatgccaaagatacaatagatgagttgagctctaggatatctgtcatggaagccaatctgaaaaatgatactgcgtctaataacaaagagaagacaaagcttcgcatggagattcgatggctgcgtccacaacttgacgcccatcgtggtcggctcaaagaagcgatgaatgagatgaagaccatggatgccaaataccaagaagcatgcaccacgctgaagaaggacctttctcagcatggtcgcgagatcctgaggttgagagagatgcttaaagaatcacagagcgcatcaaactgaggctataagtttctcatatctaatagctcacgtagcaaaatgcagatatgtcgtcagccctatggaagcactcgttgttgcgtttgttcgcttcggaccttcctggtaccgtggttcactgactttctttgaggtgtggtgcgattccatgcgtcagctacttctaatccaatgcgcttgcgctaccgtaaagaatcctgatgtattgctgttcaaactgtaccttttttttatatttagtccataaatagaaagaaaaaaaaaaaaaaaaaaaaaaaaaaaa

SEQ ID NO: 173617 - DNA, 1310 bp, Zea mays
  Clone ID: MRT4577_89919C.1
gaagatctgggaatgcaacttactgatgcccttttggacatggaatctgaaagatcaatttggacagcaaaggagaaagaatatgtagaagctaatcatagattgaacatctgccttgatgagaaccgcaaactttcagaagatttgatgaaggtgatgcaagagctagggtgttgtagagaacagtgcaaaacaatggaggataaacggtgctttccatgaagagtgacatgaatgagaaagtaatggaatgcagcgaggcttgtaaagcatccaaccaaattgtggagaaaggaggaaccattcctggtgctgcgtgtgaaaatgagctcgacaaacaactattgttgattactgaagagcgcaattgtttactctctgagacacaacagatgagatccatggtcgctgaagcagaggttttgaaagagaattgtaacagaaagttaatacatgccaaagatacaatagatgagttgagctctaggatatctgtcatggaagccaatctgaaaaatgatactgcgtctaataacaaagagaagccaaagcttcgcatggagattcgatggctgcgtccacaacttgacgcccatcgtggtcggctcaaagaagcgatgaatgagatgaagaccatggatgccaaataccaagaagcatgcaccacgctgaagaaggacctttctcagcatggtcgcgagatcctgaggttgagagagatgcttaaagaatcccagagcgcatcaaactgaggctataagtttctcatatctaatagctcacgtagcaaaatgcagatatgtcgtcagccctatggaagcactcgttgttgcgtttgttcgcttcggaccttcctggtaccgtggttcactgactttctttgaggtgtggtgcgattccatgcgtcagctacttctaatccaatgcgcttgcgctaccgtaaagaatcctgatgtattgctgttcaaactgtaccttttctttatatttagtccatagtgtaacaactacgataagtagcaggaagattgagcgaagcttgacttatctatgaaacgatgaaaatgtctaacccactgaattagtcttctttaatatttttcataaattaaaataaaaaataaaaaaaaaaaaaaaaaaaaaaaaaaaaaaaaaaaaaaaaaaaaaaaaaaaaaaaataaaggggatccactattgtagggtaggaccttttaaatgttaaaatcttaaataactttaatggcacactaaaacctattaattgggggacctaaaaaaaatttaatccggggaaaatttaaaaagtttcc

SEQ ID NO: 173618 - DNA, 490 bp, Zea mays
  Clone ID: MRT4577_89920C.1
atcaggctggagcagctggacgtgtcgcggaaccagctcgccggcgccgtggcggagaacgtgtgcaagctcccggctctcgccaacttcagcttcgcgcacaacttcttcagcgtcgaggcagaggcgtgcgtgccgtccgaggactcgccggtggcgctggacgatagcggcaactgcctcgatggcggacgcccggggcagaagccgttgcctgagtgcgcgcttgtgctcgcgcaccccgtcgactgccgcacgaacgtctgttccaagatgcctgcgccaccagcgaagaaggttcctaggccaccagacgttagtccacatccgttgccaccagcgccatcaccggagaaccaaccaccaaagaagtccccagcaccacagccagtgagcccacagccgtcgccgccaccatcagtgaaatctccacccgcaccagcaccagcaccagcaccagcacctattagctcgcctcccccacttatca

SEQ ID NO: 173619 - DNA, 328 bp, Zea mays
  unsure (1)..(328): unsure at all n locations
  Clone ID: MRT4577_89921C.1
gataaggaaattgagtagttgagttttgtggggggggggggagtngatttttttatagnaggaaaggaatgtgagnagtngagtnttggggtgagtnntgaagtgaattnttttatggtggagaaggaaagtgagnagtngagttttgtgttatgtgagngtatnagagatnttgagatnagggntaaaggaangggtgaatntggagagtaaattngtgatttgtgganatggaagtaagnaaggaaattttttttgggggtttntggtagtttttttttttgttgggaggaaaggatagnnagtagtgaggtataattttgaagag

SEQ ID NO: 173620 - DNA, 578 bp, Zea mays
  Clone ID: MRT4577_89922C.1
atcgctctcggggttggcttctcctccccttccggttcgggttctggttcggttctggtccgagagtagctagcctagtctagggtttccgtagagaggaagggagagggagatccatccatggcggagacggagtaccgctgcttcgtgggcggcctcgcctgggccaccgacgacaacaacctccagcaggccttcagccagtacggcgagatcctcgacgccaagatcatcaacgaccgcgagacggggaggtcccgcgggttcggcttcgtcacgttcggcagcgaggagtcgatgcgccaggccatcgaggagatgaacggcaaggagctcgacgggcgcaacatcaccgtcaacgaggcccagtcccgccgctcgggcggagggggcggcggcggcggcggctacggcggccagcgcggcggtggcggaggctacggcggcggcggcggctacggaggcggcggcggctacggcggtggtggcggctacggcggacagcgcgacggtgaaggcggcaactccggcggccaggaggagaactgaacctcgaatctcccattatcgatgtatct

SEQ ID NO: 173621 - DNA, 486 bp, Zea mays
  unsure (1)..(486): unsure at all n locations
  Clone ID: MRT4577_89923C.1
taccctcggagcctgccgggtgctctctcagagtgggctggcttctcctccccctcttacaagtcctcctcgggttagggttccttagggttttgtggaggggcgatggcggcggctgatgtggagtaccgttgcttcgtcggcgggcttgcctgggccaccagcaacgagtcgctggagaatgccttcgcctcctacggcgagatcctcgactccaaggtcatcaccgaccgggagacggggaggtcccgcggcttcggcttcgttaccttctcctccgagaactccatgctcgacgctatcgagttatcttatctatctatagtatcgtgttaccgttcgcttctgtcaccgtgttagtgtccgttctacctttggattaggtgttggtaccctgttgttcgctttggttgctcccgctatgaaacgagacgagagaagaatgagcanggtttttgttcgaaaaaaaaaaaaaaaaaagcggcc

SEQ ID NO: 173622 - DNA, 489 bp, Zea mays
  Clone ID: MRT4577_89924C.1
tcgaggccggccttgtcaaaaagggcgctcagaggtgggctgttccctcctccccctcttaccaagtcctcctcgggttagggttccttagggttttgtggaggggcgatggcggcggctgatgtggagtaccgttgcttcgtcggcgggcttgcctgggccaccagcaacgagtcgctggagaatgccttcgcctcctacggcgagatcctcgactccaaggtcatcaccgaccgggagacggggaggtctcgcggcttcggcttcgttaccttctcctccgagaactccatgctcgacgctatcgagaacatgaacggcggcggcggctggagggactgatgtgtgggcccatcctggcttcggccgagttatcttatctatctatagtatcgtgttaccgttcgcttctgtcaccgcgttactgttcgttctacctttggactaggtgttggtacccctgctgctccctttgcttgctcccgttat

SEQ ID NO: 173623 - DNA, 920 bp, Zea mays
  Clone ID: MRT4577_89925C.1
gctggcttctcctccccctcttaccaagtcctcctcgggttagggttccttagggttttgtggaggggcgatggcggcggctgatgtggagtaccgttgcttcgtcggcgggcttgcctgggccaccagcaacgagtcgctggagaatgccttcgcctcctacggcgagatcctcgactccaaggtctgcttcgtcctcgctaggtttcatttcgcggtctgtttgtgccgttggggctagatccgggtcgtggttcaacagatctgcttcgttttggtacagatctgcgttcgctcgaatcgagcatgacgttttcatgtgattatgcaggtcatcaccgaccgggagacggggaggtcccgcggcttcggcttcgttaccttctcctccgagaactccatgctcgacgctatcgagaacatgaacggcaaggagctcgacggccgtaacatcaccgttaaccaggcccagtcccgtggcggtggcggtggcggcggtggctacggcggcggtcgcggcggcggcggcggttatggtggcgggcgccgtgacggcggttatggcggcggtggcggctacggcggtcggcgcgaaggtggcggcggcggctacggaggcggtggcggctacggcggtcggcgcgagggtggcggtggcggctacggcggcggtggcggcggcggctggagggactgatgtgtgggcccatcctggcttcggccgagttatcttatctatctatagtatcgtgttaccgttcgcttctgtcaccgtgttagtgtccgttctacctttggattaggtgttggtaccctgttgttcgctttggttgctcccgctatgaaacgagacgagagaagaatgagcaaggtttttgttcgcagctatttttgtccaatgatattgatatattgtttcc

SEQ ID NO: 173624 - DNA, 419 bp, Zea mays
  unsure (1)..(419): unsure at all n locations
  Clone ID: MRT4577_89926C.1
cttctcctccgagnactccatgctcgacgctgtggaggacatgaacggcaaggagctcgacggccgtaacatcaccgttaaccaggcccagtcccgtggcggcggcggcggcggcggcggcggtggctacggcggcggtcgcggcggcggcggctatggtggcggctacggcggtcggcgcgagggtggtggtggcggctacggcggcggcggcggcggctggagggactgatgtgtggccccatcctggcttcggccgagttatcttatctatctatagtatcgtgttaccgttcgcttctgtcaccgtgttagtgtccgttctacctttggattaggtgttggtaccccttttgttcgctttggttgctcccgctatgaaacgagacgagagaagaatgagcaaggtttttgttcgc

SEQ ID NO: 173625 - DNA, 394 bp, Zea mays
  unsure (1)..(394): unsure at all n locations
  Clone ID: MRT4577_89927C.1
gttttgtggaggggcgatggcggcggctgatgtggagtaccgttgcttcgtcggcggacttgcctgggccaccagcaacgagtcgctggagaatgccttctcctcctacngcgagatcctcgggggggggggggtctacttttctggagacggggaggtccctctgcttcagcttcattaccttctcctccgagaactccatgctctacgctatcgagaacatgaacggcaaggagctcgacggccgtaacatcaccgttaaccaggcccagtcccgtggcggcgggggcggcggcggccgccgcggctacttctgccgccgcggaccccggcagctatggtggcccgccccgtgaccgctgttatggcggccccggcggctactgcgcgccgc

SEQ ID NO: 173626 - DNA, 605 bp, Zea mays
  unsure (1)..(605): unsure at all n locations
  Clone ID: MRT4577_89928C.1
accccgggctggcttctccttcctcgtttntcaagttctcctaaggtctcgggttccttagggttttgtggaggggcgatggcggcggctgatgtggagtaccgttgcttcgtcggcggacttgcctgggccaccagcaacgagtcgctggagaatgccttcgcctcctacggcgagatcctcgactccaaggtcatcaccttaccgggagacggggaggtcccgcggcttcggcttcgttaccttctcctccgagaactccatgctcgacgctatcgagaacatgaacggcaaggagctcgacggccgtaacatcaccgttaaccaggcccagtcccgtggcggcggcggcggcggcggcggcggtggctacggcggcggtcgcggcggcggcggctatggtggcgggcgccgtgacggcggttatggcggcggtggcggctacggcggtcggcgcgagggtggtggtggcggctaccgcggcggcggcggcggctggagggactgatgtgtggccccatcctggcttcggccgagttatcttatctatctatagtatcgggttaccggtcgcttctgtcaccgtgttagtgtcccttctacct

SEQ ID NO: 173627 - DNA, 672 bp, Zea mays
  Clone ID: MRT4577_89929C.1
ccggccggggtgctctctagaggtgggctggcttctcctccccctcttaccaagtcctcctcgggttagggttccttagggttttgtggaggggcgatggcggcggctgatgtggagtaccgttgcttcgtcggcgggctcgcctgggccaccagcaacgggtcgctggagaatgccttcgcctcctacggcgagatcctcgactccaaggtcatcaccgaccgggagacggggaggtcccgcggcttcggcttcgttaccttctcctccgagaactccatgctcgacgctatcgagaacatgaacggcaaggagctcgacggccgtaacatcaccgttaaccaggcccagtcccgtggcggtggcggtggcggcggtggctacggcggcggtcgcggcggcggcggcggttatggtggcgggcgccgtgacggcggttatggcggcggctggagggactgatgtgtgggcccatcccggcttcggccgagttatcttatctatctatagtatcgtgttaccgttcgcttctgtcaccgtgttagtgtccgttctacctttggattaggtgttggtaccctgttgttcgctttggttgctcccgctatgaaacgagacgagagaagaatgagcaaggtttttgttcacaaaaaaaaaaaaaaaaaagcggcc

SEQ ID NO: 173628 - DNA, 311 bp, Zea mays
  Clone ID: MRT4577_8992C.1
gcccttggtttttttttttcatacaaggacaattattcagaaaaaaaaggggaacgtgcaaactgaatacgctaatctaacaaacagaacattaacactggcttcgctaacatttgcaaaaaagatctatccctacgaggcccaatcttcatattttttctgggccagatgctactaaacatttgccacactttttttttggttagcggggtcgattttaactgtaatcccaaagtcatgtaaaagcaagaaatattgacaaaacctgaacccgggttctccctatctggattattgaacccaactaagct

SEQ ID NO: 173629 - DNA, 1478 bp, Zea mays
  unsure (1)..(1478): unsure at all n locations
  Clone ID: MRT4577_89930C.1
aaacgccattgggctaggtttggggtatccaaaatccagggtttctgtcactttaacaggttcttcaacaattcttcccaccaagagcccccctcccaggaatgccataatcagcagcgcacacagaaccgcgcagacatatgcagcccagagcgacccccacacaatcctccgcgccaccttccccataccatcccctcctccaagacgtgcgatcagagtgcccgcggcgtccccagccataccgagcacccacgccctcgcgcgccgggccagaccgagcgggtcggtcacgaagagggaccaccattgcagcagccgaaccgggaacgcgaggcagctgacgagcgcgctgacctggaagactactgccttaacgacgagcacggcgaggtactcgagtatgctcggggcctgcgacggcgtcgccgtaggagcaggcgcctccacctcaacaaccgcatccacgtccgtagccttaatgtcctcctcctcctcctcctgctcctcctcctccttgggtgcggggtcagtacgggaagtggcgctggtggcctcggaggaatcgggcttgagatgctcgtcctcgacggcggtgacggtggaggtggccgcggaggccgagggggatgatgagagaatagagtcgggctgctttacactttttgcgcggcgcgggcggcgacggagcgtagaggaggagatatgggaaggggaaggggaaggcgaaggcgaaggcgaaggggaaggggaaggggaaggggaaggggaaggcgaaggcgacggggaggggagcgagtcaagggcatcgaagaaggtttcgtcggaggaggaagcggtggcggcggagggatcgtcggcgtccatgagcaggagatcggtgagatgggtggtcgtggtggtacgaaatcgtggcggtgtatatgcatttggaaggaggcggtggcggctacggcggtcggcgcgagggcggcggtggctacggcggcggtcgcggcggcggcggctatggtggcgggcgccgtgacggcggttatggcggcggtggcggctacggcggtcggcgcgagggtggtggcggcggctacggaggcggtggcggctacggcggtcggcgcgagggtggtggtggcggctacggcggcggcggcggcggctggagggactgatgtgtgggcccatcctggcttcggccgagttatcttatctatctatagtatcgtgttaccgttcgcttctgtcaccgtgttagtgtccgttctacctttggattaggtgttggtacccctgttgttccctttggttgctcccgctatgaaacgagacgagagaagaatgagcaaggcttttgttcgcagctaanaaaaaaaaaaaaaaaaaaaaaaaaaaaaaaaaaaaaaaaaaaaaaaaaaaaaaaaaaaaaaaaaggggcccctccctctacctctatttgttccttcccttaagggaaaataaaa

SEQ ID NO: 173630 - DNA, 680 bp, Zea mays
  Clone ID: MRT4577_89931C.1
caatcaaactgttttttgataggtgacaacctgacagcgaccttgatcgtgtactacacacatgggcacatggcgtcacacgtcgctggcggcgcattcctgaacgactttcttgcttctgagatcgtcgacgagcttctgtagcgcggcgagggcaccgtcgccgtcgcaccccatgaacacctccgcgacatcggccggcgtcaagtgcacctcctccagcaacacctccgcctccccgaccagctcctcgtacctctggtcaccattagccggttcgtgatcgccgccgccgggagtgccgcagtctccgaggtagttcttggcgagcacgcgcagcgcggggcccttgcagtagccgagctcgatcttgcggtccatccggccgggccgcagcagcgccgggtcgaggcggtcgacgtggttggtggtgaacacgatgaggcgctccccgacgcaggacgaccagagcccgtccacgaagttgagcacgccggacaggctgatcttatccccgtacatccctggccctcccatcggtgggaatcgcgacaagctgacatggcgcggcggcgcaatgtcccgctcggcgtcgtcggcggtcttcgtccggtcgaggaggccgagggagcagtcgatgtcctcgacgacgatcagcgacttggggcgcgtgcaggcga

SEQ ID NO: 173631 - DNA, 246 bp, Zea mays
  Clone ID: MRT4577_89932C.1
gtaatcatggcgacggcccatttaaaaaataggagtccgaatttattcaaattgtcactattttaaaccatgacattaagttcatattgatacagcatctggcccaaactaattttagcgcttgaagcgtggattttacttcagaggggtacatcaacccatttacaaacaacaaaatttgacagatttttggaggaacgcgttaaaaacccaccttttattctcgtacacagatgcatgaatttg

SEQ ID NO: 173632 - DNA, 389 bp, Zea mays
  unsure (1)..(389): unsure at all n locations
  Clone ID: MRT4577_89933C.1
tatacaacttgcagaatacaaccagctgaggatgcaccaacaataggaagttctacttctgattgaggaaaaacatcttgcagctgagataataaaccttaatatctaccaccgttgtatgacagttgctcatagcatgttatcttcattaaacgctctatattaccgctacgcttcctgtacaatatctaaaccattatataaaacttgcttgacatgactgtatctcctgatctaatatcttagtttcctgctaaaaaaaaaaaaaagatacctaagactgcctccacgcctaaaccacgactaatggcagaattctcgtaaatatgcactcacactgngcagcactgcttnaacatgcatcctatagggcctatttcgacctatat

SEQ ID NO: 173633 - DNA, 701 bp, Zea mays
  unsure (1)..(701): unsure at all n locations
  Clone ID: MRT4577_89935C.1
ttttttnnnnnnnnnngcttgccacttctaataacaggtttgggtccttccttacagggcacactcctgtcaattgaggcatgggtttcctcatatttggatgagcatagtggttatcttatgatagaatggcagcaatcgtcatggatcactgtgttctttacttactaaactgaacaattcgtgattctgccttcagtagttcagtcactatgatgatgcatggggtgatttatagaccttatggaaccttctacttgggttattcttcacactacaaaaaatgcacgagcaaaatagttcttatgaaatgaaagtaaaattatgtgttgaattctgaaaattcacattcttaatcatttagcctcaaattgtcttatgtgaaaagaaaagctgaacactagaattctagcctatcaagtatgttaagtgctgcatatctttaagagttggattttataattaggtgcggaactacagagatttgtctaatgatgcgatctactgaaatacctactgtaggcttcttaaaagcatcctgttgttgagaaaaaaatatctttttcttcatcttggtttgcatttcataagtctttggcatcaggctattaccctaacaatatagcatagatgaaagttagttgtgattagaccgtgtccagcagttcacccatatggtcgcccaaaaactattttgcact

SEQ ID NO: 173634 - DNA, 373 bp, Zea mays
  Clone ID: MRT4577_89936C.1
gccacgcgtccaggttcacgctctcactatagtgcaggctctgtcttccgtgctctaacatctcgtgcgcctctcacatgggaaaccgggagaggggaggcacagaggcacgaagccggctccagacaatacggctgagagcactgagaacaggtcgtgtggcaagaaagtacagtcgataagcctacgaggaacaggaagaggaaaaggcacaccatgtgcaaacaaggtacaacactgtgcacacactcaggctagtgacggagatcaagggggagcagagacgaaacctggctctgagaacgagcccatgaatgagagcatgatacaaggagaaagagatgctccatcggatgagactacaaagcaagcg

SEQ ID NO: 173635 - DNA, 172 bp, Zea mays
  Clone ID: MRT4577_89937C.1
acgcagggagacagcccactcgtcgacgcatttacctggtgaacatgcgtactcgtctgtcgcgtggtatctgcagcaacttcgcctaggagttaaacacgggtgctctggcaccacctctttatagcatgtaaagcgtcaacgtatttatcggtgcttacagactgccatg

SEQ ID NO: 173636 - DNA, 500 bp, Zea mays
  Clone ID: MRT4577_89938C.1
agccctgtcttttctttcttttttttctatgaagggcgcggggcttatctttgcatgagaactaagaaggtccttggaggattaaaggtgcccctgggcaacgggacttgaacatgttgagcctttgctaacgcaggaggtttacccggaagtattgtggctcctcaccactcgtggcagcgaaaggtgtatacatcaagattaacctgtccgggactacttgcttgagttccacttgaaaagggcggacacccagcttggggcctccgaaccaggtagcttgtgtgttaatcagtccccttcctttttaatgaaataagggccaggcttgataggataagggtaaaagtaaccctcaggccgcgaaaacccaaattcattcatgcgatcactgaaaaacatgcagaataggcttctttaacccatattcatgcctgtttttctaaagataggcattaggttcttcacccacctccatggggaaacgcaaatttattctc

SEQ ID NO: 173637 - DNA, 662 bp, Zea mays
  unsure (1)..(662): unsure at all n locations
  Clone ID: MRT4577_89939C.1
cccacgcggccncgggcncgtggggaaacatctattcattttatnatctnnnnttgatgaacggggcgttcctggggtnnatatgcaggcacttcattcgggggtattnggggctcagctaaccactcggagggctggagnnncncnagnngcttgngtaaccacaaggctgatattggcgggcgggggggggggggggccgggggggggggggggctgctacggttgggagagaagtgggtggggggggggggngggcgtggggtgggtgggtggtgggcggcgaggagggtgggtgaggtggtccgggttgcgggcgggttgtgtcggcgacgtggggggggcgcggggcgggtggggtgatgggggggggggggggggggcggggggcggggggggggtcgggggagctgggttgggcgggggggtgggggtcgggggcggggggggggggaggggggcggtggcgcggggcgggtgggtggggtgggggcgggggtgggggggcggcgaggggggtgggcgggcgggggtggggggcgcgtgctgttgttggcgctgtggtggntggcgtggggtgggggtcctgggggcggggggtggggtggtggggcgggggggggggaggggcggggggggcggcgggggttggggtggggggg

SEQ ID NO: 173638 - DNA, 414 bp, Zea mays
  Clone ID: MRT4577_8993C.1
ataaaaaaaaaaaaaaaaaaaaaaaaaaaaaaaaaaaaaaaaaaaaaaaaaaaaaaaaaaaaaaaaaaaaaaaaaattaaacataaaaacgagaccacactttagggcgatttttgagggattgtccataacccttggaatttttttttgcccttgggggggggggggccccatgtgggcctttttgcggattttccctcccattgggcctggggttgggtttttcttttgtggggggccccatttacccctttggggggggccaattttaatattttttgggggggttttcttttttacgcggggttggggggaaaacccctgggggtcccccaacttttttgcgctttctgaacagattgcccttttttgcaatgtttgggtggacttcgcaaggggggccggccctttttt

SEQ ID NO: 173639 - DNA, 962 bp, Zea mays
  Clone ID: MRT4577_89940C.1
acggcgtatacatcctatgggcgattggctccctcgaggccggccgggagttgtcgctgctgccctgttgcggcgacgactccgtgactcctagtccctacccagatcggcgcccgacgcaaggccgagcaggcgatggccgcagcggcgtcaatggggcacccttacgcgccagccgagctggaccttccgggtttcgtgccgctgaagctgtcccaggtcgagatcctcgtgtcctacctcggcgcctccgtcttcgttttcctcgccgtctggctcgtctccggaagatgtgtcagattatccaagaccgaccgtctgctcatgtgctggtgggcattcacagggttgacccacataatgatcgaggggcccttcgtcttcactcctgatttcttcaagaaggagaaccccaatttctttgatgaagtttggaaagagtatagtaagggagactctaggtatgttgctagggacactgcaactgttacggttgaagggatcaccgctgtattggaaggccctgcatcactacttgctgtctacgctattgcatccaggaagtccttcagccacattctccagttcgccgtctgtctgggccagctctacggatgcctggtttacttcatcaccgcgtacttggacggcttcaacttctgggtcgccccgttctacttctgggcgtatttcattggcgcaaacagcttctggatctggataccgatgctcatcgccataaggtcctggaagaaaacctgcgcggcgtttcaagctgagaaggtgaagaagaccaaataaaagctgtctttagctaccgttttattggaactaagggttgtgctgtggagaccgtcattttgatggcttaaattcttgtgctggtactggaaactgcatgatgtactctttgctcaaacaaatgaagaccggtttacaaaaaaaaaaaaaaaaaagcggcc

SEQ ID NO: 173640 - DNA, 955 bp, Zea mays
  Clone ID: MRT4577_89941C.1
acatgtcaagcactcaagcagcccttcctgtgccggtgctatacttcccgtactagttgtcgctgctgccctgttgcggcgacgactccgtgattccctagtccctacccagatcggcgcccgacgcaaggccgagcaggcgatggccgcagcggcgtcaatggggcacccttacgcgccagccgagctggaccttccgggtttcgtgccgctgaagctgtcccaggtcgagatcctcgtgtcctacctcggcgcctccgtcttcgttttcctcgccgtctggctcgtctccggaagatgtgtcagattatccaagaccgaccgtctgctcatgtgctggtgggcattcacagggttgacccacataatgatcgaggggcccttcgtcttcactcctgatttcttcaagaaggagaaccccaatttctttgatgaagtttggaaagagtatagtaagggagactctaggtatgttgctagggacactgcaactgttacggtcgaagggatcaccgctgtattggaaggccctgcatcactacttgctgtctacgctattgcatccaggaagtccttcagccacattctccagttcgccgtctgtctgggccagctctacggatgcctggtttacttcatcaccgcgtacttggacggcttcaacttctgggtcggcccgttctacttctgggcgtatttcattggcgcaaacagcttctggatctggataccgatgctcatcgccataaggtcctggaagaaaacttgcgccgcgtttcaagctgagaaggtgaagaagaccaaataaaagctgtctttagctaccgttttattggaagaccgtcattttgatggcttaaattcttgtgttggttggtactggaaactgcatgatgtactctttgctcaaacaaatgaagaccggtttacaaattcaaaaaaaaaaaaaaaagcc

SEQ ID NO: 173641 - DNA, 706 bp, Zea mays
  Clone ID: MRT4577_89942C.1
gcccctcctctcggtttttttttttcttttttttttttttttttttttttttttttttttttttttttttttttttttttttttttttttttttttgggatcgacacactgatcctcccggtcatggaaagccaagtgcggggcggggcggttgccaacatttttcgattgttcacacagggtttgcagagcttgacatgacccaacaaaaacctaaaattttcccataaagttgccgtttcaacactgcattggaggctgcaaacagcccccccttttggttgtaggaagcgttttgtcagttgcaacctccccccggaggttttttttttttgggcagctcaccacatttgatgactagggaaatgccggaaacaatgttttttgggtggcttaaaaaaaaaatttcacttttcactgggatgcttcctaacgctggctcggatgtaacaaacaacaatcactgccgttgggtgaaaaaagggatttcgaggggtgtaacgttgcccaaaaacttttccaggttgtaaaatgctccctgttgcggaaggaatttttggcccacaacatccccaaaatccagtattgcccaaaaattcggttttgtatcaccaaatgcaactttgttaaactgtttttcaccaaaatccctcattttggaactgatagcatttatctgaccttttgaaaaggccgtgaggatgat

SEQ ID NO: 173642 - DNA, 596 bp, Zea mays
  unsure (1)..(596): unsure at all n locations
  Clone ID: MRT4577_89943C.1
ggagctctctatcctctgcgacgcggaggttggcctcatcatcttctccagcaccggcaggctctacgatttctccaacaccaacatgaaagctgtgatagaccgatatgggaaggcaaaagacgagcagcttggcaagaacgatgcaacttcagaactcatggtacggtgaggaaaatgtatacctatttctagctaactagcagttattggtcgtagtacacacgtgccatatgatgtatgttggtcggaccaagatcagaagtttagtccttcattactcacaaataatgacaatttgttgtgtttagctaatcagctagtcggctattcaaattttttgtgaaaggacatctagctgacttggttagttgatctgaatagcactcctcaggttctgagttcggcttctcgtggaagctcgacttcccgtgggagcgaatttcagtttttggggacatagattcgagggttttcttgaccttcatgagaatgtctttttagtataatgtatcggggctgccttaccacccatatgtnnnnaaacaagaaaatatttatgtattaagttagaaaaaatatttaaagttgccnct

SEQ ID NO: 173643 - DNA, 275 bp, Zea mays
  Clone ID: MRT4577_89944C.1
tttgtcccgggctctgctgcctctcgtgatctgggggcggaccggttcccacccaggatttccactagttagacctcccgaccggtttctagccgttccctcgtgctcctcctactgcaccccgcagagcatcgggggccaggcggccgttcttgatgcctgctgctgcctccacttgcggtgcctaccctaccttacacgacgccgcgtccgacggtgcacgagcatgcgctgcccgggcttccagcacgcactgcatggggcctccagactgc

SEQ ID NO: 173644 - DNA, 690 bp, Zea mays
  Clone ID: MRT4577_89945C.1
tttgccgggcgcaggttctattttgttacaatgcttttttttccttttacatttgctcactcattgatcatgttatttctgaatgctgaattcgatgcaattgagctgatttgttttgaatctggaccatgacctgaactagacctgttgttggggaggctatgaacatacccgggcttacccacacccaaattcatttctgaaatatccattctgcaccctccccataattctccatgtccattgccagcattgggtaacctgatacatctgaaccacaaacatatgcttggactgtaacattcgcaagcttgcaaaaccattggaagcacatagaatctgcatgaaaacttgccgtttgaaatcaatcgaacaagtgatggaaaccaaaatcagtataaaaggatttgaatcctcatttcctgacaaggattggaacttgaaaggtacattgcaaggcaattgaagaacagatggaaattgccctcagaaaaggggaaaagaagaacaaatcaaagtggagatgtggttgcagacttatcagtttcagtatatatgtgactggatcacgaagttactccctcaggatgacaccaatgtgggaggaggcttgcagccgcaacgaacgagtggagcagtgtggggaaaggacggcgtttgggggcgtttccaggagacaaggagttcatg

SEQ ID NO: 173645 - DNA, 549 bp, Zea mays
  Clone ID: MRT4577_89946C.1
aaatcataattgatacttcatcagaagtatctataaaaggaatggattttaaggtagccaatgcatcaaagggtttccaagcaactcctataaacctaatgcacatttcgctagactttaagtgtgtaaaatttttatttaaaaacacaaggaaaggattgcatgcaccagggcttgcctggaataaatactacgttaatgtttgttagacgacgtccacttggcgaccatcctttgtcttggcattcattcagtccattcacctgtggtccatcgacactgtttctcagagtagtcgactctttgcattacttggggtcactcggctttagtcccccgcatcatgtgatcaattaacgtacctaaatccgacttggatttcgcagaaataacaacgataatatgttcaagaagtttgttgaatatttgacgagcgccacgcgagaatcgcttctttacccactctcgggatttcttgatgacgtacggaacgacgacgagctcgataacgcacacgtgtgataaggcagggtctgcggaaatgtgtgt

SEQ ID NO: 173646 - DNA, 704 bp, Zea mays
  Clone ID: MRT4577_89947C.1
acttcacacagcagaagcactccactcgcaggcacttagcgtctctcctcttcctctcccactgaccacgccccggaagacagagagagatcgacgctcctcttctctccgacggtgatgggagaggccgccctactcgagagacatctcgctgcgcatcctcaagatctggacgcaaacccatcactacatacggtgaagatgtgctgcgtcgatgctgttctatgacgtcagtgccaactcatgttctgtgattgcacctatcgagtcccggcacattagcagtagtcggtgctgacatcatccaatcctccacattgagagtcatggaagctggacatcctcccgatcataccagcccatcctcgtatgaggttcgtgatccagaggaatccatcgaaccgcttcttcagcgctgacgccaagaaacagcagtacctgatgttgacgtcatgcatgcgtctcggtgatacacccccagcaagacccgtgcgcttggagcctgccgacgttgtacgacctgacctactgctagatggctgctcgaatgatcttcgatgtgtcctatccggaacagattcatgtcaagaacatcatcgtgcctgattagaccgctgaggctattgatcaatatcttgacctctcacggcattggtcttcactaccagattctttcgcagcccgatctgcttgcgaaggttact

SEQ ID NO: 173647 - DNA, 312 bp, Zea mays
  Clone ID: MRT4577_89948C.1
ggtcaaatcaactcgagatgtcacagacccaaaataagcgttttacactggagccaccaacacggttgaccagccacgggtcatacttcagaaagaacacacccacatacacagaacatgaccactagaacaaagttgctgtacttggctgccatcacggtctatccggactgaccggcatctaagccctctgcccatggaaaccactggggaactgtatgcacttgggcacgatggggactcactctgggttgttgggacctaagtggttgtgcttcatcaggccgaacaagtaagcctacgccttcttct

SEQ ID NO: 173648 - DNA, 653 bp, Zea mays
  Clone ID: MRT4577_89949C.1
ccgggcaccgccgattccggatatttcgtcgcctcgatacagcctggagctttatccggtggccaagcctttatcatctccctgctgcagttcgcgtccggctcggcaagctgctccattcctcctctgccgcggccgatgctggtgcttctctgctggaccgcgtcccccatggctgctcggcgcgcgcttgtttcctctgtccttccccctgcgctcgctcaggatccatggccgtcggccctctgtcccaacgccagccgagtctctcccctggcacccgcctccctgtgcgtcgccttccccagtggctggtcgcgtccctgccctgctccggcgttcatcggcaagctcgccctcaactctgccgcgccgtcgccccctcggactcgccctgcgtttcgccggtcctcctccaccaacgtcgcgctgtcttcgctccagcgccctgacgtcgctcctgtgccatgccttgtctcccttgcagcagacgcgtcacgttcctcgttccacctcctgcgttgcccggtctgtggtgaagaaaggatggaagatgatggtcttgtggatggggaaagaaagcgctctcctagagtttcgctcatcatgtgttcgacgaaaggcctgaaccaaagaccgttgtcgttctggcg

SEQ ID NO: 173649 - DNA, 327 bp, Zea mays
  Clone ID: MRT4577_8994C.1
ccacgcgttcgagagcggcggcgcgggcggacaaggagcaggcggaggaggagttgtgccaagccacaatgggtatctcgcgtgactcgatgcacaagcgccgagccaccggtggaaagcagaaggcctggaggaagaagcgaaagtatgagcttggtcgccaggcaagccacaacaaattgtcaagccattagacagggaggaaggtccgggttcggtgaagttatgtgaaattgaaggctcttcggcctgattcttggtactactcattggggagtgaagcttgttcccgcaagacccggattctcgacgtggtctacaatgcat

SEQ ID NO: 173650 - DNA, 409 bp, Zea mays
  Clone ID: MRT4577_89950C.1
tttgggagctcgcccgcgtgcgggtgctgggacggaggtatattgctgggtcgacattcttctactcggcggccgccctcgacctttgttgtttatatcaaaccggtttgggcgcttatggatagcgatactgacggtgcctcagatgagcgtctacaggtggctcgtgcatttacagaggtcccaactctgccgctacaagtgctgatagctaagctgtcgtacgcccaagggtctctaatgccgtgccatgcggaagctactggtatgcacagtgatgtcatatatctgattggggtgtcacacgaggatatgggtctccataatgaacaggtgaaagaattgtgtcacgcacaacttgcgttacttggaggacactatgatgcacaacaggacatagtgtgttctg

SEQ ID NO: 173651 - DNA, 297 bp, Zea mays
  Clone ID: MRT4577_89951C.1
tggctggggcgaaaggaggggcgggcggcctccaggagctagaagaatggctccgtcacgcgtcacgatcagtatgcgccaagcccgtcgtggacaagatcatggagagcgccactctcgagaagtccctgccagagcgcattaaggtcgctggaggcaagggcgcccagctcggagagggcgtgaccgtctcccgcgatatgttcaaggtcaccgttaccttcgacgggcctttttctaagagaggcctgaaatacttgaccaagaagtacctgaagaagcacaatgtgcgtgact

SEQ ID NO: 173652 - DNA, 3362 bp, Zea mays
  Clone ID: MRT4577_89952C.1
ggccacgccatcgtccccgcttcgccgcctgcttctccggactcccactcttcaagccacctaccttcctacacccaactaggagtacctacctgcgcagagcccacgacggctcggactccggcgtgtcgacaccgctcctgccggagcatcgaggctacattaccaagtagtaggaaaccatgggccctgcgccgagggagcccatgaagcagcgcgtgaaccgctgcctgctgcgcctctcggaccgggacacggaggcgatggccgcggcggagctggacgcgatcgcgcgcgagctggacgccgacgagctgccggtgttcgtggccgcggtctccgacgcgcggcccaccgacaggacgccgctgcggcggcactcgctccggctgctggcgctcgtcgccggggagcacccgcgggacgccgtcgcgccgctcgtgcccaggctcctggccgccgcgctgcgccgcgtccgcgacccggactcctccgtgcgcgccgcgctcgtcgacgcggcccgcgccgcggcgggcgccgcggcgtcgccgcccgcggcgctggccccgctcgccgacgccgtgctccacgagcaggaccagtgcgcgcagctggccgccgcgctcgccgccgccgccgccgtcgaggcctcggagcccaccgacgacctcgccgcgtacctccgggggctcctcccgcgcctctacaagctcctccgcagcgcggcgttcaaggccaagcccgcgctcatctccctcatcggcgctgcctcggcagcctccggcggtggagccgcctccgccgccgtgccttgcctccgcgacgcgctcactgccgacgattgggccgccaggaaggctgccgccgaggcgctcgctttgttggccctcgagcacggagacgacctcgtctcacacaaatcttcctgcattaccgtcttcgaagccaagagatttgataaggtgaaaatagtgcgcgagtccatgaaccggttgatcgaagcatggaaggagatcccggatttggatgaggaggtctgctccttaccatcgtcccagtctagatcttctctcacagatactgcaagtgatggccgatacccagctgattcctcgggctccacctctagcccttcaattacaaggaggaactcatggccgactaacaggcagccccaaccggatggatcgaacaatgccatcaacagaaaaggcagccctccttccatcgtggctaagaaaaatctgcctccttcacgccgcagcacagaccagttcaagaaatctgaggacagggttgttgttactacggctccagacgcaacgccaattaaaatggtggctgaggagaagcttctgaaagaaggcaatgttagggagaggcttgaagcgcggcgggtgctgtttcagaagactggtgacaaaggttacaagaaggtggctggtcccaagtcaggatccagagttgttccatacagcggggaaggggatggtgactcggaagagacggctgagactgaggacgcgcccgaagaatttcagtcagctcacaaagatgaggacttgtcgaagatcaggatgcagctcgttcagattgagaatcagcaagccagtttgcttaatcttctccagaaattcatggggagctcccagaatgggatacgttccttggagacaagggtgaacgggctggagatggtgttggacgagatatcccgtgatttggctgcttcctcgggaaggattccgaacagcgagcctgacacaaacgcttgctgcattctgagcccaaagttctggagaaggcatgacggaggtaggtacacttccaggtaccctatatcggacgcagcaaactactccgaggagagcagaagtccttacaagtgggacagacagcagaaatttggagtccatggtggttttgtcaccaatcccttagcagagccgaatgattcatctgtaaggagcatagctggttcccagcaagggaggagaagagactcggctcaatacagatcaaggttgagttaggtgtgacaggaagtggtccatgtgaagtgagaacaacgagcttcagcaataaggccgggtgtttgaagacgatcccactgttggtgtattttcgaaattttcttttctccaagcttagagctgagatcgtatgtcctatactcctatggggcttttattcatgaattgtcaagggttcagacagcctaaactctaaagcaagacgccaagaccctcgccgctggctcggtaaccatacgatggtttagcagtgagaaaaattgagaatcgacactcattgtccagtcatggatgtaccttgtactgcttgtaaatagtttctatacagtgattcatgtgctcgcaagtcgcaaggtgttgtcccaaaaaaaaaaaatgggtgtgctgagatcattcaagtagggaaaaggttcagagcgcgacaaatgtgtagggtaacggcatgtggctatgcttcaataatctcttttagagttggtttggtgacaaaagaattaaaaggaaccgccagttggaaagtccttcgtccttcccctacccgctccggcacgaccccaagcgccccctcggccccgcaggaccatcgacatcgaagaatcccaagagcccaaatcgcatggccatggcgccggagcccttcttcactccgccgcccgcgccgcggcacctcgccgagctccgcatcgaccccgcgcatcacgctgttgccttctccgcgccctgcgccgccgacgcgaggcgcaagcgccgctgcctcctcccggcctcctccgtgcgcaagaggatactcctcgagcttcccccctttgacaccacgccgaacaccccgtcaactccgccgacgcccccgcccccgcccatctcaccgatggtgccgcgcgccgcgttctcgttcgagccgggactccgcccgcgccagccaacctccgcggggggatccgaggccagctgtgcggggaacatgttcgcgttcttggctgcgccggaacggcccaacacgcccacgggtcccacctccaggggtggcttcgtgttcgcggcttcgcccgagggtccgctgacgcccacctccaggggctccaacaccggcaggctcacgttcttgccttcgccgaagcagcctttgacgcccatgtgctccactgccagcggctgcgaggcgtctttgatgctcaccggtagcggcgcagccgcgtccctccactccgcgaagacggcgcgcacggggtctacgacccgaggcgtcgggttcgaattcttccctccgaaggggaccgcgtgcgcgaaactaggctctccatcttccgctgcagccaaggagacgacgct

SEQ ID NO: 173653 - DNA, 413 bp, Zea mays
  Clone ID: MRT4577_89953C.1
accacccgtccgggacaagtcataacagagtaccctccaaattctgagccttgatgttgtcgggactgaacaatagttgtgggggaggtgaagtcacaccgagaattagttaactatagggcatatcttccaccgaatgctctacctgcctacaagagaagtgagctgactacatgacatggaggatctcataggaatgacacatgagagtaacagcggaaacgctaccggaaccatgacagtggaacaccacaggagtccacaacagctccagactctgatccatgaggaaagaatgctagattccgggagaaaggggactcttacgaagaataggattactacgacgggaaaccatggcggtaaagctgtgggacagccagcgctactacatgcagcatgcactagagtcc

SEQ ID NO: 173654 - DNA, 922 bp, Zea mays
  unsure (1)..(922): unsure at all n locations
  Clone ID: MRT4577_89954C.1
gcccaaagttctggaaaaggcatgacggaggtaggtacacttccaggtacccctatatcggacgcagcaaactactccgaggagagcagaagtccttacaagtgggacagacagcagaaatttggagtccatggtggttttgtcaccaatcccttagcagagccgaatgattcatctgtaaggagcatagctggttcccagcaagggaggagaagagactcggctcaatacagatcaaggtaaggttgagttaggtgtgacaggaagtggtccatgtgaagtgagagcaacgagcttcagcaataaggccgggtgtttgaagatcccactgttggtgtatttttgaaattttcttttctccaagcttagagctgagatcgtatgtactatggggcttttattcatgaattgtcaagggttcagacagcctaaagcaagaccctcgccgctggcccggtaaccatacgatggtttagcagtgagaaaaattgagaatcgacactcattgtccagtcatggatgtaccttgtactgcttgtaaatagtttctatacagtgattcatgtgctcgcaaaaaaaaaaaaaaaaaaaaaaaaaaaaaaaaaaaaaaagctacgccagttgccacctccttcgtccttcccctccccgctccggcacgaccccaagcgccccctcggccccgcaggaccatcgacatcgaagaatcccaagagcccaaatcgtatggtcatggcgccggagcccttcttcactccgccgcccgcgccgcggnacctcgccgagctccgcatcgaccccgcgcatcacgctgttgccttctccgcgccctgcgccgccgacgcgaggcgcaagcgccgctggctcctcccgggctcctccgtgcgcaagaggatactcctcgagctttccccctttgaca

SEQ ID NO: 173655 - DNA, 1372 bp, Zea mays
  Clone ID: MRT4577_89955C.1
ggcacgggcccaagccggagaagccgcccaggagcactagccgacgccgcccacgtacaccccgagccccaaacccacgccgccgacgtacactcccaccccgacgccccccaagccgacgccgccaactcccaagcctacgccacccacatacactcccgcccctacgccccacaaacccacaccaaaacccactcccactcctccgacgtacaccccttcccccaagcctccgacacctaagccgaccccgccgacgtacactccaagccccaagccaccggctagcaagcctccgacgcccaagccgaccccaccgacgtacaccccttcccctaaacctccgacacctaagccgaccccgccgacgtacaccccaagccccaagccaccggctaccaagcctcccacgcccaagccgaccccgccaacgtacaccccttccccaaagcctccgacacccaagccgaccccgccgacgtacaccccttcccccaagcctccgacacctaagccgaccccgcctacgtacactccaagccctaagccaccggctaccaagcctcccacgcccaagccgaccccgccaacgtacaccccttcgccaaagcctccgacacccaagccgaccccgccgacgtacaccccttctcccaagcctccgacgcccaagccgaccccgccgacgtacactccaagacccaagcctcccacacacccgacgcccaagccgaccccaccgacgtacaccccttccccaaagcctccgacacccaagccgaccccaccgacgtacactccaagccccaaaccaccggctaccaagcctcccacgcccaagcccgaccccaccgacgtacactcccacaccgaagccgccggccaccaagccgcccacctacactccgacgccgccggtgtctcacacccccagcccgccgccaccatactactagaaagcggtgcctaccataccacactgctgtcagtctctggagcatttaggtggtctggatcaatggaagggttgtgtcctagccagccggcaaaggtgagctgctgatggtaatgatgatgataagaggccactgctaccctactacgtaccctcctctttgtgtgctgccatccgtccccgttagacgatcgaggagagaataacgcagagctctctgctcccggcctgtcttctgccgtcccggccgtttaatttactagtgtgttcgtcctatatgtttagcagcagcaggtgtattgtgcgggtatgtaatggtattgcaactatattgggtgtaaaaccataataaatgtgggcaaatatgcaaggaaaaaaggcttctacttctataaaaaaaaaaaaaaaaaagcggcc

SEQ ID NO: 173656 - DNA, 266 bp, Zea mays
  Clone ID: MRT4577_89956C.1
tgttaacaaccatttgttaccagaagtgggaagaaatacaagcgacgtctatgaggttgttccctgcagttgcattaagcgacccagttgtgtatcaacaccaggcccgattaatggaaagcattcccattgggcaggattctgttgaatcagcatctgcttgagttttgatggctatgctagagttgcagcttactcgagggcacagtcgtcaaatgtggcagcagttgtacactgggagttatgcaacatttaagatgacggaa

SEQ ID NO: 173657 - DNA, 479 bp, Zea mays
  Clone ID: MRT4577_89957C.1
taaaaaaaaaaaaaaaaaaaaaaaaaaaaaaaaaaaaaaaaaaaaaaaaaaaaaaaaaaaaaaaaaaaaaaaaaaaaaaaaaaaaaaaaataaaaaaaaaaaaaaagggggggggcctctttttgggggtacccatctttcctccccctttccttgccgcctttttatttttttttttgggcctccctaaaattcggggggtgggcccgttttttccccccgcgggggtgggaaaaccctgggggtccccaaatttattggcgtggagaaccttccctttttcccgggtggggttattacggaaggggccctgacagtccccctttcccaccgttttccccccttggtgggtgatgggccccccctttttggcctttattttggccgggggggtgggggggttcccttcgggttccttcttttttttgccggccccttacccccccttcttttggtttctttcctttcgttggcccccc

SEQ ID NO: 173658 - DNA, 1747 bp, Zea mays
  Clone ID: MRT4577_89958C.1
aaccaaactccaccaacgaacacccctgtgcgccaaagccaacaacaaacaaaccgaccccaacaacgaacactcccacacaaaggccgccggctaccaagcctcccacgcccaagccgaccccgccaacgtacaccccttcgccaaagcctccgacacccaagccgaccccgccgacgtacaccccttctcccaagcctccgacgcccaagccgaccccgccgacgtacactccaagccccaagcctcccacacacccgacgcccaagccgaccccgccaacgtacaccccttcgccaaagcctccgacacccaagccgaccccgccgacgtacaccccttctcccaagcctccgacgcccaagccgaccccgccgacgtacactccaagccccaagcctcccacacacccgacgcccaagccgaccccaccgacgtacaccccttccccaaagccttcgacgcccaagccgaccccaccgacgtacaccccttccccaaagcctgcgacacccaagcctccgacacctaagccgaccccgcctacgtacactccaagccctaagccaccggctaccaagcctcccacgcccaagccgaccccgccaacgtacaccccttcgccaaagcctccgacacccaagccgaccccgccgacgtacaccccttctcccaagcctccgacgcccaagccgaccccgccgacgtacactccaagccccaagcctcccacacacccgacgcccaagccgaccccaccgacgtacaccccttccccaaagcctccgacgcccaagccgaccccaccgacgtacaccccttccccaaagcctccgacacccaagccgaccccaccgacgtacactccaagccccaaaccaccggctaccaagcctcccacgcccaagccgaccccaccgacgtacactcccacaccgaagccgccggccaccaagccgcccacctacactccgacgccgccggtgtctcacacccccagcccgccgccaccttactactagaaagcgatgcctaccacactgctgtcagtctctggagcatttaggtggtctggatcaatggaagagttgtgtcctagccagccggcaaagatgagctgctgatggtaatgatgatgataagaggccactgctaccctactacgtaccctcctctttgtgtgctgccatccgtccccgttagacgatcgaggagagaataacgcagagctctctgctcccggcctgtcttctgccgtcccggccgtttaatttactagtgtgttcgtcctatatgtttagcagcagcaggtgtattgtgcgggtatgtaatggtattgcaactatattgggtgtaaaaccataataaatgtgggcaaatatgcaaggaaaaaaaaaaaaaaaaaaaaaaaaaaaaaaaaaaaaaaaaaaaaaaaaaaaaaaaaaaaaaaaaaaaaaaaaaaaaaaaaaaaaaaaaaaaaaaaaaaaaaaaaaaaaaaaaaaaaaaaaaaaaaaattcatcttccccctagattttgggataaaaaaaaaaaaaaaaaaaataattgttcccactcaaatttgctggcaaaaaaaaaaaaaaaaaaaaaatttttttgccttcagaattttttggcaaaaaaaaaaaaaaaaaaagatatctgcccgttttttattctagaaaaaaaaaaaaaaaaaaataattaattattcgggaagctctgcggagaaaaaaaaaaaaaaaccaa

SEQ ID NO: 173659 - DNA, 1520 bp, Zea mays
  Clone ID: MRT4577_89959C.1
agaccaccactgcgccattggccagctagagccaaccagaagagcttgcagttactgagagtgtgtgtgagagagaggatgggtggcagcggcagggctgctctgctgctggccctggtggtggtggccgtgagcctggccgtggagatccaggccgacgccgggtacggttacggcggcgggtacaccccgacgccgacgccccccaagccgacgccacccacatacactcccgcccctacgccccacaaacccacaccaaaacccactcccactcctccgacgtacaccccgacccccaagcctccgacacctaagccgaccccgccgacgtacactccaagccccaaacctccgacgcccaagccgaccccaccgacgtacaccccttcccccaagcctccgacacctaagccgaccccgcctacgtacactccaagccctaagccaccggctaccaagcctcccacgcccaagccgaccccgccaacgtacaccccttcgccaaagcctccgacacccaagccgaccccgccgacgtacaccccttctcccaagcctccgacgcccaagccgaccccgccgacgtacactccaagccccaagcctcccacacacccgacgcccaagccgaccccaccgacgtacaccccttccccaaagcctccgacacccaagccgaccccaccgacgtacactcccacaccgaagccgccggccaccaagccgcccacctacactccgacgccgccggtgtctcacacccccagcccgccgccaccatactactagaaagcgatgcctaccataccacactgctgtcagtctctggagcatttaggtggtctggatcaatggaagggttgtgtcctagccagccggcaaagatgagctgctgatggtaatgatgatgataagaggccactgctaccctactacgtaccctcctctttgtgtgctgccatccgtccccgttagacgatcgaggagagaataacgcagagctctctgctcccggcctgtctactgccgtcccggccgtttaatttactagtgtgttcgtcccatgtgtttagcagcagcagcaggtgtattgtgcgggtatgtaatggtattgcaactatattgggtgtaaaaccataataaatgtggaaaaatatgcaaggaaaaaaaaataattcgctcacctctgctccgcctcccccaatctccccacagatctcgccgcgatgggcctcgccgccgcccgcgcggtcctcctcctcctcgccgtatccggggtcctcctcagtcctgcggcggcggagatcaagcaggagtccttcaaggacgactcccgcggctccatcctcttcgagaagttcggcttcggcctccacggcatggtgtctatctccgtcaccggcgccaaatactcctccaagctcgctaagcccgaccccgcgcagctcggcttcttcctcctctctgacgagtcgctcttcgaggccatctacgatcagccggcgcccacggatctg

SEQ ID NO: 173660 - DNA, 346 bp, Zea mays
  unsure (1)..(346): unsure at all n locations
  Clone ID: MRT4577_8995C.1
cgctacctcgacgtcagaacggagggcgagtttagcgccggccaccctgaaggagctgtgaacatcccatacatgaacaaaaccggctcaggaatgacgaaaaacgctcactttctcgagcaagtgtcgagggctttcgggaaggacgacgagatcatcgtggtacgtagctacgtttgctgaacgaatctgaatttcagtcggttcctcaacacggggggggaatataattccgcctgctgctacccctccttcctccttttcagggctggcaaagcggtaagaggtctctcatggcggngaccgagctctgctgcggtggcttgacggttgataccgacattgt

SEQ ID NO: 173661 - DNA, 586 bp, Zea mays
  unsure (1)..(586): unsure at all n locations
  Clone ID: MRT4577_89960C.1
gtcaaaggcaacaggtgcttcnnnnnnnnnnnnnnnnnnnnnnnnnnnnnnnnnnnnnnnnnnnnnnnnnnnnnnnnnnnnnnnnnnnnnnnnnnnnnnnnnacatctacttcctgctcgagtcccaatatgccaagcctactccaggaagccagacggctgatccggtgaccccacggatcggggcaaaataacctagagaagatcgatttgcttctgcacaatttccctaacgaatctcatcttgttggccactctttctgccagttcatccaggaaggaacaggcacgcaatgttcttatgatnnnnnnnnnnnnnnnnnnnnnnnnnnnnnnnnnnnnnnnnnnnnnnnnnnnnnnnnnntggtagtgggcgggcatcttccaagcaaagtattggtggatggagctacgaattctcagggaagacggtctggatgaagttcaagaaacgctccgagtagaactcggtctcgatctcggctggagagacagctcgatactgcatggacttgacagcgtgctcgattttctttgtcatgttgtactcttgcagtatgtcaatgatgcccaggagaggaccaca

SEQ ID NO: 173662 - DNA, 891 bp, Zea mays
  Clone ID: MRT4577_89961C.1
aggccgacgccgggtacggctacggcggcgggtacaccccgacgccgacgccggccaccccgaccccgaagccggagaagccccccaccaaggggccgaagccggacaagccgcccaaggagcacaagccgcccaaggagcacggccccaagccggagaagccgcccaaggagcatcatgccgacgccttccacgtacaccccgagccccaaacccacgccgccgacgtacactcccaccccgccgccgactccgaagccgacgccacccacatacactcccgcccctacgccccacaaacccacaccaaaacccactcccactcctccgacgtacaccccttcccccaagcctccgacacccaagccgaccccgccgacgctacaccccaagccccaagccaccggctaccaagcctcccacgcccaagccgaccccgccgacgtacaccccttctcccaagcttccgacacctaagccgaccccgccgacgtacactccaagcccaaagcctccgacacccaagccgaccccgccgacgtacaccccttcccccaaacctccgacacctaagccgaccccgcctacgtacactccaagccccaagccaccggctaccaagcctcccacgcccaagccgaccccgccaacgtacaccccttccccaaagcctccgacacccaagccgtccccaccgacgtacactccaagccccaagcctcccacgcccaagccgaccccaccgacgtacactcccacaccgaagccgccggccaccaagccgcccacctacactccgacgccgccggtgtctcacacccccagcccgccgccaccatactactagaaagcgatgcctaccataccacactgctgtcagtctctggagca

SEQ ID NO: 173663 - DNA, 967 bp, Zea mays
  Clone ID: MRT4577_89962C.1
gaagccaccggctaccaagcctcccacgcccaagccgaccccgccaacgtacaccccttcgccaaagcctccgacacccaagccgaccccgccgacgtacaccccttctcccaagcctccgacgcccaagccgaccccgccgacgtacactccaagccccaaaccaccggctaccaagcctccgacacccaagccgaccccaccgacgtacactcccacaccgaagccgccggccaccaagccgcccacctacactccgacgccgccggtgtctcacacccccagcccgccgccaccatactactagaaagcgatgcctaccataccacactgctgtcagtctctggagcatttaggtggtctggatcaatggaagggttgtgtcctagccagccggcaaagatgagctgctgatggtaatgatgatgataagaggccactgctaccctactacgtaccctcctctttgtgtgctgccatccgtccccgttagacgatcgaggagagaataacgcagagctctctgctcccggcctgtcttctgccgtcccggccgtttaatttactagtgtgttcgtcctatatgtttagcagcagcaggtgtattgtgcgggtatgtaatggtattgcaactatattgggtgtaaaaccataataaatgtgggcaaatatgcaagaaaaaaaaaaaaaaaaaaaaaaaaaaccctaggctgctacgcgcctcctctcgccctcgcgccgccgccgccgccgccgcatcaggcacccgccccgccgtcgcctgaggtagacaccaatccgccgccatggggcgtatgcacagccgcgggtaaccctcccgtcctcgtcctcgtaacactggtgctattgcttctagtgtggtgaatctgtgtgctgatggcggctgcgtggctccgtgacgcaggaagggtatctcatcgtcggcgctgccgtacaagaggacgcc

SEQ ID NO: 173664 - DNA, 673 bp, Zea mays
  Clone ID: MRT4577_89963C.1
tgggaccctcgaggccggccgggcaaccagctcccctgaaccagaccaccagcaaaaacccgttcacctcacaggttgcgttgcgatccggtgatggaaggcctcatcccgctgctctacaaggccatcaaggaccggcggagcaacgccggcggcggtgggcgatcctaccgcagcggaggtgccctcctctcctccgcgcccgtggacctggacgaccccgagcagaggaggcggtggctgcagcaggagctgcggtccccggtgcacgtgggccacacccacacggcgagggcggcggcggcggccgaggggtcgccgctgcaccggcggaacctgtcgcttgaggagctggcgggcgaggtggggctctcgcccgaccggcggctccgggtgccgctgcccaaggccaggagcgtccgcgccttcgcctgcatcggcgccgcctgattgccgcccccaaccgagcgcgcgcgcgggcgtaggcgtacgttagggtcggtcgttcacgagcatggcaaggtcactcatcaagctgtatgtgtacatacatatgtgtcgttatttgattttgatcgtcttggagaactcgagattgtataatatgccatgctagctagtgcaaggtttgttttgacgttccaaaaaaaaaaaaaaaaagggccctagggcc

SEQ ID NO: 173665 - DNA, 340 bp, Zea mays
  Clone ID: MRT4577_89964C.1
ttaattttttgtttgttggtgtattttttggttacattttgagacaaccgagacgcctatctgcaacagaagaggcttcctcgcatgtgaagtatgtacgcgcggaatttcccgatcgcgctctcaaaacacggttggtgtgctggttttgcgtgttggtgttggtatttattttctctctctcgatgaaaaatagaagacagcaggggcaggcgacacgggtgcaattgctgacccgtgggggtctccccatttactgcgcctttttgagcgtctgctcccgctcctcgatgacggagagcttgacacccttcgccttgggcagtgagatggcgggctt

SEQ ID NO: 173666 - DNA, 755 bp, Zea mays
  Clone ID: MRT4577_89965C.1
cattgggtacctcgaggccggccgggatcacactacgacctaatttccgacccacaaccgacgaaatgggtgacgccgaaatcacaacgagtgcctggaggctggtcgaggtcggccgtgtggtcctcttcaacgagggccagtacgagggtcgcctggctgccattgtcgagatcattgaccacaagcgtgttctcgtcgatggtccttccgagaaggcccccgttccccgccaggagatcgcccttgccaaactctccctcacacccatcgtcatccccaagcttccccgcgccagcggtgttggtcacgttgcaaagaagtgggaagagcacaaggtccagcaaaagttcgacgagagcgcatgggcaaagaagcgtgcggccatgcagaagaggcggggactgaacgactttgagcgcttcaaggtcatgaagatgaggaagcaggcccgcttcgaggtccagaagacctttgccaagatccgcgccagcgcaaaggcataggtattctagatgctgtcgggagacaggcgttgtggaggtcgctgcatgcaggtgacggagaggcatgatgtgcatttttcatgagcattccgaaggcgaccctcaaaggcattcaaaaattcaagacctggcttcgggtgaataagtccaatgtttggcatgggtgcattcggtatgggaaacgtttactcggctctcgcatgcattctacatgtagcaagagagtccaatccacaatttcatggacac

SEQ ID NO: 173667 - DNA, 1169 bp, Zea mays
  Clone ID: MRT4577_89966C.1
cgggagacaccactgcgccattggccagctagagccaaccagaagagcttgcagttactgagagtgtgtgtgagagagaggatgggtggcagcggcagggctgctctgctgctggccctggtggtggtggccgtgagcctggccgtggagatccaggccgacgccgggtacggttacggcggcgggtacaccccgacgccgacgccggccagggcgaccccgaagcccgagaagccccccaccaaggggccgaagccggacaagccgcccaaggagcacaagccgcccaaggagcacgggcccaagccggagaagccgcccaaggagcacaagcctccgacacctaagccgaccccgcctacgtacactccaagccctaagccaccggctaccaagcctcccacgcccaagccgaccccgccaacgtacaccccttcgccaaagcctccgacacccaagccgaccccgccgacgtacaccccttctcccaagcctccgacgcccaagccgaccccgccgacgtacactccaagccccaagcctcccacacacccgacgcccaagccgaccccaccgacgtacaccccttccccaaagcctccgacacccaagccgaccccaccgacgtacactcccacaccgaagccgccggccaccaagccgcccacctacactccgacgccgccggtgtctcacacccccagcccgccgccaccatactactagaaagcgatgcctaccataccacactgctgtcagtctctggagcatttaggtggtctggatcaatggaagggttgtgtcctagccagccggcaaagatgagctgctgatggtaatgatgatgataagaggccactgctaccctactacgtaccctcctctttgtgtgctgccatccgtccctgttagacgatcgaggagagaataacgcagagctctctgctcccggcctgtcttctgccgtcccggccgtttaatttactagtgtgttcgtcctatatgtttagcagcagcaggtgtattgtgcgggtatgtaatggtattgcaactatattgggtgtaaaaccataataaatgtgggcaaatatgcaaggaaaaaaaggcttctactacaaaaaaaaaaaaaaaaaaaaaaaaaaaaagtactctgcgttgttaccactgct

SEQ ID NO: 173668 - DNA, 1193 bp, Zea mays
  Clone ID: MRT4577_89967C.1
tttttttagatgtgcccggcttttagcattttttttaactccagaagatacagcctcactcctccgacgtacaccccttcccccaaacctccgacacctaagccgaccccgccgacgtacactccaagccccaagccaccggctagcaagcctcccacgcccaagccgaccccgccgacgtacaccccttctcccaagcctccgacacctaagccgaccccgcctacgtacactccaagccccaagccaccggctaccaagccgccgacgcccaagccgaccccaccgacgtacaccccttcccccaaacctccgacacctaagccgaccccgcctacgtacactccaagccccaagccaccggctaccaagcctcccacgcccaagccgaccccgccgacgtacaccccttctcccaagcctccgacacccaagccgaccccgccgacgtacaccccttcccccaagcctccgacgcccaagccgaccccgccgacgtacactccaagccccaagcctcccacacacccgacgcccaagccgaccccaccgacgtacaccccttccccaaagcctccgacacctaagccgaccccgccgacgtacacgccttcccccaagcctccgacacccaagccgaccccaccgacgtacactccaagccccaagccaccggctaccaagcctcccacgcccaagccgaccccaccgacgtacactcccacaccgaagccgccggccaccaagccgcccacctacactccgacgcccccggtgtctcacacccccagcccgccgccaccttactactagaaaccgatgcctaccataccacactgctgtcagtctctggagcatttaggtggtctcgatcgatggaagaattgtgtcctagccagccggcaaaggtgacctgctgatgatgatgatgagaggcgagtcctacgccctagtcctactactaccctctttgtgtgctgccatccatccgtccccgctagacgatcgaggagagaataacgcagagctctgtgctcccggcctctgtcttctcctcccggccgtttaatttatagtctctactgtgtgttcgtcccatgtgtttagcagcagcagcagtagtgtgcgggtatgtaatggtattgcaactatattgggtgtaaaaccataataaatgtggaaaaaatgcaagg

SEQ ID NO: 173669 - DNA, 371 bp, Zea mays
  Clone ID: MRT4577_89968C.1
agggtaacaccggcaaacggaacatttttttatcttcgtgatcaagcatcacctaagtctaagtttgcgagagggtgtcaaatgtggcatgtaactatttagccgatgagacccatggaccaagcgcctccttgtgcaacacttcatcagtacattggacatactacatactatatgtatacttcttgcatattctacactcttctagcagcaacaacgtcgccttcctcgtcgcattcctcatcactgcggtgttctttgctcttgtcaaggcccttcttgctgaacatgctctttaggttatgagcggttttcccagcatgttttaccatgtgcaccggcttcttcctcaggtgccttttactcgggct

SEQ ID NO: 173670 - DNA, 272 bp, Zea mays
  Clone ID: MRT4577_89969C.1
ctatgccgtcggtcgtcgtcctcgcggatgccgtctgcgtggcgtcgctcgcgcagcccgtcgcggccgacctgaagctggactagtacgcgagcacctgcccctacgctgaggccatcgtgcgcggcgtggtgcagcagcgactgcatgcaacaatgccggccgtcggctccaccgtccgcctcttcttccacgactgcttcgtcgagggttgcgtacgctctgtgctgatcgaatccacgcccggcaaccaggccgagaaggacgcctcc

SEQ ID NO: 173671 - DNA, 359 bp, Zea mays
  unsure (1)..(359): unsure at all n locations
  Clone ID: MRT4577_8996C.1
ccaaaaaaataggacttncacaggaggtaaatttgaaaccgggccccgaaattttccccctagcagaccaggaaggaaaaattggccggggaaccagactctctcggtcggcaattggaagcatgcatgcacagcacacacgcgaccaagatgcgtgtgtgccgtcacgacatcatcactcatgcacgcgaaccaggagtctgccccgaggtcggcgctgccgcttggtgcgctggctgacactagctgctgtataaggcagacggtgctgccctttgctgattggtgcccggcctagtgggcccccgttgtcgtactgcgatcccggagctgaacatcatgctctgccctggcttcac

SEQ ID NO: 173672 - DNA, 889 bp, Zea mays
  Clone ID: MRT4577_89970C.1
acgccgcccacgtacaccccgagccccaaacccacgccgccgacgtacactcccaccccgccgccgactccgaagccgacgccacccacatacactcccgcccctacgccccacaaacccacaccaaaacccactcccactcctccgacgtacaccccttcccccaagcctccgacacctaagccgaccccgcctacgtacactccaagccccaagccaccggctaccaagcctcccacgcccaagccgaccccgccaacgtacaccccttccccaaagcctccgacacccaagccgtccccaccgacgtacactccaagccccaagcctcccacgcccaagccgaccccaccgacgtacactcccacaccgaagccgccggccaccaagccgcccacctacactccgacgccgccggtgtctcacacccccagcccgccgccaccatactactagaaagcgatgcctaccataccacactgctgtcagtctctggagcatttaggtggtctcgatcgatggaagagttgtgtcctagccagccggcaaagatgacctgctgatgatgatgatgagaggcgagtcctatcctaccgtcctacgccctactactaccctcctctttgtgtgctgccatccgtccccgctagacgatcgaggagagaataacgcagagctctctgctcccggcctctgtctactgccgtcccggccgtttaatttactagtgtgttcgtcccatgtgtttagcagcagcagcaggtgtattgtgcgggtatgtaatggtattgcaactatattgggtgtaaaaccataataaatgtggaaaaatatgcaaggaaaaaaggcttctacttctactgtacaaaaaaaaaaaaaaaaaaaaaaa

SEQ ID NO: 173673 - DNA, 766 bp, Zea mays
  unsure (1)..(766): unsure at all n locations
  Clone ID: MRT4577_89971C.1
acgccgtctccgtccccgggtcaagtcgtatcgagcacatccatctccattaccgccgccgagagagagacccaccccgctcatccaccaccatgtggcgccgcctccacaccctagcactagccctctcctctcagaggacaagccggcgagggtggaggacgtcatgcccatcgccacggggctcgagcgggaggagctagaggccgagctccaggggaagaagcggtttgacatggattccccggtcggccccttcggtaccaaggaggaaccagctgtcattgagtcatactataacaagcggatagtcggttgtcctggtggcgagggtgaggacgaacatgatgttgtatggttctggttgaaaaaagacgagccgcatgagtgtccagtctgctcgcaatactttgtgcttaaggtaattggtgatggtggagatccagatggccatgacgatgaagatgatggacatcactaaggatgccttgtggttctgaaaataagaatctgatgaggcagatgagtccatcacacttcttttttcttgaaccagactgcacggcatccttgtttatgaacagacatttggccatcaagcgggtggtagttaatcacctagggattntgtccagacaaaagcttattgagatttgacccatgcatttctttaagagcatcatcgaataaaagatgactgcatcagattgctntcttttgttaccgtatggccatcgggtgtgatggacatgtaatattcagtcat

SEQ ID NO: 173674 - DNA, 492 bp, Zea mays
  Clone ID: MRT4577_89972C.1
tactacgtatacgtacaagaatggagcatgcaatgtgcatgcacactgcgtacatttagtatgtgcttgtgtcaaatgtatcgtcagtatcatactgatctcctggcatagtctggcactaaccataggctctccttttcttttgtgttggacaggtggtctggatcaatggaagggttgtgtcctagccagccggcaaagatgagctgctgatggtaatgatgatgataagaggccactgctaccctactacgtaccctcctctttgtgtgctgccatccgtccccgttagacgatcgaggagagaataacgcagagctctctgctcccggcctgtcttctgccgtcccggccgtttaatttactagtgtgttcgtcctatatgtttagcagcagcaggtgtattgtgcgggtatgtaatggtattgcaactatattgggtgtaaaaccataataaatgtgggcaaaaaaaaaaaaaaaaaaaggccccta

SEQ ID NO: 173675 - DNA, 1227 bp, Zea mays
  Clone ID: MRT4577_89973C.1
gggtccctcgaggccggccgggccgggggggagtttggctggggcgggccgctgggtcccgccgcctgaacagccacttcccctgtccggtgccccggttgctttatttcctctatgccgtctccgtccccgggtcaagtcgtatcgagcacatccatctccattaccgccgccgagagagagacccaccccgctcatccaccaccatgtggcgccgcctccacaccctagcacccgccttgcgcagggctactgccgccgctgccgggggccccgcggtgcccgcctcctctgctgcccgcgccgcgccgctctcctcggcggccgccggcttccgccgcactagccctctcctctcagaggacaagccggcgagggtggaggacgtcatgcccatcgccacggggctcgagcgggaggagctagaggccgagctccaggggaagaagcggtttgacatggattccccggtcggccccttcggtaccaaggaggaaccagctgtcattgagtcatactataacaagcggatagtcggttgtcctggtggcgagggtgaggacgaacatgatgttgtatggttctggttgaaaaaagacgagccgcatgagtgtccagtctgctcgcaatactttgtgcttaaggtaattggtgatggtggagatccagatggccatgacgatgaagatgatggacatcactaaggatgccttgtggttctgaaaataagaatctgatgaggcagatgagtccatcacacttcttttttcttgaaccagactgcacggcatccttgtttatgaacagacatttggccatcaagcgggtggtagttaatcacctagggattttgtccagacaaaagcttattgagatttgacccatgcatttctttaagagcatcatcgaataaaagatgactgcatcagattgctttcttttgttaccgtatggccatcgggtgtgatggacatgtaatattcagtcatggaatggaacagacccatttctttattcagtgtgctggggaatttgcaaaaggtctcctatatcattgacgagttttaagccagagtttgatgatccaacttctttatgtccattgttttaatagtcgtgctattctgtgacaaattttttttatagggcgaccaaaattaattcccctgcccgctcttaatcaacggctgacttgagaaaaccttgttattgccaaactaaacctct

SEQ ID NO: 173676 - DNA, 213 bp, Zea mays
  Clone ID: MRT4577_89974C.1
cacgccggccggcgaataatatttctcccgcagcacttctcggggggggtgcgggtgcgccttatacattaccctcccggcgatcaatcagtcacgcgcggtaggaacagcagcactactaatcgtcggccggcgacgctgcccgcgaagaagccccccaccagcctgacaccgcccgccccaacaacaacatcgtcagcgggaggggggccc

SEQ ID NO: 173677 - DNA, 878 bp, Zea mays
  Clone ID: MRT4577_89975C.1
gggtacctcgaggccggccgggctgccgtctccgtccccgggtcaaatcgaatcgagcccatccatctccatttccgccgcaccagcccgctcctctcaggggacaagccggcgagtgtggaggacgtcatgcccatcgccacggggctcgagcgggaggagctggaggccgagctcaaggggaagaagcggtttgacatggatcccctggtcggccccttcggtaccaaggaggaaccatctgtagttgagtcctactataacaagcggatagttggctgccctggtggtgagggagaggatgaacacgatgttgtatggttctggttgaaaaaagatgagccgcatgagtgtccagtctgctcgcaatactttgtgcttaaggtcattggtgatggtggtgatccagatggtcatgacgatgaagatgatggacatcactaaggatgccttgtggttctgaaaataagaacttggtgaggcagatgaatccattacacttcttttttctagaaccagactgctccacggcatccttgtttatgaaaagacagttggccatcaagcaggtggtagttttcccctaggtattttgtccaaacaaaagctgtttgagatttgacccatgcgtttctttaagagcatcatcgaataaaaaatgactgcatcagattgctttcttttgttaccgtatggccatcgggtgtgatggacatgtaatattcagtcatggaatggaacagacccatttttttattccagtgtgctggggaatttgcaaaaggtctcctaaaaaaaaaaaaaaaaaaaaaaaaaaaaaaaaaaaaaaaaaaagggcggccgccccacgcggccgcggacgcggggcggacgcgggg

SEQ ID NO: 173678 - DNA, 320 bp, Zea mays
  Clone ID: MRT4577_89976C.1
tcttctttttttttttttttttttttttttttggggggctggcccaaaagagctccacgcttacattttagcattagcaaagtaccacattattttggactttaaaaaacgcccttgggcttgacaatgatcttcttggagcaaaaaaataagccaaacggtaaaaagaagaaacattttaacagcacagcaggggttccactgcatgatggacatatctcgacaggttgcttttgggctcttaacctatgagcaggttggttttcttttacaaacaggcttgtcgggaccttccggttgaacggggcagggcccttgcg

SEQ ID NO: 173679 - DNA, 663 bp, Zea mays
  Clone ID: MRT4577_89977C.1
cctgtgcggcgctcaggcggcgggtgcgcctctatctctgctgccgttgtcacgggagagggagatagagagcgcgagagatccgctcaacgctgcgctgttcttcaggacggattctctccggacttgtttacggagaaccggggggcggtgaccgttagaggacggcggccgccggcgctaagatctggtggccacaaactagctgcaccgtcgacgaggtccgttctgctttgatctttgttccttggttttcgccaggtcggtaatggcaacgcagaagagtcgtgctgcttgcagtaccgccgccgttggcgcacattccacatccgagctttgagacgggaaaaaaatataggaagggcttcagagttgggatttcggagccattccctgccgcgtttcatccctaatcatcgaaccgtggttcaggaattcaggtgagttctaatccggtgaagcttaaggaatcgtgtctatttttttcttcttttttacttacaaattccccaagtcttgccaaactcgtcattagattagttctatacatgatgttcgtttggttttaatcgtatcggcttcagtgttttgtcttttttgattgtagctgcagtaatctaaacagttgattttttctaaaaaaaaaaaaaaaaaaggccccta

SEQ ID NO: 173680 - DNA, 362 bp, Zea mays
  Clone ID: MRT4577_89978C.1
atggtttcctatgttactttgcagattattttatatctaaaattcctactaagtgcaacgatccaaaaacctgatatgtgtaggaattataatgctactagctttgatgttgcgcttaaacctcaaattatatttgatggttcaaactacaagagatggcgtgcaaagacgagtttatgactgacaaccatgaacatatatcacgtggcaggagataggcatgaagggatgacttccaactctttcgaggagaagtcattgaggtcgtcgataacctttttagaggtgccatgataagcgctctcgctgaaaatatagttggttcttacatgcacttgttcattacccaagagatgtgagat

SEQ ID NO: 173681 - DNA, 158 bp, Zea mays
  Clone ID: MRT4577_89979C.1
ggcgcttccgatctgcgcttcgatctccctcttcgcagaggtgatgtacccgtatgttatcgcaggataatcacatttagtgctagtcctttgggccccggattggaagaagggtctcaatctgcagtcagtagcttcagacgggttgcagttgtgcg

SEQ ID NO: 173682 - DNA, 586 bp, Zea mays
  Clone ID: MRT4577_89980C.1
agacccttccccttccgtccccggccggcgccaacttcactccagcgagccgaggccggagacggtcactgcgtgcatagagacacgccgcacgcctctccgccccactccgctccagattgcgcgcacccacccatggcgctcgccgcgttcccaccacgttcccctgccataacaccgcgataggcacgctagcccttcacgacacaaagcagcgcttcaccccaagaagcactctgttgactcccccaccaaggagaaggtcgccaactataaagtcggctaatgcggtggtatcgctcccgatgacgatggattcggtgatctcaagtccaagggcgacgatgaagctgaacacctaccggcatagtataaccccaagaacccggattctgagatcaaggatgaagtgtacttcaaatctcgagactgcttagatacctactgctaggatgacttctacagagtgaatggacagatcactccgtctcaagacaaacacccgactaccagcccagagcgcagacggtgatgaccagcatctttcagacagacacgcgcaaatcctaatcaccgaagtcttctc

SEQ ID NO: 173683 - DNA, 662 bp, Zea mays
  unsure (1)..(662): unsure at all n locations
  Clone ID: MRT4577_89981C.1
gccggccgggccgggaacataataagaggaaagttttttttntgnaaaaaaaaaaaaaaaaaaaaaaaaaaaaaaaaaaaaaaaaaaaaaaaaaaaaaaaaaaaaaaaaaaaaaaaaaaaaaaaaaaaaaaaaaaaaaaaaaaaaaaaaaaaaaaaaaaaaaaaaaaaaaaacaaatccccttttttttggaaccccagcccccccattgaatgtggggggcccctgggccccttgtgtctgccgggggggggcgaaaaaatttccccccccttggggcgctgctttttcgggcggggggcccccccgcccccatttcccccaaaggggcaaaagggcaaaagccttccctttgccccccaaaccttttagaagggatggcccccgggggggaaaccccagcttttccccccgtagggcccccaaccggatttcccggaggaaaggtgcccctttgcccccggggtttaaaagctcccccccccttttttggggggctcttggggaccacccctttggggccggtaattcttacaccccgctgacccgggggaacacccaagcttttgggcaaatctttcccccgctacttgggggaaaatttttttcccctcaaagaccattcccccgttgacccggggggtttttttaaaagaacaattt

SEQ ID NO: 173684 - DNA, 233 bp, Zea mays
  Clone ID: MRT4577_89982C.1
gagacaagaggagcataagcaacactctggacaaagacagatacacataacaggaacttaaattcgataaaaatgcccatgctaactggcccagaactttttattttacaaaaatactaacaggttcccttaaacgccttccttgggattcaatgggtctgggcttccaaaaggcaacaggttaaaatgttaagagccatgtcccataaacttaacacctttttttaggataa

SEQ ID NO: 173685 - DNA, 2317 bp, Zea mays
  Clone ID: MRT4577_89983C.1
ctcgaggccggccgggaggtcatctatctccctctttgccatccggcccatccccagcctgtgtttgcatcccatttgcttcccccccctcttgcccatcccctgtgctgtgctgtgaactgcggccgggggcatccttgttggggggtggcgtaggaggctgctgacactactgcagagcagggcagccatgaggcttcctctccctctgctggccctggtgtgctgcgccctgatggcgcgccagcattgcgctgcggcgggcaaggcccggcacttgaggtgggagatcagcaacatgttctggtctcccgactgcgaggagaaggtggtgatcggcatcaacgggcagttcccgggcccgacgatccgcgcccgggctggcgacaccgtccacgtccagctcaggaacgcgctccacaccgagggcgtcgtcatccactggcacggcatccgacagatcgggacgccgtgggcggacggcacggcggcgatctcccagtgcgccatcaaccccgaggaaaccttcacctaccgcttcgtcgtcgacaagccggggacgtacttctaccacgggcactacgggatgcagagggcggcggggctgtacgggtcgctggtcgtggacgtggcggagggggaggaggagccgttccagtacgacggcgagctcaacctgctgctcagcgactggtaccacgagagcatccacacccagatggtcgccctctcgtccaggcccttcaggtggatcggcgagccacagtctctgctgatcaacgggagaggccagttcaactgctcgctggccgcagcgcacacgcagggggccaccaaccagtgcgccgccaccgccgccaacacgcagtgcgcgccggtggtactccccgtgcagcctaacaagacctacaggctcagggtggccagcaccacctcgctcgcgtctctcaacctcgcgatcgggaatcacaagctgacggtggtggaggccgacggcaactacgtggacccattcgttgtggacgacatcgacctctactccggcgacagctactccgtcctgctcacgacggaccaggacacgtcctcgaactactgggtcagcgtgggcgtgcgcggcaggctgcccaagacggcgccggcgctggcagtgctcaactaccgccccaaccgcgcgtcggacctgccagcactcgcgccgccggtcaccccggcgtgggacgactacggccacagcaaggcgttcacgtacaggatccgcgcgcgcgccgggacgcccccgccgccgccgacggcggcccgccgcatcgagctgctcaacacgcagaaccggatggacgggcgcatcaggtggtccatcaacaacgtgtccatggttctgcccgccacgccgtacctgggctccctgaagatggggctcaagtcgacgctggcggcggcgcgccccgcggagacgttcagccgggaatacgacgtgacgctgccgccgccgaaccccaacacgacggtgggggacaacgtgtacgtcctggcgcacaacaccaccgtcgacgtgctgctccagaacgccaacgcgctgtcgcgcaacgtcagcgaggtgcacccgtggcacctccacggccacgacttctgggtgctgggctacggcgacggcgcgtaccgcggggacgccgccgacgaagcgcggctcaacctccgggacccgccgctgcggaacacggcggtcatctttccgtacgggtggacgatgctccggttcgtggcggacaacccgggcgtgtgggccttccactgccatatcgagccgcacctccacatgggcatgggcgtcatcttcgctgaggctgtggacctcgtcgccaaggtgcccaacgaggctgtatcctgtggcgccacggccaccgcgctcatggccggcggtcacctgtgattgccatcaaatattggtggccaggctagggaaccgcgcgccttgcctcgcgcgcatgcatattaatgcccttctgtcgtacgagatctctggtcattaattagtgttatttattaatatttcttctatctttttttccgtttattgagacgtgaacctagagtgtttgtgcttggctaaccatcccatcttagataggttgttgcatcgtaagccaattccttaaattaatgaaaatgcctttttctcaggtgttgagagaccacctctattccacaattgaaacaaaaatttaaggcctgagaaagtgatggactattctataccaaaaaaaacaaactcctaagtgatatatactattcgaaggaggtcagacattttgcttct

SEQ ID NO: 173686 - DNA, 767 bp, Zea mays
  Clone ID: MRT4577_89984C.1
tcttaccattcccaaaccccaggcaaaggccagggaaaacaagctgtacctgcagtagctccattgatcccctccacatcgccgaatcaaagcaaaagagcacggtcctgcaatggaatcgagcggcctgaggaagagagtagccgatatgatggatgggggcaagtacaagccaaaaggctatgggatggccggccccggccagaggctcccgtgtgcgctgctgctgatgctggttctcgccgccgccgcgttgagcgtcgtcgtcacgcacaaggtcagggagcagcgtgcctttgctgtggttctcaaggagcgcgacgtgcaggccgtctccctccggatccaactccagaaagagaaggcatacggcaaagagaccaagaggaaggcggaagaaatgaaggccacaatgtcttccctgagaacacagaagacagacctgaaaacaaagctcaaggcgctggaagccacagccacaatcctcaagaacgtgcagaaagagctcgaagcatctctcaaggagagagagagccgcatcagccaaatggaagggaaagccgcaaatcttcacagcactcggaaagcactggaagcaactgtgaaggaacgagacaaccgcatcaagcaaatgcaagataaagtcacgagtcttgagaaaactctgaaggaacaggagctgtctctgaaggcgagagacagccgcatcagccaactggaggagaaaaccgccgcagcgtcaaatcctgaccagatggcagctctca

SEQ ID NO: 173687 - DNA, 248 bp, Zea mays
  Clone ID: MRT4577_89985C.1
cccacgcgtccgaaaaaaaaaaaaaaaaaaaaaaaaaaaaaaaaaaaaaaaaaaaaaaaaaaaaaaaaaaaaaaagaagggggggccgaacagatggatgtaagcttcggttggcggggatgggaagtcattttctcttgtatcgtgtcattttcatttcatttccctgggtttttgttttgtcgcctctggaatggaacattccttttcgtaacttaagtgaattgcattacattaaattttccttt

SEQ ID NO: 173688 - DNA, 533 bp, Zea mays
  Clone ID: MRT4577_89986C.1
agatgcaaacactgatgatgcatggtgatggacatgtctttgcatatgggacagctgatagcaggggtgccactggatatccacattccagctttgcccaccccccttggcaactgattgtcctaatgctaataacatggaaagattttccatgtccggagtacgaattcctactgaaagggcatatgcactataaatccttcccacatgcggaaagctatatacctatttcaaattgacgcctcaggctgcaggcggtgtggaaaatatgtgattgaaaggggaagataacttaaccgaaggtgatgacactgatccagcaattactgcgaggtacatgtgccctaaaggaagggatggcaaaactagttacaaccttgccgtgaccatacttacgtgagagaatacaacactaaccaccactctactctcctggaaggtagggacacccagcagcggtgctacatgttgctatattgggtgaacgtttgttataatcgtggatcagcctaagaatagctgctggtgcaacc

SEQ ID NO: 173689 - DNA, 567 bp, Zea mays
  Clone ID: MRT4577_89987C.1
agtagattcacaattctatttgcttggctactggggacacaacttactggttggatctatgttcacttgttttgtcacttcttttttgtatgcttctttggagcaattatttgcagttccaggttgaagaacgcttcagagatgtcatgaagagaatcttcagatttcgcaacaagatttgttttgctgtggtcatacttaaattttctttctgacttaatgaggagcatctttattattaaagattgttcctaatctaaaaacccagtgcagaacattggaaaagtacaggatactatccttctcaaaacccatcttttaatatcccagtcccagtccatatcacaaacccatggtgcatccaaagttccaaacgccaccttagtgtttgttcctcccccatcattttgttgctgatgttcctactccaggtgcaataataagggggtgtttgaatgcactataactaatagttagttggctaaaaattgatagtaaaattagctagctaacaaagacctacctgactattaactaatttaccaaaaatagcttgtagctgaacta

SEQ ID NO: 173690 - DNA, 377 bp, Zea mays
  Clone ID: MRT4577_89988C.1
cgggcacgctgagaggaaaaagaggactctgttgttgcgttgaggaaccctgcgagatcccatggtgttcggttggctctaaatataatgttgaagatactgttggtttaagtgacccagagaaggctccttctcacttggatggtggtgccaataaagaaggcttttatgctgctaacaaggatgcccgcatctttgtttttgaagtcaaagataatgatgtccatagacgcgaccgcgctaaggaggacatatatttcactgatgaacgcccctcgttgactcaaccgagtggctataatgggaagagacatgagtttgacccacagtctggtaatgatgccgaacaagctcttgctgggatggaattctaagaa

SEQ ID NO: 173691 - DNA, 327 bp, Zea mays
  Clone ID: MRT4577_89989C.1
ggggcttcaaactgggcgtcccaaaaattcttatggggaaaattggttttttccggaaccccttcctttgccagtcccttaagttttaccagcttaccctttggtccctggaaacatttatttgaggaccggccccccccttttaaggtgcctcccaaaattcccttttttggccgtttcccaagctaatttttacagcatttattacagcccagtttttttattcttattcaaggcctttattaggtatagcctgtcaaaatttttaccaccaacccccttgttttggttgccagaaccgccaatctgatttgtttctaaatagcc

SEQ ID NO: 173692 - DNA, 468 bp, Zea mays
  Clone ID: MRT4577_8998C.1
ggccgctttttttttttttttttgtttgtgttttttttttttttttttttttttttttcttttgttttcttttattttttttttttctactgtggggaccgggacccccccactccaaaacatagttgcaggagctagcacaacctatacatccaatcaaaaactaatgggggaaaaaaccccccttctggggggggtgctaattgttaagcatcgaaagcaaaaactgttcccgacccccgatcgaatgcgcccgttaaccaccaccgctgtcgtgcttatttattttcaacattgttcccccgctggaacccccatttttttcaaaaaaaacaaccctgggccggggaatgtctgaaacagcacccttgtacaggaaggggagaacatagttgtcacacaacccctttaacacgggcatggggctcttcttcttaacaaatctctgagacgtcttcatagaacttc

SEQ ID NO: 173693 - DNA, 530 bp, Zea mays
  unsure (1)..(530): unsure at all n locations
  Clone ID: MRT4577_89990C.1
cttggtgatgcccagcacgttgaggaggctgagaagatgggacttgactacatgggtgttgaggccctcaagaaatgaacaagaacaagaagcttgtttttattcttgccaagaannaccatgcttggggaagaagggagattctccttttncanannccccgtctccttggncctgggctgaacaggggaggcaagttccccactctggtcactcaccaggagtccctgggttccanggtgactgagacgagggctacagtcaagtttcaactgaagaaagtcctttgcatgggtgtcgcggtcggtntcctgtctttggtggagangcggatcccgcgggacctcctgatgagcatcaacttcctcgtgtctcttctggggagcactggccgaatgtatgatggctcttcttctagagcgccgtggggaaaccattcaggagtttctaaggctgttgttttgggaggtctgctctttatggtgtttggtttttgaaccgtggttgtcttgggctaaaactcttgttag

SEQ ID NO: 173694 - DNA, 739 bp, Zea mays
  Clone ID: MRT4577_89991C.1
acgagagttggaggtcactaaagcttcatcttggcatcaagaagctgcagagaggtgaagatgatgaaacctggtgagagaagcagggagagggatgctgatttccactattcgggtcacgacgatgagaaggacaggtacttcttcaaggttctggttggcgatttccgtgaacgactggccgtccctgacaaattcatgcagcacttcaccagagggctagtcacaagcagtgttacgctagaatcacgctgcggacgcagtttccatgtccaagtggctgagaatctgggcaaggtggtccttcaagcggggtggaaagagttcgtcgctgcgcatggcttgagcatgggggacgtcctggttttcaagcacgacgggactcctcggctgaaggttttcatgttcgaccatagctgctgcgagaaagtgccgccgccatgccctgtcaagatcaagcgagagcatcatgtctgtggcggagagagaagggagacgcaccctgaagttccaagcagcagctgtggagatgcttccatgacttttgtcaccgctagctcgtcgtcagcctccccctccgacgacgcgtcaggagagtggatattatctccagaagaccagaaaccacgttacgttccaggttacatcctcccaaatggaacctacctcacctgtgtgcagatgcagaaactgaaagaaagaggccgagctaggacttctactatccccatctacggat

SEQ ID NO: 173695 - DNA, 318 bp, Zea mays
  unsure (1)..(318): unsure at all n locations
  Clone ID: MRT4577_89992C.1
ggccgcttttttttttttttttttggnnngcagtgctgtgntgctgttnttgttgtgggncagcacgagcaacgtcctgtcggcacagaacacagtagaattttatttccggggcttgcattattatatatgttgaattcgcgatggagagggacatgattcattattggatgagcatcaccggacggggggtgggatatgggctagcaggctagctggacacacagatcatatatgcatgcgtcttatggggggatggggacatctgcggacgatcgacactgtagtaccactcggtatgcatggtcgcctccgcag

SEQ ID NO: 173696 - DNA, 273 bp, Zea mays
  Clone ID: MRT4577_89993C.1
tgtgaagctgctcgctcagaaatacaagttctggaacatctgaatacaacagaccccaacagtactttccgctgtgtccagatgttggaatggtttgagcatcatggtcacatttgcattgtttttgaactattgggacttagtacttacgacttcattaaagaaaatggttttctaccatttcgactggatcatatcagaaagatggcatatcagatatgcaagtctgtgaattttttgcacagtaataagttgactcacacagacttaaag

SEQ ID NO: 173697 - DNA, 143 bp, Zea mays
  Clone ID: MRT4577_89994C.1
ttaaatcttggaagagaggtgcggcaatttcagcacgagatcattaagaggagcaggagttcttacaccgatgaatcattaggggtgatactgagaaaagggtggaagctttgagcttggaggtaaaaaagatagaggatatg

SEQ ID NO: 173698 - DNA, 716 bp, Zea mays
  unsure (1)..(716): unsure at all n locations
  Clone ID: MRT4577_89995C.1
cattgggaccctcgaggccggccggaagaagccctaccgcctcgcctctctcgttccccctcatcgccacgccagtcgcctccactcccagtcatctcccatcaccgacgacgtgtcgaggcgagagaagagggcgagtccaagtctagggttcccgccgcatcgacacgggcatcgcaccgcaccgcgaggggcgggcacggaggaagatggcaccgcgcgggcgcgtggagctgcggcggatcgaggacaaggcgagccggcaggtgcgcttctccaagcgccgcgcggggctgttcaagaaggccttcgagctggccctgctctgcgacgccgaggtcgcgctcctcgtcttttcccccggcggcaagctctatgagtactcctcctccagatgttggcaaaagaaaacaatggtggtgccggtgcaagtacaagcagccagatgttgctttactcggcagagcgtgcaaccgacaaatgaaacggggcgtgcatctgttgctaacggggcggtgccggtgccgcatactattgttgtgtagctgaggtttgtcaaggtggctgctggcaaggtagccgagggaagtggagttcaataacaggatgcggaaactgtgccgctccttgccgaacttaagccccgttacgttgtcgcnacaagtttattttctagcactgtgcttgctgccaaaaaaaaaaaaaaaaaagcggcc

SEQ ID NO: 173699 - DNA, 1106 bp, Zea mays
  Clone ID: MRT4577_89996C.1
ctcctcgtgaggaacttgctgcccgaccccaagctgtagctcaccttctcgcgctcagatccctagcgtggatctcctcgccggaagctcttgggccggccatgggtgcccagccgaccaacgccgactagcactcgcgtcggttctccatgttctcgccggggaggctcagccatcgcgccctcaagctcgtcctagccggcgtcctcctctaccatggatctcccctgcgtgctggactttcctccgctcctccatccatggcgctcggctgttccaaatccctcccctattcgctcatagaagccgcgcgccacctctctgctcggccgcatctccctgtgctcgagctcgtcggcttctcctccacgcgctccagcccttgctcctcgttcctcccggctgcgcgcgtcaacttcctacgcgctgagctctcttgcacgcctctacactcgcccaagtcgccaccgttctccctgctcgcacgtgcagccgcgccccagctgctcgccgtcgcctgtgcactttttcttccgaacagtagcccctttttcttccgaacagcagccccggatctgcgcagctctgaccttgttgtccacctcactcgctaccgatgtcgtggctgcacctcgtgttcgacaaaagcccagcgtgatggacatgcttacgcgattcgagtcgattccaacagtccgtatacaagagagcgacatgtatgtgttcacgatttagagtgccacaagtcccctcattcttcgtcgtcgatccaagccgtttccccaacgtgcccgtcgaccccaacgatctatctttcaactgcacgctacttgcgtcgggatccgaagctctctgtcgtgctcgaccttacaagtctcaaactcgtcgacatcccttgcgtcgtcgaaaaatcatgagagtttggataaagcaacaagtcctgcgtggtgctcaccatgtgctcgacgtaatggcagaatcagaaatcatagccgtgctcgtggccttcaagacggatcaaattattggtgagctatcatcgctctcgctttttgttttaatatttctcgtcagtttggtataaaaaaaaaaaaaaaaaagcggcc

SEQ ID NO: 173700 - DNA, 282 bp, Zea mays
  Clone ID: MRT4577_89997C.1
gtccgaaggtagcagtcccggattcgaatttccaggcagacgtacgcgtccgatcggggacccgtccttcaacgtctacggctgggagttctccaatgatgtgaacgccgtggatcgtgctggtgggcatgcacggtcgcgggctcaccaactcgctgttcctccctactggcggcgagttcatccagatcaacccggaaggccatatggagcacatcggggaggtagacttcggtattcccggcgttgatcatgggctctaggacaacgcctaagtcgccg

SEQ ID NO: 173701 - DNA, 1095 bp, Zea mays
  Clone ID: MRT4577_89998C.1
ctcgaggccggccgggaagatagccctaccgcctcgcctctctcgttccccctcatcgccacgccagtcgcctccactcccagtcatctcccatcaccgacgacgtgtcgaggcgagagaagagggcgagtccaagtctagggttcccgccgcatcgacacgggcatcgcaccgcaccgcgaggggcgggcacggaggaagatggcaccgcgcgggcgcgtggagctgcggcggatcgaggacaaggcgagccggcaggtgcgcttctccaagcgccgcgcggggctgttcaagaaggccttcgagctggccctgctctgcgacgccgaggtcgcgctcctcgtcttttcccccggcggcaagctctatgagtactcctcctccagcatagaagatacatatgaccgctatcatcaatttgcgggagcaggaagaaaagtgaacggacataacaacgataaccgggatgtagctgcttcagatttacagtcgagacttaaggagatcgcaacatggtctaaacaaaacaacgctgaggagtcggatgccaatgaacttgagaaacttgaggaactcctgacaaatgctttgaggaatacgaaagccaaaaagatgttggcaaaagaaaacaatggtggtgccggtgcaagtacaagcagccagatgttgctttactcggcagagcgtgcaaccgacaaatgaaacggggcgtgcatctgttgctaacggggcggtgccggtgccgcatactattgttgtgtagctgaggtttgtcaaggtggctgctggcaaggttagccgaggaagtggagttcaataacaggatgcggaaactgtgccgctccttgccgaacttaagccccgttacgttgtcgcacaaagtttatttcctagcactgtgcttgctgcttatgtttgtttggatgtgccaacctgcagtgaccctcgtggagcctgggtctcacgctcctcttacctagtgtgatgtgcagaaaaagtgtgatgctgtaaaattatgtgattgcctagcagatgtcaaattttcaatcagtagctaactccttttaatggtaaaaaaaaagcggccaaaaactc

SEQ ID NO: 173702 - DNA, 808 bp, Zea mays
  Clone ID: MRT4577_89999C.1
aactgtcctctcctcccgcagcggctgcggacaggagacgacgacgcgcacagaaaaacaaccgcttcccgcaccgcagtcccccgcccccgccgtgccgtgctcccccctctgccagcctatgcagcgcccgagcgctcgcctttttgaccgcgtccgcctgccgccctgtcctctgaagccgttcttcttgggttccaacattatctggtcatgcttggtaccactgtgatcataccaactgcacttgttccacaaatgggaggaaacaatgaggacaaagcagtggttatccagacattgctgttcgttgcaggtatcaacaccctcctgcagagtttctttggtaccatgttgcctgcagtgaccggcgggtcatacacctttgttctgcctaccatttcgatcatccttgctggacgttatgctaatgaacctaatccacatattaaatttctccgcatcatgcgtgggacacaaggtgcgttgattgtggcttcagccttacagattatagttggcttcagtggcctttggcgtaatgttgccaggtatctgagtccactttcagctgctcctttggtggcactagttggatttggactgtatgagctaggatttccatcggtcgccaaatgtgttgagattggtctacctcaactcatccttcttgtgatctttacaatgtacctgccacatgctgttcacatgctgaagtctatcttcgatcgatttgctgtcctggtcactatccccatagtgtggctctatgcatatcttctcactggtggaggagcatacaggaatg

SEQ ID NO: 173703 - DNA, 274 bp, Zea mays
  Clone ID: MRT4577_8999C.1
aaagtcaaaatctctcttactttattaatctcatagaatcctcgtatgaataaccaaacaacaccgcgtaaaatcggtctggccgtcggccgctgtcatcacatccttaaaaaaagagatttcttaacaaagaaaacttccttttttttctaaagaagagagagcaagaatttcttggcaataatctcaaagatgcatgcttccattccatattctattgtctacggagtagtatttgcctggaaggattttttttgatggcgtgacgtgactc

SEQ ID NO: 173704 - DNA, 457 bp, Zea mays
  Clone ID: MRT4577_899C.1
ccccaaaaacaggcccaataattttttgtgggccccattttttggggtgggcaaaaaaaaaacccgccccttgggaaacattcctaaagcataatcaggggggggaaaaaaagccaatcccgggggccccctatttgggaattcctatcctataaaaaaaaaaaaaaaaacattttttttccggggggggggtatttaattaaaacaaaaacctaaaccctgttgggaaagttgcatgctgaaaattcccccacggggaaaagggcccaaggagaattttgctccggaataaaaactggtacccgaaactgaaagctaaaaatcgttttccaaaaagggggggggggacttcctgttcctcctaaagacgggggttaggaccccacctttgtaaataagggggcccaaaaacccgaaaaaccggaaaaacttgaaaaagggggccagcccgttgggg

SEQ ID NO: 173705 - DNA, 1311 bp, Zea mays
  Clone ID: MRT4577_89C.1
aattcggcacgagggcgccgcccccagatccggcaccgcccgctgctcgaacccgcaccccacgcccgcaggccgggaccggtgggcgcgcgccgggcagtatgagggagaggaagggcggcatggcggcgccgccggcgagggcccgggccgactacgactaccttatcaagcttcttctcattggtgatagcggtgggtgctgctagatctctttgtctcagtaaacggttgtataagggcgtaacgccgttcgcgcgctcgcgttctagggatcggagttggattcgtgcatatgcgcagtgtggatcttgctcatgtttgcccgtggtcgtgttccctcgattgatacttgatgacttttttgaaaaaaaaaaaaaaaaaaaaaaaaaaaaaaaaaaaactaccgtggagctatgggtatcttgctggtttatgatgtcaccgatgaatcttctttcaacaacatccgaaactggattcggaacattgagcaacatgcctctgataatgtcaacaaaattttggtgggcaacaaggccgatatggacgaaagcaagagggccgtacctactgcgaaaggacaagcacttgctgatgagtatgggatcaagttttttgaaacgagtgccaagacaaacctgaacgtggagcaagtgttcttctccatcgcacgtgacatcaagcagaggcttgcagagactgattcaaagccagaggacaaggcaatcaaaattaacaagccagaccagggttccgaggcaccagctgcccagcgatctgcatgctgcggttcataagcagacgcacgatagccataatcattggttatttgacactatttatttcctgcttggcttttataggaagaatttgaggaagccacttatgatatactgatgatgtggttgtactcttgtttgcttccactcttcgaagcaagcacctcttgctgttgacgtagctattgcactctggacatccgttggaacaacctctctccctacagacgttgggtttgcattatcgatcaatgcatggattaacgtatcgcccttgtgtgaattgttgtgtttttttttctcatgttgctgttcctttagattgaatttgttgggaaggaaaatatattttccttttcttatgtatatcaggtgtatttttatcttttgtacctggaatgtatgtatccacggaaagcgtgaatcttcaatttagaaaagaagaaaacttatctggaaatataagaccagtgcatgcggtattgtttgaataaaaaatataataaaacttatacatttgtatatctct

SEQ ID NO: 173706 - DNA, 658 bp, Zea mays
  Clone ID: MRT4577_8C.1
gccgggtcgggactttccatccactccacccgatttgctgcggcggcggctctcacggtcacggctgcggctctgcggcggccggcggcccctctgctcggccgagctcgcaacctcgcccgctcgccgtctcgcgcgctgcccgctcgccgtctcgcgcgctagcgccgtcgcggctcgcgcgctgctcggcgtgcccgctcgccgctcgccgttcgcccgcttctccccggctgctcactcgcttctccctctgctcgccgtctcgctcgccgctgctcgcttctcccctggccgcttgccgctgctcactcgcttctccctctgctcgccacctcgcccgcttctcccctggccgcttgccgctgctcgctgcccgctcgctgtccgcttgccgctgctcgctgctcgctcgctgcccgcttgccgctcagtgaccagctccctgctcgcttgccgctctgtcaccactcaccagcgaggcagcgacgcgctcgacgctcctctgctctctccccccgcgctctcctctgctcccctctgctctttcaagcttcatgctatgatgctatgatgaaagagaagataggtggagagcttgttaaatggaatgccacgaggtttggcacactttttttgttcctacagagtttttggg

SEQ ID NO: 173707 - DNA, 190 bp, Zea mays
  Clone ID: MRT4577_90000C.1
cccacgcgtccgggtcacggacacggcggaatacagtgatggggtccagaagtgcatgggggtgcttttcggatcataagcatgtttcagaaggcgtgcttgtaaacgtgggagaggaaggtatcggaagaacatggattgttcttatgggagagaagacattacatttgttagtaaagggtaaagtatt

SEQ ID NO: 173708 - DNA, 1670 bp, Zea mays
  Clone ID: MRT4577_90001C.1
tgccactacactacaatactactgcgcggtagcgctcgcactcgcaccacaccacgccaccgctgctgcctgctcctcacagtcctccccgcgctcgcattgcgattcgcgttccacaaatgggaggaaacaatgaggacaaagcagtggttatccagacattgctgttcgttgcaggtatcaacaccctcctgcagagtttctttggtaccatgttgcctgcagtgatcggcgggtcatacacctttgttctgcctaccatttcgatcatccttgctggacgttatgctaatgaacctaatccacatattaaatttctccgcatcatgcgtgggacacaaggtgcgttgattgtggcttcagccttacagattatagttggcttcagtggcctttggcgtaatgttgccaggtatctgagtccactttcagctgctcctttggtggcactagttggatttggactgtatgagctaggatttccatcggtcgccaaatgtgttgagattggtctacctcaactcatccttcttgtgatctttacaatgtacctgccacatgctgttcacatgctgaagtctatcttcgatcgatttgctgtcctgttcactatccccatagtgtggctctatgcatatcttctcactgttggaggagcatacaggaatgcaccaccaaagactcaatttcattgccgcactgaccgttctggattaattggtggcgcaccctggataagagtaccatatccttttcagtggggtgctccaacttttgatgcgggtgaagctttcgcgatgatggcagcatcatttgttgctctcgtggagtccactggggccttcattgctgtctctaggtatgctagtgctacaccaatcccaccctctgttcttagccgtggtattggctggcagggcatcggtattcttctggatgggctatttgggactggaaatgggtcttctgtatcagttgaaaatgctggtttgctagctttgacacgcgttggtagccgaagggtagtgcagatatcagctggtttcatgatattcttttctattctcgggaaattcggagctgtgttcgcctcaattcctgcacccatctttgcagctatgtattgtatcttctttgcttatgccggttctgctgggatcggcttccttcagttctgtaacctcaacacctttaggaccaagttcatccttgggttctcagttttcatgggcctttctgttcctcaatacttcaatgagtacacatctattgctggttatggtcctgttcacacacattcaagatggttcaacgatatagtgaatgtgatattctcgtccaaggcgtttgttgctggcttcgtggcatatttgctggacaacactattgacaggcatgaagcttcagtcaggagagaccgaggctaccattggtgggacaaattccggtcgtacaggaccgatacaagaagcgaggagttctattccctgccattcaatctgaataagttcttcccatcggtctgagcttttgctgtggttaatgtgagatgctcttgttactctggaactgcccaccccctgttctccggcggtggcaccgtgatctggattttctcggtacatgaaaaaattactgtatattaaaacccgctcagctcgggtttcccc

SEQ ID NO: 173709 - DNA, 2315 bp, Zea mays
  unsure (1)..(2315): unsure at all n locations
  Clone ID: MRT4577_90002C.1
gggtaccctctcgggccggcccgggaacctgtcctctcctcccgcagcggctgcggaccaggaagagacgacgaacgcggacgcgcacagaaaaacaaccgnctcccgcagccccccgnccccgncgtgcctccccccctgccagcctatgcagcgcccgagcactcgcctttttgaccgcgtccgcctgccgccctggcctgtactccccctccccccttcacagcgtcacacgcacttctcgttctcgccgatccagtgccactacactacaatactgctgcgcgctagcggtagcactcgcaccacaccacgccaccgctgctgcctgctcctcacagtcctccccgcgctcgcattgcgattcgcgacctagcgcgagggtacggggggtggtgcgcgcgcgtgctcggtgatccgggaagcgccgcgagatggccgggggcggaggcggcggtgccgcgccgaagcacgacgacttcacgccgcaccccgtcaaggaccagctccctggggtctcctactgcatcaccagccctcccccgtggcctgaagccgttcttcttgggttccaacattatctggtcatgcttggtaccactgtgatcataccaactgcacttgttccacaaatgggaggaaacaatgaggacaaagcagtggttatccagacattgctgttcgttgcaggtatcaacaccctcctgcagagtttctttggtaccatgttgcctgcagtgatcggcgggtcatacacctttgttctgcctaccatttcgatcatccttgctggacgttatgctaatgaacctaatccacatattaaatttctccgcatcatgcgtgggacacaaggtgcgttgattgtggcttcagccttacagattatagttggcttcagtggcctttggcgtaatgttgccaggtatctgagtccactttcagctgctcctttggtggcactagttggatttggactgtatgagctaggatttccatcggttgccaaatgtgttgagattggtctacctcaactcatccttcttgtgatctttacaatgtacctgccacatgctgttcacatgctgaagtctatcttcgatcgatttgctgtcctgttcactatacccatagtgtggctctatgcatatcttctcactgttggaggagcatacaggaatgcaccaccaaagactcaatttcattgccgcactgaccgttctggattaattggtggcgcaccctggataagagtaccatatccctttcagtggggtgctccaacttttgatgcgggtgaagctttcgcgatgatggcagcatcatttgttgctctcgtggagtccactggggccttcattgctgtctctaggtatgctagtgctacaccaatcccaccctctgttcttagccgtggtattggctggcagggcatcggtattcttctggatgggctatttgggactggaaatggatcttctgtatcagttgaaaatgctggtttgctagctttgacacgcgttggtagccgaagggtagtgcagatatcagctggtttcatgatattcttttctattctcgggaaattcggagctgtgttcgcctcaattcctgcacccatctttgcagctatgtattgtatcttctttgcttatgccggttctgctgggatcggcttccttcagttctgtaacctcaacacctttaggaccaagttcatccttgggttctcagttttcatgggcctttctgttcctcaatacttcaatgagtacacatctattgctggttatggtcctgttcacacacattcaagatggttcaacgatatagtgaatgtgatattctcgtccaaggcgtttgttgctggcttcgtggcatatttgctggacaacactattgacaggcatgaagcttcagtcaggagagaccgaggctaccattggtgggacaaattccggtcgtacaggaccgatacaagaagcgaggagttctattccctgccattcaatctgaataagttcttcccatcggtctgagcttttgctgtggttaatgtgagatgctcttgttactctggattctggaactgcccaccccctgttctccggcggtggcaatgtgatctggattttctcggtacatgaaaaaattactgtatattaaaacccgctcagctcgggtttcacctccttcccgtgcttcacgggaatttggcgacattccttccgacacgtgccccagggccgaagtgggagaccaatagctttcgtagctcgggttatccacgagcaagaaagtcgagaatacaatgg

SEQ ID NO: 173710 - DNA, 1376 bp, Zea mays
  Clone ID: MRT4577_90003C.1
cctcgccctcgccagagccccgtctctctcctctctaaacccaagccagtgtgctgccccagcacccagcagctattggagctcagccatccagaacaccagggcgctagctgttcgttgatagaaaccctcctgctgcttcccttcccttcctgctcacccacgtcccaatcttcgctgcggctttccgatctgcggtacttccggcaccgcgacctaaagctcgccaccgatccgctgggtcctcggcattcctttttctccagcaccggcaaagcttccatcttttcgccagcagacttgacaaacggggtgcatgacgctgcttggagtagacgcaagctctgtggaagatctctagcatatccttttttactagattgtctaagaccagttgtcttgacgaagtacttcatttccaacaagcaaatctgataaaacaaaaggagcagcttcaacagagcctgcagctccagtggttggactgaccaacatttgcacagctgaaattgaatccatgggcagaggaagagggagagggaagaagctaaccactgtcaggagccatgaagacaaaggtagcagcggcgaagaagtcgtgcctgcaaagaagaggaggggaaggccccaaaagcgcttcgccagtaagatcgatcaagcagatgttgaaaactttgtagaacaggtcgatgccgaccaagaagaagctgacgatgccaagctgaagaacagcgccgcagctggtggtaccaaagagaggcaggccgctgaaagagggctccaatattgccttcgattaaactaattctactcaacgaggacccatgggtgaagccagaatgggagccggcgaaaaaacaagccccggcgagcatcggaggcagggctagaatgcaagtgaaccgtccctgcatttttcagtacaagggagcatccttttttttttttttgctacatccgtcatgtttggtagctcccaatgctggaaaaacaaaatgtaaactagcatgttctgattacatgcctcagtttttttttcattgacacaaagtgtatgaactgatggtacaccaacttgttcagctgctctagaccctggttctgtttgagctgcttgtagcagacatcttacctttcagtttaccatatggtgttcctgcaattttgattgatctgatcttttccttttccttttagcctattactgaatatttgtagtttattaagttctggaaatgggaaagaacataggtgctgtcttgaggatctgttatctgttgttcttagaccgctgagctaacatctaaatgtatatagtttgctagattattcgttagctccacgcggtctactacctccagaagctactcgatggc

SEQ ID NO: 173711 - DNA, 538 bp, Zea mays
  Clone ID: MRT4577_90004C.1
gttaggataaactgcattatggattctggcaacagttcgtgctctagaacacgaatgggcttgtaaggaaaaaagacacatttgctctcagtagatcttcatgttcaagaactcgaagtggacttctaagagtaaagagctctgtggattccagtgatgtttcgagttccagaactcgaagtggccttctaaggataaagagctttctggattcccatgatggttcattttcgaggtcacaaagtgaccatgtaggaggtagccctcctattgttgaggctataaatgatgaatcagttttgaaggagtctcctgatagattgatgaaagaagagatgcctgttacaactccaaatgggcttgttagacagagctttactgaacaggctgtaaccaaggacaagtcaggcatgaggacacttctcgatggatgtttgagtgaagatatgccttttagaacacggagtggacttgttagaagaagccctactgttaagactcttaacccggacaaattatcattttaagggctggcaca

SEQ ID NO: 173712 - DNA, 1397 bp, Zea mays
  Clone ID: MRT4577_90006C.1
ttcaactccccacgcaaagccgccgccgttccctctcgtcttcccagttctcctacgccggtaatcccacgtcctatcagccgccgatccagccttacttccatccatccatccatctcgtcgcttcactctgttccgcgtgcgatcgagtagatcaagaggaggaggatggcgaggagttcgttcaagttggagcaccccttcgaaaggaggcaagctgaggctaaccgcatcagggagaagtaccctgacagaatccctgtcattgttgagaaggccgagaggagtgatatcccagacattgacaagaaaaagtcagccatttcacgagtatctctttagtgcatttgtattttctctatgagttttttcggacattatattttttctgtacttctaaaagttgccttagactgtctccaacagccttacataacccaactcttatttcaaaccccactctataaacagtagaggctgcagtacaaaacccttgcaaaatagtgttttgcacggttatatgcacgatttgttggacactgagctcaccaatacgaataagtggacgcgcaaaacattgttctagcactgttgatgtattatagacagtgtggagttaaaatgttaaatagacggtgggataggcgtaccctggtgacctcagccttaccaatttttgttattgatttttatcaaattcttaataatgcaaaactgttggctgtgggcattatccttgtgccaatgatgccttcaaagttgtttatctctactagcagcaagttccggacacttacaaacgtcccaaccaagagtctgtttcttctgcaagtagccatctagaaatggattgcttactccatttgtgtaatctttgcttgtacaatcttccagcattaattaattcatcagaatgaggtcttgtttatcggtacaaggcaagaccagctgcaacatttgtgtggcccctgatatgtgaattgtgattgcttgcaggtaccttgttcctgccgacctcacagtcggacagtttgtgtatgtggtacggaagcgcatcaagctgagcgctgagaaggcaatcttcatcttcgtaaagaacaccctcccaccaacagctgctctgatgtccgccatctacgaggagaacaaggacgaggacggcttcctctacatgacgtacagcggcgagaacaccttcgggctgttctgagtgggcgccgctatggatccacattgggcaatgcctcctgtaaatactaaacatgcatcacaagaatctgtgtccatagcataatctggtctgtctttcggtctgtcattacgcaacttgacgtgcaatgctaaacacatttaagtaataattaaaaaaaaaaaaaaaaaaaaaaaaaaaaaggagc

SEQ ID NO: 173713 - DNA, 1652 bp, Zea mays
  Clone ID: MRT4577_90007C.1
atgaaggttgcggacttgcggttcaaattcgctaggctacccacagtttgttgttctggctcagatcaattatctgcttgttctgtggcggacctagaaatcttagagagcttgggcaattatagtactcatactataaacatatagcttcgcctaatttttaaccatgtttaaacacgtttacaagttcattagcactaatggaggagtctgggcaagagcccaggctcgcctgcacttggcagcgtaacatgaatacatgatcatgtagagttcttacaaactctagcaactagtaaattccttcctctgtatttggtactctttagttgctaaattttctggacgcacacgcaacctgtaactctccaatcttaggctgtacctacatccagggaatgtgtggtctgtttctgtgcatgtcttaccattagcttgttcttattcaccacttgcctgtctcatgtagatattttggtttctttatacagatgtacatgtacccattcatcttagaatctgcaggtttgccggactgctcgtagtaatctgtaggctggattgatggaacttgatgaaggttgcgtttcaaatttgctaggccacccacaatttgtagtttgttgttctgactcagatcaattctctgcttgaagcagtggcgggcccagaaatcttgggcaaatatagtactcacactataagtttatatagctttgcccaagcttgcctgcgcttgggtccactcttggcttgtagcagtgtaacatgaatacatgatcatgtagagtttatacaaactctagcaactagtaaattccttcctctgtatttggtacacttaattgctaaattttctggacgcacacacaacctgtaactctccagtgtccatttatttatcttcaatcttagtaggtttaggctgtacctacatccagggaatgggtggtctgtttctgtgcatgtcttaccattagcttgttcttattcaccacttgcctgtctcatgtagatcttttggtttctttatacagatgtacatatacccttttatcttagaatgacagaattctcattatacatttgtacatatgttttatatcgcagaaaggaggcaagctgaggctaaccgcatcagggagaaataccctgacagaatccctgtcattgttgagaaggccgagaggagtgacatcccagacattgacaagaaaaagtcagccatttcacgagtaccttgttcctgccgacctcacagtcggacagtttgtgtatgtggtacggaagcggatcaagctcagcgctgagaaggcaatcttcatcttcgtaaagaacaccctcccaccaacagctgctctgatgtccgccatctacgaggagaacaaggacgaggacggcttcctctacatgacgtacagcggcgagaacaccttcgggctgttctgagtgggagccgctatggatccacattgggcaatgcctcctgtaaatactaaacatgcatcacaagaatctgtgtccatagcataatctgggtctgtctgtcattacgcaacttgacgtgcaatgctaaacacatttaagtaataatatatactactctgctttgggatgcttcagaaatcaaaaaaaaaaaaaaaaaagcggcc

SEQ ID NO: 173714 - DNA, 1927 bp, Zea mays
  Clone ID: MRT4577_90008C.1
ggctcggccggtcccccaccatttcttccctctcgccttcccctccgccggcaatcccacgtccaatcagccgccgctccagccttccatccatccatcccgtagctgctctctattacgccagcgatcgagagaccaagaggagcaggagcgatggcgaggagctcgttcaagctggagcaccccttcggttcgtccctccgattcctgattcccccctcctcatccgggcttcagctcttgttattggtcgtgctagggtttcggttgtttggctggtactggtagatggtaccccgtgcggacctatcaatcaatcgattccttgaatttcctaggttatataagcaaagctttgttgggggcgggcgggggttggactgttctatcgtttcgcgatcctgtgatggttggatacatgttttatttttgtttgggggggggggggcgtggtgggaatctgcagctttgatggagtgctcgtggtaatctgcactaggcgattcataggctgtggcacccacagtttgctcgcttgtgtagcagcttaacatgttccggcacagttcgtaccgaccactcaaactagtaaattccccctctcgtcttccccagttcccctacgccggtaatcccacgtcctatcagccgccgatccagccttgcttccatccatccatccatccatccatccatctcgtcgcttctctctgttccgcgtgcgatcgagtagatcaaaaggaggaggaggatggcgaggagttcgttcaagttggagcaccccttcgcgcagaaaagtgcaggagccaggctatagcggacgcccgtacaacctctaagtttagagtgtccagcgacatacactatttttaccggacgttttgccgtgtgctgctggagggataaaggagctcgttgtcctctaaatttaagaaaggaggcaagctgaggctaaccgcatcagggagaaataccctgacagaatccctgtcattgttgagaaggccgagaggagtgacatcccagacattgacaagaaaaagtaccttgttcctgccgacctcacagtcggacagtttgtgtatgtggtacggaagcggatcaagctcagcgctgagtcggcaatcttcatcttcgtaaagaacaccctcccaccaacagctgctctgatgtccgccatctacgaggagaacaaggacgaggacggcttcctctacatgacgtacagcggcgagaacaccttcgggctgttctgagtgggagccgctatggatccacattgggcaatgcctcctgtaaatactaaacatgcatcacaagaatctgtgtccatagcataatctggtctgtctgtcattacgcaacttgacgtgcaatgctaaacacatttaagtaataatatatactactctgctttgggatgcttcaaaaaaaaaaaaaaaaaaaaaaaaaaagcttgtacctgcccgggcggccgcacagcacccaagtcaccttccatcacctcttccaatgtttgccgtgaaccacaagcagcacggagatagttcatgacataccgagtgataggatgtataccaccaccaggcacagcaacacgggctgggtcacggcggatgagattttccagctccatgaatatacccttgattgaggagccaagagtgttgcatacagctgatacctcagcacgtagagctgcagagtagggatcagagaagacaggatcgaggtcagaaaggaggtctcgtactgcttcatacatgtcaataacacggaagagccgttctggcgcgcggctggcagcagcaactgcatctccgaatgaaataagctgaagcgcctgggtgcgcacggcagcaacaaaggcaaggtcgccgtacggagcaaggccttcgaagacacgatcacagaggcggcgctcgct

SEQ ID NO: 173715 - DNA, 1776 bp, Zea mays
  Clone ID: MRT4577_90009C.1
ccgggaagtaacttgaggactgggctgcaaaaggaaaaggagccgaggaagccctcccctctcgccgcagccgcaccaccagaccgacaaccggccggcttccctcgcccccggcgaggagtgaagacaagccgacaaggcaaaaccatcgcctgtacggtatccaaccgccgtcccgccgcacaaccaaggatagggcgggagagggggatctcgctttcgctccgctgccgcatgcgcaccgcccctcctcatgacaccaactagggcaccaccagcccccttctcgtcgacctccgcgcggtgactctgctgagcatcatacccttatagggcccgacccatggatgtaacttcgaccgctgccgcctccgcctcaggcgggggtaggtggtacacgggcatgtccgcggataacatcaagggcctggtgctcgcgctctcctccagcctcttcatcggcgccagcttcattatcaagaagaagggactcaagaaggccgcatcctccggcgtcagagcgggggttggtggctattcttatttatatgagcctctttggtgggttggcatgataacaatgattgttggagaagttgcaaatttcgcagcttatgcatttgcaccggctattttggtcactcctctcggtgctcttagcattattatcagcgctgtgcttgcacatgtaatgctgcgggagaagctgcacatatttggaattcttggatgcgcgctatgtgttgtgggatccaccacaattgtccttcatgctccaccagagcgtgaaatcgagtcagtgacagaagtgtgggatctggctacggaaccagccttcatgtgttatgcagcagtggtaattgctatagctgccatacttgtttatcggtttgtcccactttatgggcagacacatgtcatggtctacataggtgtttgctctctcgttggttccatctcggtcatgagcgtgaaagctcttggtatagcattgaagctgaccttttcaggaacgaaccagcttatttacccacagacatgggcttttagtctggttgtcatctcatgtatcattacccaaatgaattacttgaacaaggcacttgacacgtttaatacagcagttgtgtcacccatttattataccatgttcacatctttaactatcttggcaagtgtcatcatgttcaaggactgggacaggcaaaatcctacgcaaattgtgactgagatgtgtggctttgttacgatcctttctggaacttttcttctacataaaacaaaggacatggctgatggtgggctttcgatgtcatcctccttccgtcttcctacatcttcttcggtgcgcttctccaaacaaacagatgaagatggtgaaggaattcctctaagatcgtccgaatcattccggtcaccacattaacgcatgtttgctaatcattaatttgcacagagttaggggtgggtattatatagataatgctatcagtgagcttgtactaagggtacgatggatggaccctcttttgctttggcagaattgtatatgtatgcccaacatcttgtggaactcccaatatatttctcttggctgtcgtgtgtgataaaaaaaaaaaaaaaaaagggttaaggcaaccatgagccatcaggaacattgagtgctgtgcaaagagtccgcgtaagcgtcgacgcaggtgtgggtgtattcttttggatagaaaattagaagataggggaagaatttgaagaaggctcctcgaagaaacttcttta

SEQ ID NO: 173716 - DNA, 550 bp, Zea mays
  Clone ID: MRT4577_9000C.1
tttttttttttttttttttttttttttttttttttttttttttttttttttttttttttttttttttttttttttttttttttttttttgggggaaaaacgaggggaaaaccctttgatctaaccaccttaagttacaatgggttggggggcaaaaaaataaaaaaccatttaacaactagccccccctcccctcccattttggcttcccttatccccccccccccctgggggcttaaaaggggggaagcccggggacccctaaacgggggcccggaaccccggcccagaaaccaggaaaaaaagaggagaacatttccttttaaaaggcccaacccccaaggggcgcattctttttttccccccccccccagaaattcccgggcccaaaagggaattataatccccccccccgggtttggccaaaaaaaaggggggggctacccatgccctcgcccttttccatccggaaaccccccatccttttttgggggcccccccccttggggggcccggcccccttcaaccgcccgtggttgttgccgttgccc

SEQ ID NO: 173717 - DNA, 302 bp, Zea mays
  Clone ID: MRT4577_90010C.1
gacaccctgaggctgacatgatttatgaaatgatgcacacgttaataggttggatgaagggatgcagccatctgagcaatttaaatccaatgtatctggcagaattctcataagttttcaaattgtgctacacaattggttacacaagcacatggattggcagtagcccataagttagaatggtgcatctgaagataaagttaagctcacaccatcatgaccagcaataaaatttggtcctggcaacaaattttcgccaaatatcagagttcctgcggccagtgctccagctccgagcccca

SEQ ID NO: 173718 - DNA, 653 bp, Zea mays
  Clone ID: MRT4577_90011C.1
acctgctcattctgactttagctatagtgcttgtgcttataccactagggatcgacacaccttcgttgacaggaaaattattagtcagagatgaggagctacgcagctgtagtccgggcagcactactcgtccttggcgcgctgctactccctgcccaccatgtgatggccgactactcggccatggcaccggcgccgccgccaccgcctaagccggccagtgccatttccatgcccccgttgccagccaatgacaccaacatgtcgccgcctgtccagctggcgccacctttcgtcgttgtgcagggcgtgatctactgtaagtcctgcaaatccaggggctacaaccgcggcatggacgcgtcaccgatccaaggtgcaacggtgaatctggtgtgctacgggaggaaggtggtgaacgtgacagcgacggtgtcggacgagcacggctacttcctggtgatgttctacgacctggccaacttcaacgcgcgcaactgcaagatatacctgggcacgtcgccgacgccgctctgcgacaagcccgtctacccgccgaacaagtggatcgggctctcgctcgtcaaagagaccgtaacttcgccgccggtggggctgcaaggcgtctactgccccagcagcgtgctcttcta

SEQ ID NO: 173719 - DNA, 1772 bp, Zea mays
  Clone ID: MRT4577_90012C.1
atcacacacgacagccaagagaaatatattgggagttccacaagatgttgggcatacatatacaattctgccaaagcaaaagagggtccatccatcgtacccttagtacaagctcactgatagcattatctatataatacccacccctaactctgtgcaaattaatgattagcaaacatgcgttaatgtggtgaccggaatgattcggacgatcttagaggaattccttcaccatcttcatctgtttgtttggagaagcgcaccgaagaagatgtaggaagacggaaggaggatgacatcgaaagcccaccatcagccatgtcctttgttttatgtagaagaaaagttccagaaaggatcgtaacaaagccacacatctcagtcacaatttgcgtaggattttgcctgtcccagtccttgaacatgatgacacttgccaagatagttaaagatgtgaacatggtataataaatgggtgacacaactgctgtattaaacgtgtcaagtgccttgttcaagtaattcatttgggtaatgatacatgagatgacaaccagactaaaagcccatgtctgtgggtaaataagctggttcgttcctgaaaaggtcagcttcaatgctataccaagagctttcacgctcatgaccgagatggaaccaacgagagagcaaacacctatgtagaccatgacatgtgtctgcccataaagtgggacaaaccgataaacaagtatggcagctatagcaattaccactgctgcataacacatgaaggctggttccgtagccagatcccacacttctgtcactgactcgatttcacgctctggtggagcatgaaggacaattgtggtggatcccacaacacatagcgcgcatccaagaattccaaatatgtgcagcttctcccgcagcattacatgtgcaagcacagcgctgataataatgctaagagcaccgagaggagtgaccaaaatagccggtgcaaatgcataagctgcgaaatttgcaacttctccaacaatcattgttatcatgccaacccaccaaagaggctcatataaataagaatagccaccaacccctgtcataacaataacatggaacattaatactgcagtttgctagtataaatagacagacgcctcagggtaagagtacaaatgaggcctgaaattgcgatataaaatcctgtaggaggggtggggcgtccgagatataacatgacataagccttctcgattttgggcataagtcagagatgtcatgtgcgtgggtatccgctctgacgccggaggatgcggccttcttgagtcccttcttcttgataatgaagctggcgccgatgaagaggctggaggagagcgcgagcaccaggcccttgatgttatccgcggacatgcccgtgtaccacctacccccgcctgaggcggaggcggcagcggtcgaagttacatccatgggtcgggccctataagggtatgatgctcagcagagtcaccgcgcggaggtcgacgagaagggggctggtggtgccctagttggtgtcatgaggaggggcggtgcgcatgcggcagcggagcgaaagcgagatccccctctcccgccctatccttggttgtgcggcgggacggcggttggataccgtacaggcgatggttttgccttgtcggcttgtcttcactcctcgccgggggcgagggaagccggccggttgtcggtctggtggtgcggctgcggcgagaggggagggcttcctcggctccttttcc

SEQ ID NO: 173720 - DNA, 188 bp, Zea mays
  Clone ID: MRT4577_90013C.1
gtcacgcattctgttcaacgatacctcaacgtggtagtcgctcatgtggtcatgcatggggtcgacttctccgacaaccctaaaacgattatctctctctggtttacggaaatcactgtgctgctgatcaccatttcagatatgtcaacctaccatgcttaggcagtccttatcagatgctgtgcctt

SEQ ID NO: 173721 - DNA, 424 bp, Zea mays
  Clone ID: MRT4577_90014C.1
ctcttttttttttttttttttttttttttttgggggttttttttttttttttttttaaaaagggtgacatacaaaccggtcttttttttgttaaatgacaattgacaaacccctccattggatccagggggtttgtatttgcattggccctggaaactagagaaagggatggttttgatacacgagcctaccaaattggaatggggtagctccgcagccagaaaagccctgtgttgttttactgtccaatcaccattacccccattttattattaagaattcccgctcacattggacatgatcattggtcgggagataagaccccaattttttaactcctttccacggttagcccgccgggtaggtttgcatttccgggggggacgggatcaacacgcggacaactggggtccccggggacggg

SEQ ID NO: 173722 - DNA, 232 bp, Zea mays
  Clone ID: MRT4577_90015C.1
aggatggtgttacctgagctccaccttctagaccttgtatctgccgacgacgccgctcagctccaatggagatcgcccgaagctgcgaatcaaggcctccaggaagctgaccgagcgggaggtgacgaccaaggtgaacaagacggaaaatacaggaggagcgagtgccaggcaccacaccacaagaaaaacccacgggacaccatcaagaaaaagcaccaagtgcaagacc

SEQ ID NO: 173723 - DNA, 1634 bp, Zea mays
  Clone ID: MRT4577_90016C.1
ccacgcgtccggattgggtacctcgaggccggccgggactggcactgccattcccgtttcctcgctcgaacacacaccgaagagagagacagagcgagagaggatggcgtccctggcgcagcacgtcgcgggcctaccgtgcccccctctatccggtgcgtcgcgccgtcgccccgcggcgcagaggcggcctccgtcggcgcttgtgtgcggtacctatgcgctgaccaaggacgagcgggagcgggagcggatgcgccaggtgttcgacgacgcctccgagcgctgccgcaccgcgcccatggagggcgtcgccttctcccccgacgacctcgacaccgccgtcgagtccaccgacatagacacggagatcggctcgctcattaaaggaacagtatttatgactacctcaaatggtgcatatatcgacatccaatccaagtctactgcttttttgcccttagatgaggcatgccttcttgatatcgataatgttgaagaggctggcattcgtcctgggttagtagaagaattcatgataattgatgagaaccctggtgatgaaactttgattctaagtttacaagcaattcagcaagaacttgcatgggaaaggtgccggcaacttcaggccgaagatgtcgttgtcacgggtaaagtaattggtggaaacaaaggaggtgttgtagctcttgtggatgggcttaagggtttcgttccattttcgcaagtgtcatcgaaaacaaccgccgaagagctgcttgagaaagaattgcctctgaagtttgtagaggtcgatgaggaacaaggcaggcttgtcctcagtaatcgcaaggcaatggcagatagtcaggcccagctaggtattggatcagttgtcttgggaactgtagagagcctaaaaccttatggcgccttcattgacatcggtggaatcaacggccttctccatgtgagccagattagtcatgaccgtgttgcagatatctcaacagttctgcaaccaggagataccctcaaggttatgatactgagccatgaccgtgaaagaggccgagtcagcctttctactaagaagcttgagccaacacctggtgacatgatccgcaatcccaagcttgtgtttgagaaggctgatgagatggctcagatattcaggcagcgaatagctcaggcagaggctatggctcgtgctgacatgttgagattccagccagagagtggattgaccctcagttcagagggcatcttaggaccattgtcgtcggatgcaccttcggaggattctgaagaacccacagatgaatagaggcagttgacgaagtgcaccgggtttgagatatgtgatggcagttcatcatgctcattttccttggggtgggggggaggcatgacgagagcatgttctgttcagatcgttttccccgttccacttattcttgtcttgtactaggaaatctgaaaatgtaacaaggttctgaagacaccgaaaagaaatgtaattaaatccctctgtgaagttatcccattctcgcaggaacctcaatgtgtagtctgatcgttgagtgtatattttgtaattttgaatgcattttgaatgcgtattccgcaaagggaacacgcgaagtgttctg

SEQ ID NO: 173724 - DNA, 219 bp, Zea mays
  Clone ID: MRT4577_90017C.1
acgcggacgcgttgggtttcccgccaccaccgcaagggattccaaggccaggaagaaccagcgggggttaaaaaaaatttccggcttattcaccaagtccaatttgaagggcctattccggggatcttggcgcaaattaacccccttcccaaccggtgatgtgacccgttcctattccaatacaaagggccctttcgtccagcttgctttatacaaact

SEQ ID NO: 173725 - DNA, 461 bp, Zea mays
  Clone ID: MRT4577_90018C.1
tttttaaagtatcatattacttttattgggagattggttatccagtatatacataatgcattgcgccatacccatacacaggcgcccttggatcaacagtcggttgatccataaatgctgccgagtaaccagattttaaaactactggagcttcctgaactcgatgccttccaggatgaggccgcgcttgggatacgatccaaccacctcgaagctcgccaccacgtcctcaccgggggcttcatgctcaccggcctcgacggtgcgtagccgccccatctccacctcccaccacccgtcatctcgcagtctcggcacatggacgcctccgacgccatatggaatgacggcgccggcgccccagaacttgcgcgcttcggcttcgtcggggcggaggcacacagagcggcggtggtgcgactccgcgggcacgcggccaaccaagctcactgccgctgggg

SEQ ID NO: 173726 - DNA, 379 bp, Zea mays
  unsure (1)..(379): unsure at all n locations
  Clone ID: MRT4577_90019C.1
ggggggggggggggcncaaaaacggagcgggccggccgccgggcgaggngcgcgnaccngccgncgancgncgccgggaccaaccaccangggcggcggcaacggccagaagnccaaagaggcccgcgagcgcaacaaagaaaaaaaaagggggggggggggggctttctcctttcaccaacangaaggccangagcagccaggggggaggngcangcccaccccccgngnaccacgacngaagngaagngcagggagcacgccgaggccaagcancccaagacagacgngcaccagngcnncccccanccgaagaagggaaaggccngaacnnagcaaccagngcnnggccggccaggggggcgcccnggggcggagg

SEQ ID NO: 173727 - DNA, 152 bp, Zea mays
  Clone ID: MRT4577_9001C.1
aattcggcacgaggtgcagatcgagcacagccgcgcgcggcttgccaccgtacaaacaagcacgagcactccgctagctgctccgccgcgcaacaacaatggcgtccccgcgcggccatcgtcatcgccgggccaacgtgctgagcggttgc

SEQ ID NO: 173728 - DNA, 245 bp, Zea mays
  Clone ID: MRT4577_90020C.1
tcgctaatattcccctcacctatcggccgccctcgtttgactgcgtgggaggtgccaccaccgacgattctgcctatttttgtaaactgcaaggatcttacttattacaatggccaaatgctctcttttgatgttgttaaaatcgtgcaagcttttaaaaatgagattttgccacgacatggacttatcaaagtgtgtgaattcacattgtcagagtatggagcattttgtggtcccataggaca

SEQ ID NO: 173729 - DNA, 337 bp, Zea mays
  Clone ID: MRT4577_90021C.1
actgataaacctccaagaagaacagggccaggggcatgtgtctattagcccaagaaacactcgctagaggacgaactgaaggctatgcagcataaggatgccatagacagccaacgactacaagcccataccaagacccaatgagaaacaagtgaagatgatgaccgtctgctagagcgtcgagtggagtgtggctacttagatactgacgtcgtgtcatctgggcacaagatctgtatgaaatggacggagctagattaagactgaaattagaatgagaataggaataagtgaatctgcagagaactggagcaaggttccttgaaccgtttgcata

SEQ ID NO: 173730 - DNA, 168 bp, Zea mays
  Clone ID: MRT4577_90022C.1
cccatgcagtacgttgacttggaccccttcctcctttcaacttaactccgtcatggaggggatccaatttcctccttgggctggggtaaatggataactcagtgcaggacgctatcagtcagagtcggtttttaaatcgactacccggtgcgtcagtgtatgaaactg

SEQ ID NO: 173731 - DNA, 339 bp, Zea mays
  Clone ID: MRT4577_90023C.1
caatggaaccaggggaggacagccactttgcccataaaataaaaacacctttggaggttcaacgggggcttttgtggtcccaagggaagagagctcatgtggtttctgtggggtggcatgatacccaaattccttggagagggcaactttgcttaaaaatctggcgggaaatccaacaggcggctccatttttttcccagttttatactagtttaggaccaaccaggagggatcttttgtttaggaaaccgccggcccttttaacgcccagtggcagataactattactggctgagagggtcccatatacccagggccaagacaacagtccataacata

SEQ ID NO: 173732 - DNA, 354 bp, Zea mays
  Clone ID: MRT4577_90024C.1
ggccccaaagggatttggggccttaaagcccctccatttcttttaaaaaaggactaagggggtaaaaaaaaaaaatgggccccaacttttatgaaaggtcttaaaagaaaaaatattccacccccctttcaaaagaaaaagggttttttactggaaaagggaaccaaattaaggcttggaaggggggcccattttattttaaaaacaacaaaatggtagggggccaaccaatggttgggtttcggcggcggaggggaaaaaattttatttggaactaactttggaaaaaccaaaaccaaaaaaaatttctgacggaagaaaaaaatctttaaagtttgacaaaagaaaaatccc

SEQ ID NO: 173733 - DNA, 191 bp, Zea mays
  unsure (1)..(191): unsure at all n locations
  Clone ID: MRT4577_90025C.1
tnntntttttttntttnnnttattttttttntttttttatgggtacctcgaggacggncaggacgggattccctacgcctctccttccagtgtccactttcccgcgatcctacccctatccctaaaaccatttgccgacaaaaaaccataaattttaccccaaaatcaatgcttgttgctgtcatatttga

SEQ ID NO: 173734 - DNA, 330 bp, Zea mays
  Clone ID: MRT4577_90026C.1
ccgggcgcggaatttttttttgacccatcgttcgggagaatacaggaataaaaaagaggcgtggtagtggacagcgtgagggtgcaggacaggggccaccagtggtccccttcttacgttcactctatcagcatcagctcttccccatcaccgaggagagagaagcctgtcgccgcgcgaccgccccacatggtcaccgttctcggtggggggcccaaccccaccgacttctccatttaggttcgacccttcactcgcctccgtcgactagaatcatttcgtcactatttttgcatcgtgatgcgtttctttcacaagtcatattatttc

SEQ ID NO: 173735 - DNA, 383 bp, Zea mays
  Clone ID: MRT4577_90027C.1
ttctccttttttttattaatccttaaaaaactggaaagagagcgttttatttttggttggccacatacctcctccaaaaaactttattattgaattacaactaaaaaacaatctaaaagagggcaccaccaatgatgcgttgttggtaggaggctgctggctttgtcaaagcaagttggacaaagggcaacaattgatggacaactaagaaggttgcggaggtagacgaaaactgtttgtataaaggaatcaaccgttgctgtgtcaaaaacgaaacactgcttgctccaactaagaagctaaatgggaggagcatttgctactacaaataagcaccggggttcaatgcggccaattgggtaaatggaagaagttttccttgc

SEQ ID NO: 173736 - DNA, 1248 bp, Zea mays
  Clone ID: MRT4577_90028C.1
agtggaccggatctccgaggcggggctccaccacctgccgcgccggccggcgagcctcttcctcttcctccggtcgctccccttcccatctccatcttgatttcgattctctggtggctgggaaagcctgcgagagcgcgataaccggaaagatctgagctgctgcaaccgatctccggcgccatggggttcctcgaggacttccaagccagtgttgaagcattgccatctatgctgcatcggaactattcattaatgcgagagttggataaaagtttgcatggtgtgcaactagaaaatgagcagcgctgtcaacaagaaatagaggacattaagcatggacttgaatctggaagtattacatatgacccagcaaaattgaaattttccgaagaagcaatggaggagcagaaacattgtgttagaattgctgacgagaaggtggctttagccactcagacttatgacttagttgatgctcacatccaacagctagatcagtttatgaggaagcttgaagaaatccggcaagaaaaagaggcagctgctgctgttactgcagggactgctgttgctactactgccactccaaccgtgaatgctggagcgacaactgctgatgctaatccgaagagtggacgatctggcgaaagaggcagagggggtcggaagaaggccaaggtacccacggagcagtcagtgccagtgccagtgccactgccacctattgacttagaattgcctgtggatcctaacgaaccgacatactgcctctgcaaccaagtcagctatggtgagatggtggcatgcgacaatcctaattgcaaaatcgagtggtatcactatggctgtgtgggcgtcaaggagcaacccaagggaaagtggtattgcccaaactgcatcgggttccagaagaagcgaaaaggcaagtgatatgcagtccacaggctgctgtgctagtgtgtccttgcttgttaattgtgttgctgatgttgggtaacaaatgtagtagtagttgctgcctgtgacagtgcataccgttgtagatccagtgttctgtacatgttactcctccttcggtgctcgtagtttagggccatcgaccatttgttaacttcatggcctttttggcgattcatgccccttgtatgggtttcacaatatcatgtctccttttcctggtatcacaatattatgcaatacagccggtttgtaatttaaaaaaaaaaaaaaaaaaaaaaaaaaaaa

SEQ ID NO: 173737 - DNA, 383 bp, Zea mays
  Clone ID: MRT4577_90029C.1
taaaaaaaaaaaaaaaaaaaaaaaaaaaaaaaaaaaaaaaaaaaaaaaaaaaaaaggggggggtgttttaagagggggggcttactaacgcgattctttcaaaccaagatctctcttattgtgtgtccaaagttaaatccactgtccgtggctctacaacttcttgtctggcaactctttgtcctgccccaacttaatctttttgcagcgcatcccctttcgaaccgctggtgataccatcaagagccccgccgcaaacccccttccattcagttcccatgtctaaatcgataaggacccgcgcactggccttccacattaacttctccatgtgtggaggatactcacagcgccagtgaactccttcccatccccctaccaac

SEQ ID NO: 173738 - DNA, 1299 bp, Zea mays
  Clone ID: MRT4577_9002C.1
attcggctcgagccaaagggagcagtggtgttcaatgggacaaatgaggatgacttcctatactgcctccctgataacaaagaattatctgtctgccgagagatggctagaagtatggggttcccgaagctcgaagctggattatgtgctatgacgaaggaggatctcgcggacagtcttgcgtataacagcctaaagggcttaatcctaagcaacgcattaagagcacaaaagagtgccgaagatgagagctatgaaattgcgttcaacaaccttcggtcagaagttattaaactgagaaacgaagctctggagaaggataaaattttgctcacattggtagacaaggtaaaaaaggacgaagttgcctcaaagatccaggccgaagcccaaaaacgtgagattaaagatcttcagaaacagctagctagagctaaagaggaacgtgtgtttgaagaaacaaaacgagagcttagtgatcagttggttaatcatttagagttaagtgttcaggagcttcgggcatcccagaggaaatgctatgttaaatctatagaatgcgtcaaaaagataaaatccagcttcgccagcgttggcgcattttctagtgaagaaagtttctccagaggcaatcccgaaggtccattggaatggattagtcatgaagcagaagccttcgaggaaatcctgagcagccgcggtgatatctgcgcattttcgggcgccagaggagttgctaccgttctagagaagaaaggttgtgatcatattaagctgcttgcacaatccgaagccactttatccgctgaagatattaaagacccctcgaccgaagctagccaagttggtggaaaattttttaccgacgtctgggataatggtggccgagaaatggcaggagaaattattcaaagaagtgaaaagggcattcacgatgctagagaagtggctaaggctgctgaaaagagcgcagagcccgaaggtcaattaggtattaattaatagtttgtatcgtgttgtaatttttatttcaaactttgttcgcggtttgtaatagtaatgcaaaaatattctcttccctcagaacctgctggatcgtttgttgaccttcacacaaaaggggatgacgaaattaaacaaatggccgaaactatcgtggataaagttgttgaacagcttctaaatgaggctgccgaagtaatattaagagaagactaggtgttattaggaaaaacagttgaagtgtgatttatgtaatatttggtacatttgaatgtaatatacaagtctctttttatt

SEQ ID NO: 173739 - DNA, 306 bp, Zea mays
  Clone ID: MRT4577_90030C.1
gtgggggccccaaaaaaaaattcatccctaagtcaggaatcaaaattcacccctaggggaagggggctctatcccctccagccaaacagaatgttttcttggggaaacgggcccacctttttttttaaaaaactagaatccccccacctgctttttggctttaagggcgactgatttagggccccgggctcccacagccctaggggggaaaaacggggcaaacctttttttttaaaaaaaggaaattctggttaaaaccccccccggggattgagaagctcttaccacactaactccttgctttgg

SEQ ID NO: 173740 - DNA, 179 bp, Zea mays
  Clone ID: MRT4577_90031C.1
attctaaatttgatactgtgattagtttaagggaatgaaacactctcatggtggtttcaaatgccatgcgggggtgaaatgcaatatccaagcctacatggtctctaatagtcctatccttcatttctaaatcacatacaggcaagtcaatctgattacctagcaatgaatttccaaaa

SEQ ID NO: 173741 - DNA, 230 bp, Zea mays
  unsure (1)..(230): unsure at all n locations
  Clone ID: MRT4577_90032C.1
gcgatcnataatgcttgcagctagcgcgctcctcgagcgcagcatttaaaggacggcctaccctctctctctctctctctacagtctccaccggcagcgccaatagtaatagccatgggctccaccgccggcgacgtggccgcggtggtggacgaggaggcctgcatatacccgatgcaggtgagcgcccgggccatccttcccatcacactcaaaaacgccatgtatct

SEQ ID NO: 173742 - DNA, 292 bp, Zea mays
  Clone ID: MRT4577_90033C.1
ggatggcgccgctcctgcccttctacagcgccatgtcgctggcgttcgcggcgctggcggcgtgctggttcccgcagtgcgcgcggttctggcgggaggtggtgccgttccagagctgcgtcacgctggtgatcactctgggatgatggagggcaccacttggtacgttgacctcgctgagttcaacgagtccagggtctgcccccgtggcgccacgttctgggcggccacgtccggcgcgctccacggcgtggcggcccgcgtgttggtgcaggccgtggccatgggccac

SEQ ID NO: 173743 - DNA, 422 bp, Zea mays
  Clone ID: MRT4577_90034C.1
gatcgcacaactcctttccactattcaaggagaactttttcctaggctaatgtacaattgtatacatcaaaagatttaataaaagagtactttgctatgctaaagcttgttggcagattaaggagaaggttatgtttcatctgaacaggaacagttctcacatacattcacattcacataagtaaaggaactgccaaggctacagcgatgttgcacaaagagaaaatggaacgtgtcttcttcataattcccttccgcggtgcacataagtacacaaccttccatctatgacccacaccagccttagttttttagatgcataaaaaatgatccaaagaccaaaactgcagccagaactaactgggtctctggttccatcttttccgagccaaactgctggcctgatctggtttaacaatatg

SEQ ID NO: 173744 - DNA, 790 bp, Zea mays
  unsure (1)..(790): unsure at all n locations
  Clone ID: MRT4577_90035C.1
gccggccggttcgggaacttaaacctgcttcaccagttcgctgcttctcctcgtcctcacaggcgcgtcgatccggagggcgcctgccgccgccggcgggaacggaggcccgagcaggagcgggactggggacggcgaatctggagcccggcggacctgcattgccgcgggaccgccgcgcgtaggcagatctccccccgtcccctgccgcggcaccggcacggcacggcatggtggctgccgcggcggcggccaccgcgccagatccggcccgcccctcgcgcccgccgctcacgccggcgctcgacaagcccaactccgccgccgcgcggaggaactcgcgctccaacaagcccgtgtcctcgaggtacctgcccgccgccgcgtccccggcatcgtccacctcgtcgtcttcctcgtcctcgtcccgccgctccctctccgcgcagcgcgcccggtcatctaccccgccgccgcagcactccacgtcgcccaccaccaccgcgtcggcagcggcaaccgccaccgccaccgcgaccacgatgcggagcctctccgtgtcgttccagggggagtccttcttctacaagacgtcgcgcgcgccgcgggcctcgtcgccgtcctcaccggcagcgcgccgcgggcccacgccggagcgccggaagagcgtctcctccgtgccggaggccgagaacgccgcgggggaccaggcgggggcgccccnnctacggccgcgccggcgtggccccgcggcgcgccgccggagtggacggtgacgaggcccgcggcg

SEQ ID NO: 173745 - DNA, 314 bp, Zea mays
  unsure (1)..(314): unsure at all n locations
  Clone ID: MRT4577_90036C.1
ccgggcctcgcacagcaacccccaacagcgccacggtgcccagcgcgcggcaagcnngcnnagcaagccgccaaggccncccncgccgccttttccgcgaagccggggggcancaagggncncgccggcagcaccancaccggaaggaagcncgccgacgccaggccgacggcccgcaccaaccgcaggccccgcgcagccgccgagggggccaagaacggcgacaagagcggcaacgaagaccacgacgacaacggaaacaccaccggacagagggacccccacggcgccgacgcgcccacgcccaacaaccc

SEQ ID NO: 173746 - DNA, 451 bp, Zea mays
  unsure (1)..(451): unsure at all n locations
  Clone ID: MRT4577_90037C.1
tcaagcggccgcccgggcaggtctagaataataagggggaacaagctgtgctcttgttattttctttaaatttgaaaagtgacccatataaaaaaaaaaaaaaaaaaaaaaaaaaaaaaaaaaaaaaacaaaaaaaaaaaaaaaaaaaaaaaaagcttgtaccttgggccggggggggggtaagggaaaattctggaaaaatccataaaaatggcgaaacctaaaaaaatgaatttaaagggccaaattagccctatagggagccaaattaaaataaactggccgcctttttaaaacctcgggaaaggaaaaacccgggcgtaacccaactaaaaagccttgcagaaaaaaaaattttaaacagttggggtaatagcgaaaaggccaaaaccaatcgcccttccaaacaattgcgcaccctaaatggcaaatgaacnctccctgtaacggg

SEQ ID NO: 173747 - DNA, 643 bp, Zea mays
  Clone ID: MRT4577_90038C.1
cattgggtacctcgaggccggccgggaaaacaccactgcaccagtacaacccagaatcccagatccctcctcggcatctccctttctacggtgcacggtacaagcctgcaaactgtaccgtaaggaaatggcatccaaggccttccgcgccgtcgccgccgccgcgctcgccgcgtccgccctcgcgggggtcgcgatggccgccgacgcgcccgcgcccagccccacgtctggggccgccgccgtctcgtcctccgtcgtcgccgccgtcctctgccccgccgtggcgctcctcttcggcagcctgcgccactgagtgctccaggccacggcgagtttgtcccgttcctactttgtatgtactagtactagtcctagcatgtttcttcctacgctagctgcatcgcatgtatgaattatgatgatgtatctttaccgattcagatattctatatcggcagttcctcagccgcagtaggtatttgtttcagaatcagagtcacgtccctcccaaccattatgcatattaatgattttttctctggaatttcttgtgtaatgtttcttctctgatgaactatacaaaagatgtcccttccaacctaaaaaaaaaaaaaggaaaaaaaaaaaaaaaaaagcggcc

SEQ ID NO: 173748 - DNA, 111 bp, Zea mays
  Clone ID: MRT4577_90039C.1
aaattcaatgtgatactgtctctaattaagttaccacacatttgtaaatgaaaagagacacagcccatgtgtttgattcagtggaatgaacaaaatactgtataatctatt

SEQ ID NO: 173749 - DNA, 306 bp, Zea mays
  Clone ID: MRT4577_9003C.1
cgtcctatgcgtccggggtgtctgttttgacaataaaatagccatacagttcatctttcgaactcagggtgcgaacgttttattcggtcttatactccaagtacgatggacatccaatcacgcatacactctcattggcacttatctccagattgatacatgcctatttattgggtatctcatacccacagccatctccctaaagttgatgctgcctcataccttgaggactgggttgtgccttcgaacccttgcagatgaggcacagaccctattgtgtgttactgcataggagattgtagacat

SEQ ID NO: 173750 - DNA, 598 bp, Zea mays
  Clone ID: MRT4577_90040C.1
gattgctcgaggcgggcccggccgggaaaacccactgcaccagtacaactcagaatcccagatccctcctcgcctcctcggcatctctgtaccgtaaggaaatggcatccaaggccttccgcgccatcgccgtcgccgccctcgccgcgtccgccctcgcgggggtcgcgatggccgccgacgcgcccgcgcccagccccacgtccggtgccgccgccgtctcgtcctccgtcgtcgccgccgtcctctgccccgccgtggcgctcctcttcggcagcctgcgccactgagtgctccaggccacggcgagttgtcccgttcctgctttgtatgtactagtactagtgctagcaggtgtcttcctacgttagctgcatcgcatgtgcgatgatgtatctttaccgattcagattttctatatcggcagttcctcagccgcagtaggtatttgtttcagaatcagagtcacgtcccttccaaccgttatgcatattaattgatttttctatctctaaaatttcttgtgtaatgtttcttctctgatgaactatacaaaagatgtcccttccaaaaaaaaaaaaaaaaaaaaaaagcggcc

SEQ ID NO: 173751 - DNA, 602 bp, Zea mays
  unsure (1)..(602): unsure at all n locations
  Clone ID: MRT4577_90041C.1
gcgagatcactgccccccctccctttcttgtttcttcttcatccatcgaccatccctctcctgcagtcctgctcctcgcctgcccatctcctgttcggcgctagctccgcgacatgcacacattgttgacgtcgcactgtcgcaagctccccctcccttcaaacccaaacaaaaccgcaccaaacgatccaaagcaggggcacggatcgctgtctgcaccaacaccaacgccgacgccttaccctcacctcgccgagcttgagcgctagtcgtgtccgactgtccgtacctcgccgcttggctcagctctccgagtttcagctcagcacgccgcgatgagctccggcgggacgccgcccgtggggctaacaccggcggacggcggcatgttcagcaccgaccgcatcggcggcttcggctacggcgtcggcgtgtccgtcggcatcctcctgctcgtcaccaccatcacgctcgcctcctacttctgcacccgagcgcccngccgacgccgcgggggaaggccgcccccgtcgtccgggcgccacggncggcgaagggggcgcacgacgatgtcgagctcggcatcgacgaggccacgctca

SEQ ID NO: 173752 - DNA, 323 bp, Zea mays
  Clone ID: MRT4577_90042C.1
cccccctctctctctccctctccttcctccccagtgattgcagcaccacccctcaaccctagccgcccccccccccccggtggtggtgtacatggtgcaggctcgcctctgggtaccccgtcgtgtgggtgcgagtcttacattggagtttggagggaggaagaaggaagaaaggaaggaggaaaggaggaacccaaggagggggagggggggatcgtacttagggattgggccgaacgcccggcaaagggacttgatccatgcctgggaatgaggggagtctcagccctggcactttgactgtcacaacaacgttggccagg

SEQ ID NO: 173753 - DNA, 1409 bp, Zea mays
  unsure (1)..(1409): unsure at all n locations
  Clone ID: MRT4577_90043C.1
gggggccaagagcggatgcggcggtgctccgngagcagctagttgagttttgtgatcagcgattcaggatcaaacttgataacgagagcctccctattgagcacatcacaaaaggagtcatgttccttgaccatgtgctgtgccgtcgagttgtgtacccaacactgcgttacactgctacaggaggcaagatcattagtgagaagggagttggtacactgctctcagtgacagctagtctgaagcagtgcatcaaacaattccggaagcttgagtttttgaaaggagaccgcgaaccagatccacaaccatgcttccgtatgttccacgccacacaatctcacacaaattcgcagatgaataagcttttactgacgatggcagagtggtatcgctacgctgataaccgcaagaaggttgtcaacttctgctcttacattataagggggtcactggcaaagttatatgctgccaagtacaagttgcggtcaagggcaaaggtctataagatcgcgtcaagaaatcttagtcggccattgaaggataagaaaggccagtcgccagagtatcacaatttgctgagaatgggccttgttgattcaattgatggtcttcagtatacaaggatgtcgatggttcctgatcctgattacacgccgttaccatttggatggcggccagatcatgagaagattttgctggagtacataaagctcacagatcaacagacattgaaagagcagagaaactgcaccagggaggacgggcttataacaccacaggacaatatttcgatgcttgtatggggctacaagaaaaatgctgttttacttccttcaaaagtgagtgatgcccaaggatccacagaggaccttggttcagataccgatgaattgaatgaaaaagagctaggaaatgagggtaaccaaagtttccaaaagcttgctgaaatgtcatgagttttggcaaactctgtagtgttcccaaggggtatttgacttgttgactggatggttggtttgtgactttgaaaacacaaaaccatctgctagttcttgcttgccgccggtgtgctgggcggaggacggcgtcagcgaaccgggatgtggcaagggacggggggagggcggcggccgtggaagctgggcgacctgactcgagagccgagactgggagtgtgttatattaccactgagtgctgccgtatggagtagtacggagtattatattaccaaagctttacgtagcggacgaatcgatgccatccaccgctctctctttccagccgtccataaagccaggaaagcgccaaacgcactcgggcgtaggacggatgctttaagttttaagactgttctagagcgtcttatataaaaaaaaatttcctcgnnnnnnnnnnnnnnnaaaaa

SEQ ID NO: 173754 - DNA, 236 bp, Zea mays
  Clone ID: MRT4577_90044C.1
gtactggctgtgcgaaagcgaccattccttcttcggtccttcaggcgcgctatggtttagtactcgcagggaccgggcaaccctaccaaatagagcaagggcatgggaagggacccgaggggccacttcaagaacacaaaggagacagcttttgcccttctcaaggtggctttgacacaaagggtatccatacccctaggaaggtattggtgacaaacaagccaatccccttctga

SEQ ID NO: 173755 - DNA, 347 bp, Zea mays
  Clone ID: MRT4577_90045C.1
ttttcctcctttttttgggagaattttattgttttatgcctttgttttggttattgtcattccatatggaccggctgagattgaaaaaaatcaacaagacgctcggggggtctgggatttaaactcactcaaaccatatatatggattgagaactaaccgaacaagaccttacctggctcagagaatcgcttattgcatgatgcaattgaggaacacatgttatcttgctcatgcaacctacgaacattggagtctaggaacaagtgtgatggggttctcccaccggccgctccgccatatcatcccttccagtagcaacccagacattttccgaccgtacgcaagt

SEQ ID NO: 173756 - DNA, 515 bp, Zea mays
  Clone ID: MRT4577_90046C.1
ggaggaaaagaaagcattcccccatgcttgacaaacagcagggttacaaaaacatcatttcatcctcgtttccacattcaggggcttatttacccccttattcaaaaaacccttgatgaggccgggcccaaacctggggcctgggcccaattcccggtcctccggcccgctttttactcctgggccatgccggcctgggcctcctccaggaacctaatttttttgacggcctgcccagggtccttcctgggggggcggggggggacctggatcaggatgtccgattttatccccgtttaagggttaaccaaaccgccgttccgggccaccctggaaaccagtttgtccttaccgggcgcggggtaaatgaaaaccgggcaattttcggcaatcccctccgggacaacattttcgacagggggggcccccccctttttttgacccacctttttatgggccgggccccgcaccccggatcgtaaaaaaaaaacaaaatgatgtccaagggggggggg

SEQ ID NO: 173757 - DNA, 286 bp, Zea mays
  unsure (1)..(286): unsure at all n locations
  Clone ID: MRT4577_90047C.1
tgctgcgggctccgctttcagnggggnctgtcgcgtgggaggcgctcttgtggtagttcccccgtctgtcaccgtgccgaacgaggagggtgagactgtggacctctatgtccccaggaagtgctcgggcactgtcaggatcatctctggcgagggccatgcctctgtccttataacattggccacttgggtgggggtggcctgtntgatggtcccttctcntcgcttgctctttctgggtttgggcgtgctcagggcgacgctggctgctccttggaccggctgt

SEQ ID NO: 173758 - DNA, 503 bp, Zea mays
  Clone ID: MRT4577_90048C.1
taagtactacattcacatttatatgcttttcattttggtcaatgatggtctaattatacaccaatagtatcatttgtgcaccataaatagtagtctatacagacaattaaaaagggtaacaattacataagttgataaagttgcaccatggcattttaatgcacaaataagaaagcataaaaatcaaaccttccttatgctctaaagcacctaagaaatttctttggagctaccctaaaggcaccgggacttagctgccatctcctcagtcttgagaatttcttcaccatgctgggccataaccatcgctctcttttccttggccttcttatggatgattgccttcttgtttttcatcttctcagcatattcagccattttcttctctagttcttcctgatcagtagctcaaagagattaatatttttttattttcattaaaaagcacacaatttcccacaccatattttatgatatacctattacattaacatcaatataat

SEQ ID NO: 173759 - DNA, 347 bp, Zea mays
  Clone ID: MRT4577_90049C.1
accgggggacttcaacacttgagggggatataaaactggccatgttcatccaaacataaaataaccattatagccttcataaaccattcctcgttgtgggctcccagccatggtcatcccttaataccggaagaacacccaccctttttatttatgacatttttactccaagccagccgatgcacccacccccttaccactatatttgtactgaaaattatattgataagaaaggggccaatccacgggtacactttcaagggaacacacgctcccaaacacttggggatcttgtataacataaacctctatttggagaaaagctccctccattctttttcatctcg

SEQ ID NO: 173760 - DNA, 102 bp, Zea mays
  Clone ID: MRT4577_9004C.1
cttgtatgaggagaaaagctcagattgttctgtgaacagctcagattattctatagaaaagtattccgttgatgatgaaaattgcagcccacaagctgaata

SEQ ID NO: 173761 - DNA, 398 bp, Zea mays
  Clone ID: MRT4577_90050C.1
caaggggcctgggttcctgcccctggttttttaaaaatggggaacaccaaaaccaccccccaccaaatttccgaaaccaaacatcacccaattaataataattcccaaaaacaaaaattctgccccgggaagggaccaaggggcacttaaacatttaaaaccccaaacccgggccccccccccatggccatggggttggcagaaaaaaaggggccttccccacccccctgggggtaaacaacaccggcttaaggggggaaaaaggttttcccccccgaggcagttggcccaaagcagcccctaaaaacctgggggggacaaaggaacccaggagccataaagccctaatcccccccgggagccggtttggccccatcccggaagtcctaatgggaaaa

SEQ ID NO: 173762 - DNA, 344 bp, Zea mays
  Clone ID: MRT4577_90051C.1
aaggctcgtcctcctacgcttccggcgtgtcgtaccaggacggagactatctttctgaggagggtttataaccatccactgattacatccaaagctcaagatgctaggagggctatgatctatgttcatgccacattgatgatagtgcactatgcttacatcatcattatgtccaccaacattaaccacaggtccatggacggagcctgtgactctcagatcaccatgtgctcgtaccagccgtaccacctgtcaactaggcaacctgcccgaggcctgatccaaggcttccagatgtcatattggttcgaacaccagcagatgctgcactacttattccaccg

SEQ ID NO: 173763 - DNA, 361 bp, Zea mays
  unsure (1)..(361): unsure at all n locations
  Clone ID: MRT4577_90052C.1
tcgagccttcttgttgtcgtaccaattgtcttaatacgaggtgtggatggtngaattgttaatttattaaaaaaaaaaaaaaaaaaaaaaaaaaaaaaaaaaaaaaaaaaaaaaaaaaaaaaaaaaaaaaaaaaaaacaaaaaaaaaaaattggggataccgaccactagggatcccacggctcccgaaataaataccaaatgaaaaacctggcggggccccggcaatacctgaagtcatgctgaaaaaataatgccgtaacaatagaaaaaaaccttccgagcgggaaacataaagagcgaaaaaatgggagacaaatgagagacctaaaggataaaaattaaaacctggtgaacgcaat

SEQ ID NO: 173764 - DNA, 324 bp, Zea mays
  unsure (1)..(324): unsure at all n locations
  Clone ID: MRT4577_90053C.1
ttaatttttacatttaaaaataacaaatgcgatcgtacacccttattctgtcctgtttnnaccattccaaatcctcaaaccttacattgatcacacacattatttatctcaacgtgctagactttaacctccttattcatcttaccacttactttgaatgcatacacacactaactttcattttcaacccagacttctacaaagaaatccaattttccatttctatcaatctcttcaaaaccactacaaaacatcaatttcaaacccatcattaattttcataacttacttcaactaaaattacaaggctaacttatttttcct

SEQ ID NO: 173765 - DNA, 412 bp, Zea mays
  Clone ID: MRT4577_90054C.1
cgccacgcgtccgttgcaagattgtctcaacaactatggttatgcgatcagtacgtgccagctgggcctggtcatgctgaacgagtgccctcgcgttggagcgcctgtctaagctgctctctagcattattcatgcgatgctgttttcgaatgggtatctcattaataagacacctatgaaactactaccatatacacaccttgaaaccaaactttctgagattcattaccttctgatatcctatgctgatggaacatactctggactcttcaccattcatacttacaccatcctgtgatcttggagtaacaacttctactttggcgaccgttctagatgatccaaccttacgtacgcatccatgcttaatgctacctcttctatactgtcacctaaatctaattcaatagc

SEQ ID NO: 173766 - DNA, 247 bp, Zea mays
  Clone ID: MRT4577_90055C.1
tcggctttgagcacttcggcgacgtcgtgaagatctggttcaccttcaacgagcgggagacgtggtcctatttttgctacggaaccggcatctttgccccggggcggtgctccccaggacaaaaatgcgctaacccaaccgggaactcgctcaccgagccttacattgttgcccacaaccttctgcgagctcatgctgagactgtccatgattgcaacaagcatcacacacgtagcatggacccaca

SEQ ID NO: 173767 - DNA, 1536 bp, Zea mays
  Clone ID: MRT4577_90056C.1
aattccctgcctcgacccgacccacgcgttcgcggacgcgtgggcagcagcaaagctgtgtctgtttcggtgtcggcgtctgcttcggtgtcggtgctgggcaacggcgcgtgggcatgattcttctgttctgacgtggcaactaatgattctgatcccatttggttgcagtgcgacgacattgacatggacatggcgcatctggagtggctgtcggtgctcttcgacgacgccttcatcccgcacgagccggtgttccctggcgcgacggcgggcggcgcggggccgatcctgaagggcggggggctgtcggcaggcaaccttcttcttctcttctcagtcctccctcccgccccgttcgacacagcagcttgcttgtcaccaagctagccaagcaggaggagtaagagtacagccagagagagagagagagagagagagagagagagagtgcaccaccctgattccacccaccgctgtcccttgcttatttacaggcgttcgtgatcaccaacagctactcgtcagctagagagagtgcaacgggccgggcagagctagagagagagagagagaaagcggccttctttttctgtgttcaccaagcaacaaccccagtccaagctctccgtgttggccgatcgtttccggcgaacagagcaagcaactcacagacgcaggcggcggattcgcggaggagagatgatgagggagcagagcctcctggaggcgacgtgcggcgacctcttcgaccacatcgacgacctgctcgacttccccaaggaggactcggccgccgacgtgctcctgctggacgcgccggcgccggggagcccgctgtcgtcggcgcgcatcatcgacgtcggccgcgccggcagtgcgcccgctccccccgcgctggcgccgtcgcttcccgcgcagcaagacaccaccgccttcttcgccaccgcggggcccgacgtgttcgaccccagggacgtcggcgctcacctcggctcgtgcgacgacattgacatggacatggacatggcgcagctggagtggctgtcggggctcttcgacgacgcatccatcccgcacgagccggcgttccccggcgcggcgcccatcatcaagagctccgcgctggcggccggcgcgctgctgccgccggacaagatggaggacgcgctgctgttccgcagctccagccccatctcggtgctggagcacggcagcttcaacaacgccaacggcggtggcggcggctgctccgcgtcgtcggagtcgtcctcggcgtcctcgtcctcggagtctttctccggcagcgggagcgggagcggcgaaggccacgcgtggtcggcgcccgtgtcgccgccgcccgtgctcgtcataccggcgcgcgcgcggagcaagcgctcccgcccgtccgcgttcacgcgcgccggggcggaggcgcccaccatcctcgtgccgacgcccatgtactcgtccgggccgtcccactcggaccccgagagcatcgctgagtccagcccgcacccggcgccgcccatg

SEQ ID NO: 173768 - DNA, 266 bp, Zea mays
  Clone ID: MRT4577_90057C.1
gcgaacaccaaagtccgggaactttagcattttcggtttctagggttgttacgaagctgcaggagcgagatggaggtggacgcaccgggtgttgatggtcgagatggtctccgggagcggcgaggctttagcgagggagggaggcagaacttcgatgtgaggcctcagtctggggcaaatgggcttcccaaacactcctactggttggacctctggcttttcatccttttcgatgtggtggtgtttctctttgtgtattttttgcc

SEQ ID NO: 173769 - DNA, 544 bp, Zea mays
  Clone ID: MRT4577_90058C.1
ggaccgaacatgggtgaacagcccacgggctttatgttcaaaactagatcatttgctaacttttttagcagttacgttttttacaaatgtccttctcaaggccaatgtttgcttaaacatgaagctccagggtgggcttaaaatcaaggactgattgatacccttatggtcaaaaaaacattgttgggggcagaattgctcgggcagtaactcaataggggggagccctgcaccttcaaattcaaacagtttggcagtgcaggcaaagcacaccaaacgaattacgcaaaccccgtcaggtggggggggattattggagcctccttttgtaaactatagctaggtacctaccggagccgggcacctaatgacctactggggccttcttccaagcaagatccgggtcaacacaccatcacatattatttagttttatgtaacgggcattggcacccgcaccctcctgacgacgattaatacccacccctgagccatttgggccgtgattttttttttttttaccgatgccattgtccggactttt

SEQ ID NO: 173770 - DNA, 1456 bp, Zea mays
  unsure (1)..(1456): unsure at all n locations
  Clone ID: MRT4577_90059C.1
gtgattagtgcatgcgtatccagcctgatttgcatgcattttgcgcattgatatggaggatattcatcgtcttctatcttctgcctatctatcccttcctttacactttatttattcataaatatacgtccatccaacgcagccccggaggcgactgactgactggcgcgggtggaattcggcacgaggagagagagaggggcaggaattcaattccaccgacccacgcacctctaggtcaccccgctcccacccctttcctccatttacctccacctatatagctccccataattccccgggcctcccctctcttgttaggagtacacacttctccttagaattggagctgtacgagccacccacagacagagagaggggaggaatcagcaaccaccttcccacgcttctctagctctccctcttcccacgtccgtccacacagtaccttcacctacaccaagctagacaattagccggagtacccgtacattgctaggagtaagagagagagagagagagagagggcgtaagcaccacccagcaactttccacctcatcttcttgcgtacttactgggtcccgcgatcaccaacagctgctcgtcagcaagatagagtgcaatggctcgaggccggccgggcagaagaggtagctgggagctagagagaaaaaaaaaaggtgcaccgagcaacccaggccagggaggaagggaggagtgagccgtcagtcgaccgtttccggcgaactcacaggcagatggcaggcggcggattcgtggaggacatgatgagggagcagagcctcctggaggcgacgtgcggcgacctcttcgaccacatcgacgacctcctcgacttccccaacgaggactccgccgccgccgtgctcctcctggacgcgccggcgcccgggagcccgctgtcggcgcgcatcatcgacgtcggccgcgccggcaatgcgctcgccccgcctgctgcccccgcgcagcacgacgcttccgctagcgccttcttcgccgccgcggggaacgatgtgttcgacaccaaggacgtcgtcggcgcacacatcggctcgtgcgacgacattgacatggacatggcgcagctggagtggctgtcggggctcttcgacgacgcctccatcccgcacgagccggtgttccctggcgcgacggcgggcggcgcggcgcccatcatgaagagctccgcgctggcggccggcgcgctgctgccgccggacaaaatggaggacgcgctgctgttccgcagctccagccccatctcggtgctggagcacggccagcggtggcagcggcagcgccagcgccaccggctccgcgtcctcgtcctcctcctcggctcgtcctcctcggagtccttctccgggagtgggagtggcantggcggagggcatggttggtcggcgccagtgtcgccgcgcccggcgccgccgc

SEQ ID NO: 173771 - DNA, 389 bp, Zea mays
  Clone ID: MRT4577_9005C.1
gggacggttaccgtcatctctcccttccgctccttcttgttgaagatgttcttctaggagcacgagggcaaggagttcaccgggctggcgtggtgtttttcttggctttccaaccagcgacaccctgctttacaagagaggaggtggggaagattaatgatatagcgcctgacaacttccagctgtacttttcggtgagcccgtaacagaccaaccccgccccggagaagaagaacattacatactcccatagtggatttcaaaaaaaagcggttgtagccgtttcaagaaagaaaaaacctacctttacatattcgtgctctatggcatggatgaaaggtatatgtcacattttgctcttctctctcgtccaagactggaagaactgt

SEQ ID NO: 173772 - DNA, 154 bp, Zea mays
  unsure (1)..(154): unsure at all n locations
  Clone ID: MRT4577_90060C.1
aagtccgggggcgtcccacgcgtccncanacacttgtcagccgtttctttctaaatgcaaaacccaccnccacgtaagatggtaacatatttctttcagccatcncactgcgccgcatgaagccagtgtttcaaatatcaacccacatgcaccc

SEQ ID NO: 173773 - DNA, 1039 bp, Zea mays
  Clone ID: MRT4577_90061C.1
gaaattgtcggaatataaaatctccccctccgacccgcctgtcccgctcctcttctatttgttcgtttacagccccccagctcatcaaagatcacattttgagcactgctatataaacaaagttggcaggagtcgtagattagcaggccgcccgtctatttttttgttcatgttttgaaagtgaaggaggatttgggtgggcaacgtctacctctgccaaaaataatcggcgtccatatgcaggcgtcgtatctttggaataagtgaatagcaggcagatggcaggcggcggattcgtggaggacatgatgagggagcagagcctcctggaggcgacgtgcggcgacctcttcgaccacatcgacgacctcctcgacttccccaacgaggactccgccgccgccgtgctcctcctggacgcgccggcgcccgggagcccgctgtcggcgcgcatcatcgacgtcggccgcgccggcaatgcgctcgccccgcctgctgcccccgcgcagcacgacgcttccgctagcgccttcttcgccgccgcggggaacgatgtgttcgacaccaaggacgtcgtcggcgcacacatcggctcgtgcgacgacattgacatggacatggcgcagctggagtggctgtcggggctcttcgacgacgcctccatcccgcacgagccggtgttcccgggcgcgacggcgggcggcgcggcgcccatcatgaagagctccgcgctggcggccggcgcgctgctgccgcaggacaaaatggaggacgcgctgctgttccgcagctccagccccatctcggtgctggagcacggcagcggtggcagcgacaacgccaacggcggtggcggcggctgctccgcgtcgtcggagtcgtcctcggcgtcctcgtcctcggagtctttctccggcagcgggagcggcgaaggccatgcgtggtcggcgcccgtgtcgccgccacccgtgctcgtcataccggcgcgcgcgcggagcaagcgctcccgcccgtccgcgttcacgcgcgccggggcgga

SEQ ID NO: 173774 - DNA, 364 bp, Zea mays
  Clone ID: MRT4577_90062C.1
cggacgcgtgggcaaaaaaaaaagggggagcgggagggaacacaaaaaaaaaaaccaccgaggaaaaaaaaaaacaacaaagggcgcaccgggacaaagaacagaagcgccgaaagcctgcagcaagcagcaaaaaactcgagcatcggggagccaaaaaaccaaataacagccccagccggggggggggggacatacccaaaaccccccaaacaccaagataaagggcggggcaccaaaccaccaacaccccagtggagaaacaagccagaagccccgccccataggcaatcccaaacagtcacaaacccgaaaggaaaaaggaaagccccctggcacggtacgctaaacccggccagcgagg

SEQ ID NO: 173775 - DNA, 299 bp, Zea mays
  Clone ID: MRT4577_90063C.1
gctcggaattcggctcgagcctcattattaccccccctttcatatccaccccccagcccaaccaaaaagggtgatttttttataataatgctttttttctcccacggcacactacttctaactcatacttaagctcaacatgaccaccagaagcccgcagtgccatcatcggaccatccggcgtacacaatttcagctgaccataactccacatatgctatggctcaccatctagataatatccatacgccctccttcatacctgctgaacctagacagtcaatcatatctgctctaac

SEQ ID NO: 173776 - DNA, 534 bp, Zea mays
  unsure (1)..(534): unsure at all n locations
  Clone ID: MRT4577_90064C.1
cattgggtacctcgaggccggccgggaaaaaaaaaagtcggcgtcggtgctggggagcgggcgagcggcgcgtcgcatgattctgtcctcctgacgtggcagctaacgattccgattccctttggttgcagtgcgacgacattgacatggacatggcgcagctggagtggctgtcggggctcttcgacgacgcatccatcccgcacgagccggcgttccccggcgcggcgcccatcatcaagagctccgcgctggcggccggcgcgctgctgccgccggacaagatgggggacgcgctgctgttccgcagctccagccccatctcggtgctggagcacggcagcttcaacaacgccaacggcggtggcggcggctgctccgcgtcgtcggagtcgtcctcggcgtcctcgtcctcggagtctttctccggcagcgggagcggcgaaggccatgcgtggtcggngcccgtgtcgccgncacccgtgctcgtcataccggngcgcgcgcggagcaagcgctccccccccgtcccac

SEQ ID NO: 173777 - DNA, 1322 bp, Zea mays
  unsure (1)..(1322): unsure at all n locations
  Clone ID: MRT4577_90065C.1
ccctccaggctctgccgggaggagtacacagtcctccttataattggagcacactccttatatgattgcacaagccgctcagcaaccttcttcttcatcttctccagtcctccctcccgccccgtccatcgacacagcagcttgcttgtcaccaagctagccaagcaggaggagtaagagtacagccagagagagagagagagagagagagagagagagagtgcaccaccctgattccacccaccgctgtcccttgcttatttacaggcgttcgtgatcaccaacagctactcgtcagctagagagagtgcaacgggccgggcagagctagagagagagagagagaaagcggccttctttttctgtgttcaccaagcaacaaccccagtccaagctctccgtgttggccgatcgtttccggcgaacagagcaagcaactcacagccccggaggcgactgactgactggcgcaactgtgttgctcgatccatcgaagcagacgcaggcggcggattcgcggaggagagatgatgagggagcagagcctcctggaggcgacgtgcggcgacctcttcgaccacatcgacgacctgctcgacttccccaaggaggactcggccgccgacgtgctcctgctggacgcgccggcgccggggagcccgctgtcgtcggcgcgcattcatcgacgtcggccgcgccggcagtgcgcccgctccccccgcgctggcgccgtcgcttcccgcgcagcaagacaccaccgccttcttcgccaccgcggggcccgacgtgttcgaccccagggacgtcggcgctcaccttggctcgtgcgacgacattgacatggacatggcgcagctggagtggctgtcggggctcttcgacgacgcatccatcccgcacgagccggcgttccccggcgcggcgcccatcatcaagagctccgcgctggcggccggcgcgctgctgccgccggacaagatgggggacgcgctgctgttccgcagctccagccccatctcggtgctggagcacggcagcttcaacaacgccaacggcggtggcggcggctgctccgcgtcgtcggagtcgtcctcggcgtcctcgtcctcggagtctttctccggcagcggnagcggcgaaggccatggcgtggtcggcgcccgtgtcgccgccacccgtgctcgtcataccggcgcgcgcgcggagcaagcgctcccgcccgtccgcgttcacgcgcgcccggggcggaggcgcccaccatcctcgtgccgacgcccatgtactcgtccgggccgtcccactcggacccgagagcatcgctg

SEQ ID NO: 173778 - DNA, 350 bp, Zea mays
  unsure (1)..(350): unsure at all n locations
  Clone ID: MRT4577_90067C.1
ctttccnncaccgcaatcttcatcaacgctctcctactcaacaataacatccancttctaataataacttcacccataatcactattaaccactccaatatctactaccacatatactcttatatcaccattacaatacttcnaacaaaccaacactttatgctttaatccaaccaccgtcttctcactcacacactacttctacataaccttctacaccatccttaacgcgaccaccaactatacactaacacacatgcaacaatcaaataccttacaatcctaacctaattacataaatccaactcctaaatcaatactttagcaacatcatttcccccatcaacaac

SEQ ID NO: 173779 - DNA, 356 bp, Zea mays
  Clone ID: MRT4577_90068C.1
tggccacgcaccagcagcggcggtcgcactccgcaccgatgttgtgggtgtagtaggtcgtgggctactggctcaggtggtggctgctgggtcaacgcacgctacctgttcgacgatttacctggccgccgaccgcaacttcgctgacatctctgttggcgcgctttcagaggagacgatggaacaaggggcaacgactctacaacctatttttcctgagaagaaatcggtgctcctctcctcatccactgatagtaaactcggaggtctgaaggcctatcatctcgctcgaggcctgtgtgaccgatgtgatgagaaatggcatcggggtcacaagtgcaatgatattgtgcagt

SEQ ID NO: 173780 - DNA, 420 bp, Zea mays
  Clone ID: MRT4577_90069C.1
gcactttttggatgatgagctgtgctgacatgcatggctgcctgcacatgctctgcagaagcagctagcctgggaacaggttttccaggagagacggatgagcaactctggttctttacccctcggtatatacgcgtatatataggcaagatctgtactcatattccgcttttgttcaccacttgggtaattttttccccaacacgagatagagagggttgtgtgtgtgtgtgtcaatagtctgaccacatgtaaattttaggcttgtaccatctggacgaaatgtaatagggagcaggcggaataatgagccactttgcaaaaaaaaaaaaaaaaaaaaaaaaaaaaaaaaaaaaaataaaaaaaaaaaaaaaaaaaaaaaaataaataataaaaaaaaaaaaaaaaaaaaaaaaaaaa

SEQ ID NO: 173781 - DNA, 628 bp, Zea mays
  unsure (1)..(628): unsure at all n locations
  Clone ID: MRT4577_9006C.1
ggtcgcctgcagtaccgtccgnattcccggtttttgtcttgttcatactttattcatacagttcatttttcttgttcagtagtccgcacattggtctaaaattccagtttcagtaaagctgcattgtctcatttatttgatctctacatcaatacttcactgatttacatatcgccatgatataacttgaattttaaacatcttaacaggtatatgcatgtgcataatgttggaatacttgttgaactgaaattgaaaactgaatacttgtagcagctgttctgtacattggatgggagcatgtttctaatagacagctaattatttggcttcagttagtattacgattatttgaaatactggatgggaatggatgtttctaacagtccgttaaccctcctcttcagttcaagattgtgatgatttgtagtactaaattggaggcttcgatcccctgcaatttatgtggtacaagtaagggttttgtttgagaaggcgaatgagattctaatggaggaaataaatgttcaggaatgtagtacagaacatggattgcgcccaaatcggatccgctgaacatggattgcgcccaaatcggatccgcgcctataaaatatcaagcaggcac

SEQ ID NO: 173782 - DNA, 263 bp, Zea mays
  Clone ID: MRT4577_90070C.1
ttctttttttttgtttttaagataaatgtattttgagaaatactgtcaccactcatcaattaacttagaccaatatgtatataataaacttagcttcaaacaacatttatgtaatttactagaatgtataaacttgtattccatctcaaactttacaagctttactcttgtctttgcccaaacttatacacagtactctatatcttttttaaatccacaatttcacttctcttgacttacttctttgatggtctttttgcata

SEQ ID NO: 173783 - DNA, 1170 bp, Zea mays
  Clone ID: MRT4577_90071C.1
ctcgcgccgcgccgtgccccgtctgcttcgaccagccgttcccactgttcgacccttccgtgtccagcaccttcagggccgtcgcctgccccgaccccatctgccggccgagctccggcttgagcgtttccgcgtgtgccctgaaaactttccggtgcttctacctctgctcttaccgcgacaagtccataacggcgggttacagcttcaaggacactttcaccttcatgtcgcccaacggcgagggcgcgccgccggtcgccgtgtcggggctcgccttcggctgcggcgactacaacaccggcgtgtttgcttcgaacgagtccggcatcgctggcttcggccgcgggcccctgtcgttgccgtcgcagctcagggtcggcaggttctcgtactgcctcacatcgcacgacgagaccgagagcaacaagaccagcgcggtgttcctgggcacgccgccgaatggtctccgagcgcacagctcggggccgttccgatccactccgatcatacacagcccttcgttccctaccttctactacctctctctcgagggcatcaccgtcggcaagacgcggctgccggtcgactcgtcggtgttcgcgctcaagaaggacggctcgggcgggacggtgatcgactccggcacgagcctcaccaccttaccggaggccgtgtttgagctcctcaaggaggagttcgtggcgcagcttccgctgccccgctacgacaacacctcagaggtcggcaacttgttgtgcttccagcggccgaaaggtgggaagcaggtgcccgtgccgaagctgatcttccacctggcgagcgcggacatggatttgccccgggagaactacatcccggaggacacggacagcggggtgatgtgcctgatgatcaacggcgcggaggtcgacatggtgctcataggcaacttccagcagcagaacatgcacatcgtctacgacgtggagaacagcaagctgctcttcgcatctgcgcagtgcgacaagatgtgacgaactcatcacttgctagcttgtgcgtacgtacgcgctgcacgtgtgcgtgtgtatgactgtatgcatgcttctacggctctacatatgttgttagtgctaaataaaaaaatgttactgtccaaaaaaaaaaaaaaaaaaaaaaaaaaccagg

SEQ ID NO: 173784 - DNA, 298 bp, Zea mays
  Clone ID: MRT4577_90072C.1
ctgaaatcttcacttctaccaatctgtatatccgactaacatgtaaactttctgaaacggtactatttcatatggatggacgtcaaatcgacgaatcatgctctacatgacaggaccacaaccactgctgtctcaaattgaacatttcttatacactgcaatccatcttgctgttacatttgtagttcaccccgcactgattttcgcatacctgtgttaagctggttacttatcaacacatcatgactttcactctatcttacacgatcgatactacatcgaagttccatataatatc

SEQ ID NO: 173785 - DNA, 534 bp, Zea mays
  Clone ID: MRT4577_90073C.1
ttccttaagcagtggtaacaacgcagagtacttttttttttttttttttttttttttttgcaaattttattattgactggcgcaagacaggtgaatactgatttttctattgctgctttttaaaaaaaacagtgctctggcggagcacctgtcaagtgatcttccatacaagctgtcaactgatgacatcttcctcaccgttggaggcactcaagtcattgaggttgtcgtctcagtccttgcccaaccgggcgccaacatattgttcccaagaccaggctatccaaattatgaggcgcgtgcaggactgcacaacttacaagttcgccatttcgatctgattcctgagagagggtgggaaattgatatcgactttttggagtcgattgctgacaagaacaccaccgcaatggtcatcataaaccccaacaatccttgcggcagtgtctacacccgtgaacatttagccaaggcatggctgcttatctcactgaccatttaaatgaaattgaatttagtttaactagtcctcgg

SEQ ID NO: 173786 - DNA, 1059 bp, Zea mays
  Clone ID: MRT4577_90074C.1
ggaccctcgaggccggccgggctggcaaatgggacaatcaactcaagtcatcgagtccacagctcgcgcgcgcagccaatcgctctccctccggcctccacagcccaaaaccacctcggccccacttcttctctccgtcgccccctgtttgtccaacccatggcgacccacgccagcgacaatggcagcgggcacgcggagtggcggttcgctcgggcggcgaaggagggtgcgctggccgtggccggggacaagatgagcatccgggcggcgcggttcaagatcagcgcgagcgtggacgggcgcgacccgcggcccgtgctgccgcttgcgcacggggacccctcggtgttcccggccttccgcaccgccgccgaggccgaggacgccgtggccgccgcgctccggacgggcaagttcaactgctaccccgccggcgtcggcctccccgaagcccgccgtgctctggcggagcacctgtcaagtgatcttccatacaagctgtcaactgatgacatcttcctcaccgctggaggcactcaagccattgaggttgtcgtctcagtccttgcccaaccgggcgccaacatattgctcccaagaccaggctatccaaattatgaggcgcgtgcaggactgcacaacttacaagttcgccatttcgatctgattcctgagagagggtgggaaattgatatcgactctctggagtcgattgctgacaagaacaccaccgcaatggtcatcataaaccccaacaatccttgcggcagtgtctacacccgtgaacatttagccaaggtcgcagaggtagcaaggaagcttgaatactagtcatcgctgatgtgtatggaaacctgcttacgtcttgattgcccctccatggctgcttatctcactgaccatttaaatgaaattgaatttagtttaactagtcctcgcggagaccaaattgtgttctaagcatgtcttgatgtcatttaggtcgcggaggtagcaaggaagcttggaatactagtcatcgctgatgcccgcgtactctgcgttgttaccactgct

SEQ ID NO: 173787 - DNA, 2481 bp, Zea mays
  Clone ID: MRT4577_90075C.1
ttgggtacctcgaggccggccggggagatacacgcacgcaccgaacccaaccggacccaaccccaaagcagttggaattggaatcccaggcggatccaattctgccaattgcaagcaccgtcggccctggcgtcatcgcccaattacctctccctctcctccccacgccggccggagaaaccccccacccagcaccagttcccaactcctccccccacacactctatcctcctcgccgcctggggcacagtcacagagtatttcccccccattctccatgcatcgcacgagtgtctcctataaaaccccgcgcaacccccccgctccgacggcacgcacggacgacgcaccgcacactacccggcggtggaactcctcgcccgcgtcgctgctccggtctccgcgctgctagccgccgactgtaataactataacatttcaggtgtgcttctgaagggagatttcgttgaacaggatgaatgcattggcagcaaccagcaggaacttcaagcaggcagctaagctgctgggcctcgactccaagctggagaagagcttgctcattccattcagggagatcaaggttgaatgcacaatcccaaaagatgatggaactttggcatcctatgttggatttagggttcaacatgataatgctaggggacctatgaagggtggaatcagataccaccatgaggttgatcctgatgaagttaatgccttggcacaattgatgacttggaaaacagcagtagctaacataccatatggaggagccaaaggtggtattggatgtagccctggagacctgagcatctctgagcttgagaggcttacccgagtttttactcagaaaatccatgacttgattggcatccatactgacgttccagctccagatatgggcaccaactcacagacaatggcatggatacttgacgaatactcaaagttccatggttactcacctgctgttgtgacaggaaagcctgtggacctcggaggatcattgggaagagacgccgctactggaaggggagttctgtttgctactgaagctttgcttgcagagcatggcaaaggcattgcaggccagcgtttcgtcatacagggattcggtaacgttggttcctgggcagctcagctgataagtgaagccggtggcaaggtgattgctatcagtgacgtcacaggcgccgtcaaaaacgtcgatggcctcgacatcgcgcagctagtgaagcactcggcggagaacaaggggatcaagggcttcaaggggggagacgccatcgctccagactcgttgctcactgaagagtgcgacgtcctcatcccagcagcgcttgggggagtcataaacaaggataatgctaacgacataaaggcaaagtacatcatcgaggctgccaatcaccccacagatccagaggcagacgagatcctgtcaaagaaaggcgtcctcatcctccccgacatactggccaactctggtggcgtcacagtgagctacttcgagtgggtacaaaacatccaggggttcatgtgggacgaagagaaggtaaacgcggagctgcggacgtacatgacgcgcgccttcggggacgtgaagcagatgtgccggagccacagctgcgacctccgcatgggcgccttcacgcttggcgtcaaccgcgtcgcgcgcgccaccgtcctcaggggatgggaagcatgacctccctccgtgtcgtccgtgtgcccctccctgttgtatcctcttggtcttgggcccttgtttttctttggttaattattgtcgagatcaacggagatccgagaaaaacgggctcagttaataattccaagaagtgcgtcttcttggagataaaatagcggaaggagagttataataagtctgtaactgtaacccatagctgagatgctgtctgcaagcagcaatgccaatgccaatgccatctggttttcgtgcaaacgcggagctgcggacgtacatgacgcgcgccttcggggacgtgaagcagatgtgccggagccacagctgcgacctccgcatgggcgccttcacgcttggcgtcaaccgcgtcgcgcgcgccaccgtcctcaggggatgggaagcatgacctccctccgtgtcgtccgtgtgcccctccctgttgtatcctcttggtcttgggcccttgtttttctttggttaattattgtcgagatcaacggagatccgagaaaaacgggctcagttaataattccaagaagtgcgtcttcttggagataaaatagcggaaggagagttataataagtctgtaactgtaacccatagctgagatgctgtctgcaagcagcaatgccaatgccaatgccatctggttttcgtgcacgactttgggtcattttcgaatcctgatcactcaacgacagggtcggtagagatgaagctgtagacagccacgtccctgagcctcccactcaccacgcggtagctccg

SEQ ID NO: 173788 - DNA, 836 bp, Zea mays
  unsure (1)..(836): unsure at all n locations
  Clone ID: MRT4577_90076C.1
ngaatcccaacccacctggctgcaaccaatatccaagaatcatatccatatccaacttgccaatgtgccattgaccatcgcaatgcgtagcgctggtgcatcgatcctcctcttgcatcgaccgctcctccgtgccaagctgccaagcttctgtgcaccatcagtccagcagctcacagatccttcctccttcgcgcgcgccatgcacggccgcgtcaccgtcctgctagtagtagccgcagcagtgctactgctcgcgtcgtcggccgtcgcgcagccgtggccgagctgcgacggggccagcggcaactacctggccggcagcgcctacgccaacaacaccctgcagctcatcctgggcctccagacgaacgcgtccgactcgcccgcctacttcgcgtccggctccgtcggcgcgggcgcgggcgccgtccacgggctcatgatctgccgcggcgacgtcagcagcaacgactgcttcgactgcggcacccgcgcgtggcaggacgtgcaggctgtgcagccgctctgcaaccgcaccagggacgccgcgctcgccgacaaccagtgctacgtccgcgtcgccgccaccgacttcctcgcctcgcccaacaacaccggcctggtgagcgtcgtcggcggcgccagcatccccaggggcgtcgacgtcgcggcctacgacgccgcgctcaagcggctgctcaccgccaccgggcggtacgcggtggacaggtcggtcccgtcgtcgccggcgaagctgtacttcgcgaccgggcagttcggggggctcgaccccggggtccccaacatctggtccctggcgcaatgtgcggggg

SEQ ID NO: 173789 - DNA, 379 bp, Zea mays
  Clone ID: MRT4577_90077C.1
ccacgaaagacatcgtcaatcaagatgagagccaaatggaggaagaagcgggttcgccgcctcaagcgcaagagaagaaagatgagggccagatccaaataaacacctcgcacctcaacctgacttgactcatctcgcatgatgttacgacttcacacgcacaacgatactctggccgaagatgcgaactctaccttggcgcctctgggatgtcccgcaacgttatgagctgggatttgactttgggaactacgtcacggtggtggaaccccgcacttgagcggctgttgggcacacaatgaacattacggggatggggattatgacaattgggcggtcaggaaccaggcggtgttaggatcaaagacaatcagtcatg

SEQ ID NO: 173790 - DNA, 819 bp, Zea mays
  Clone ID: MRT4577_90078C.1
ggtattcatttcatttttatttgggctacacttcacaaagaggccgcgggttttttttttttttttttggctttgaattcagttgatctcagaatttccgtattgacgccgttcatctggacgatgaaatgtggcatacagccttccagaacgtagcgaaaagtgaatccagcagcctctatacagccgtgattgtgtttcgtaccctgttccgtgccacttgatctaaacccgactttcaagcacctccgtgactccagctaaataacccatttatgcggaggccttgaccttggccagagccttgcgctcttcgaatcgtcgctgcttcttgagtcggagaacctggaaacgctcgaagtcggtaagagccttccttcgctccatctggtcccgcttcttggcccagttggtctgctcccacttggagtcgatctcggacttctcccagagctttcggacaacaccagttcgggaaccgcggttcaggccctcaacaacgagagaggagaggagaaccttgttgaggggaacagcttgtcggggagtggcgaggctagcgttcgcggaagggccgtcgacgagaattcgcttgtggtcgatgatctcgacgatcgtggccaggtggccagcgaaggggtggtcgccgttgataacaacgactcggccaacctcaacgaggcgccagtttgaaccctcaatgactgcgtcgcccattgtgacggtgatcagttgtcgattatgctgtcccgttagttggttgtttgctggagccgcggaccttgaaatcgctaaggtctttttgatcccggccgccgg

SEQ ID NO: 173791 - DNA, 352 bp, Zea mays
  Clone ID: MRT4577_90079C.1
tttgagctgttttataactttccggtgcgcaaccacgggcgattaatggatgagtcgggggggaccctcaccgcagccaagatttgtggcttccctcgtctcgatccaagacttccaggagaaacattcagactctgaccctgtcacaaacgcgcttggacaccgaccgggacgggtaccactcgccagcaagccatatgttggagctggagggggtacgcttccttcttgggtgaccatcgacctgtctaccccgtgggctgtgaaccgctgccaacatcctcgaaagaaggaggaacagatgttgtgctcgtgtcatgctctacagtgaagctaagacaccattttctta

SEQ ID NO: 173792 - DNA, 174 bp, Zea mays
  unsure (1)..(174): unsure at all n locations
  Clone ID: MRT4577_9007C.1
gtacgtcggtttacattatcagatcacacacaggtcgagtaacttcattttcttatcccattttgnnaaatcaacccatcctcgntttccctccggtcttagcagccctctcaccccttcatggcccaagatcaagaatcggggatcaattgggttcgggcagggatccggaaa

SEQ ID NO: 173793 - DNA, 102 bp, Zea mays
  Clone ID: MRT4577_90080C.1
gccacgttgtatacgcggatcacggatcaccgtgctgctcgcccgctcattgcttgccttcagtctgcagagaacgcgatttggtctggtgttcgggaccca

SEQ ID NO: 173794 - DNA, 412 bp, Zea mays
  unsure (1)..(412): unsure at all n locations
  Clone ID: MRT4577_90081C.1
ctttcaacaaaaaacaaggntgccaatcctgaaacacataaagtgcgaacggcggcctatgttagcctgaatcctgaaccactgagagggcccgacacagactcattatgcccctgaaagaatattcactgaccttatatacaacacaagagaggggaaaaaacatactacggaagggaaactaaacgcgcccggactggctagcccgccctttattttaacctttgggaaatcccaaacagcgtttgttgtttttccaggaaaatgaataattttgctatagattaagaaacccccccctcccgcagcattccctttttgtttttttcctggaactatacttacattctttgtgggtcccccatttccctcaaagaacttttttttttttttataacgggccctctttttt

SEQ ID NO: 173795 - DNA, 658 bp, Zea mays
  Clone ID: MRT4577_90082C.1
ccccgaatcctgaaacccctcgcgtcgcgtgtcgtgctgatccagaactgcaaaattccccaacagatgaccatgaagcttcggttgcgatccatggacgcgcgcggcggcgtcgctgagacgcaccgcgtgcagctgacggacacggccgtactctccgatgtgaagtccttcctcgccgccaagctctccgcggcgcagcccgtccccgccgagtccatccgcctctccctcaaccgctcgcaggagctccgttcaccggacccctcggccaccctcgccgccctcggcctcgcatccggtgacctcctctatttcacgctctccgcagagttattatcgcagccatcgcctcctgaaatccttccccgtaaccctagcccggttacagcctcgatcgggcaaattgcttccggttccaaatctcctggggaggccggtggatcctcgtcactgcctcaaaatctacacatacagcctgtctgttcgtcggtgccgcaaaatctacacatagagcctatctcttcgtcgaggccgcgaaccctccacgtggagcctagtttgcccgtggcatctgatccgcccgatgtggtgatggcggaggccgtccacgcgcccaagagcttgtcgagccttgtgattgggattctcaagcggc

SEQ ID NO: 173796 - DNA, 459 bp, Zea mays
  Clone ID: MRT4577_90083C.1
acgcaataaacctcacctatagaagaaattctaaggaagacggcccaacatgtccaagattaccgtcgccggtgtgcgtgagaacgttgctgcgctcctcgagtacagcaacgaaaccaagaagcgcaacttcctggagaccgtcgagctccagatcggcctgaagaactatgacccccagcgtgacaagcgtttctctggcactgtcaagctgcccaccgtcccccgcccgaacatgagcatctgcattctgggtgaccagcacgatatcgaccgtgccaagcacggcggtgtcgacgccatgagcgccgacgacttgaagaagctcaacaagaacaagaagctcatcaagaagctggctcgcaagtacgatgccttcgtcgcctccgacaccctgatcaagcagatcccccgtctgctgggtcctggtctgtccaaggccggcaagttccccaaccc

SEQ ID NO: 173797 - DNA, 284 bp, Zea mays
  Clone ID: MRT4577_90084C.1
gaaaccgaacaattttgcatgatagtgatgaccttatgtacttagcgaatgctcggtgtaagaaaagtaagcaaagagggtatgctgccaacggggacctctgagggcccagcccaaatctgaacagcgcgcttcacttggtactggagcacgttgactcacttggccaaaaaacgaaaggaaacacacgcgagcctaccacaagacagacccggccattgaaagatactttttttatccattggagcactcccaagatagggggcatggatgaataacgccta

SEQ ID NO: 173798 - DNA, 263 bp, Zea mays
  Clone ID: MRT4577_90085C.1
gactcgaatccgcgagaccgggaaagaaaatggggcttaaacaataagcagagcgcttgacatgtacattacgagctttatgcactccagcacatgaccaaatttaaacaccaagcagacttgatccgagcagtggttggtgaacaaccggggggcgaagctcataaacactgccaagcttaaggtggtgagcgagcgcaccacctgacttgcaataacactaaaacgatggcatgctatgcacatgaaaaacgaatgctttt

SEQ ID NO: 173799 - DNA, 285 bp, Zea mays
  Clone ID: MRT4577_90086C.1
cactaccattcgggggagtgcataagatgggtttaaaaaaacccatggggagggaatggggggggcttttgaagacttgtattcaatacgacacaggtcatggtaaaaaagagcttaccggaaataagaaactgggtagcttggctacccatacacagaatagttacagtttcaactggcttgaagactttaatttcacacttcgtccaattgaattacctgaccaccaagaccataagcggaagttgaaaagagggtggagtaccgattcttcaacatcgaaag

SEQ ID NO: 173800 - DNA, 202 bp, Zea mays
  unsure (1)..(202): unsure at all n locations
  Clone ID: MRT4577_90087C.1
atttattcttcaatcgaagtagtacatgatcacttgatcaggattgntggtgtactcgatggcggggagatactctccccgagcgattacatcttaaacactcttatacatcattccatcctgctcggtccgttgctacctagacatggctcttttcttgattttgactccattgaccgaccaccttgtagagggggtgctt

SEQ ID NO: 173801 - DNA, 471 bp, Zea mays
  Clone ID: MRT4577_90088C.1
aaggcaacaaaactttcattaacccaaagggcgcccacccccccaaaacaaagggcgggcatgggaatggggaaacaaagcagggccggctcccatggctacataaacatggaaatggggggacaggtttttataacaggggaagaagacccacggtttaaactaaacacccaaacggggggacgaaaagctaaaaaaaaaaaggggccctggcccttttggcccccaccaatctaaaaaggctggcttctctggagggcgggcggggagaagggctggcagctcgggcccggaagcttaaaaacaatcttctggggggcctgggccttctgggggaaaacaggctgggccggaccaccatatccggacggcggggggccaaaagggggctttcccggggcaaacaggctatcctggccctttttatacggagcaacctgggggagggggggcttctggccctcttggttc

SEQ ID NO: 173802 - DNA, 325 bp, Zea mays
  unsure (1)..(325): unsure at all n locations
  Clone ID: MRT4577_90089C.1
ggccggcggctgccggggggggggcccttgtggcgcgacgccctacgtgggtcggggcgggcggcgtgcggtggcgccggttgctggcttgggttctgtcttnggggcgttctgtgcttgtccggtttttttttttcttttttgccctggcttttctttttgggggggggcccattgtgtgaatcaccggttcctcttcttctaggggggggggctatcgcggcgcggtcgtctgttgggtcaatctgacctgtctcacggcggtctgttcccagctcacgttcccttttggtgggtgggctgtccctcgcttggtgtcttctgc

SEQ ID NO: 173803 - DNA, 475 bp, Zea mays
  Clone ID: MRT4577_9008C.1
aaaaaagaaacacccccgtccaaggcggccaattcatttttttccgagacattaaaccaaacaaacagttttgcaaagcccccggaacaaaataccagtcaaatatgggtctttttaaacaacaacgctgcaacaggggcgggtttttttttccctggaaaaagcagcaggttgggagcacaaaaaccagcttccagcctttttttatcaactttgagaatcgaaacatagcgggggggcataacatttagagggggggcttaattaaaaacagcggcaatggcaatggcaggcatttttagcgcacaccccccggggccgggacaaaaagaacaacacggggggtcctaaaagataagctttcaaaaatcaagaacggcccagtcctggtaaactccccgacatcaggagacacccattagggggggagatcggatccgttttactggccctggggggcggattttttgggggc

SEQ ID NO: 173804 - DNA, 816 bp, Zea mays
  Clone ID: MRT4577_90090C.1
atgggtcgcggttctgcgcgcccctcctccaaggcgttgggaccccctgcagtcgacgcatcgggtaccctcgttgtcgacgtactgggcctcccctcggctaaggaggcgggcccccgatcaccgacctcggcaacggcgtccgccctctccttatggccgagactggggaggtcggggacgaccacgagcggtggctcctcaaccatcccgacgtcgggagccacgggcggctccgcgggcgaatcagcgacggccccggcgggagtcgacgccggcgccagcaacaggtcaggcgggcttggggccacgaccgcgtcagcagtctcctccgacacgatggtcgtcccgacagaggggtcggcccgggggacttgccccatggcaactcgtgccgcttgggccccccgctcgagggcgctttatgcggaggccagccaaccggcctggtgcgccgcggcaccggctgcagaggctagccccatcttaagggccttcctgggggccagactagtcgagctctgcctctgcttgctgaaagaaggagagaaggcaagatcaagacacacggaggaaaaaaccaaagcagaggtatcctcggatacttacccgctccggaccaaggccaatcgtgcctgtggggaggcccctcaggcctcggccctcgcaggcgctgccgagggtagccccgctgccgactccggcgccgcctccacctcgggcgcccgaggcgccaaaggggcggcccgcccaggcgtcgtcacgatggctggaggaccaacttcctgtgcagccggcacgggcgactgctcttag

SEQ ID NO: 173805 - DNA, 379 bp, Zea mays
  Clone ID: MRT4577_90091C.1
agggctaacccagaagttctgctcacgaacattaatggtcagaggcgtgaatataagctgaattatgctcactgttcaaacaagaaccctgtcgctaacattggtaatacgctacacttactcaatggggcgcaagatcagatacaacacctgtgtttgcactactatatacagagttgaacactctgctctctacttatacacatgcaaactaacagccagccgccacatactggcgccctcgctagagctgtaaagcgtaacgacaaccacaaggtgctggggaactccatgaccaggttcgtgaacgagccaatacccaaaacgtacagggactactccataaccatggcccaatatggactatagaacctgccgt

SEQ ID NO: 173806 - DNA, 402 bp, Zea mays
  Clone ID: MRT4577_90092C.1
catgaaaaaatatatataggggaggggaaaacccctctgctcctccttttgcgtccgttagtcgttgaagctggtgagtctcttgaaagtggtggtcacgggccttagttaggtagacaagttatcgtgatgcactgtggtgctgcctgaggagtctgttgttgctgttaagtagtactttgtggcgtttacggatgtcggggttcctctgtgtgttcgtcttaatgctcttgcttctcctggtcgctctggtactgtccctaagcctgtggagacggatcatgctgtgaaggccgacgacccggcggaggtgcttaagctaaccctaataccgttcctcacggccgagtgagatacctagattgatatcgctaggaaattagggagttacataaggaactc

SEQ ID NO: 173807 - DNA, 469 bp, Zea mays
  Clone ID: MRT4577_90093C.1
gccggccgtttcgaaataaggcacttacctgcagtcatttctcccaagccagtacccacagacctacgagcagtcgcacgcaagtgtcaagagacaaaacggtcgacatggctcgcacgctatctgccgtagcggtcgccgtggaggccgcggtgctgctgctggcagcgccggtgacgacctcggaggacgacatcacctgcggacaggagagctccgacatcgcgacctgcctctcctacgcccgcggcacggggaccggcccctccgtgccctgctgtaccgacgtcaggaacctctagagcgccgccagcaccgccgccgacaggagcgccgcctgcaactgcctcaagaacgccgccaggggtgtcatcgacctcaacgccggcaatgtcgccagtatcccctccaagtgcggctccttcatcccctacaccatcagcacctccaccgacctgctccagggtga

SEQ ID NO: 173808 - DNA, 323 bp, Zea mays
  Clone ID: MRT4577_90094C.1
gtttctttaataaaaaaaacagcatcatataacgaaacattcacgtcgataccaggcgcatcttactatacatgtgcactcataatcataatcttgaacaatgtcctcttcacactcacacttacttgcaaattaactctttctgaactctacatccatctatagacccacacatacaccaagtctcacaactcttagccctgctattagaacatacaatacttcttatacccattaataacgtttaacattaccatgggattcaaatttcctacaatttaactctttctagaaatatacgatattgatcattccatcatttg

SEQ ID NO: 173809 - DNA, 524 bp, Zea mays
  Clone ID: MRT4577_90095C.1
ccacttacctgcagtcaccactgcccaagccagttctcacagtcctacgagcaggcgcacgcaagtgtcaagagacgaaacggtcgacatggctcgcacgcaatctgccgtagcggtcgccgtggtggccgcggtgctgctgctggcagcggtggcgacgacctcggaggccgccatcacctgcgggcaggtgagctccggcatcgcgcgctgcgtgtcctacgcccgcggcacggggtccgtcccctccgagtcctgctgtagcgccctcaggaacctaaggagcgccgtcagaactgccgtctgagagtgccgccgcctgcgactggctcaggaacgtcgccagggctgactacggactaaccgcgggtgcactcgtaggcttccacttcaagagcggggtgagatttgaatacatactgaggtggttcaccgagtgtctgaaccagaccttcttcatagtccacgacgctaataggggcgactgattgatcgatgaaccatttcgaggtcgtcgccgggcg

SEQ ID NO: 173810 - DNA, 434 bp, Zea mays
  Clone ID: MRT4577_90096C.1
cgcgtccggagcttcatagacaacagacaactaactagcttcctcttccagttcccgactctgccgggagtctgcccgagaatgaaggactaaccgcaaatacactaaaggcagaaggcacgagctagcacacagtcctctgctgaggactgaggttgactccagctaccgcgctcagtgactgtgactgaccggcgataaagcagtagcagactagcagtagaccagctgctcaatcagaggaaagctttcacaccaccagcccaccaccatgctgagcacaacgtgggcatcgccgaatgcgacccccatccccttgtcttcggcctctcagacggcgacccggctccattccgccttcagccggaaccgaacgctccgccttgtcgcgctttccttcccgtccgcgccgcggcggaagcggaggcccagcc

SEQ ID NO: 173811 - DNA, 703 bp, Zea mays
  Clone ID: MRT4577_90097C.1
attggtacctcgagccggccggaatatctcgaagcctagtcgtctgttacttctctctccgccgacactcccctcacattcaccgccaccgacaattccataccgacctccgccacctctgctgatagcgagaaaaatgaaaggtaatcttgatgggccgataatcggcatcgatctctgcactacctactctatgctgccatagtatagtcagaacgtaccgtgacacagatcatagacgacaaccacggaacccgcatcacaacctcggacgtcgccttctccgactcctatgggctcatctcacatgcgaacaagaatgatgtcgccatgaaccccatcaacaccgactttgatgccaaacgtcacattgacaggagggttagtgatgcctctgcccagagagatattatattggggaccttcaaggtcattccagcgtccgaagagaatgctgtgataaatgatcaccacaagagggaggagaaactacttgcagccgaagagatctcctctatgtatctcatcaagatgcgggagatcgctgaagcttaccttggcagtatcgatcaagaatgctgttgtcacgatccctgtctatttcaacgactcgcagaggcaggccactaaggatgctgcgcatgattgctgagcctcaatgtgctgcatatcatcaatgagccaaccgctgctgctattgcct

SEQ ID NO: 173812 - DNA, 585 bp, Zea mays
  Clone ID: MRT4577_90098C.1
accactcccattcccgtacagagtcctacgagcagtcgcacgccagcgtcaagagacgaaacggtcttcatgcctcacacgcactctgacgcagaggacgacgagcaggccgcggtgctgctgctggcagcggcggccacgacctcggaggccgccatcacctgcaggaaggtgagctccgacatcgcgccctgcctctcctacgcccgcgacacggggtccgccccctccgcgtcctgatgtagcgacgtcaggaacctcaagagcgacgacagcaccgccgccgacaggcgagacgcctgcaactgcctcaagaatgccgccaggcccgccagcggcctcaacgccggcaacgccgccagcatcccctccgagtgcggcgtcagcatcccctacaccatcagcacctccaccgactgctccagggcgaactaaaacctagaccacgcgcgacgacggccggctgatcgatcgaccaaccattccgccgtcgccgacgtgcggatcatcgatcgtcgacatgaggatatctatcaatctacgccgtgacgatcgatgactacttgtctactgctatgtactact

SEQ ID NO: 173813 - DNA, 296 bp, Zea mays
  Clone ID: MRT4577_90099C.1
attcccgtctggagccactcttccttgattcatcactcctcccgttgggaatttatcttctagtctgccctcctcttctcatcgtcctttcttactaagccagtggcactttcccttgttgctctaactccctaacgtgtgtcggttctgtcttctagcatattctcctgttgctatcttggattcttacttatattctttcattcataattcctcacactttatcttctctccactgtctttttaaccaatctctattaccaattgtttgaatcaacagttccttttcttactat

SEQ ID NO: 173814 - DNA, 481 bp, Zea mays
  Clone ID: MRT4577_9009C.1
atttattagccttcggatgaccacgggttgagtgagcctgttttgggctgaggaggatacgacaccccacactaagccgaaccatcgcatgatcatcaggctgtacgcgaacgcagctaggactaggagatacatacgtcctgcgcccagtcgccatgatgagtggcacctacctctgtgaggccgaggcgccctcgacgctctctggaggctcctccacaacggtatctctgtcgagatcgttgtctcttgtgggctggagggagcaccatcctaaatctacggggctacttcaaacccgtgatcagcgagaaactccttgctacacaaggaggcgacgtggattggagaaggtagatagtcgaggagatgaatccgtgccaccaagagctaatcaaacaggcaatcggctactgagaagagcagtgcagggatatcaaggacgttccaaagctggatagcacgatcgggttgatcaaag

SEQ ID NO: 173815 - DNA, 424 bp, Zea mays
  unsure (1)..(424): unsure at all n locations
  Clone ID: MRT4577_900C.1
gaatgaatgaanattattggctttgctttgcttcaaaaaaaaaaaaaaaaaaaaaaaaaaaagggcagaacgaataaaaaagaaacaagaaaaaaaagcggcggcctgcctaagaggatccatgttttctagcgcgacctagctacaatttactggtcgtatattgacacctaaatgaatgggaatgcccgggggttaccaaccttaagactgttaaaacccatgcgtttcccaacttattgggtttgaacgaaaagcccctttcccaacgtgctttcaaacagaagaggcccctacatggcgactttcacaccccttgtacagcctcattaaccactgggactctccctgttacgcccaattaaacccgtacactggggaggttactagcaccgggtcctttacatttgttaccttcctttct

SEQ ID NO: 173816 - DNA, 799 bp, Zea mays
  Clone ID: MRT4577_90100C.1
ccggccgggaggccacttacctgcagtcaccactcccaagccagtacccacagtcctacgagcagtcgcacgcaagtgtcaagagacgaaacggtcgacatggctcgcacgcaatctgccgtagcggtcgccgtggtggccgcggtgctgctgctggcagcggcggcgacgacctcggaggccgccatcacctgcgggcaggtgagctccgccatcgcgccctgcctctcctacgcccgcggcacggggtccggcccctccgcgtcctgctgtagcggcgtcaggaacctcaagagcgccgccagcaccgccgccgacaggcgcgccgcctgcaactgcctcaagaacgccgccaggggcgtcagcggcctcaacgccggcaacgccgccagcatcccctccaagtgcggcgtcagcatcccctacaccatcagcacctccaccgactgctccagggtgaactaaaacctagaccacgcgcgacgacggccgcctgatcgatcgatcgaccattccgccgtcgccgccggccggatcatcgatcgtcgtcatgatgatatctatcaatctacgcgtgatgatcgatggctacttgtctactgctatgtactactaaataaaatctctccgtgtgtacacgtacgcttgcatgtgcatggtagcatgtacgtacgacgtcgtccatgtataagtgtgtgacgtgtgagacagagagagagagagagagacaggatcgatcgagagacggtcatgtccttttggctgtttggtttattcatatcacaacttttgagtgtat

SEQ ID NO: 173817 - DNA, 802 bp, Zea mays
  unsure (1)..(802): unsure at all n locations
  Clone ID: MRT4577_90101C.1
ggaccctcgaggccggccgggctcaggcctcttaccagcagtcaccactcccaagccagtaccgagtcctacgagcagtcgcacgcaagtgtcaagagacgaaacggtcgacatggctcgcacgcaatctgccatcacctggggggaggtgagctccgccatcgcgccctgcctctcctacgcccgcggcacggggtccgccccctccgcgtcctgctgtagcggcgtcaggaacctcaagagcgccgccagcaccgccgccgacaggggcgccgcctgcaactgcctcaagaacgccgccaggggcgtcagcggcctcaacgccggcaacgccgccagcatcccctccaagtggggcggcagcatcccctacaccatcagcacctccaccgactgctccagggtgaactaaaacccagaccacgcgcgacgaccgccgcctgattgatcgaccaaccattcccgccgtcgccgccggccggatcatcgatcgtcgtcatgatgatatctatcaatccacgcgtgatgatcgatgactacttgtctaccgctatgtactaccaaataaaatctctccgcgtgcacaccgcacgcttgcatgtgcatggtagcatgtacgtacgacgtcgtccatgtataagtgtgtgacgtgtgagacagagagagagagagacaggatcgatcgagagacggtcatgtccttttgggctgtttggnntattcatatcacaaaactttgagtgtatacaaagattatnntctgtggcagcttatctaaaaaaaaaaaaaaaaaaaggcccct

SEQ ID NO: 173818 - DNA, 186 bp, Zea mays
  unsure (1)..(186): unsure at all n locations
  Clone ID: MRT4577_90102C.1
tttgtacttcctaatatttccattgacgttgtgaacgatactactctggggctttctttgcaggtttatcaactagcntcccccttcttacataaatgtctgtcgtggcaaaacccaatgtgtatccaactataactcttgctctggctctcgctctttatatgcatcaagttaaatatacagaca

SEQ ID NO: 173819 - DNA, 870 bp, Zea mays
  Clone ID: MRT4577_90103C.1
gggaccctcgaggcctgtccggaggcccttaccagcagtcaccactcccaagccagtaccgagtcctacgtacgagcagtcgcacgcaagtgtcaagagacgaaacggtcgacatggctcgcacgcaatctgccgtagcggtcgccgtggtggccgcggtgctgctgctggcagcggcggcgacgacctcggaggccgccatcacctgcgggcaggtgagctccgccatcgcgccctgcctctcctacgcccgcggcacggggtccggcccctccgcgtcctgctgtagcggcgtcaggaacctcaagagcgccgccagcaccgccgccgacaggcgcgccgcctgcaactgcctcaagaacgccgccaggggcgtcagcggcctcaacgccggcaacgccgccagcatcccctccaagtgcggcgtcagcatcccctacaccatcagcacctccaccgactgctccagggtgaactaaaacctagaccacgcgcgacgacggccgcctgatcgatcgaccaaccattccgccgtcgccgccggccggatcatcgatcgtcgtcatgatgatatctatcaatctacgcgtgatgatcgatggctacttgtctactgctatgtactactaaataaaatctctccgtgtgtgcacgtacgcttgcatgtgcatggtagcatgtatgtacgacgtcgtccatgtatgtgtgtgtgacgtgtgagacagagagagagagagagagagagagagacaggatcgatcgagagacggtcatgtccttttggctgtttggtttattcatatcacaacttttgagtgtatacaagattattggaaaaaaaaaaaaaaaaaagcggccctctttttttat

SEQ ID NO: 173820 - DNA, 641 bp, Zea mays
  Clone ID: MRT4577_90104C.1
cagcagtcgagcgcagcgccgccaatcattccttcctctgccttcctctctctctccccctcccggcgccatctcgacgctcggccccccgcgggcgggatccgtcgccacagatccgctgcctcctccccgaggcctgcctgaccgcccctcatgctcgggtagcgctttccagtttcacccgttccccgtgggccactcgaccggccgacggagcggaagggcggccccggccgtgaccgcggcgcgactcgcgaccctcccagtcccagaagcggcgtgcggcgaccgggaccggctgctgctggtgaattcgcgccggcgaactgaattcaggcggcgaatcccctcctctggtcctgtctcgagccctcggcgtccgcgcctcctccgtctcgccgccgttctcgacgcccgccgatccaacaccgggtctgcccaacagcccaagtgtttcactagtgatggcagaagtccaggatggtcattatgattcaatgtcacaggccactgatagcttgcgtgttgaacctatatatgagtcgttcctatgcccgcttaccaaacaggttatgcgggatcctgtttctattgacagtggtgttacatttgaacgcaatgccattttgaattatttcaat

SEQ ID NO: 173821 - DNA, 967 bp, Zea mays
  Clone ID: MRT4577_90105C.1
actcctatagggcgattgggttcctcgaggccggccgggccgggaggccacttaccagcagtcaccactcccaagccagtaccgagtcctacgagcagtcgcacgcaagtgtcaagagacgaaacggtcgacatggctcgcacgcaatctgccgtagcggtcgccgtggtggccgcggtgctgctgctggcagcggcggcgacgacctcggaggccgccatcacctgcgggcaggtgagctccgccatcgcgccctgcctctcctacgcccgcggcacggggtccgccccctccgcgtcctgctgtagcggcgtcaggaacctcaagagcgccgccagcaccgccgccgacaggcgcgccgcctgcaactgcctcaagaacgccgccaggggcgtcagcggcctcaacgccggcaacgccgccagcatcccctccaagtgcggcgtcagcatcccctacaccatcagcacctccaccgactgctccagggtgaactaaaacctagaccacgcgcgacgacggccgcctgatcgatcgaccaaccattccgccgtcgccgccggccggatcatcgatcgtcgtcatgatgatatctatcaatctacgcgtgatgatcgatgactacttgtctactgctatgtactactaaataaaatctctccccgtgtgtgtacacgtacgcttgcatgtgcatggtagcatgtacgtacgacgtcgtccatgtatgtgtgtgtgacgtgtgagacggacagagagagagagagacaggatcgatcgagagacggtcatgtccttttggctgtttggtttattcatatcacaacttttgagtgtatacaagattatttctgtggcagcttatttatccctagggtgatatggaccaaaggtgtagacgtcgatttggcaccaaacactataaagaactacctagcgaaaaaaaaaaaaaaaaaaggcccctagggcc

SEQ ID NO: 173822 - DNA, 872 bp, Zea mays
  Clone ID: MRT4577_90106C.1
cattgggtacctcgaggccggcccgggaggccacttacctgcagtcaccactcccaagccagtacccacagtcctacgagcagtcgcacgcaagtgtcaagagacgaaacggtcgacatggctcgcacgcaatctgccgtagcggtcgccgtggtggccgcggtgctgctgctggcagcggcggcgacgacctcggaggccgccatcacctgcgggcaggtgagctccgccatcgcgccctgcctctcctacgcccgcggcacggggtccggcccctccgcgtcctgctgtagcggcgtcaggaacctcaagagcgccgccagcaccgccgccgacaggcgcgccgcctgcaactgcctcaagaacgccgccaggggcgtcagcggcctcaacgccggcaacgccgccagcatcccctccaagtgcggcgtcagcatcccctacaccatcagcacctccaccgactgctccagggtgaactaaaacctagaccacgcgcgacgacggccgcctgatcgatcgaccaaccattccgccgtcgccgccggccggatcatcgatcgtcgtcatgatgatatctatcaatctacgcgtgatgatcgatggctacttgtctactgctatgtactactaaataaaatctctccgtgtgtgcacgtacgcttgcatgtgcatggtagcatgtatgtacgacgtcgtccatgtatgtgtgtgtgacgtgtgagacagagagagagagagagagagagagagacaggatcgatcgagagacggtcatgtccttttggctgtttggtttattcatatcacaacttttgagtgtatacaagattatttatgtggcaaaaaaaaaaaaaaaaaaaaaaaaaaaa

SEQ ID NO: 173823 - DNA, 671 bp, Zea mays
  Clone ID: MRT4577_90107C.1
aaaacgagtcactgatgttcgacaggtacatcaactttgacaacgcaaaaggggtctcgatatgatcgttttcctgagacacgtaactatgttcggtgctgagctcggcaaacagggaatccttcttcctgacaggagcctcaaacacaaaccgtgaactgatacacgattctgcttctgagatgtctcttgggagcgagccagcgacattgacaacgcccttgacccgagtgctttcttctgcgaacggaccaactttggtagctttgaacaacgagatcactctttcaactttctcttgtctctccctcagctgcataatgtcgtaaaacgcttgtcgctgcaaacgtttcaagatctgtacggggttagggtcggggtccgtacatggcggcggcggcggcggcgggcggcggaaggggaggaggaagcgcttggcggagtcggccatgccggtggcccgattcaccgcggaggtccacgccgcctccatcatctttttccccgtcggccacgcttccctccgcgacactggaggagagcgtgcgagaggctcgactccactggatggatggatgcttcgaggtcgactgtccgaggaggaaaggcaggacaaacagcttctcgtgggatcctcggtggggaaatcgaaaacccggccggcctcgagg

SEQ ID NO: 173824 - DNA, 175 bp, Zea mays
  Clone ID: MRT4577_90108C.1
aggaagaggtggctgtactgctgatgaagcataacctctcttctctgccgcattggaaggaagggcacgcgtcctagaaacgaggccaggtgtcatgccaccgaagctcggcgccgccacgtcctccttctgcggccaggttgctttgatccttagactgggtctcaattgcaac

SEQ ID NO: 173825 - DNA, 427 bp, Zea mays
  Clone ID: MRT4577_90109C.1
ggcgattgggatcctcgaggccgggcgggggttaaccaatcttcccagtggaaggcgcgtgtctcgaatggagccttcccccggtggtggacctggtcctcctcgacgagaaggacaggggagaggtcaagctcctgctcaccttgactgaacgagctgatgctcaacaccggcctgatgacagcaatgagggggcaccttacagcacctggagttgatctatctgccctgggatgggatggatgctgcatcatatccaccgatagaagagaggataattacctactctactactaagaaaagaccatgatggtgaaatgctaccctctagccctatctatccatatatatgctcaagtcgacatgatcgactgccgatataacctaaactagacggaggcgaaccccgaccaaagaaggggcgagc

SEQ ID NO: 173826 - DNA, 371 bp, Zea mays
  Clone ID: MRT4577_9010C.1
gagttacaataactatgtcacagaccgcaaataatcacatcctttttcccgcgaaaatttcacatgtagtacgtgtttactctgtcctctacatgtatggaaatttctttatcaatatattgaagcctacagatatgattttccaccaagttacagatatcatggtcatatgacaccatgatcagattctatctctcaaccccctctgttgcgatgagaacttggctgggtgttttcggaggatacagctcccataacgcaaccgtggtgtccgccgagcatgaggccaacagtttgcagtcatgtgagaaagtcaccccggcacacgcagcgctgtgatacttcagaaccgctagagcatttcctttatt

SEQ ID NO: 173827 - DNA, 368 bp, Zea mays
  Clone ID: MRT4577_90110C.1
ctctcaatctcccattaccccatcggctcagcgtgctgcgacgggagacgcgcttcccaatccccaccccactctcgtgtcgtggcgaccactggggggctgtcgctgccgccctacgtaaggtggccaaggtcgtattagggcacttcgtccgccaccagttccacaaggcaagggacactttttttggtattacaagatcaatgtccaattattatgatgaccttcactacacttacccgatggagagataaatattatatgggtgaatccccattttttaccctggggaaacctaaccactaaggggatttaatgggttttctttaatgtttgggaacaataattgctttattttgacaactcta

SEQ ID NO: 173828 - DNA, 764 bp, Zea mays
  unsure (1)..(764): unsure at all n locations
  Clone ID: MRT4577_90111C.1
tggggtaccctncnggtctcggccgggtaggtcccaagatagggcctctccacatatgagaaggagtatatggccattctgctcgcagtcactcaatggaggtcatacctgcaattggccgagttcatcatatacaccgatcacagcagccttacacagttgaatgagcaaagattacatacgccatggcaacaaaaagtatataccaagttgattggtcttcaatacaagattgtgtaccggaagggctctgataatactgcagccgatgctctctctcggttacctcaacagacagctgattgtcgggccatttctcagtgttctccaacctggttacaggatgtgatcgacggttatgctaacgatccagcaacacagaagctcttgaccagtttatgtgtgcagtcagatgcctcgcgtccattccaattgcagcaaggtgtgattcggtacaaaggcaaggtttggttagctggaaattcagagttgcagcaaaaagtgatccatgcaatgcatgattcagccattgggggccattctggtatacctgccacatacagtcgattgaagcaactattctattggccgggcatgaaaactgctgtgcaagaatacgtgaggtcctgcacaatttgtcaacaagcaaagccggaacgtgttcggtatccagggttactccaacccttgccagtgccacctcaggcatggcacacaatctccctcgacttcattgaaggtttgcctcgttcagccaatgcaaa

SEQ ID NO: 173829 - DNA, 510 bp, Zea mays
  Clone ID: MRT4577_90112C.1
accctccagccggccgggtgaggttctcttaactggcaccctcatgtacactagaacgagaggtgagtcacatgaattactgattttcatgagccacctcaagagaaaattacattgaccgtagtggtaaccccctcatgcctcattacggttcggaaggagtggtgtactgtcagctcttaaaggtctccagcgttgctcacggtgctatccgacaaacaaacctcgaaagacctgctgcctgctgagatgacagagctacaatagatacaattcacctgtatcactcataaggcatagttagttttgttgcaaacaaagaatagtctccatcgtaaccttggctcgcactccaatccattcttaactcagcacataactcatccatgggcctgcgccctcacctgcattcattatccacgatttcgcgaaacaaatacccgacactgctatgggcattgctccgtacaatgctgaaaaacactgtcgaccgccggctaaaaaacaaaa

SEQ ID NO: 173830 - DNA, 390 bp, Zea mays
  Clone ID: MRT4577_90113C.1
aaaaactggccttgtagaatttggggcagcctctctcaagttgttccaggagggttatggacttgtccctacacaaacctttcttctttttgaacggatccttacacacggatcctggccctacctggacaccccctgcaaaactgctttcattacaaccctggggtgccccctacacaggacggggtgcggtatgtagttggacgaacatatgacctgggtcaaacttccttacaaacgcaggtcggttgaaaatgatgggtgaccacggtgctgtgttccaaaactacttactgcaccgccttgtttgttaggaggcactctgggactgaattgaatgcctattcgcaggggttgcccatgtagcgcccggatctgtgtgtatgtgtc

SEQ ID NO: 173831 - DNA, 840 bp, Zea mays
  unsure (1)..(840): unsure at all n locations
  Clone ID: MRT4577_90114C.1
cattgggtacctcgaggccggccgggtcaggagatgcatggaaagctctatttgatttagctggaggtcttttacgtgagtatgatcaagaagctacggtatctctgagcaaatttattgatcagttaccatcagtaatgaaccaggttacagaaggtgtgtctgaatttaaaccaacaccacctgaaaaccgtgaattctgcaagaattcctacagtgtacccaatacattattggtcaaattcactgtagatgctattgatgatacagacatagttgaagatgtcctgagaccccgcgttgattcaatcggtggacaaataaagaaggtcatactgtcaggaacacatctaactccatgtatacaggatgtcaaatggcaagttggttcagaatacactccagcagatgccattgcacaaggattgaaatcattggctcttagtgaaacaagagtcctctcaagaactattgctgattggtttacatccctttaaattttgagttattcaatacatccgttgaagtttggagttcttcttacaaaggaatgccttcatcaggtctcaacttcccattttgttgacgcagtccactattgtaatgagatgccctagccgtactacaaatatctgaccaagaattggtggtttggggcctacgtggatcgtagttgcaagctataaaaagcatcgaacccaaaagtccaagcagctcgatcctgtttgangtacggtgccagcaaaggcaagttggccaaaacatcctgttgcacgcagacaacccaacgngggtttctgcaggctggcgaaaagtaaggcgtacgataggaaatctggg

SEQ ID NO: 173832 - DNA, 743 bp, Zea mays
  Clone ID: MRT4577_90115C.1
ggatgcccctgccgccccacgcctgctcagccggagcggggttcctcgccaccgccaccttctcccacctctaccagctatgcaccagcgctgggcgctcggccctcaccacgggccaggctgcgcacgcccggatgcttgtgtccgggttcgtgcccaccacgttcgtctccaactgcctcctccagatgtatgcccgctgcgggggcaccgcccacgcgcacggggtgttcgacacgatgccccaccgggacacggtctcgtggaacaccatgctcacggcgtacgtgcacgcaggcgacaccgacacggccgcgtccctattcggcacaatgccggacccggacgtcgtgtcctggaacacgctgatctcgggctactgccagtgcggcatgttccggaactcggtgggcctgtctatggagatgtctcgccgtggtgttgccctcgacaggacgacgctcgctgtcctgctcaagtcatgcggtggcttggacgacctggcgcttggtgttcagatccatgcgctagcggtgaagacgggcctgaagacggatgtccgggccgggagcgctctcgtcgacatgtatggcaagtgcaggagcttggatgacgcgctgcgcttctttcatggaatgggtgagaggaattcgggctcgtggggtgcggcgatcgctgtgtgtgttcagaacgagcagaacgcacgggggatggaactgttcgtgcagaagcagaggttgggg

SEQ ID NO: 173833 - DNA, 438 bp, Zea mays
  Clone ID: MRT4577_90116C.1
gaacacacaacggcgagactgacggtacgttgcttagaacgttcaggaaatccggggaatcactgaacctgggaagattaagtattctagagcacactattctaaacagctgaacaaacatagtggatatgtacttgcccatcccagagcataaatgaatgccggaactaaaccggcaacaccctgaggatattgataactgctctaaagccttgttccctccttacgttcaacgtccatgacgaacctagcccagacgctggacggggtcatatccatctgcgttacgtacttgggtttggtcagagacccattcatgtgcatataatcgccgacgaacgtgaggaagaactttagctcgtcataggtgcgcacgcccttgagctcgatgggaaataacagccccccgatccctgtgaaaggggacaccatgtgtac

SEQ ID NO: 173834 - DNA, 629 bp, Zea mays
  Clone ID: MRT4577_90117C.1
gccctggccatcgcggagctcccgctctactctgttggccacagcaacggggcactgcttcagctgctagtgggaagctacttctcagaaaggataccagaggctaatgccattgtctcattcaacaataggccggcatcggaggctgtgccttactttgaacagatagggcccctttttaggcaactgatgcctatgatggaggcctcgcctgtttactcgatggccagaaatgcatcaggatatgcatggaaagctctatttgatttagctggaggtcttttacgtgagtatgatcaagaagctacggtatctctgagcaaatttattgatcagttaccatcagtaatgaaccaggtttcagaaggtgtgtctgaatcaacaccacctgaaaaccgtgaattctgcaagaattcctacagtgtacccaatacattattggtcaaattcactgtagatgctactccatgtatacaggatgtcaaatggcaagttggttcagaatacactccagcagatgccattgcacaaggattgaaatcattggctcttagtgaaacaagagtcctctcaagaacaattgctgattggtttacatcccttttaattttgagttattcaatacatct

SEQ ID NO: 173835 - DNA, 1301 bp, Zea mays
  Clone ID: MRT4577_90118C.1
aggccagaatatggtgcttggcgggtgctgctggcatggttcttaaggcgataaggcaagataaggcgttggaccaccgcctagacacctatctttttcaatacagacatctatcagtccagagtaaagtggcagtggcaccaatactcaggccaacatctaatcgataagagggccactatcagccaaaaaagggaaaacagaataatatttcttttccaagcatccaacaaacaatttgtgtttgaagctgatttcggtctaattgtgctttcctactggcctttggaagttacactgtcttaatagtatatttgttttatgcagatagggcccctttttaggcaattgatgcctatgatggaggcctcgcctgtttactcggtggccagaaatgcatcaggagatgcatggaaagctctatttgatttagctggaggtcttttacgtgagtatgatcaagaagctacggtatctctgagcaaatttattgatcagttaccatcagtaatgaaccaggttacagaaggtgtgtctgaatttaaaccaacaccacctgaaaaccgtgaattctgcaagaattcctacgcgtccgcacagcaatggggcactgcttcagctgctagtgggaagctacttctcagaaaggataccagaggctaatgccattgtctcatccatcaataggccggcatcggaggctgtgccttactttgaacaggtatttagtctgggcttcattaccttatgcttaatgggtgtgcatttttctgtttcacattaatgtttccctgcataagagtagcaagttgcagatgctgattagcaagcgtagaaatgagtacacttatatatggaacaggagaggaattgatactgaacttctaattaacttttgactagaccaaatctcgacctaaaattagtttgttgggatacaagttgtggttcaactcttcttgctagttagtactgtaggctaactgagtgccagtctgtggttgtgtttgtgtgagtagtgaacagttgagtatctaaaatttgatgcccttctttttctctcaaacgtgtaggagggcatcacatcattgcattaagaagagagagagagaggtccaaacaaaaaacaaccaataaaaacacatggcactcatccaaaccacacaaacactaacatcaagttttcaaacgcgttacagtaacattataatcaatccaacaacagagcgcaccaagcccctaacaccaccgaaagtgcccaggcgcccctgcatctctcgatagctgaaatttctccattg

SEQ ID NO: 173836 - DNA, 436 bp, Zea mays
  unsure (1)..(436): unsure at all n locations
  Clone ID: MRT4577_90119C.1
cctccctctgagccggagacaganccaaacttgcttaatggttgcaatactgcagcgtctgctatgctgttttggtcacattgcacttaaattctgttcacttttctgaaatcgcattagtagtgacaagcaccatgttctcattcagagtaaaggcaatatatgacgtgtcaaacgacccaatcgtttactttcgtctagctcgaatggcatgtgcaaatacttatattttatgttaaacagctttccagtctgcttaccactataggcaggtgcacttgatggtttatggcatgatatatcataatgtatggactaatttggaatattcaacatattttaaatcaatgtgtcctttgtattacctnttttacagagggttgttatgttcatgagaaatggagattgggggcttttaactgtccatatttactga

SEQ ID NO: 173837 - DNA, 472 bp, Zea mays
  unsure (1)..(472): unsure at all n locations
  Clone ID: MRT4577_9011C.1
cccccgtcggcatgggtgcctcctgatgcggcggccctccttttttttttctctttaaacaganggaaaaccaattttatacaggagatatttctgaggaccgtatcgagccattaaacaccgggtcaactaaaccttgaccttgataaggacacaaccggtcgacttacacccctgtgcgccggacatgagaccaccccaacccattcccttcagtgttggtggcaacaagaaaacacccaacgagacgacactgagtccacaggcacagggggggcacgggacgcgtataccacggacggacacaccaaaccaaaatagcacactgccgtcgtattacacacatcttttgcggggagcttccgggcgtggtgcacgtggaagccgcgcttacaggagctgaatgagggcgcgcgcgtgcttcttcttgggcacgccgacgagggaggcgttttcgacaagggggccgcaa

SEQ ID NO: 173838 - DNA, 1797 bp, Zea mays
  Clone ID: MRT4577_90120C.1
gccagcacaccaacgaaatacctccaaaccgtccaaatgtatttgagctatacgcctataacgtggaattacaatgtggcaatataaaacattcccagatttcctatcgcacgcctttactttcgccagcctgcagaaacccccattgggctgtctgcgtgcaacagatttggccaacttaaccttgctggcaccgtacctcaaacaggatcgagctgcttggacttttgggttcgatgctttttatagcttgcaactacgatccaagtaaggccccaaaccaccaatcttgatcagatatttgtagtacggctagggcctgcgggtgagcatgaccagctcagcacagcccaaaaatgcactgctcttatgtgccatacataatacattgtatccttacatctcattacagtagtggactgcgtcaacaaaatgggaagttgagacctgatgaaggcattcctttgtaagaagaactccaaacttcaacggatgtattgaataactcaaaatttaaagggatgtaaaccaatcagcaatagttcttgagaggactcttgtttcactaagagccaatgatttcaatccttgtgcaatggcatctgctggagtgtattctgaaccaacttgccatttgacatcctgtatacatggagttagatgtgttcctgacagtatgaccttctttatttgtccaccgattgaatcaacgcggggtctcaggacatcttcaactatgtctgtatcatcaatagcatctacagtgaatttgaccaataatgtattgggtacactgtaggaattcttgcagaattcacggttttcaggtggtgttggtttaaattcagacacaccttctgtaacctggttcattactgatggtaactgatcaataaatttgctcagagataccgtagcttcttgatcatactcacgtaaaagacctccagctaaatcaaatagagctttccatgcatctcctgatgcatttctggccaccgagtaaacaggcgaggcctccatcataggcatcaattgcctaaaaaggggccctatctgttcaaagtaaggcacagcctccgatgccggcctattgttgaatgagacaatggcattagcctctggtatcctttctgagaagtagcttcccactagcagctgaagcagtgccccattgctgtggccaacagagtagagcgggagctccgcgatgtccagggcgctgaggccggcctccgggagccccgacgcgagcagcgcgtcgtagcaggcatggaacctctggaatacctcccgcgcggcggcctcgtggtcgaaggtgacgttgtatggtacgcacacgaccacaaagccctccagcgccaggagctccagcaggtagccgtaggtgacctcggggacggcgccgatgaaggcgccgccgaggaacttgatgaccgccagcgggcgtcgaccgcgcgggggcgggaagatgaggcaagagtgctcccgcatgtacggcttcctcatcggtggggccgtcctgggactgggagccccgagcatggccagcgatccatcggggctgagcgacgcgcggcaggggaagaatcttctcgatggtgtggcccggtgggcgcggccacgggtagcaagggggcgtgggcctcgtgccgaattttcccgtgtcggggttggcgcggcgacgggtagcaagggtccgtgggtgcgcggcgcgataggcgaccggtgcagatcagaagaggtgagccgccgccatagaagatagcagatgcagcgcggtgagccggtgaagtg

SEQ ID NO: 173839 - DNA, 205 bp, Zea mays
  Clone ID: MRT4577_90121C.1
cgcgtccagtggaggcggtgtccaatgcctgtggaacgctgtgtactaaacggacatcagccccaggtgttcatccactccgttcactcctctgtgctctccgcggtcaggaacttcggcaacttcatgaaggtgctcatcatccaggacaagatcagcagagctctgagtccgtcggtggatgacatcaccaagtaggcagaca

SEQ ID NO: 173840 - DNA, 158 bp, Zea mays
  Clone ID: MRT4577_90122C.1
ctcgatcgcgttccctgtaacgccaccactaccgtcaccgccatggctcgcccggatcgtcaacatgtcatccgccctgcgtgtcggcatcacattcctatccttcgtatgcgtctcttttgggctcgccaaagtgtactactgtgagaaaaatctgg

SEQ ID NO: 173841 - DNA, 970 bp, Zea mays
  Clone ID: MRT4577_90123C.1
ccaacaagcaccacacactctgccggccccagccctccttgcctcgtgcgccgaggcgcccgcagcaacgcaaaagagctcgtcggccgcatgcgcatccgacggcagcgaccagcagggcccgtcgtcccactggctgacgccgcgcgcgcagcaggcatactcctccaagctcctccaggcgctgcgcctcgtgcgcggcggcactggcacacccacctgctccgcctccgccccggcggtgcgcgacgcggcctaccgcgcgctggccgtggcggcgcggggtcggtcgcgctggagccgcgccatcctggcacgcagccgccggcgccgggcgctcctccgcgcgcgccgaccgccgcccccgacgccaaggcaccgtcagcggcggcatcagcagcagcaggacgagcggccggcgggagggctggctggcagggccaaggtgctggcgcggttggtgccagggtgccggagcctgtcgctgcccgcgctcctggccgaggtgtccgactacgtcgccgcactggagatgcaggtgcgcgccatgggccagctcacgcacgacctcgcgtcctcgtcttccgcgccgacgacggcgtcaacgatgattgctccgccctagctcggctcaggcgctcagctccttctcttggaatggatttgggtggcaatggaaatgggagatgcctgtacatttcaactagctgttagagttgatcgatcgattttgcttggctttttttggattggttttggacaatatttgatttgatctgtctcttgctttgcttaaactgtaaggtctcctttggtcttgttatcatttgctaagactggcgctaaagaagtcgtgtaagctgaatgtgaagtcgtgtaagctgaatgtgaaatgatgcttcacaagtgtaaacgtgtgcgatgtttgaatgcaaaagcaagcaagtaaccaaaatggctgcattaagat

SEQ ID NO: 173842 - DNA, 587 bp, Zea mays
  Clone ID: MRT4577_90124C.1
cattgggtacctcgaggccggccgggatcagaactcagaaggcctcagtgtcacagctcacaagagcccgtcgtcagtcgtcacactagctcgtcacaacctagaaggacgcggcagtacgtacgtacgaacgtacgtacgcatggcgccctccgttatggcgacatggcgccgtcggccgccgccgccgtcactactccattccaaaggctcgtgtccgccgccggactccccgtcgcctgctggtcctggtgctgctgctccaccggcggcggcttccgcgacgtccgcagcggcgaaaggatcatcaggcgcatgcagatgatgaagcagatcgagatcgactagtacctgctgctgcgctccaactggcggctgccctgcctcgagctcatcatgctcatcagcaaggcggccggctcggtggtgtaccgccagaacgcgaggacccccgggcacgacgacggcaggcgctacaaaagatattctattttttgacactgtatatctctcgtagcatagacaactaataatgttattagctcactgtcactgtttgacggaaaaaaaaaaaaaaaaaagcggcc

SEQ ID NO: 173843 - DNA, 800 bp, Zea mays
  Clone ID: MRT4577_90125C.1
ttgggaccctcgggccgccgggacatcagaactcagaagaggctcagtgtcacagctcacaagagcccgtcgtcagtcgtcacactagctcgtcacaacctagaaggacgcggcagtacgtacgtacgaacgtacgtacgcatggcgccctccgttatggcgacatggcgccgtcggccgccgccgccgtcactactccattccaaaggctcgtgtccgccgccggactccccgtcgcctgctggtcctggtgctgctgctccaccggcggcggcttccgcgacgtccgcagcggcgaaaggatcatcaggcgcatgcaggtacccaaggtgggctcgtggtactatgatgtgtcttcagacattcacgactcaaatacggatgagacgcggcctctccagaaaaatcagagccatcaacatgaggcttgatggcatcattgaaaacaaggataaatacaagatagaggattccaatacgaagacaggtgtgacatggaagccttctacctcgacatctatacgctacactcatagaaagctgatttggtttcttttatgctgtttctggacaaactgccacgtccgacaagacagaagcgaagcgaagcgaagcaaagccgaaagtgacgatcccagtccagttcatcgggctggcggcctagcccattcagcatgcacggcccaacattcccttccttccccgggcggcgggggaggattccttgccgtctcccgctcttcaccgggcgctttccgcgaaacgccaaccaattcctccgtcgatcaaaaactgcccct

SEQ ID NO: 173844 - DNA, 663 bp, Zea mays
  Clone ID: MRT4577_90126C.1
ctgtgcggccctcgaggcggcgggccgggacactagctcgtcacaacctagaaggacgcggcagtagtacacgtacgtacgcatggctccctccgtgatggcgacatggcgccgtcggccaccgccgccgtcactactccattccaaaggctcgtgtccgccaccggactccccgtcgcctggtcctggtgctgctgctccaccgccggcggcttccgcgacgtcgtccgcagcggcgaaaggatcatcaggcgcatgcaggacacgtgtggccggtcgagggcaccaaccagtccgggacgacgacgacgacgacgctgttgtacctgcagccgctgctgctgagcatcatggacgatctgcagatgatgaagcagatcgagatcgactagtacctgctgctgcgctccaactggcggctgccctgcctcgagctcatcatgctcatcagcaaggcggccggctcggtggtgtaccgcgagaacgcgaggacccccgggcacgacgacggcaggcgctacaaaagatattctattttttgacactgtatatctctcgtagcatagacaactaatgttatagctcactgctgtttgacgacgtttgcatttttctatcgctaatttatgacattattaaaaaaaaaaaaaaaaaaggccccta

SEQ ID NO: 173845 - DNA, 244 bp, Zea mays
  Clone ID: MRT4577_90127C.1
atgcacttcctttcctttatagtgacaaattcacattcattgtcgcagccgtcgaatcgacattttaatcacttaagtaactgggattatttattgctagatacgtgtcatattgttcagacatggcatcacctagaccatttatgccagtctactactttggtggttggaagctgaatctgccttctacatgaatgctgtacgatttcatatctgtctgacaaaaatacgatgagctgctgat

SEQ ID NO: 173846 - DNA, 949 bp, Zea mays
  Clone ID: MRT4577_90128C.1
cattgggtacctcgaggccggccgggggtagcggttagacgagccgtttaaataggtgtcaagtggtagtgcagtgatgtatgcagctgaggcatcctaacgaacgaacgatttgaaatcagaactcagaaggcctcagtgtcacagctcacaagagcccgtcgtcagtctcgtcacactagctcgtcagaacctagctagaaggacgcggcagtagtacacgtacgtacgcatggctccctccgtgatggccacatggcgccgtcggccaccgccgccgtcactactccattccaaaggctcgtgtccgccgccggactccacgtcgcctggtcctggtgctgctgctccaccaccgccggcggcttccgcgacgtcgtccgcagcggcgaaaggatcatcaggcgcatgcaggtaacctcaacgtcagcttgatcacagttcacagctcgttaattagttttagaaaagaccttattagatatataggatcggaataggagtcgatctgtatccgtttctcatgcaacacacacaacaatgcaaggacacgtgtggccggtcgagggcaccaaccagtccgggacgacgacgacgacgacgctgttgtacctgcagccgctgctgatgagcatcatggacgatctgcagatgatgaagcagatcgagatcgactagtacctgctgctgcgctccaactggcggctgccctgcctcgagctcatcatgctcatcagcaaggcggccggctcggtggtgtaccgcgagaacgcgaggacccccgggcacgacgacggcaggcgctacaaaagatattctattttttgacactgtatatctctcgtagcatagacaactaatgttatagctcactgtcactgtttgacgacgcttgcagttttctatcgctaaatttatgacattattagcttctaagtcaaaaaaaaaa

SEQ ID NO: 173847 - DNA, 380 bp, Zea mays
  unsure (1)..(380): unsure at all n locations
  Clone ID: MRT4577_90129C.1
aggaaatcgtcctgttcgccgcagggatggtgttcttntggggcgacgacgtacgacgtgcaccggtccatcaagaacaacgagccgccgccgacaagggagcagatggaggcgctccaggactacatcaactccaagaatccaagaggccctccaagagattgaggggaggccctccacgaatccaagaagtagtgaggatcctccaggagatagaaggggggcaacaagcgggtgcgtgctatgtgctcgacgatatctcactgaggacttctggaaactggattgtgtataagaaaccagtaaaattaaggctgtctggttgtaattgtaaatcagtaaatggctgtgtaattatgagactagttgagcatgtttcg

SEQ ID NO: 173848 - DNA, 701 bp, Zea mays
  Clone ID: MRT4577_9012C.1
cctggccgggatcttcattttccggtcgcttgctacactctttttccctcttctttacagtcttgtgtatttcctaacagctttgaaagaaatcattatggatctcaaggatcttgcacccgttgcaggcgccgccattgcaggcgttactgctgctgccgcatacatcgacgccaaatatcacatctccaaagatatcgcaggaattcgcggtcaaaaagccgcagcgcgtggaatagagaagaactctcgaggcaagggccaatctctctggtaccaattcgaaagccaagttcgccgtctcccctcgaacgaagagtgcatctggtctcgtaacggatgctacacctgggccgaaacctacgcgaacgcctgtcgctatggccaatacctccaccagcatggcgtcgtgcccggacagctcttcgccatgtacatgatgaaccgacccgagtttctgtttgctcatttgggcagctggagtataggaagtgccccggcatggatcaactacaacttggcgggtgactcgctgtttcactgcttgaaagtaagcggtgccaaggtgatacttgtcgacgaagaccaagagtgcaggcaaaggatagaagatatccgccaaaagttggaggaagagctcggcatgactatcttgattctggacaacaatctaaagggcgagatttcgaggtcggagccca

SEQ ID NO: 173849 - DNA, 294 bp, Zea mays
  Clone ID: MRT4577_90130C.1
ctgatatcatggacactgattggcctgagaggtaccgagcaatgaccagtgcttactatctaggagctgtggaggcgttggtagcttactatttcactaacatggtgacatctcagaatgtggcaatggtggtgaacgagcttctggaccatgctctcttggacatagtcgggatgctcattgccaacatgactgaccttcagcacctgcgctctgtcgccgctgagatgctacacgctctgcacagagcgagggtctgttcttcatctgatacctctgcgctcgatgccacaa

SEQ ID NO: 173850 - DNA, 1295 bp, Zea mays
  Clone ID: MRT4577_90131C.1
cattgggtacctcgaggccggccgggggctcagaactcagaaggcctcagtgtcacagctcacaagagcccgtcgtcagtcgtcacactagctcgtcacaacctagaaggacgcggcagtacgtacgtacgaacgtacgtacgcatggcgccctccgtaatggcgacatggcgccgtcggccgccgccgccgtcactactccattccaggggctcgtgtccgccgccggactccccgtcgcctggtcctggtgctgctgctccaccgccggcggcttccgcgacgtccgcagcggcgaaaggatcatcaggcgcatgcaggtaacctcaacgtcagcttgatcacagttcacagctcgttaattagttttagaaaaaaccttgttagatatataggaataggagtctgtaattctgtatccgtttctcatgcaacacacaacaatgcaaggacacgtgtggccggtcgagggcaccaaccagtccgggacgacgacgacgacgctgttgtacctgcagccgctgctgctgagcatcatggacgatctgcagatgatgaagcagatcgagatcgactagtacctgctgctgcgctccaactggcggctgccctgcctcgagctcatcatgctcatcagcaaggcggccggctcggtggtgtaccgccagaacgcgaggacccccgggcacgacgacggcaggcgctacaaaagatattctattttttgacactgtatatctctggatagcatagacaactaataatgttattagctcactgtcactgtttgacgacgcttgcatttttctaccgctaatttatgacattattggcttctaagtcatgaaaaacagccgacagaagttggggcctttgctcttgaaataaagaggctttggctttttagggtagggaaaggggcgccaaacaaacttcttctcttctcggttgactcatgcttattggttgccatatgccttcatagtggagttgggagttatatttgggggcaatgttgggtcttgggctttccatttgctagttcaatgccaaatgatgtttccatacaaaatatgaaaaaatgtgacatattgcatttttctgtcgctaatttatgacattattggcttctaagtcatgaaaaaaatatgaaaataacttttacaatagccgacagaagttagatttggccacgctaacttccatcggctcacgaacgaccaacggaccatcgcaagccaataaaaagttagcacaactaaacctaacttttctcggctgcctatttaactaat

SEQ ID NO: 173851 - DNA, 1416 bp, Zea mays
  Clone ID: MRT4577_90132C.1
atgtgggccaccggacaggtcctgttcactgtccggaccgaggaaaacttccgcacagagaacgttaagttcaacgtcgtggaggttaacctccccttcaatgccatcattggcaggccagccctataccggttcatggccattgcccattacgggtatttggtcctcaagatgttgtccccagctggggtcctcaccatgcggggcgaccgcgctactgcacttgcggtcgtcgagaagctgcacgccctggcggcagaaactgctcgcccggacaacggagggagggacccctcgacttctggtaccaaggcgcctaccgaggtgccaaagatgcctaggatccccagggaggtgattgagcaccatctgaagatccaccctaacgccaaactagtgagtcagaaacctcacagacagtccattgagcggcaagacttcatccgtgaggaggtccggaagctgcttgatgctggcttcatcgaagaggctcatcaccccgtatggctggccaacccagtcatcgttccaaaggcaaacgggaagcttcgaatgtgcattgactacaccagccttaataaggcttgtctcaaggacccgtatccacttccacgcatagatcaaatcgtggattctgcctacgggtgcgacctcttgtcctttctagatgcttactctggtttccatcagattcagatggctagggaagataggaagcataccgcttttgtaacagtggatgggctttactgctatgttgtaatgccctacggtctaagaaacgccttgccaacatttgtacgggcgatgagtaagacctttggggacctgattagagacaggatagagatttatgtcgatgacatcgtggtcaagactaagaaagggtcgactctagtggaagacttgaccctggtctttgacaagctgcgggcaacacgcacgaagctgaaccccgacaagtgtgtctttggtgtctccgcagggaagttgctgggattcctgatcaaggacgtccagaagcttacggggtccttggccacccttagccgcttcatctcacggctggctgagagggcgctacccttcttcaagctcctgcggaagtccggcccattctcttggaccgaggagacagagcgtgccttccaagagttgaagcagcaccttgtgtccctaccaatactggtagctccggagccaggggagccgttgtacttgtacattgcagcagctgcagaggcggtgagcatggtgctagtcgtcgaaaggacagagcaacactcccaggggagtcaggaggttcccctaggagaaggtggtggtccgaccgccacggaccctgagagctcggggacaaccgtaggggtccggaccatacagaggccggtctactacgtcagtgtgacactatga

SEQ ID NO: 173852 - DNA, 435 bp, Zea mays
  Clone ID: MRT4577_90133C.1
cactacagaagttctgtggcatgcccgcgcacgtaagctaggctcgtatcctgtggccgcccttccttttttttttttttttttttttttttttttttttttttctgagggataatcctgttcagatcaccaagacttgactgtttgcccatggacacaatttgactaatgccctctgcccacgataacactaattcgtgcaaagccgggaggcacacaattgatttctttggccacaaatgatatcatttgccttttaattgatagggatttccaggtccacacaatgagcactataagaagggccagtgctgaccagactgtcctcaccgttaagggcatgagcctttggaaccagacaagtggtcaagcttgatgcatattaggaggtggccaatgcatatggccaggccaaggcccaaaaggatcccacct

SEQ ID NO: 173853 - DNA, 322 bp, Zea mays
  Clone ID: MRT4577_90134C.1
cacagacataggtacgcggccacccagagagactcttgctcgcttttcccatccttcttcctcggcttcgtcggggggcgatccgtccccccctccagcgatggcgaattcaaggatggacatgaccaagatcgcctgcgcctcactcaccgtcgccctggcgggcacggcggcgcttgccgcggaagcctgcggttccggcgccaacataagcacctccgtctttgcacccggggactgcaccctccggtgctacatagactgatccttctgacgatgcttcatatcctgagccaccctaccacggtcggccgtaagacgt

SEQ ID NO: 173854 - DNA, 132 bp, Zea mays
  Clone ID: MRT4577_90135C.1
attcggtgacggccgttgatgaggagcctgagttcaccacgcttgaatccgcacccatactactgctatctggccacgtaaagtaagtgtactgaccgccgttgtacatagggaagacaggggacaccgtgg

SEQ ID NO: 173855 - DNA, 311 bp, Zea mays
  Clone ID: MRT4577_90136C.1
cccaggggagaggttaaaaagggaggggccgacttttacggggtccaaaaaaataaccaccacaaaagttccaaccaaccacaaataaagtttaagggggcacaccggaccaactgacgataacttttgggaggaactgggccagccagcaactggagcacacttaaaactgacaacaaaccggttagtccacctcctccatcttggggccagggccgccatttccggcaggggcattcttgttcatgccggcagggccggccatgttttcacccgcgccctggtacattttggcgatgatggggttgcaa

SEQ ID NO: 173856 - DNA, 460 bp, Zea mays
  unsure (1)..(460): unsure at all n locations
  Clone ID: MRT4577_90137C.1
aggctctgccgggatcgtcttcgncttcggcgtctttcacgaaccgcccggcgcaaacctttggccccgaggcgtcgacaggatcgttcaaatttcccgctattccggcccaaccggatccgagccttcacgcccagtcttcggtcttctttcacgaagggcgtcgctgcccgggttgtttggaaaggaaggaggcaagaagaggggagtggcatcttccgttcacaatcggggcaggcccgggcaatcccaagtccggcaaccgcggtggccgggggacncttttattggccttcggagccccggggatccccagccctggaaggcccaaagtgcccggggaagataaagaaccgggggggacaatcaacgaatgaaggccctttcaagcaaccccttctttcaagcccagatcttggtggctgggggaaagcaccgtttccccccggtgccaaatctt

SEQ ID NO: 173857 - DNA, 111 bp, Zea mays
  Clone ID: MRT4577_90138C.1
ttttcttttttgaactgaaacggacaggatatttagtacatatgaagggtggaataacagagtccttctagacctacaattagcgaaacgcttatatattattacaacaca

SEQ ID NO: 173858 - DNA, 219 bp, Zea mays
  unsure (1)..(219): unsure at all n locations
  Clone ID: MRT4577_90139C.1
atgttcgggttttttaacttcctgatttttatcacaaggtttacccggggaccaagcccgggaccaaaaaaggggcgaaccccagcacactggcggccgcntctagaaggatccgaccggggtaccccgcttgccctggccgggccacacctggggccagtgtgaaaaagttggccggctccaattcgggaaaccaaacgaggcgcaaagctaggggga

SEQ ID NO: 173859 - DNA, 1344 bp, Zea mays
  Clone ID: MRT4577_9013C.1
ctcacactcatatacccaattttcaacactgtaatattcgttttcaagatttgctcatataaatacaaggcaccatgccgacagagctagaagaactcgttggcttcatcgcccatccaaacccccagatcagggccgtcgcgacagaaaatctggtcccttactctctctctgatccggccatcttcaagactgaagagctgaaaccggtgaaacatctgaaatttcttgttcgagatcatgagaaaatcgccgaaaatgcgttgaatattctcatcaacttgaccgaggacccagtggtcttggagtctgtagcaacagatgagaagttcttggagatggtattctcacatatagtctaccctgaggagccaaatgccgatctactggccatgctcctcgccaacctctccaaatacgacggctcaaaagcgttcctccagcgaaagcaagaagccccctcacagctcggctcagacgacaacgtcctcaaccaactcatggacctcttcgtcaagggccaagacggcgcatataacaaaaaggcagactacgactacctcgcctacgtcttcgccgacctcgccaagcacacggaaatccgccagtacttcctcacatcccagccttacgacggtgtcatccccctgaccaagctcaaggtcttcacagagcacaagtccgacattcgaagaaagggcgtcgcaaacaccatcaagaacgccgcctttgagatccccgcccacccgtctttcctgtccgagtcagacatcaacatcctgccgtacatcctcctgcccatcaccggcaacgaggagtacgacgtggatgagacgatggagatgttgcccgatctgcagctccttccgccagacaagaagcgcgattcggatacggccaacattcaggctcatgtggagacgttgacgctgttgacggccacgctggaaggccgtgagttgatgagaaagatcaacgtatatcctattattcgggagacacacatgagagtgaatgacgagggtgtacaagaagcatgtgatagactggtacaagttctcatgagagatgaagcgacggaagacgcaccggaagaggtagaggagcgcgttaaggagattgaagaggacgaggatgaagagttggttgaagtttgaaaggaaagcaaaggcaaaataaaaaggtggaactgaaaatcagtaaaaaaaaaagagaagtcgcacagggggactagcaatttaatattggtcgtcgtcttttgaccttgattctagatgtgcatgggcctcatagctttagactaggatacaaaaagagtttggatggtgcatagttgcactatat

SEQ ID NO: 173860 - DNA, 328 bp, Zea mays
  Clone ID: MRT4577_90140C.1
tgtatttgtacaaaaacaattttccctgggtacaagtgatatttttgaataatgtattctcacgcattataaactttgaatttcaataaaaacctttgtatggcaggatggcttcttcaatgcaccggtgcaaataacatagcgtacaggtgggtcacctgtcacggcttctatagattttcagtgtgagtcgtcgctagcaaattttgtatttttgctccctgctggattgagttttcgctttgtctttactgcaaaagtgtcttggcaggagcaccttgcaactacttatgcttggagttgctgcatatatgtcattttgcaccct

SEQ ID NO: 173861 - DNA, 469 bp, Zea mays
  Clone ID: MRT4577_90141C.1
tcactatagggtaaggctcggtaccacgcatgctgcagacgcgttacgtatcggatccagaattcgttattttttatatttttttgaaatgtttttgcagtatatgaaagaaaaaagtgttcaacaattgtacttactaacaaatcatccacaatctgtaccgatctttcagttttttgacttttttactatagaaaaggatgaggttccagagggaattcaacaactagaacatttttgtcaaaatctaaaagagcatattgcaataatactaaattgtgagctattcacaaagttatgcacggattaattagagggtctcaactgtagctacaggagcaacctgtagcgacagggcttcaaggaattcatggcccacaaggaatccatggtccgtaaggaatttatggttcaacgggagctacaggagcaaccggagcgacaggtcttcaaggaattcaaggtcccc

SEQ ID NO: 173862 - DNA, 253 bp, Zea mays
  Clone ID: MRT4577_90142C.1
ggaaataagctctgtttttggcataaccttaggacaactgttcagccgttcggcaacaaattttgggggaacttcaacggggtcgggccatgaacaatctaagttgccaacacatgggcacttttaaggctcaggggagaaaaaactaaccctggccctttaaagcccacctttactccaacaaaaacctaaccttaaatgctgctcgggtccatgaacactttgaccttgcgccccatgggctccggccccc

SEQ ID NO: 173863 - DNA, 252 bp, Zea mays
  Clone ID: MRT4577_90143C.1
cttgacaaaccacggccgcaaggcacaacatagctgagcttgaacccaagatttactgacaacaaagtacatgacccgagcaaccttaacatgggcttaatattaacttaccaggacttaaaaaaaatccattcactgaggcgttgtaataaaacttctgcagttggcggatacacttatttcaagctgaactgctccagcttcatcactacactgttgtaccaatgaaccgttccaccgttggcaagcccg

SEQ ID NO: 173864 - DNA, 396 bp, Zea mays
  Clone ID: MRT4577_90144C.1
gcttactagagctcactcgcccgaagacatcctttttttttttactttattaaaacggggcaacggggaattatgggtttttttacacaccaaaacccaaaaaattaactcaaaaaaccacagaaataacaatgtccaaaaaaaaactgtcaaatataaaccattacactatatccaagagatagttccaccaatcataaaaagcagataccacaacggcaacttattgacatgtttatccgatcctataaaacagcacagacaaaccaagtaataatctttaaagccaaacacatacacaatttcttaacactttgaaaatgatcaacatcacaactgaaaacaaggaatacttaatcctttttttgtcaaacagatccaactgttatttgaaaa

SEQ ID NO: 173865 - DNA, 361 bp, Zea mays
  Clone ID: MRT4577_90145C.1
gccacgcgtggggatactcgttccgtggttaataacaggcactaggccctgatgctgatggaagcatgccgtgagtatgttgatgcactacaacctatgacatactatgaggaaacatccaacatcttcttatcaagaggagctcggtttactggacagtaaaatgcgagcttggctccactattgacttactcgcgattagtggctgaacttgatggtcatacaagcatactccatctacttgtggcggagctgcatgatgatacagatactaggaagcaaacgatcgaagctttttgtggatctccaaacaacggagaacatatagcaagtgtttattgatgttatgctgagcagtacg

SEQ ID NO: 173866 - DNA, 1798 bp, Zea mays
  Clone ID: MRT4577_90146C.1
ctcgcgcgtgggcgggcttgaacgcccggatccgcggggactacagccggaagcccgtcgtcgagatgaacagctgctaccggatgcactggggacagtcgcagcgctgcgagggcttcgcctcccgccccgtcgaggacaccgttgacgggcaactcaagtgtgagaaatggatccgtgacgatgacagcaagtcagaggaatcaaagatgaaatggtgggtcaagcgtttgattggcaggcctaaggatgtccgcatcatttggccatacccattcacggaaggcaagctatttgttatgactttaacagctggtttggaaggttaccatgttaatgttgatgggcggcatgttgcttcgtttccttaccgcactggttactctcttgaggatgcaactgcattatccctgaatggagacatcgatattgagtcgatttttgctagttctctacccaattcgcatccaagcttcgctcccgagcgataccttgagatgtctgaacagtggagagctccacctctgcccactgaacctgttgagcttttcatcggcattctttctgcagccagccattttgctgagcgtatggctgtaaggaaatcgtggatgatgtatacaaggaaatcatccaatgttgtagctcggttctttgtggctctgaatggaaagaaggaggttaacgcagagctcaagaaggaggcagagttcttccaggacattgtcatagtgccttttatcgatagctatgacctcgttgtgttgaagaccgttgccattgccgagtatggggtgcgcgtcgtccctgcaaagtacgtaatgaaatgcgacgacgacacattcgtgaggatcgattcggtactggatcaagtgaagaatgttggaaacgataaaagcgtttacgtagggagtataaactacttccatcgaccactaagatctggcaagtgggcagtaacgtacgaggaatggcctgaagcactgtatccgaattatgctaatggacctggctacgtaatttcatccgatattgctcgctacatcgtgtccgaattcgacaaccagacgcttcggctgtttaagatggaggatgtgagcatgggcatgtgggtggagaagttcaacaggacgcggcgggcggtggagatccggcacgacgtgcggttctaccagtcgggctgctacaacggctacttcacggcgcactaccagtccccgcagcacatgatctgcctgtggcggaagctgcagtccgggagtgcccggtgctgcaacgtcagatgacgcattgcgagagagagcctgattttgtactctttcttgatcaaagaggagagaaacagatggtggtggacgacgggtcggcagcccgtaagcgcagctcttctgcgatggacacagctgacgacgacccgttacgacggtgggtttgcaggaggaggttgctcttctggaccttgtgatgcgatgattctttcattcttttggtcggtggcccgtttgagctgctgattctgacagccctggtcggcgtccatggtcggggattctcttatgctgctgctgctgctaccacctgttgatatttttaggtggtagatccagtacatgaggctaagtagggctccggatcatatgggatctatccttgtgctttgcgtcaaacttctttgacctagaaattttaacttgggtgagttcggttggtaggctgtgtttgtctataaaaaatgattttctaagtttgtatttgtgttggattatcttatatacgaacttgtgtgtgaaaaaaatca

SEQ ID NO: 173867 - DNA, 313 bp, Zea mays
  Clone ID: MRT4577_90147C.1
cggacagggggcatacctttttaaaagaaaggggaatatgggattgacattggaaaatttttatccactgccaactggcagcacctgaaataattaacgaacatgttttttgctataaaacaaaaaaaggtttcagggaaccagtttaggaccacttgctttaaaaaaaaccccactccataaacttttgctaaaaaaaaaaagggccatggttgcccccagggggcaaagggccaaacctaaagcccagggaaggttttagctttgcatgacccccaaaacactggtgaggggatctttaaaaaggcaacgg

SEQ ID NO: 173868 - DNA, 162 bp, Zea mays
  Clone ID: MRT4577_90148C.1
atggcggagcagctgtgtgcacgacgccagctgctcagcggcggagcaggcgcgcccaagtgtctatttacagtctcgtctcgtgtcccctattttatagatattcaaggtgtgcctgtttttgttcagtacgacctacgcatactgctcatccaaatctaa

SEQ ID NO: 173869 - DNA, 193 bp, Zea mays
  Clone ID: MRT4577_90149C.1
ccagaacaagtcaatctatggtgacaattaccgttattctacagatccaccacttaaccctagaacaacaacaccaataaacgagctgcacatggaaaactgacatcccaaacaatagaccattaaaggaaaatggagccagcaaaagagactacctgatacgtctcgacggtgtcgacgtcccacccaagcc

SEQ ID NO: 173870 - DNA, 321 bp, Zea mays
  Clone ID: MRT4577_9014C.1
cgtaattcggctcgagaggtaaaatgggcctttctttgccttggggaccgggcctaatcaaagggggaatattcacaacgaacgctgactgctcacccagtacagctgaagaacctggagcgcagccgcgtagcacgacccacctgcagatgcaccaccacattctctgatcatgcatgaacccaccggtgccacatacgaaatggagcaaaagactgcgggcgccttgaccattacaacactcaataatgcagcaaatgcgccggccttcactagcacttcggggactgttgagactaaccgggagctggccttggaccc

SEQ ID NO: 173871 - DNA, 251 bp, Zea mays
  Clone ID: MRT4577_90150C.1
ggtaaaaatctgagcagggaaaatagtcatcaccttaactatgccaagttttttttgtttagaaaactagtaatctggtagttacttaatttcaaccatggggcattccatcttgagtccaaaattttcattaaagcaaagaaaaaccatacatcctttcaagtaaaaggctggcacaactttggggagctaaagccttctttgcccggtatctctgggttgttttcagcttcgggggaggcttgcaatga

SEQ ID NO: 173872 - DNA, 327 bp, Zea mays
  unsure (1)..(327): unsure at all n locations
  Clone ID: MRT4577_90151C.1
ttnttttttttttttttttttgctggattccttgcattgaaaatctgcagggttttggctgcctgggcgtgtcattgtgtctgtgtgcgattggagtatgaagtatcgtcacagaatgatggatgctcacatataatacaatcaaagaccagtgagattgaacgggaggggaaagaagggggaacatggttaatgtcgctactctctaatggcaatcctcaaatgctcgcgcttgctgtgagtatcatctgtgcccatggtgggggctcgtgcttctcccatcgcttttctccccttcctcccttgagccttcttttttataaccat

SEQ ID NO: 173873 - DNA, 426 bp, Zea mays
  unsure (1)..(426): unsure at all n locations
  Clone ID: MRT4577_90152C.1
cggacgcgtgcgtcgatttgcgcctcccgtttttcatccggcgacggcacttgcacgagccatgctgttctatagcatctgctcgtcatgtcactcagcctctggctgctcggngggtgccccacacgtgctccttggcgcgggccttctacgtatcctgtcaatcccttccggacaacggcatcacctgctacctgctaaccacggagcgcgccgacacgcaactcctacgggattgacttccccacgcaccaacacaagttctgcttattacacggccttaacatccccgacatactgagagaacacctcggcgccgaacctgcactgccatacctggaacctgagctccgcgggcagaatctgcttgccgaggcccacttggcgttacccgaagaaaccattctcaacgacacaggaatacaa

SEQ ID NO: 173874 - DNA, 245 bp, Zea mays
  Clone ID: MRT4577_90153C.1
gaaccatgcatacgattctatgcataaatcgctatgaactgaaggttcacacgtgacacctaaaacgttcatgatggtacatatacaaaagttgattttaggaattatgcaaactaaaggcacttgaacttagttttcatacggatgatataaaatattaaagctcagatatgtctctgatatcacaacattgcatgcaaagcacaacctagaggcatgtgcactgcttcgatggccgatagcta

SEQ ID NO: 173875 - DNA, 307 bp, Zea mays
  Clone ID: MRT4577_90154C.1
tttattgttttatcttttttttttttctgaaacaaaatactattaaaacttaactctgctcataaaaaccggaggaacatgaccggttatcacaccccatcaactatcccaagtttttacagggacataacttcccccgaaacttatgctgggaatacccaccaatctagaagcaccggcaatattacccaatgggtcaaaatccgtgaaaaaagggaatctttaggccggaatttagggggggagttgtcccgccaaaaggcaaggaaaatattttttggcccttccaggcaccccccttctgggc

SEQ ID NO: 173876 - DNA, 331 bp, Zea mays
  Clone ID: MRT4577_90155C.1
gggaagggacgggttatgcctttgactaccctttgcccttaaaaaaaagcccccccccccctccgtgaaaaaaaaaattggggctcaaaatttgcctggggagaaccccttttccttttttgccataagcccataaccatgaccccccctgtgacatatacggggtaaaagggtgggcccctaaacccccatacgggccaaaatggtggggcacaagaagaaaaaacaagttccccccacattcagggtatattagcccccggggcccccaggtttttaaaatctcttaaaaaaaaaagggcaccaccgccccaggggcccgagaatcacc

SEQ ID NO: 173877 - DNA, 1166 bp, Zea mays
  unsure (1)..(1166): unsure at all n locations
  Clone ID: MRT4577_90156C.1
cggggcctgccagcggcctgcctgcctgcctactagtacggcgtggaggtggagcagtgggcgctacagcctccatcagctagctgccttgccgtgtcctcctcttcctcctgtcggtggcgatctctgcggaaacccgagcttcgtccaagccgggcagtagtgcgcgccgcctgggcgtaattatggattcttttgagggctctgatcatataactcaaagaaaggttgttcctgcaaaacattgcattggttgatggaaagaatgagcctgctgtagaggggttgcctaatggttggctgaaagaatgcaggcctagaaagaaccgatatggatccagagtcaagagtgacacgttctatattgatccaatcaatggatacgaatttcactctctcaaggatgtacaccgctatcttgaatctggagacatcagtaaatgtattagattgccaaacaagagaaaaattgaggacctgcatactaaagaggaccaatctcatcatgtaagtttcatcttcaagttttggcccacatctgaatttgccctcgatcttgtgttagctgctacattggattgacaattggattcaaatcaacaaggagttaattcttaaggtagtatgattctttttaaggcaaaggtttatgaatttcatttgaactattttaccatccccccgagaagtactaagaggttacacaaattgtaatttgggagataccaaatccctagttgtaattttggtctttccccaaggactgtaaaaagcctcatttctggtctcatttcttctttaaatgaactgcggcgattctcttgtcgccctttcggaaaaaaatatctactattataaagcaccaatttttctggtttccacactcgtcacttttgtaaaaaaaacccttatatttcatagcacgggcaaaccatcctttcccatccttatgtgcaaaaaaaaacctatatgcacctgaacacaagcactgttcttgatagacacttgttcggagtctatccaatgcgtatttgcaatgcacctccgttatagttgaccgtagatgcatcttgtattgatgtaggctgtcatgctgaattatgatgcatntttatattctaactgagtgaactgggaggaattcttttcttgttgntattgctctt

SEQ ID NO: 173878 - DNA, 2474 bp, Zea mays
  Clone ID: MRT4577_90157C.1
gctcgagaaaggctgggccgggaacattagctagccgatcttccgagtcggggaatctatttccaccggtccccatccagtacaggccagcactgccgctgccgtgtcgccaccggcccccggctggctctccagcgactccgtcggcggcttgccttcccgcgccgcgccgggcccggatcgctcgccctttccgactgtcctgctcaacgccgccaccagcacgtcctttcccgcgccggaggtcccgctcgcctgccacagcggtgcggcgcaagctcccccaagcgtttctcaagtgacgagaagaagaaagagggggagaaggaggttggcgtcagtgggtcccgcggaccaatcagctagagagctgagtgatgtctcgcaagcgatgagcctcatgagatcggatcggaggccatcattccacgcactggtgatgaaaagctcgcttggtgcccctagctagctagtggcgaagcaaggaagctagccagccaagatcctgcttgtgagaaaaaaaagggagtagatccagtaattttaagaatctggtcaacatacctacggcaagatggctgatattgtaatccgcgacctggagagggtagtcaaagtcgcacttgcgatcaagaaggccgtggaaacagctaagcagaacaaggaggattgcgttaagatcggtgagcgtgcagctgaggtcagtactcatatgaagcggctgaaggagaatacaaaagcaatggaggaccctttgatgagcgatacgctcaagagtatggaagagacactccaacgcgctcttaagctcgtcaacgagtgccagaggaagcacgtcgtgctccattacttaaatgccggcggcatgtccaagaagctgcgccaggtgcaggaggatatatcatataaattgtggaatggggtcttggccaccgttgtcgacacaaggattgctttggaaaagcagatccaatctgctattgatgcccctctgcaccaacaccaacagcgtgcagggcaggtggaaacctcacaaagtagtcattcaagaactgatcaagctagcgagaaaggaaaggccatgttagcaagagtaaaaagggagcagtctgaacttttgtctggtgttcctcagttcagtttgtctcaactgaacgctgctacaaacgaattttcagagggctgtgtggttgaaagaggctactacaagggagtattacacgacggactagatgttgccatcaagaagttagcagtctctgatgatactcaagagaggcgcctgcaacttgagcttaatattcgtgcaaagcttgaacatggaaacatacttaaacttctgggatattgcctcgatgcccaagaaaaagaaaagctatactttctggtcgaagaatacataccgaatgttgaaagcttggagaaatttattaatgtctctcgactcgattggtcctcgtgtttcaagataattcaggggatagcaaagggcttacattgcttacataagcatcatattctctatatggatttgaatccagccaacatcctcgtccgttcagatatgaatcctgtggtcatcaattttggatcatcaatagtgctggatcgtgatgatgataaggtcaccggggatgccgtagcaggcacactgggttatgtcgctccagaaaaacttatggaagcttatgcatcaatgatgtctgatgtgttctcttttggaatcatcatcattgagatcattaccggcaggagagcttcacctttcgttgatttaccggaatggggttcagttgatgagatgattacatcagcgaaagggttatttgatccggcgctagctaacgagtctcagctgatgaagattaataggtgcagagaggtcggactgaagtgcattgagcgggatccgaaacgtcggcctaccatgggaaatgtccttgagatgctaagtagctagagtgacaggcaccgatttgaggtgttctcggttaggagtggattgaagcggattagagataatcaaatctcttgctagtcaaaactgaatagaaatgggtttactttccctcaatcccctcctacctatgcaaccaaacaaggccttatgggtttcaacaatttggtttgatgtattgtcacaaattgatcatttgtaacattcaagatttatgcgcaaatgtattggcgtgtggattagagagtttctatcttataggctggctcttgaatgatatggcaaacataagctagcaaaccagttcaactactgagggtgcacatgaacctcgtgtttactagcatttttttttcgtatgctatttcctagttcaagtttgcatctcaaacctttttcatgtatgtacatgtattgtaaatgtgtcaagtgttaattttattgaaccctttccaaaaaaaaaaaaaatacataccgaatattaaaagtatagcttttctttttcctcgagccgaat

SEQ ID NO: 173879 - DNA, 893 bp, Zea mays
  Clone ID: MRT4577_90158C.1
ctcgaggccggccgggccgggtctatttccaccagtccccatccagtacaggccagcactgccgctgccgtgtcgccaccggcccccggctggctctccagcgactccgtcggcggcttgccttcccgcgccgcgccgggcccggatcgctcgccctttccgactgtcctgctcaacgccgccaccagcacgtcctttcccgcgccggaggtcccgctcgcctgccacagcggtgcggcgcaagctcccccaagcgtttctcaagtgacgagaagaagaaagagggggagaaggaggttggcgtcagtgggtcccgcggaccaatcagctagagagctgagtgatgtctcgcaagcgatgaggtctttctttcaccctttcctctctcctgcattggattggaaaccggctgaggacgccgtagcgattagggagtgctagtattgtacgtgtaatggttggagagtgcttgacagcctcatgagatcggatcggaggccatcattccacgcactggtgatgaaaagctcgcttggtgcccctagctagctagtggcgaagcaaggaagctagccagccaagatcctgcttgtgagaaaaaaaagggagtagatccagtaattttaagaatctggtcaacatacctacggcaagatggctgatattgtaatccgcgacctggagagggtagtcaaagtcgcacttgcgatcaagaaggccgtggaaacagctaagcagaacaaggaggattgcgttaagatcggtgagcgtgcagctgaagtcagtactcatatgaagcggctgaaggagaatacaaagcatggaggaccctttgatgagcgatacgctcaagagtatggaaagagacactccacgcgctcttaagctcgtca

SEQ ID NO: 173880 - DNA, 855 bp, Zea mays
  Clone ID: MRT4577_90159C.1
cctcgcggccggccgggggtcaatctaattccatcgccagtccccatccagtacaggccagcactgccgctgccgtctcgccaagcgcccaagccgtgtcgccaacggcccccggctggctctccagcgaggcagcgactccgtcggcggcttgccttcccgctccacgccgggcccggatcgctcgccctttccgactatcccgttcaacgccgccatcagcacgtcctttcccgcgccggaggtcccgcttgcctgccacagcggttcggcgcaagctcccccaagcgtttctcaagtgacgagaagaagaaagagggggagaaggaggttggcgtcagcgggttcagctagttcggagagctgagtgatgtctcgcaagcgatgaggtctttctttcgccctttcctctctcccgcattggattggaaaccggcacagctagttcggagccccccgctgaggacgccgtagcgattaggcagtgctagtattgtacgtgtaatggttggagagtgcttgacagcctcatgagatcggatcggaggccatcattccacgcactggtgatgaaaagctcgcttggtgcccctagctagctagtggcgaagcaaggaagctagccagccaagatcctgcttgtgagaaaaaaggagtagatccagtaatttcaagaatctggtcaacatacctacggcaagatggctgatattgtaatccgcgacctggagagggtagtcaaagtcgcacttgccatcaagaaggccgtggaaacagctaagcagaacaaggaggattgcgttaagggtcggtgagcgtgcagctgaggtcagtactcatatgaagcggctgaag

SEQ ID NO: 173881 - DNA, 381 bp, Zea mays
  Clone ID: MRT4577_9015C.1
cagccagctgacccctcacactcacctagccaccatggacatcgccatccaccacccctggatccgccgccccttctttcctttccactcccccagccgcctctttgaccagttcttcggagagcacctgttggagtctgatcttttcccgacgtctacttccctgagtcccttctaccttcggccaccctccttcctgcgggcacccagctggtttgacactggactctcagagatgcgcctggagaaggacaggttctctgtcaacctggatgtgaagcacttctccccagaggaactcagagttaaggtgttgggagatgtgattgaggtgcatggaaaacatgaagagcgccaggatgaacatggtttcatctccag

SEQ ID NO: 173882 - DNA, 921 bp, Zea mays
  Clone ID: MRT4577_90160C.1
gaaaaagaaaagctatactttcaacattcggtatgtattcttcgaccagaaagtatagcttttctttttcttgggcatcgaggcaatatcccagaaaaagaaaagctatactttctggtcgaagaatacataccgaatgttgaaagcttggagaaatttattaatgtctctcgactcgattggtcctcgtgtttcaagataattcaggggatagcaaagggcttacattgcttacataagcatcatattctctatatggatttgaatccagccaacatcctcgtccgttcagatatgaatcctgtggtcatcaattttggatcatcaatagtgctggatcgtgatgatgataaggtcaccggggatgccgtagcaggcacactgggttatgtcgctccagaaaaacttatggaagcttatgcatcaatgatgtctgatgtgttctcttttggaatcatcatcattgagatcattaccggcaggagagcttcacctttcgttgatttaccggaatggggttcagttgatgagatgattacatcagcgaaagggttatttgatccggcgctagctaacgagtctcagctgatgaagattaataggtgcagagaggtcggactgaagtgcattgagcgggatccgaaacgtcggcctaccatgggaaatgtccttgagatgctaagtagctagagtgacaggcaccgatttgaggtgttctcggttaggagtggattgaagcggattagagataatcaaatctcttaaaactgaatagaaatgggtttactttccctcaatcccctcctacctatgcaaccaaacaaggccttatgggtttcaacaatttggtttgatgtattgtcacaaattgatcatttgtaacattcaagatttatgcgcaaatgtattggcgtgtggatt

SEQ ID NO: 173883 - DNA, 3713 bp, Zea mays
  Clone ID: MRT4577_90161C.1
cattgggtacctcgaggcaggccgggcccaaaaaccccacgaaaagcctcctctcccccctacactgtttccatcggcggacggctcccatggaggcggccgagtgaagcagccgcctgccagccagccatcgtctctgcgctgcttccgtggcccggatctgggagcgcggcgctgacagtggagtacagtggactacatcgtcagctgcaatacttcttgatccagatccaggcgttcttccaactcttccttctgcattcgtgtggagtggggattcttctggcctttcgagtgacttcttttctttagtgcagtattgtgagatacaacatcagctgatccaatggcgacatataagctgggtgtggaggtcgcaagtgctcatgacctgatgccaaaggatgggcaaggttctgcaagcgcttgtgttgagctcaactttgatgggcagcgcttccgaactgctgtcaaggagaaggacctgaaccctgtctggaatgagcgcttctacttcaatgtatcagatccttctaatcttcctgagctggcccttgaagcatatgtctacaatgtcaacaaaactcttgaaagttccaggtccttccttgggaaggtcaggattgctggcacctcatttgtgccctttcctgacgcggtggtcatgcattatccattagagaagcgtgggatgttttctcgcgtcaaaggagaactgggtatgaaagtatacatcactaatgaccccgccatcaaagcttcaaaccctcttcctgcaatggatcctgtctccaataatcctcttccagccccaagtccagcagagcagattgcagctgatataactggtactaatctgcacacatctcaggagcataggtctgaggcaaagaccttacataccatcgctaaggaggtacatcatcatcataaccatggccatcttccagctacgtttggtgagcagccttccaagtactccattgaccagatgaaacctcaatctcaaccaccgaggattgtgagaatgtattcagcagcgtcccagcagcccatggactatgcacttaaagaaactagtccatttcttggtggtgggcaggttgttggtggccgggtcatacgcggcgaaaagaatgctagcacttatgaccttgtggagcgaatgcagtatctgtttgtacgtgtggttaaggcacgagacttgcccgacatggatgtcactggaggcctggatccttatgttgaagtgagagtaggcaactatagggggataacaaagcactttgaaaagcaaaagaacccagagtggaatgcagtctttgctttttccagggaccgtatgcaggcatccgtgcttgaagttgtggtcaaagacaaagatttgattaaggatgactttgttggctttgtgcgatttgatttgaatgatgtccctattcgtgtgcccccggacagccctctggctccagaatggtacaggcttgttagtaagagcggggataagtccatgggtgagctcatgcttgcagtttgggttggcacccaagctgatgaagcatttcctgatgcctggcattcagatgctgcaacacttgaagatccatctgcagtaacacacatgaagtccaaagtttaccatgctcccagattgtggtacctgcgggttaatataattgaggcccaagatgttgctatattagataagacccgctatccagatgtatttgtgagagcacaggtggggcatcaacttgggaggacaaaacctgtgcaggctagaaattttaaccctttctggaatgaagacattatgtttgtggctgctgaaccatttgaggatcaccttgttctgactcttgaggatcgtgtaggtcctaataaagatgaaatgcttggtcgtgtaatcatacctttggcaatgattgatagacgtgccgatgaccgcattgtccatgggaagtggttcaatctcgagaagcctgttcttgttgatgttgaccaactgaagaaggagaagttctctactcggcttcatctccgtctctgtcttgatggaggttaccatgttcttgacgagtctacaaactacagcagtgacctgagaccaactgccaagcaactctggaagccgtctattggtttgcttgaacttggtgtccttggtgctcaagggattgttcccatgaaaactcgagatggaaaaggttcatcagacacctattgtgttgctaagtatgggtcgaaatgggtaaggacacggaccatcatgaacaacccaaatcccagattcaatgaacagtacacttgggaagtctatgatcctgcaactgtgctgactgttggtgtttttgacaatggacaacttggagagaagactggggagaagacatctagtggcaaagatgggaagataggcaaggttcggatacgcctttccacactcgaaactggtcgtgtgtacacccactcgtatcctcttctggttctacattcgtcgggggtcaaaaagatgggcgaactgcacctggcaattcgattttcctcaacatctctggtaaacatgttgtacctgtattctaggcccttgcttccaaaaatgcactatgtgcgcccaatacctgtgcttcaggttgatatgctacgccatcaagctgtccagattgtggctgcccgacttagccggatggagccacctttgagaaaggaagttgttgaatacatgacagattttgattctcacttgtggagcatgaggaaaagcaaagccaacttcttcagactcatgacagttttctcaggcttgtttgcagttagcaagtggttcagcggtgtctgttcatggaggaaccccattaccactgtgctagtgcacattctctttataatgctggtgtgctttcctgagctcatacttccaacagtgttcctgtacatgttccttatagggatttggaacttccgctatcgacctcgttatcctccacacatgaataccaagatctctcatgcggaggctgttcatcctgatgaacttgacgaggagttcgatacattccctaccagccgcaaccctgaggttgtaaggatgaggtatgacagactcaggagtgttgctggaaggatacaaacagtggttggtgatattgctacacaaggggagagggttcaagcattgcttagctggagggaccctcgtgccacagcagtctttgtcctgttctgtttggtagcagcaattgtcttctatgttacaccgcttcaagttattgctgcattaggagggttctatgtgatgaggcacccaaggttcagacataggttgccctcagtaccagtaaacttcttcagacggttgccagcaaggactgactctatgctataaataagccactacctggtggtcttatcgttgtaatccctagagatgctttctctgttactgtagtttgctcgccttcgttgctatttgtaactgtgtctgttcagaacttgagagcctgttaattgtatcagttgttgaattctgggaataattgcgagacatggttctgtgttgatcctttctaaaatatcaagctatcaatgtttagtaaaaaaaaaaaaaaaaaatgggtacccaaacctcccgtcccgcgtgggcccgtaagctgcgcctagatttcagggctaatcgtgtgcctgaaccctcatcataagtcgtctctgtcccc

SEQ ID NO: 173884 - DNA, 340 bp, Zea mays
  Clone ID: MRT4577_90162C.1
tcttatatcttggattctacccaaacaaacctattgcaattctccatatctacaggactcttctacactgcagatcattctaccagaaagaactatagttttaacacaccattcaacaattaaattaatattcagtcactggactacactgacaaggagccatcttggctctcatatccatccacacttatactgttcttccaacaaacactgaaaccacgctggaccatctgggttcactccttatacgcgcaaatcatctgctccatcttacgggagggtgtcttttaacctgcgatcccaaccacaaagacccatgcttgctagccttggaatgaac

SEQ ID NO: 173885 - DNA, 452 bp, Zea mays
  Clone ID: MRT4577_90163C.1
attgggtacctcgaggccggccgtcttgtttattaccgcggcccagagtagtacctgctgctggcgacggtttcctagaccagggtagtcccgccgcagagttccagcgatatcgtttcgagtacggtgggtctggtgtgtaaaaccgtcaccgcccaggccacggaggaccaagaaggacatcttctgtcccatcgtcgaggccgctgctgacaaggcattcgacttctaacatgtacacctaatggatcggcacttgcaaagggacggctacagaaattccatgagatgtatgacaagaatctggatgtatgagttcctgaaaatcgactgcaaccagaagaaacaggcgtttgctaactagctgcctatcaagtgctggtcaacgttctgcagcctcaaggtgggcaagggacagacgggttcgcgccgttcctggatctactgaatac

SEQ ID NO: 173886 - DNA, 184 bp, Zea mays
  unsure (1)..(184): unsure at all n locations
  Clone ID: MRT4577_90164C.1
atcatgtncgccatgacctaaatacacgggtgtcgggcnccgcgtcntncnaanatcgtctnagngcgnggntgacntcgacatgaanacgngggccnggancngngctgatgcgctggngcgcctgatgacggtcgtggcnanccctaggcagttcacggtgccggactngttcctcgacang

SEQ ID NO: 173887 - DNA, 396 bp, Zea mays
  Clone ID: MRT4577_90165C.1
ggccgcttttttttttttttttttcttttttttttttttttttttttttttgggagatattttgatttactatggattgaaacattctcaatccctcttaatctataaggaggggagaagaaccagacacaaccgaatagggaaaacaaaaacccatgaaagcgaaaagggggaccaagagagagcaaactacagattacagcctgaaacacacaggcgagggtcgaaggatctaaaaaaacatgtaaccgcaagctgacgggcgcggaaaagctcaagacccggggagaccctgtgaaatcctcaggacacacgataacacccccgggaacctctaagacccggggggccccgtgaacatttaaaaaaaactgccaaagcccgtggggcccctgg

SEQ ID NO: 173888 - DNA, 365 bp, Zea mays
  Clone ID: MRT4577_90166C.1
tccacgcataaccacggaagatcggggctggatcatctgttaccaccccatgatacgcgctacactgtggggcgtgcattccagctctgtctaccacacaaaaacgaattaaccatccattctactttttatactgacgcgcactattaggctcattcgcaatgctaacagatcatagaaaagcatggcgcgtttcgaaaagagtaccagcaaaatacgcacctttcccacaaatactatatcagcgatccaaaagaggtgcacttacacctaattgatttcatcggccgggaaaccacgaaagcccgccaattatctatgggagctttattatggcggctgggctgctaaaaacttgtattttc

SEQ ID NO: 173889 - DNA, 313 bp, Zea mays
  Clone ID: MRT4577_90167C.1
taggggccttttttttttttttttttggtttttttttttttttttttttttttttttttttttacccgggaacagacatcaggaaaaaggggtacccgcggtacacaaaagggggggtatagatataagattattatagacgggtggggacacaacacagcagggcacatggttagcctgctaccgggctgcacccacacaacacaacacaacacactgctcgccgccaaaagcgcccgagggggcaggggaggactacaggacacgacgccgccatcaggaatcatcatcatctcagccgggcccggccggc

SEQ ID NO: 173890 - DNA, 441 bp, Zea mays
  Clone ID: MRT4577_90168C.1
attaacatctgaactgaatttcataaagttatatcatgcatgcatgcatatagtataatgatacatggttgcctaaaaatccggatgtgaagctgagaaattttctccctgtttgaagctccctgcgctgtagcttgtctctggataaaccatttctccataaggattgaagggaattgaactaattatatatcccctccaatccaaacaaccctagctaactcgggagaaaattcatctacttcacagcctccaagtccaaagcaacctgctggatcgatctggagtctcttattattgctgtgtctatatatgtatatacgtggctgtcagttaacctgcagtgtgtcatgcatgggtcgtccatggcgctccctgatcgaagcgtatgatcattcggtccatgggctgcttgttgatcagcggcacgggcacgggcac

SEQ ID NO: 173891 - DNA, 549 bp, Zea mays
  Clone ID: MRT4577_90169C.1
aaaactatcccgaggatgcagaaggccttatttaacaaaatcgagggaaaccaaaaaaaaaacaacggcggttaatctttttttcacgcgtgggccggaaccccctcgtcgccggggggggtctcaacctggggggctgacaataaaacatctccgagggcggggttgcccacggagcatttgggggggatctctcccgcgctgccggggaggatgtccattgggttaattttcaccatggacctggcaaactggtcaaaaaaggcggcctggttgaccccaaagcggggggccccccccttggtgtccggggggttgatgaggccctggcccaacttgaaaagcccttgtttggcaatgaggtcaaagtattacttgttgtcaaaggcgttgggcgtgcccacgtccagcacctgggtaaccacgttcccgttggggtcgttggcgcacttagccgtaagcctttgccgaaacgccgggtccatggggccgtcttccgcgttgggcggaacccggtcgttaaaggaaacccaggggccgcggcccacc

SEQ ID NO: 173892 - DNA, 757 bp, Zea mays
  unsure (1)..(757): unsure at all n locations
  Clone ID: MRT4577_9016C.1
actcctatgggcgattggcccccgaggccggggccgggatcacagtcgaaacaaagccacaacacatacaggaaagcgagcaagaatcatcggaataatggctcgtgcatgcgtgttcctcgtcgtgctcctcctggccgccatcgcggtggcaccgttcgcgggcgccgcacgcgtggacgtcgtggagggtaggtccatggcatccgccgatgcaccggaggcggcggccgatgctcccgctcctagccccgactccgcctcatccccagactcgtcatcggaggcgccctccagcagcagttcctccgactagacgcaaaaacctcttcattctctggaataactaacagtgtatacgttgcaccctggtgatatagaaacatgtacgtgcatcagcgtatggaatgcgagtggcaaacacatgggatgtgcttgcctattattgtttatttctttatttattatatgtccctctcggttgttttttatttttcttaatgcatgtaatataatttgttatacccaaaaaaaaaaaaaaaaaaaaaaaaaaaaccattgtcgaaacgaagtgagtatacatacctgacagcgagcaagaatcatcggaataatggctcgtgcatgcgtgttcctcgtcgtgctcctcctggccgccatcgcggtggcaccgttcgcgggcgccgcacgcgtggacgtcgtgggaggtaggtccatggcatccgccgatgcaccggaggcggnggccgatgctccc

SEQ ID NO: 173893 - DNA, 304 bp, Zea mays
  Clone ID: MRT4577_90170C.1
aaagggacccaaacgggccctaaggccaaagtttgttttaggcaaaaaaaaggcattacatttcctttggtatcgccctaaacaaattttaaaaatgtttacccctaaatccaattggaaagggctggaatgggatcccatgttaaaatggattttctaagaaaaatcctggaattgatttataaggaaatgtcaattccaagattccaactaaattttgggggtcgggacaaactttgtttttgtttcctatacaaaaaacctgacttttgggggccatgtattaaatccccttccatggcaa

SEQ ID NO: 173894 - DNA, 639 bp, Zea mays
  unsure (1)..(639): unsure at all n locations
  Clone ID: MRT4577_90171C.1
gcagcgcatctcagcgacaaacccgggcacctcgtctagctcgccttccatttcgtcccttcctattctactaccttctgcgagtttgagcagccatggcggcaacaacaccactgcttgctgtggctggacatggagtatcctacaaaccagcaaatgctaaagacagctactactgcttcaaatttgcatcatcggcaagaacaagagtcaccctcccacagatcatccactggaggtgcaggagcagtcatagcagcacggggaccacgaccatggccgtccctgtcctcaagcggcgggagaagcaggacgaagagcaggaatggatggggtacctggccccggagaagctggaggtgctagcacacctggagccgtgggcggaggcgcacgtgctgccgctgctgaagcnccgcggaggaggcgtggcagccgtcggacatgctcccggacccggcggcgctgggcgacgagggcttccacgacgcgtgccgcgagctccgcgcgcggncggccagcgtgcccgacgccacctgggggtgcctggtgggcaacatgatcactgaggaggccctgcccacgtaccagagcgtgcctacccgctttcgaggccgtgcgcgacctcaccggcgccga

SEQ ID NO: 173895 - DNA, 320 bp, Zea mays
  unsure (1)..(320): unsure at all n locations
  Clone ID: MRT4577_90172C.1
attgtgttacctaaatttaggtcacagggccatgatttacatctgcacatactcgtaaacccctggagatacagacccggtcgaccaggaaagacgcatataggcacagcatgtttatttgccgcagaagacgacaacgaccgtccccncaatacaaaggactcatcagcatggtgaatggggcgccccctgtaacggcacaccaaaccataatggtgcggcgggtactaccagcgagaccagtacactagacagggccctatcgctcgttcacctaggcttgtttggttccattgtacctatgtaaacaccctttgccc

SEQ ID NO: 173896 - DNA, 780 bp, Zea mays
  unsure (1)..(780): unsure at all n locations
  Clone ID: MRT4577_90174C.1
aaaactttctcaccggcggcgctcgttccccaatcccctcgccgccggcgccttcgccatgctccgcctccggagctgcgtcgtcgcgcacctgctcccctctcccatcacctctcacggctacgctctccgccgactcctctccgccaccaccgccgtttccccacccaccggattcgccgtcgaggagtacctggtcggcacctgcggcctcacccgagcacaagcgctcaaggcctctgcaaagctctcccacctcaagtcccccgccaagcccgacgccgtcctcgccttcctcgccggcctcggcctctccagcgccgacgtcgccgccctcgtcgcgcgggatcccaagttcctctgcgccggcgtggaggcgaccctgtcccccatcgtcgtcgagctcacgggcctcgggctgtcgtcctgagatcgcgcgactcgtcccgctcagtgccaagcagttccgctgcaagtccgtcgtatccaaggtgcactactacctgcagcacttcggcccctacgagaaattcctccgagtattcaagggtaaccaccatctcctctcgcacagcctcgagaaggtggtcaagcggaacttgaagttgctgcaggagtgcacgctaggtgcttgcgatgttggcaagctggccatctttgtgccaaggatgctcaccgccaacgtgcaacaaatccgngcgatgggtgcctctgctgaggctttaggcgtgcctcctggctctgcgatgttcaggcaagctctgcggtctgttgcgttag

SEQ ID NO: 173897 - DNA, 516 bp, Zea mays
  unsure (1)..(516): unsure at all n locations
  Clone ID: MRT4577_90175C.1
gttgcaaaaaatagaagtgatggtttggattggttcacttgattgttgctgcaaggtagagagtaggtttgtaaagaagaaagatacactgtacttaccatacgtattaaacaggagccccttctgcgagtttggtcaccgaattcgaagcaaagaaaaagcatgcaggagagagaagtgtataaaaagaaccaaagcaacgtttcttgtgatgactgactgattaaaaagcaatgaattggcgctatgccttggctggctgaccattgctcgcccaatcactagtactggctggcgcgagaggagagcgcggcgtcccacggcgtcatgtccatggggtagctcccgagcaccctgaggaaggaggtgaactcctggatctccgcgagcgcgttctgcgcgcggacgtcggccatggacgcctggaagtcgatgtagaacatgtactncgaagtgcttggcggtgcncgacgtttggcgtcgtcgacgaggcggattggggcggtgggcggtgca

SEQ ID NO: 173898 - DNA, 419 bp, Zea mays
  unsure (1)..(419): unsure at all n locations
  Clone ID: MRT4577_90176C.1
atccgcggtcgcaaatggcgctaacctcccaaggcatcaccctccgttccccgccagcggggccccgcggccacggcgggaggcggtcctcttccgtgcccaccgccgcgaccccgcgcgtcttggggcagccccacgcggggcaagccttatccatctcgcccgtcaggtatgaacccgccgctcgcccaccacggggaggctccgccgccgccgccatacgtgccgccgcctcggccggcgcgcagcccggcagcgacccggtctctgctgagcccagaatcgagctccccacgatattttccgtcttctccgagaccgctaagaccggcgctgccttcttcattgcctcgtcggncgcggccttcctcctcggctcgtttggggggttcgggggcggtgctgggggtctcttcggc

SEQ ID NO: 173899 - DNA, 133 bp, Zea mays
  Clone ID: MRT4577_90177C.1
agcggagttgttgggttgggctcccatcgagttctactccggtgtttcttcgtacatttctctccagccggtgtgctcagtttggatatctagtattgaagtggtttagagagattggagaatgtataaattc

SEQ ID NO: 173900 - DNA, 264 bp, Zea mays
  Clone ID: MRT4577_90178C.1
gcctgcactccgcgatcgcacgagctgccgaggtgagggggtcgcggggaaaacaacaagctatgaggaagagacgaagcggcgccgccacatccacctcgtgcagcgggccgtaggcaagcacctggagcccccgggagatgtcggggaacctcgcgggcgggctccacaagcgggtgctgcagcacagccccacggcggctgctgtggcctgctgggcaggcgctgcggccataagctcctacgcaaggtccactgcccggc

SEQ ID NO: 173901 - DNA, 839 bp, Zea mays
  unsure (1)..(839): unsure at all n locations
  Clone ID: MRT4577_90179C.1
attgggtacctcgaggccggccggnaagcaaacctcccctcccccaacccgcgcagcgccctgccccccgccgcagtgagtgagatgatcatcggaggggccgcgggcgccgggaacccgaggagtaggaggacgcgatgaaggcgcagccgctgctaccggcggcgctcaagaggcggagggggccgcgagtggcggtgcttgcgctcgtcctctgctccctgctcgtgcccttggccttcctcttcgaccgcgccccctccgggtacgtgacgacggaggagcggcaccgacaggaggtcgttctgccttcgttggatcacgtggagaagaggcgtcgcagtggcgctgacagtggacagcgacaggatgcgccggagaagatccccagaagtagtgcaggaacgattcatcaacgaacaccagagaagaacatctccaaaggcagtgctgcagtcattcatcaacaaacaccggagaagaacatctccaaaggcagtgctggagtcattcatcaacaaacaccagagaagaacatctccaaaggcagtgcaggagtcgttcatcagcataagcaaattggtagcaacacgacaagggatggtgctaaaccaaaatttttgcagcaccaaaagttgaaccatcagcggatgtgacggattctactaaagtcgcaagagatactaaccaagaaggtgaaaaggctgatgaagtggaaaaaggcgaagtcctgtcaacttgaatttgggagttattgtccccggtctattgagcacaaaggaattatggaagattatatagtgaaaggcctaaagatcaactcctcgtagcacgctcat

SEQ ID NO: 173902 - DNA, 822 bp, Zea mays
  unsure (1)..(822): unsure at all n locations
  Clone ID: MRT4577_9017C.1
agaagccaccgcgctctgcgccgccgacctcgacgccatcctcgccgcctgcgacgccagcggcgtccagttcatggactccaccatgtggatgcaccacccccgcaccgccaagatgcgcgacctcctccccgccgacgtcggcgacgtcagatttataaacagtctgttcagcttccgagcaaacgaggatttcctcgagaatgacatcagggtaaagccagacctcgacgccctgggcgtgctcggcgatgccgggtggtactgcatccgcgcgatcctgtgggccgtcgactacgagctcccgaagaacgtgatcgcgctccccgaccctgtcaagaaccaagccggcgtgctcatcgcctgcggcgcgacgctctactgggccgacggcaagacggccaccttccactgctcgttcctcgccaacctcaccatggacctgaccgtcatcggcacggacggcacgctccacgtcaccgacttcatcatcccgtacgaggagaagtccggcccgttcagcgtggcgtccaggtcgaacttcgccgagctccacaccgggtgggttccgcagccgagcaggcacgtcgtcacgacagacctgctgcaggaggccctgatggtcaaggagttctgcaggctggtgcagggcatcagagacgccggcgccaggcctgagggcaagtggccggccatcaccaggaagacgcaggttgtgatggatgcggtgaaggcttcattgacaacgngttgaagtctgtcgatggtgtgagctaaatacgacacgtagctgggcatttcggatgatatgtcttccaggca

SEQ ID NO: 173903 - DNA, 349 bp, Zea mays
  Clone ID: MRT4577_90180C.1
ttcttttttttttttttttttttgggggtttttttttttagttttgggttttttttttttgggcaaggcggaaactttgtttgtttggtccgcccggcactcaggaaaaggccctccctggggaaaaacaggggtaaagacttttgaccatttgacaaacgtttaagaaacacggggaaagccaagcgaaaaaactgcccccttttattaaatggaataatctggcccaggggcccggaacccccccacaagactggaaacctcccccacccccattggcggaacccattcactccaatgaactcaaacacagattggccgaaaatcttgccctgggcaaggcccttta

SEQ ID NO: 173904 - DNA, 322 bp, Zea mays
  unsure (1)..(322): unsure at all n locations
  Clone ID: MRT4577_90181C.1
cttgggggcgacataaataggtttctgctgctggcgtccttaatttaataactcgatacacatgcatcttaaggtagcaggggcacatgtatgtgataacgcaataagaataataataatacacatgcactgctttatgctggcataggcacaaagctatataggggggcggactattcatatatacaatgcttacccatgcatttgcgaatgaattagattatcttcgcaattttgcttgtttttgatatattagccaggggatgttaaaagccaggagaatccagaaataacatctggtgnaaatggaggatgacacatg

SEQ ID NO: 173905 - DNA, 426 bp, Zea mays
  Clone ID: MRT4577_90182C.1
ccggagcctttttaactctttttacataaaacatttcatactttattaatttacatatgtaaagaatgttgctttactttctgtgtttctcgagttggcctttttgtcccatctaatctcataccccattgaatcacctttgggtggtgttcgacaaggtttttttgtattcaattcatgtggactcccgtattcttgctgtggaatttgctcctttgatctggcacagatttacataactacctcagatttaccctgaaaccgcttccaaaaattctggacgcaacatcaaatactgccacatgtgacctattaggggcagagcaggcacatggagatccacgtctcctccggcggtgttctagctgacaccaatcatgatgactgcgagagaaggggccccttgttgtttaggactcctgcctc

SEQ ID NO: 173906 - DNA, 812 bp, Zea mays
  Clone ID: MRT4577_90183C.1
gacattgggtacctcgagtaggcggcaccatagtccgggccttcacgagcgcgcacaactgatgcaagccctggggtgttccgcagagcctcaggtcctcagagaagctcacctgtccactctgcagaacagaagcgctcatcctcaggccgtcatccatctaatgcgaagaactacgattccgctctcaaaggcattgaaggccttactttagatggcgacgagagggttcagtactagagcggcaagaagaaattctacatcccctgtaaaaaagcataaccaggtggtaagcattgtgtttcctgttgagttttggatcaacaggaaacagaatgatggaaggaggatctggtcacgtgttgtgcggtttcgggtggccttctgagcaaggtaaataaacggtcctgtccgaggcgcttcaagcctagctctcgtaatgttatcgtcatgtatgtaaatgtgtcttatagtgagcctattttgttgttccaatccttacggtgttccattctgaggtgctgaaccttggggcaacaaggctgaagctggtagggacttcaattggagaactggggttcaagcatgtagaattttaaaatcggttcatttgtctggacaatgttcctgactagtaatgtgatcgcaagacaaacgatgttatttccctctctggttatcaatatgtccatctcttcacacgcctgatagaatattatttgacaaaatgatgttataaatctgtgtaattttcgcaaaaaaaaaaaacaaaaactctcaaatctcggttaagttttagatgctttgatttt

SEQ ID NO: 173907 - DNA, 371 bp, Zea mays
  Clone ID: MRT4577_90184C.1
attaggtgaggagcacagcaagatagcatgcggccacttgacaagataagcctggctagaagcgcaccccgcaacatattattcgagggcagaaaattgtagccggacaggggggctaggggaaggggtgcatgggtgcacatctacctagcactcatagggaaagaaaacgagggcgcgcgtgcgctagttcacgccctgtggggggttggttacaggagggtccaccaagcacggcttccgcgcacggggatacataaacaaccaatgaacggtggacacacagacagaacaaccccaggctgaaggagctcaggcacaggtggagcgggggtgccgacgacgagactttaaacctggggagccaatat

SEQ ID NO: 173908 - DNA, 649 bp, Zea mays
  Clone ID: MRT4577_90185C.1
tgtttttccgagacccagtcacatcttcttgctactgtcctgatcataagctggtctgtcactgaggtacaaatcacttgatgtgattctctaaatcactcacttatcatcaggtactctttctttgcaatgaaggaggcatttggctctgcaccttcctggctatcatgaaggtagagttgtacacggaactcttcgggtgcaaagccggcaactttccaatcaattaccttggcatcccaattcacttcaaaaaattaagaaatcgggattgggctagagttggagagcgctttgagaagagactcagtagctggaaagggaaacatctctccatcggaggccgtccgactttgattaattcagttcttagtagccttccgatgtatatgatgtctttcttctccatccctaaaggagttatcaagacattagattattttcgttcaagatttttttggtagggggatgaaaacaaaaaaaaaggcttgctaaatgatctattctgtgccaaccaaaagaccagggaggaattggaatcctagatttgaacactatgaatagagcccttcttagcaaatggttgtataaattgcttacctctgatggtatgtggcaacaattgctccgtaataaatacataggttcc

SEQ ID NO: 173909 - DNA, 356 bp, Zea mays
  Clone ID: MRT4577_90186C.1
ctcgaggccggccgggatacgctttccacatgcctattgtccttgacccatgttatcctgtagcatgcatcggtcagacggatgagcaaaaatggtctcagtctgcctaggtcgcctttccttgcctcgatgtgtgtctgtctccagagatgctcttgccctgagacggagtcgactgaagatgtacctagatccgggccactcctctgaggtgggaggcggcttcttacgctcagcgttcgcgaaggtgtcgctcgtgtgctaccctcctgggaccaggatctgcgtcaagagatagacggctagatgtatccgggtctgtctcgtggcgaactgctatccgagatgcgaggctt

SEQ ID NO: 173910 - DNA, 2081 bp, Zea mays
  Clone ID: MRT4577_90187C.1
ctcccggctcccctgcctgcgcgccgtctcctccaggctccagcgcctcgcggccaccccgtacgtaccacggctgcacggccgatggcgtaccccgcggcgccgcacacgagcgcggccttcctcgccagcttcgcgacgccgctccccgcgcgctgcgcctcgcccccgacccggcgccgcgcggtgtcggccgccgccatcgccaccaccaccacctgcgtattcgccgacgccccccgggggatcaaggaggagcaggcggactcgggcgcccaggcggcggcggctgcggctgcgcggagggacgtcagcccggacaccgtggcctccatcatcctcggcggtggcgccggcacgcgcctcttcccgctcacgcgtacaagggccaagcccgcggtgcccgtcgggggatgctacaggctcatcgacatcccgatgagcaactgcataaacagcatgatcaacaagatctacgtcctcacccagtttgaattcccaatctgtatgaggccatttcacgtcctttcataagcctcgggtagtgccggcgcgcgcagggtatcttttgttcgtgctggcagctacccaaactgctggggaatccggaaagaaatggttccagggaacagcagatgctgtcaggcagttcctctggctttttgaggatgcaagactcaaatgtatagaaaacatactgattctgtctggtgatcatctgtatcggatggattacatggattttgtgcagaagcatgttgactctggtgctgatatttcagttgcgtgtgttccaatggatgaaagtcgagcatctgattttggattgatgaaggccgacaggaatgggcacatcactgatttccttgaaaagcccaagggtgcagatttggaatcaatgcaagtggacatgggattgtttggattatccccagagtttgcaagtacgtacaaatacatggcttcaatgggaatatatgtattcaaggcagatgttctcagaaagcttctgagaggccattatcctacagctaatgattttggcttagaagtgattccaatggctgcaaaagattatgatgtgcaggcttatttgtttgatggttactgggaagatattggaacaataaagtctttctttgaagcaaaccttgctctcactgatcagtctcccaacttctatttttatgatcccgtgaagcctatttttacatctcctagatttttacccccaaccaaggttttgaactctatagtttcacatggctgctttctaactgagtgcagtgttgagcactctgtcattggtatccgctcaaggttagaaccgggagtgcagctcaaggacaccatgatgatgggggcagattactaccagactgaagctgagagattatctgagctgtctgttggaaaagtcccagtcggtgttggagagaacactaaaataaggaactgtatcattgataaaaatgctcgaattggaaagaatgtagtcattatgaactctgagaatgtgcaagaagcagacaggccagctgaaggatattacattcgttctgggataactgtggtgctcaagaatgcagtaattctgaatggtacaaaaatttagaagattatagaattatctgcagaataccaatccctcagtgaagagcacagcattgaagcccacagcagagttctacgacgcagatgcagtcaataaaaccccaatagcacaaaagattaggagactgtcgatgcagctaaagaagtgtggatataggcatggagcacctgcaacacgccaacggtacggccaaaccatgagcatgaggccatttcacgtcctttcataagcctcggctagtgccggcgcgcgcagggtatcttttgttccttttttctagcagtaatttacgtgaagtgtctgtacatgtagagggagagatagggtacattacgagagagcatgttatagtacctactcttattatttgtttatttatcgttgtgccgaagaaaaaaaaaaaaaaaaaaaaaaaaaaaaaaaaaaaaaaaaaaaaaaaaaaaaaaaaaaaaaaaaaaaaaaaaaa

SEQ ID NO: 173911 - DNA, 161 bp, Zea mays
  Clone ID: MRT4577_90188C.1
gttcgtattcttcaattcttaccaagataaatctcaatcaatatattgatcatttctagggaacacaagccggtatgagggcaccatttgtgggtacatctcatatgttaacctacagatgggacctccaatgttggggttgttgccaggctcggtatatt

SEQ ID NO: 173912 - DNA, 231 bp, Zea mays
  Clone ID: MRT4577_90189C.1
tttatattacaaggtgagcgtctgctgtatccgagccaaccttagcctccctggcatgccatggcttttctatagtgtcgtgtaacttcaattcaatgcactggccgctacatcacaacgtctggactgactctgccctggcgtaactcaactgcatcgtcttgcagctcattttcgtcacctgaggtgtcatcaaagagaacaggtccgttcgcacttcccatcagtaca

SEQ ID NO: 173913 - DNA, 1132 bp, Zea mays
  Clone ID: MRT4577_9018C.1
tagcatgggataacatcataggattccggtcctattgtgttggccttcgggatcggagtaatgattaatagggacagtcgggggcattcgtatttcatagtcagaggtgaaattcttggatttatgaaagacgaacaactgcgaaagcatttgccaaggatgttttcattaatcaagaacgaaagttgggggctcgaagacgatcagataccgtcctagtctcaaccataaaagatgcgcgtaatcactcctatgggcgctgattggcctcggggccggcggggatcacagtcgaaacaaagccacaacacatacaggaaagcgagcaagaatcatcggaataatggctcgtgcatgcgtgttcctcgtcgtgctcctcctggccgccatcgcggtggcaccgttcgcgggcgccgcacgcgtggacgtcgtggagggtaggtccatggcatccgccgatgcaccggaggcggcggccgatgctcccgctcctagccccgactccgcctcatccccagactcgtcatcggaggcgccctccagcagcagttcctccgactagacgcaaaaacctcttcattctctggaataactaacagtgtatacgttgcaccctggtgatatagaaacatgtacgtgcatcagcgtatggaatgcgagtggcaaacacatgggatgtgcttgcctattattgtttatttctttatttattatatgtccctctcggttgttttttatttttcttaatgcatgtaatataatttgttatacccaatatatacaatgagtgctatgcgctttaattctatggtgacgacggttgttttatttttcttgatgcatgtaatgtaatttgttatacccaatatatacaatgtgtgctatgcgctttaattcaaaaaaaaaaaaaaaaaaagcggccgcccaccgttttctcagttcattttatttgtacagtcggtgttcctagcagtattgtgtcgtttgatccattgggtgctagggcagtgaccatatagcatttgtacccatgatagatataggaaaagttacttggtgctcttgtattattgtgtgatgtcataagtctccttgtatcgagctagtggtaatttgtgcttcgtttgcatat

SEQ ID NO: 173914 - DNA, 557 bp, Zea mays
  unsure (1)..(557): unsure at all n locations
  Clone ID: MRT4577_90190C.1
cagctgtcctgcggcctcatcctatccgcgcacgtagcgtagcggggatcgcaccgcccgccgctcaatcaccatgccgcctctcgccaccacgtacaccaagtacgagacccgccgccgagatccggacccccgcgcggncgtgctcctcgtgatcgacgtgcagggccacttcgcctcgctggccgccccgatcatgccggccatcgcgtccaccgtcgctctgtgccgcgccgcgggcgtgccggtcgtgtacacccgccaacatggcgtacgggttcgcttacctcgtcgattgcaagcggctcgaggcggcgctggggaaggcggcccagtgatgaggtgtgtgcgacgttgtgaacttgtgatccagatgctctgcaccttgtatttatacctttacgggtgggcctatgcttgttgaactgcgctgctgagtttgcttgcatacaagatgcacgctggcccattggcccttgtgtctgctttcaggccttcggtggatcgatcggctatgatgcgaatgtatagaacctatgtatacgtaaaaaagaaaa

SEQ ID NO: 173915 - DNA, 1051 bp, Zea mays
  Clone ID: MRT4577_90191C.1
gtagaatatacctcgtgcttcacgtggcatgagatgacaccggacctactctaagcaaccgggtgacggatgttaagtccgcgcgggaaccagctattccctcgggcgcggatctgcaacagctgtcctccggcctcatcctatccgcgcacgtagcgtagcggggatcgcaccgcccgccgctcaatcaccatgccgcctctcgccaccacgtacaccaagtacgagacccgccgccgagatccggacccccgcgcggccgtgctcctcgtgatcgacgtgcagggccacttcgcctcgctggccgccccgatcatgccggccatcgcgtccaccgtcgctctgtgccgcgccgcgggcgtgccggtcgtgtacacccgccacgtggacccggtcccgcgcctgcccccgctcggcgagtggtggcccggcgaccgcatcgacgccggcacgcccgcggccgagctgctcccgggggccggccgcgcccagggggacctcgtggtggagaagggcacgtacagcgccttcgtgggcacggggctggaggcgacgctgcggcggatgggcgccggggaggtgatcgtggccggcgtgatgaccaacctgtgctgcgagaccaccgcgcgggacgccttcgtcagggggttccgcgtgttcttctccgccgacgccacggccacggccagccaggacctgcaggatgccacgctcgccaacatggcgtacgggttcgcttacctcgtcgattgcaagcggctcgaggcggcgctggggaaggcggcccagtgatgaggtgtgtgcgacgttgtgaacttgtgatccagatgctctgccccttgtatttatacctttacggttgtgcctatgcttgttgaactgcgctgctgagtttgcttgcatacaaaatgcacgctggcccattggcccttgtgtctgctttcaggccttcgttggatcgatcggctatgatgcgaatgtatagaacctatgtatacgaaaaaaaaaaaaaaaaaaggcccctaccacccgctaacgcctgcttgttcag

SEQ ID NO: 173916 - DNA, 348 bp, Zea mays
  Clone ID: MRT4577_90192C.1
ggaggtcactaatctcgtcaaagtcattccagactttggatctcttcctcgacgctgtatcgcctgtgtacacgactttgtcgatgacgagcacgcgactgacgcgttgatgcagagagcggtagtctgcagtgacgacgacgaggtgaatctgatcgcggatgcctactcgatgagcttcgtgcacaacttagacaagacatactgggacgcctacgaggacacgtaccgagtgagcgatctcatggacaaattgcgcagagcgcgccgactgcagctgctggacccgtctgcggagctcggagcctctacgatgttggacgtcacgccggaagagattcgacggac

SEQ ID NO: 173917 - DNA, 415 bp, Zea mays
  Clone ID: MRT4577_90193C.1
cttctccttgacattcttctggcccttgtccttcttatctgggttttctttgcccttctcctcgccttcggcgcgcccaccaccatgcttcttttccttcttcactgggtccttgccctctgaatccttcgctttatccttcttgtcttgctctgccttacctgaatcgtcaccaccttccttcttttgcttggctttcttcttagtatccttcttcttggaaccctttgctcccgcaccgtcacccgagtttttgaccttttccttttgaacaaacttggcctcaatctatacctggacctttttccttgccgactttcctcgcaggaccgttcgcccttgtttttgaccttcacatggatcttttccttggactctttctcctccttaagcttggcagattctccggccttcc

SEQ ID NO: 173918 - DNA, 201 bp, Zea mays
  Clone ID: MRT4577_90194C.1
cccacgcgtccgcagtcctgcagcacgctctccaatgcgtcgtagcgtctcaccaactcggggacggagctatatcaagtcaccacaacacacaagttcacacttaaaaaaattcctatattaaaatgatatcacccgcacaacaagatctagacccatatctttatatcccacaacaagcgttatgtcacatatattgaa

SEQ ID NO: 173919 - DNA, 387 bp, Zea mays
  Clone ID: MRT4577_90195C.1
gacccacgcggggcgttaacttctgaaccccaaataggtttcaactgaggattacaattattttttcaagaaaaccttcaggcattactttaaccctttggcatcatcacacttcactactataggttaggtacaaattacgtcaaattctttatgttctgctacaaagaaagaaaaattaacttcttataataagaaaacccacaatattatactatatgttaaacctgtattcatatcataataccttttattgataaaatttcccaaaatattttaactttttcaaatttattttttactctaaatacccttcctttaatgtttctctttagatttttcaataaaatccaattgttcttataattaaaaaaaagcttattctta

SEQ ID NO: 173920 - DNA, 214 bp, Zea mays
  Clone ID: MRT4577_90196C.1
agactttataatcgcacaagaccaccgccatgatgaaagctgtccgtgtcttggacatcaacatcaaaccgaacttcaactcactgcatgtcattcaaaaggcgctcaacgtgaatcaaatgctcttcatgaacatgctgatataaacctaggtgctcgagctccacctcaatccactggccgtcaatcttactatgcttctttaaatcctgat

SEQ ID NO: 173921 - DNA, 419 bp, Zea mays
  Clone ID: MRT4577_90197C.1
gatcccgcctggggccggctgagtggcacttaagcgggccatgccatgcaaccttgggcgctgccaaccgtgggcgagctctgggtgtgcgggcggcctggcgcggcgctccgctgtgtcagcgtgttatgatgccgtcccgtaccaacctggctactggaatccccagtagtaaagtgaaatattcaaggctctccagcacagacgatggctacattgaccttcagtttaagaaaacccctcctaagatcccttataaggccatcgcacttgccactgtgctgtttttgattggcgcctttctcattattataggctccctcctgctgtcaggctacatcagcaaagggggggcagaccgggccgttccagtgctgatcattggcattctggtgttcctacccggattttaccacctg

SEQ ID NO: 173922 - DNA, 429 bp, Zea mays
  Clone ID: MRT4577_90198C.1
cccacacgtccgtgcacgcgtacgaggaaagcatgaaccgaacgaaaccgacaagatacagggcgagccaacactccagtgtttcttatacagcaggcaccaggcactaggcgcctgcattgcttgcgtagccgcccaattagtctttcgctaccctaagatcggtcggacgaagaacaggccaatctcagttcatcataagtgaaactgctgagaccagacctactggattccttcacttcaaagttggcatgaccatcacgcctatgaagaggctggccactactctaagaggaaagcagtcaatatctgagcttacactggggctagaactgaccagagacaacttgtaacacgtaggacaccacccaatgatctggttagaagaacaggcaaacaacataaagtgcccgcttatgaaggtcgtca

SEQ ID NO: 173923 - DNA, 382 bp, Zea mays
  Clone ID: MRT4577_90199C.1
ggcaaaaaaaagggggctgcccccaaataaaaaaggccctttttgcaaacccttttgtcccgggcgggggcgagtccaaccttttttgaaaaaccaaaaggcataaaccgcgacccaaatttttttccgctaaattaaaaaaagcaagctctgttcaattaggaaccacaaaaacggattcggggaaaacaaaccccacatttggaagccagcttcgtcttcatccaaaaaccgcaacggcgcgggtccaaacgggatgtcccccatagccgggggcctcatttgcctggccctgaaaaaaaagaacccccagcccggggagcccttggcggcaaagctaataaggtctttggggcccaagttcccggcccccggcaaatac

SEQ ID NO: 173924 - DNA, 648 bp, Zea mays
  Clone ID: MRT4577_9019C.1
actcctatgggcgattgggttcctcgaggccggccgggaaaaaaaaaatcacagtcgaaacaaagccacaacacatacaggaaagagcaagcaagaatcatcggaataatggctcgtgcatgtgtgttcctcgtcgtgctcctcctggccgccatcgcggtggcaccgttcgcgggcgccgcacgcgtggacgtcgtggagggtaggtccatggcatccgccgatgcaccggaggcggcggccgatgctcccgctcctagccccgactccgcctcatccccagactcatcgtcagaggcgccctccagcagcagctcctccgactagacgcaaaaacctcttcattctctggaataactaacagtatatacgttgcaccttgatgatatagaaacatgtacgtgcatcagtgtatggaatgcgagtggcaaacacatggaatgtgcttgcctaattattgtttatttctttatttattatatgtctctctcggttgttttttatttttcttaatgcatgtaatataatttgttatacccaatatagacaatgtgtgatatgcgctttaattctatggtgacgatggcaccgttttctcagttcaaaaaaaaaaaaaaaaaaatttgcggcccaccgttttctcagttc

SEQ ID NO: 173925 - DNA, 202 bp, Zea mays
  Clone ID: MRT4577_901C.1
cgcgtccgctggtcatggctggcgccgcgctgctcgccttggctgccggcgccggcgcgcatcatggcgtgtggtgcatcatcacccggcccatgttccaaagcatgctgagccaccgcggcgacagcgggtgccaaggcgccttctacacctaccacgccttcattgaggccggcaacaaattccccgggtttcgcaccac

SEQ ID NO: 173926 - DNA, 348 bp, Zea mays
  Clone ID: MRT4577_90200C.1
atgatgaattcatgcgagcagcgggagaggcacctccatgaaccataacgttataacgaccgaagtgctggcggagaggctgacgggcgccaaggatgtcgggcaccacgagaccgtgagcctgtgcctgccgtcctactcgctggtgcgcaccgtgctgtatatgatcacgtacgtattcggaggcctgccgctgctcagattcgatgtgaaccaatacaaccggctgcaggaccgcttgttcgtttggttcttgcatccagcagtgattctgatggatcagatacaaccactgatgatgagcgacgaggaggtcaagttcctgtagaaactgaccgtgtgcccact

SEQ ID NO: 173927 - DNA, 2273 bp, Zea mays
  Clone ID: MRT4577_90201C.1
acccacgtttctttaccctaaccttttcaccgctcgagtcttgggatacagccgccgccgtttcttcatctcccatcttcatagtcgcgctaggcacacaggcgtcggcggcggcgctcaggctcgggatctcagctacaggaaatggcagggcaagcagggaacccagtaaaccaccctataagtccccacgtgataagtggcgctttcgttcagcaatattaccacattttacacgaacaaccagatcaagtgcacaagttttaccaagattcaagtattcttggtcgaccagattccaatggaattatggcatatgtaaccactatgcgtgatattaatgaaaaaatcatgtctatggacttcaggaactgcttaacagagatagagactgcagatgcacaattatctcacaaggatggggtgctcattgttgttactggttccttgacttcggatgaaggcgttttccgtaggtttacccagtcattcttcctagcaccacaagaaagtggtggctattttgttctcactgatgtatttagatttatttcggaaaggaaaccagctgagataaatcaagttgctactcaagaaaatgaaatcagtcagaatgttagacctgcatctgaaacatgttcagcactaccagaacctattccagctgatgggagtgtgatctcagaccatgtgacagctgatagtaatgtcacggagaagcaaataagtgatctttctgctaatgggactgccattgaaagtaatgataatacccagccacctgtgcaagtgcccaaagaggatccaaagaaggccctacttgttgctcctccccctccaactcagatggatgttactaagaaatcttatgcatccattgtcaaggtcatgaaggagggcccaccaactccagttgtcaaaacaacatcgtcagtttccaaacagaagccagctcctaaaccagtgtccacggctgtcgaaggcctagagaaaccatctgagaaacctacccaggctattggaaccggtgatgggattgttgcccaaaacaactcttctcgcaatgagcaaggctattcaattttcatcaagaatttgcctttccatgccaatattgaaatggttgaggaggaatttaagaaatttggtactataaagccaggtggtgttcaagtccggcacaataaggttgatcgatttggttttggttttgttgagtacgagtcccagcagtctatgcaagcagcaattgaggcatctccgattcgtatggcggacaaagaagtcggcattgaggcgaaaagagccaattcacgaggtggccgtttccaatctggcaggggagtgtaccatggtgataactttagagggcgaggaagtggctatgtggacaacacaaactacagaagcagcggcagcttcaaccgccagaatgaaggggagatgtacaaccgcaggaatgaaggggagatgtacaaccgcaggaatgaaggggacttctacaaccacaggaatgagggggagttctacaaccgacggaatgatggtggcgagaactacaaccggcgcaacgatggtggcgagaactataaccggcgcaatgatggtggcaagaacttcagccgcaggaatgacagtggtaccgagaacttcaaccgcaggaatgacggtggcggcgagaacttcagccgcaggaacgatggtgttggcgagaacttcaacgtcaggaatgacggcgttggtgagaacttcaacaggaggaacaacttcagaaatcagaatgacttccctggacgaggacggggttcacctacaccagggaacagttactaccagaacgggaatgggaggttcagtcgcgtgaacaatggcgccaagcaagctcctgtggccgcgtagaggcatcaaggcggtaggcttacatcaaactaggaagcataaggctacattcaagtgagctgagtgcaaggattattcttagtaggagcattgctgtcagacagcttggttatttttttttgtgccgtgttgggtcgctaagagattagtagttgcagtcgtccgtggatggtaggtgaattttgttgccgttgatgagcttgtcaactgggtgttggaccatggttcgtaactttgtgtcatctgccaatcaggattggtgggaggttagacactaatcttatgaagcggtgactgcaaaaatcagtgtccatgttaaatgctattattgtcatggtattcgataatgcgaagtatgtccatgtttagtgctg

SEQ ID NO: 173928 - DNA, 869 bp, Zea mays
  unsure (1)..(869): unsure at all n locations
  Clone ID: MRT4577_90202C.1
gggtaccctcgnggnctcggcggccacgcgtccgcgtttctttaccctaaccttttcaccgctcgagccaagggacacagccgccgccgtttcttcatctcccatcttcatagtcgcgctaggcacacaggcgtcggcggcggcgctcaggctcgggatctcagctacagcgtcagcggcttcctctcccgcctctcgccagtcgtctcgcgccctcgcttccgatcctccgcacaccggccggtgaccctgcaaatggcagggcaagcagggaacccagtaaaccaccctataagtccccacgtgataagtggcgctttcgttcagcaatattaccacattttacacgaacaaccagatcaagtgcacaagttttaccaagattcaagtattcttggtcgaccagattccaatggaattatggcatatgtaaccactatgcgtgatattaatgaaaaaatcatgtctatggacttcaggaactgcttaacagagatagagactgcagatgcacaattatctcacaaggatggggtgctcattgttgttactggttccttgacttcggatgaaggcgttttccgtaggtttacccagtcattcttcctagcaccacaagaaagtggtggctattttgttctcactgatgtatttagatttatttcggaaaggaaaccagctgagataaatcaagttgctactcaagaaaatgaaatcagtcagaatgttagacctgcatctgaaacatgttcagcactaccagaacctattccagctgatgggagtgtgatctcagaccatgtgacagctgatagtaatgtcacggaggagcaaataagtgatctttctgctcaagcggctgccattga

SEQ ID NO: 173929 - DNA, 630 bp, Zea mays
  Clone ID: MRT4577_90203C.1
gacccacggtaccgccggcaaactccgttccgacaacatctagggataagtacaggagtacacgccgagccgacgctcccgtccgcacaactcgaccccgtcgtgccctaatacgacaaggccacgcagggtgatcaccgctaatccagttgggcaaacacaccgttcgccacgcggagcggtcattcttcccccccccctctccccccagttgggacaacccaatccttcatcacgcagagtggtcactcacatcccagttgggacacccccacccctacccccctcttacccgtgtattatcctgcccgccacccctttaacgcgtacctggcctggggactagagtgggtagtcttcctcgttatcgttttgataacttgtcgttgtttggaggagaactactttcctacgtggacaactaaggctatatctactaggatgattcatactctctacaagatcaggtagaccttaaactagtaagaggtcgactagaacctggagaaattctccacgaacgagacaatccattcctaggacctgaactataagtcttcaaccaagaaaggtaagatgaaggaggactaggtcgtcctttacgtacactaggagtccaagtaggacttg

SEQ ID NO: 173930 - DNA, 554 bp, Zea mays
  Clone ID: MRT4577_90204C.1
gactctagattcattatcatccatttgaatatagacataaaaattaggggataaaatgaatataatttgggacggagggagtatttaactaatggaagaaatcaccccatatgacacttaggttctgaagtttcatcccatatgattcactgatcggaactcatccttatcttcaaacaaacaaacaacatctaagccctttagtcccaagcaagttagtgtagactagagttgaaatgtaatagaaaccacaaatcaaggtttaggaacatagataactgtttttcctacactcctatttaaggctaaatctttagatatatttcatccttttaaatctccttttactatctcttctcattacaacttagacctttgcatacctctcttctcattactatcacgccttaagttgttactatgtgctgatgcttacagtcagttgaacatgtccaaaccatcttcacaggtgttggaaaatgtctattcaattagtgctatccctagtctatcatgtatatcaccatttcaaactctatcccttttcgtacctt

SEQ ID NO: 173931 - DNA, 283 bp, Zea mays
  unsure (1)..(283): unsure at all n locations
  Clone ID: MRT4577_90205C.1
cccaatcgtattatgacacaaagtttttctcctctaattgnanaaaaaaaaggagctatttcttttttttttatttcccactaatatactaaatgatatgaacttccttaaaaaaaatgctattatttctattgaaaaaaattcaaaactcttaaaaaagatatattcattgtttaattgataaagaagcctctcgttgtgatacttttaatttgtctttaataatgtaaacaaaattttttcccacctgttggttatgagattatgtaactgctccaccgtt

SEQ ID NO: 173932 - DNA, 333 bp, Zea mays
  Clone ID: MRT4577_90206C.1
atgcggtggagatctcccgccgtgctgcggctgcagctgtggctgctcgccgtctccgcgtcgtcggctgccctcggtgttctcgcggctgatcttagcaaaggttctcgcatttgtgctggtactgcgccgtcggggtcagggttggtggaggcgcgtccgtggatcccaccctcacagagagcagcgccgtcgagggcgagggcgagggcagtgggcgcgcgtgggagggagcagttcacgaggcaagatgaagcactcagaaactcgtcgtcgtgcaccacgcctcatcgacgaccgcttagacgtctagaagtaaagattcaaaagtaa

SEQ ID NO: 173933 - DNA, 275 bp, Zea mays
  unsure (1)..(275): unsure at all n locations
  Clone ID: MRT4577_90207C.1
cggacgcttgggcggacgcgtgggctgtgacggaacagaccatgcaagcaagaacctgcagcgacgcgcaggccaccggtcatggtgagcaataagcgccctcctcctcccagaaactactgcctgccagtcctacgtggcgccccgttcgtgatctgctccatctgcgtcaggctgggggggctgcccnccnanttcncctttcttattaaannaacncnccnnctgcnntncnnctcctnctccnaantcctctcctactcctacannnaccc

SEQ ID NO: 173934 - DNA, 475 bp, Zea mays
  Clone ID: MRT4577_90208C.1
ggggggttaaaacccgagccttataatgggttttttcccccccggcccgggggggaggtcaaaaaaaaaaaaaggcgactttttttggtgggccataatatcacagggcttggcccggggggaaccacagttccggtttttttccttgccccttggacaaaaccccaaccggaaccacgggcccggggtttaagttgcccagggcgcccccggccattggaaaggggccgccccccgggtgggcctgtggttgggcctcccccttttggagggggggaaaggggatctcttgggaccagggtaccggttggggccggggcaatccatgaaagggccgttccccgcccggccaaaataaaggtggaaccacattgtctttgcgaaggggcccttggtggactggacacccggggcggggtgaggccccttttggagaccttgggggacccccttggggccgaaagccccaaatccg

SEQ ID NO: 173935 - DNA, 136 bp, Zea mays
  Clone ID: MRT4577_90209C.1
ctaagagtgtcttggacattcaaaattgagggagcgtaagatagagtatgacttgaagacagcaatatctttggttaaagaaacagctaaaaccaagtttgtagaaacagtagaagcccatttccacacaacatac

SEQ ID NO: 173936 - DNA, 573 bp, Zea mays
  unsure (1)..(573): unsure at all n locations
  Clone ID: MRT4577_9020C.1
cgtattgccactaaaagcaggtccagatgtgctttcagatttgcactacgagaaagtcggctttggatccagccctttggttgacctttggcttttaagggggcaaaagccaaagccaaaagtcaaaccaaacacaccctagtacataatacaatcaccaaaagaagcagacatgcaaatgaactctgcagtctgcagctattagatttttgcaataaaactaaagcaaacaaacaaatagatgatttaattaattctgcaaatgattaatttttcatacatttgattttgtagtgctctttcagatatatattggagtcaagcagcttcgagttgtttttccagtatgttgaattgtcaaacttcgatattgcatctgatgctttgaacacttttaaggatttgctaaccaaacatgaagatgccgtctctgaatttctgagctcacattatgaacagttttttggactctacacanaacttttatcttcactaattatgtgacacgaagacaatcagtgaagtttcttcagagtttctgtggaggccccaatgctcaaatatgagcgtaca

SEQ ID NO: 173937 - DNA, 234 bp, Zea mays
  Clone ID: MRT4577_90210C.1
gcccaagcttaaaaaaacaggatttcaaacctaaaaattgcggaacccgccccaaagaaaacaggggggccccatggaccccccagccaccacaagagggaaagttggaaacaccggccccggaagggccggagccccaccccaggaggggtcggcaccaaaagcgaaccccggaaaggggggggggccctttgaacaaagaggaaaactggggtggacccaaaaaacgccccc

SEQ ID NO: 173938 - DNA, 629 bp, Zea mays
  Clone ID: MRT4577_90211C.1
atttctatttgtctctctgcgtctctccctaacataatcacaagtattgccatgagacatcttctaaccgatgacaagattcccaagtctgctccagcattcaacctctatgcacaagacccaggacttgtggatcccaccctgaacttgctgactgtgatccgatcaatacgacaaaaccccactcatgttgaacatttcaccgtgccacaagcctgtagagctgtatggactgaaaccactctcctttcctgagtatctcaagctgatggcttgcatcgatgacggactctcaatctcacccttacctcaaagactcctaccacgagtatcgcagataccagcactctgacatctctggtggtgcacttcgcaatgtaatgtccgacctaggttgccatctgaaggacgcatgaggtgccatgaaaagatacgcgacgcctacatcaacgctgatgggcagaacaactatgacgagaacctgactgccaactaggacgctcgtgatgatgtgcccgatatcaggctcatccctctcctgcaggaagcatcctagctaatgtggtatgctcaatgtatatgagacaccagagttcctctcgctaggtctctggatctatccgttagca

SEQ ID NO: 173939 - DNA, 155 bp, Zea mays
  Clone ID: MRT4577_90212C.1
tcgagcggtctaaccccaaaccctaaaccatggcgccgccggccccatccgtcggtccccggctcctaatccgccggctcctctctacggctaccgaaacagcggctgggatacctgtgtccaccggccccaagttcgtcgtcggcgcgaaccgg

SEQ ID NO: 173940 - DNA, 294 bp, Zea mays
  Clone ID: MRT4577_90213C.1
cgccctcgcaagccacttcatcaagaagccggactgggcgccaacgagagacgctccctctttccggtggaccggaacccgccacggcttatcgcccttaacaccatggcacggcggttccacatccccgaccccgttccacgggggcgggtgttgccaccctcctactgcatgctattgaggtacgctgcctttacgctgccacgggtggtgccgatgaagttgctcttcgacgatgacctgctccggaaccggctcgcaccgcgggtctacatccacatccggtgccagctc

SEQ ID NO: 173941 - DNA, 316 bp, Zea mays
  unsure (1)..(316): unsure at all n locations
  Clone ID: MRT4577_90214C.1
ctcaagctcaaaattcttctccagccctccacaatttctcccccaactnccccncaccccaagtttctacaacaatggtctggcccacnnacccccaccttcccacaactaaacaactatctcacaccaatccctcaaacatagaacatatccataagttctacccataaaaacaaaaacccgggaatgacaccatctcccttaccaaccgagatcaccatatataacttacaatccaaagagctccaccctcctaaacctagacaaccaatctacacccatctatatcaaactataatcaacaaatttacccccc

SEQ ID NO: 173942 - DNA, 291 bp, Zea mays
  unsure (1)..(291): unsure at all n locations
  Clone ID: MRT4577_90215C.1
attcggctcgagggctatcccgcattttttagtcgggggccgctactagggcaaggcccgtgctactttcagatctccccggcgaggatgaagtgcatacaccagccgggagggagatgtcattcatgcattgtttcctgcttcccccaatccccaagccggtgaagggggtactcaggctcgtgccccgggggatcaaggacttggaacgggctctgccagtgacatttatgagcccacnnnngaagatcaagaatcaggagctttctgacgatgagtgtgtcattgaac

SEQ ID NO: 173943 - DNA, 147 bp, Zea mays
  Clone ID: MRT4577_90216C.1
tcgctccactcgttcgcccactcatacggcccaaagacatacagctagacctctacatcggtggtgagcgctcagtgacatttccttcaccctttcccaatcctattcgagtcaaaggtaccagcactatattatcttttactgaat

SEQ ID NO: 173944 - DNA, 282 bp, Zea mays
  Clone ID: MRT4577_90217C.1
atttaccacacctcttactagatatattaggaatagacaactgatgttcagttggcgaactactctttaccctctgatctgatgatgctattgtataccagactcttttgaagctctttaactcatctaagtagaaagtagcttttaatttgaaaaaaagtaatcttggttgggtttcctctatcaatgtaattatgttcatgtcaccagtaccattcaaaattcactaaccatctatatactggactaccatctaattcctcatactcatttttagtactt

SEQ ID NO: 173945 - DNA, 122 bp, Zea mays
  Clone ID: MRT4577_90218C.1
ctcaagccgatcaaggttgtcataccacaaaatgcgctcgaggctaaaggggtggttttggccaaaattcctgatccaaacccaactgtattttttgagccacaaacgcttgatctgttggg

SEQ ID NO: 173946 - DNA, 315 bp, Zea mays
  Clone ID: MRT4577_90219C.1
gtcagaaccagcacaggactgaacacatccctggttgtaggtatataatgcagccctccaagctcggcaggcatcccctgcctggaagtgaccacagtgactgctgccttatattcctacattccaggccagaaccagcacaggactgaacacatccctggttgtaatgtccatttccatcttcccctaatccctatccacatcaaggcacatcagacttcgcagagacccactttattcagttctgtacatatggggacatcggtccaagcccaacccaccttagcatgtatcactctgtggagaataaagcac

SEQ ID NO: 173947 - DNA, 122 bp, Zea mays
  Clone ID: MRT4577_9021C.1
cccagcgtccgaactgcttcaaatatagcattcagaaccccccctatgtttgtattcaagaagtgtgacatcttctcttcaaccaatgacagtgttaagaacctaaaaattgtaccatgcca

SEQ ID NO: 173948 - DNA, 478 bp, Zea mays
  Clone ID: MRT4577_90220C.1
cccacgcgtccggcaaccgcctccaccccgcgctgctcctcatcatcggcgctggcgcgtgcctgctcgggtacggcaccgcgtggctcctcgtctctggcgtcgcgcccgcgctgccttactggctgatatggtttgggttatgtcttgctaccaatggtggcgcgtggttggcgactgctgttctagtgacaaacatgaggaacttcccagtcagcagaggtgctgttgctggcattctgaaagggtactcgggtttaagtgctgctgtttacaccgaaatatacactggagtgctccgggattcacccatccaccttttccttattcttactttcggaatttctgctgagtgccttctggcaatgtactttgatcagccttgcgaaccctctctggtggtgacgaatgcagagcaagtccattttatgttttgtgcagtggcaagtgtttttcttggggttcatctgggttgggc

SEQ ID NO: 173949 - DNA, 422 bp, Zea mays
  unsure (1)..(422): unsure at all n locations
  Clone ID: MRT4577_90221C.1
gctcggaatncggctcgaggctgcctgcctttctctcttttggcttccgcgagagagcgcacaacacagggcggccgacaacacccgcgcaaacgacaccggcaccgcgccagagcaggaaccaagaaagccacaagcggcggcggcaggccgaggagcggaagagcggcggagacgggcagggcacccaggaggaagcgcgggcagcacggcggcggcggcaaggaaggccgccgacacaaggccggagaaggagaagaagcgcagggggaacggcaagcccaaccgggagaagccccccgcgccagagccggcgcggccaccgacaccgacgccgccgacgcaacccgcggcgacgccacgacggggcaacgcaccggcggaagaagcaggcgacgagcagagcaagcgcgccaacgccg

SEQ ID NO: 173950 - DNA, 389 bp, Zea mays
  Clone ID: MRT4577_90222C.1
cctttgggctgatttatgtgcttgtttatgtgcttggtttggtggtgtgaagtgcagggcgagaacactggagcctggtgacgctgaagtggtagggattgttgaaatattagaattgtcatgtgcggaagttgaattccggctagaagactaatgaaattgagtttgggggtaggccttgattctcgctagaaactattggtgctcgctagtgtcgttgggactaaactgatcggaaatgtagacatggaaaacataagtttaccgccgagttagtaaaacgttagaagcgcaacaagtgaaatgcctggtaagtacattacaatgcacgtagagaccgtcttaaggattctggtacacgcgtcaagcgtcgtatacgcgccaacgag

SEQ ID NO: 173951 - DNA, 993 bp, Zea mays
  Clone ID: MRT4577_90223C.1
tcgaggccggccgggagcactcttagcagcgatcgcagcaccgcggcgagataatgagcagcagcctgtcctccggcatctctgcctcgccatctgcagcgcccagcaccgctcggcgccgccatgacgcagcgccgcagcagctgacgagggtgaaggcggcggcgcggccacagctgctgcacgccggccgccggcgttcgagtgtcgggaggaggccgggcggcggcgcggtggtggtgagggccgggcctgggccactgtcggagatcgagccggacctggaggaggacgccatcgacgtgtaccgcaccaacggcatcagcccggaggacttcgagtacgggaagtatgacggacaccacacctatttcgaaggtcaagacaagaagggcttctgggaggatgtctccgagtggtaccaagaagctgagcctcctcagggctttcaaggggggagtacctgtacatcggggcggctgtcttcatcgtggtgttctgcatcttcgagatgggcaagcccgacaagccgcacaacttcgagccggagatctacatcctggagagggcggctcgcgacaagctcatcgccgactacaactccatggacatctgggacttcaacgagaagtacggcgagctctgggacttcaccgttaaccccagggacgacatcgtcaaatcaacctagatatatatgactctgtcttcagattgttctctcagcaaaagcctgtcagggaaaagaaaccgtagctgctaggaaatgctcttgatgaactaaataaaggaataacaacaacaatgtgagcctcaagttctcagcagtcatccctgtaaaggaaaactggagagcctgaaatctttgtagccatatatgatgcatgcatgtcaggcttctcatagaacatgttctgttctgcacaacagcgagcatgctgttgctccaacttcctgcatgttttttttttcatgtttctccaatacattgag

SEQ ID NO: 173952 - DNA, 711 bp, Zea mays
  unsure (1)..(711): unsure at all n locations
  Clone ID: MRT4577_90224C.1
attgggtacctcgaggccggccgggagcgcacctttatccgcttgctttttgtctcttggccgcaacgtgaagtgcagcagcagccagcagcgggggctggagcactcaccactcagcagcgatcgcagcaccgcggcgggataatgagcagcagcctgtcctccggcatctctgcctcgccatctgcagcggccagcaccgctcggcgccgccatgacgcagcgccgcagcagctgacgagggtgaaggcggcggcgcggccacagctgctgcacgccggccgccggcgttcgagtgtcgggaggaggccgggcggcggcgcggtggtggtgagggccgggcctgggccactgtcggagatcgagccggacctggaggaggacgccatcgacgtgtaccgcaccaacggcatcagcccggaggacttcgagtacgggaagtatgacggacaccacacctatttcgaaggccaagacaagaagggcttctgngaggatgtctccgagtggtaccaagaagctgagcctcctcagggctttcaagcactcatctcctgngcatttcctcctgcgatcatcctcggcatggctttcaatgtgccgggggagtacctgtacatcgggggcggccgtcttcatcgtggtggtctgcgtcatcgagatgggcgagccccgacagccgcacaacttcgaggcggagatctacatgat

SEQ ID NO: 173953 - DNA, 1146 bp, Zea mays
  Clone ID: MRT4577_90225C.1
ataattcacagacattgtgtcaatacaaacacacagtttgcattagggtaagaagtaggtcttcttcctcttggtattaagattcttttcagcatacgaggacttgggattgttttttctctgcagatgtgttctccactggtaccacatggagtagatggtagtgcaggcacctgagaaacatggcattccatagaattttcgagagctcctcgtagtaccgtcgcctcacaagcagtagtagccacacatgaagatatcaccgaaaattaaaggccaacaaaaaggcaccgctaaattggtagcaccaaataatttagagggaactgcttacctcgccgaagcccatgaatttccaaatgtcgtcgtttggggagatctcacacataataaggggggcctcgttggggattcaacgataaaacatattcgaaaccaatgcctgcggaggagagaacgaggacctcgtgccgaattcggcacgagcagcaccgcggcgagataatgagcagcctgtcctccggcatctctgcctcgccatctgcagcgcccagcaccgctcggcgccgccatgacgcagcgccgcagcagctgagggtgaaggcggcggcgcggccacagctgctgcacgccggccgccggcgttcgagtgtcgggaggaggccgggcggcggcgcggtggtggtgagggccgggcctgggccgctgtcggagatcgagccggacctggaggaggacgccatcgacgtgtaccgcaccaacggcatcagcccggtccgtcgtcgtcgtccctcgtttccttccttttcttctcttctcttctcggttgtcgttccgcgcttagttagttagactaggaacacgcaggaaagcagtgaaccttgacgtaggttgtgctatgaacgagagctctgaagaacggagtacgtttcgttcgttcgttcgtggatgacactggagaggatctgtcttgtcttgtcttgtcttgcaggaggacttcgagtacgggaagtatgacggaccacacacctatttcgaaggccaagacaagaagggcttctgggaggatgtctccgagtggtaacaaaaaactgagcctcctcagggttttcaagcactcatctcctgggcatttcctcctgcgat

SEQ ID NO: 173954 - DNA, 1606 bp, Zea mays
  Clone ID: MRT4577_90226C.1
cattgggtacctcgaggccggccggggtagcggttagacgagccgtttagataggtgtcaagtggaagtgcagagaggtatgcagctgaggcatcctaacgaacgaacgatttgaacggagcactcaccagtcaccactcagcagcgatcgcagcaccgcggcgagataatgagcagcctgtcctccggcatctctgcctcgccatctgcagcgcccagcaccgctcggcgccgccatgacgcagcgccgcagcagctgagggtgaaggcggcggcgcggccacagctgctgcacgccggccgccggcgttcgagtgtcgggaggaggccgggcggcggcgcggtggtggtgagggccgggcctgggccgctgtcggagatcgagccggacctggaggaggacgccatcgacgtgtaccgcaccaacggcatcagcccggaggacttcgagtacgggaagtatgacggacaccacacctatttcgaaggccaagacaagaagggcttctgggaggatgtctccgagtggtaccaagaagctgagcctcctcagggctttcaagcactcatctcctgggcatttcctcctgcgatcatcctcggcatggctttcaatgtgccgggggagtacctgtacatcggggcggccgtcttcatcgtggtgttctgcgtcatcgagatgggcaagcccgacaagccgcacaacttcgagccggagatctacatgatggagaggtcggcccgcgacaagctcatcgccgactacaactccatggacatctgggacttcaacgagaagtacggcgagctctgggacttcaccgtcaacaccagggacgacatcgtcaagtcgacctagatgcattgcgtacaccgctcgctgcccttcagattgttgcctcacagcaaaaaaaaccctgtgaaaggaagctgtagctgctaggaaaatctcttgaataaaaaggaaagccatccttcctgtaagactggagagcctgaaaatctgttctatcctcgtgccatataatacacgacatgttctgcagactgttgcttcaactttctgcatgaattgcctttgttttcatgttttctgagggaaaaaaaaattcaacacctcctttcgcctccaggttgtgaacatgttttgcagactgttgcttcccctttcggcatgaattgcttttgttttaaaaaaaaaaaaaaaaaaaaaaaaaaaaaaaaaaaaaaaaaaaaaaaaaaatgacaaaaatgtcctccggcatctctgcctcgccatctgcagcgcccagcaccgctcggcgccgccatgacgcagcgccgcagcagctgacgagggtgaaggcggcggcgcggccacagctgctgcacgccggccgccggcgttcgagtgtcgggaggaggccgggcggcggcgcggtggtggtgagggccgggcctgggccactgtcggagatcgagccggacctggaggaggacgccatcgacgtgtaccgcaccaacggcatcagcccggaggacttcgagtacgggaagtatgacggacaccacacctatttcgaaggccaaggtattactatcctcccggaggatgtctccgagtggt

SEQ ID NO: 173955 - DNA, 677 bp, Zea mays
  unsure (1)..(677): unsure at all n locations
  Clone ID: MRT4577_90227C.1
ctcgaggccggccgggcggagtcatcgacatgctttcctcctccacagctcagctcccgccgcgctgtctcgcgggatacctctacaagaaccatgccccgccttctcgctcgaggtgggaagcgagccggtgggcgcccgtggaggctgcgctgaatcggatgagtaaatggctggtggctggttgttttgcttttgcagctatttggaagcgtgatgctgaaatcatgtgggttttgctgggtgcggttggcaactctctgctttcgttggttctcaagaagatgctaaaccatgaaagacctgcaccagctttgcggtctgatcctgggatgccatcgtcccatgcacaatccatattctatgctgcgaccgtcctagctctttcattgtactactggcttgggacaaattatctgaccatgattcttgggcccgcaactctgtcgttggctgcctatctgtcttggctacgtgtgtctcggggccttcatacactaaaccaggtcatggtgngagctgttgtaggatctgccgtcggtgctctttggtttgtgctctggcattggcttgtgcaggaggcctttgcttcttctgtgcttgtcagagttgctgtcatccttggatcatcagcattttgtgttagctttgtcgtctacatgattcgtcactggctc

SEQ ID NO: 173956 - DNA, 758 bp, Zea mays
  Clone ID: MRT4577_90228C.1
cctcgagccggccgggccggggtctagcgggtcgccgccgctccagaagatgccccgcctattgcttccagctccatcgcctcgcccctgtctgaacgactcggtgcgccgtccaccactctccaaatatcgattcttcctgcccaggactcggaggcggccaagtccgcggcttggcgtgcgaatggcggagatgaccaaggttgggagcgccggggaaccggccgaggttggggtttccatggagagtgacccgattgtgggaggggaggcgccgtcccgcccggggtgggaagcgagccggtgggcgcccgtggaggctgcgctgaatcggatgatgctaaaccatgaaagacccgcaccagctttgcggtctggccctgggatgccgtcgtcccacgcacagtccatattctatgctgcgaccatcctggctctttcattgtactactggcttgggacaaattatctgaccatgattcttgggcctgcaactatgtcagtggctgcctatctgtcttggctacgggtgtctcggcgccttcatacactaaaccaggtcatggcgggagctgttgtaggatctgtcgtcggtgctctatggtttgtgctctggcattcgcttgtgcaggaggcttttgcttcttctctgctggtcaggattgcagtcgttcttggatcatcagcattttgtggtggctttgtcatctacatgattcgtcactggctcagggatgagtaatgtacttcttagccgc

SEQ ID NO: 173957 - DNA, 1679 bp, Zea mays
  Clone ID: MRT4577_90229C.1
acctctccagtcacaagagacaagaccaccaaacacccttttttgcttgtcgtgccctcctccttcctcccagcttctccggtcatcccggagtagagtacggccattctctataccgtcaaccacgtcagggcaacctgccaaacaccgcaattgcgcaatccatccaaattccaaacccccccggcaactccccaattccctctcccggagtcatcgacatgctttcttcctccaatagcttagctcccgccgcgctgtctcgcgggtcgccgccgctccaagaagcatgccccgcctattgcttccagctccatcgcctcgcccctgtctgaacgactcggtgcgccgtccaccactctccaaatatcgattcttcctgcccaggactcggaggcggccaagtccgcggcttggcgtgcgaatggcggagatgaccaaggttgggagcgccggggaaccggccgaggttggggtttccatggagagtgacccgattgtgggaggggaggcgccgtcccgcccggggtgggaagcgagccggtgggcgcccgtggaggctgcgctgaatcggatgagtaaatggctggtggctggttttcttgcttttgcagctatttggaagcgtgatgctgaaattatgtggtttttgctgggtgcggttggcaactctctgctttcgatggttctattgaagacctcgaggccggaagggtttttttgtatgcctgcattattttcttactaaaaatgattaaaaaagcagcacatgcagcctatattcttgctgattcacatttcatcatactgttagctccttgaggatgcattgcaagatccgtggtaaactgtatgttaatttgtggtagacagaaaataatatcttttccttttacaatttgagaagcttgacaagctcggttccttggccttgatattttttcctaacctagaacttaatatgggcataattgttagcatcaggcaaactgcgcctcccccatcttttcagatggatcacgctcctccagtgccatttggcactagttttaagttttggcccaatctaactctggtcttattcacgtgcagtcttggctacgtgtgtctcggggccttcatacactaaaccaggtcatggtgggagctgttgtaggatctgccgtcggtgctctttggtttgtgctctggcattggcttgtgcaggaggcctttgcttcttctgtgcttgtcagagttgctgtcatccttggatcatcagcattttgtgttagctttgtcgtctacatgattcgtcactggctcaaggatgagtaatgtacttcggagctgcaatgggagatggactgataggcatggtgcgtttgggaaagtgaatccgttccgattcttatcagaatcgcttgaaaaaaatggtgacaaatgggttttggcggagcgattcacgagtggaacaattctcttttccttcagaaactctcggattggggaaaatgaagtttcacaccgattcctaatagtcacatacgcctcgtgtcacactagtaattgtatttttttcccagttaatcatttttaagtacaaggaactaaatatgttgtatctagagcaagctcaggagatttatgtcaggaatacagttttgatgaaaatatatccttcaacaactcgtttagat

SEQ ID NO: 173958 - DNA, 273 bp, Zea mays
  unsure (1)..(273): unsure at all n locations
  Clone ID: MRT4577_9022C.1
tcgtaagcagtggtaacaacgcagagtacgcgggtagcacgtcatggttgtgttataggtgtgcgttgttgttttcaagaggtagcttcttgctatgtgctgatgttaacggtggattatgattagcagttctgaaaaaaatgtaatggatgtgatctgctcaaaaaaaaaaaaaaaaaggagaaaaaaaaaaaaaaaaaaaaaaaaaaaaaaaaaaanaaaaaaaaaaaaaaaaaaaaaaaaaaaaannnnttttgggttgttaccactgtt

SEQ ID NO: 173959 - DNA, 373 bp, Zea mays
  Clone ID: MRT4577_90230C.1
atcaagcactctgatacattttgggtgtggctttacttccttttctttccggagatactgctatccatgccatgcgttcgctctgaatccttgtagttttgtgcaacatgtccgcgacgcccccgtggtatactttactgatcgtcgtcctcgtccgagtccagctgcttgagcagcgcggcccaaacggggagcggcacctccttgaagtaacctaccgccttggcggggcccaggctgtcggaaatgccaacgttcctggtgagcaagacccctgcgctttccctgagcgcctggaccttgtcacaatccttgcgcgggctggccaccaacaccacctggcagatgtcctcctcctggctgtccttgaact

SEQ ID NO: 173960 - DNA, 283 bp, Zea mays
  Clone ID: MRT4577_90231C.1
ctcattcacaggtcgcagccgtatttctgtctcgtatcctctggtggcggtggcggggcccgaacaaagcaaacagcaaggaggtcgaccggcggcaaggccccccggaagcagctggccactaaggctgcgcgcaagtcggacccggccaccggcggcgtgaagaagccccaccgattccgccccggcaccgttgtgctcggggaggggcggaagtaccataagagcactgagctgatcattcgtaagataatgttgcagcgcctcgtacgcgagatcgcgc

SEQ ID NO: 173961 - DNA, 805 bp, Zea mays
  Clone ID: MRT4577_90232C.1
tcggccgggtgttgtcggccattccttgtgctcgacctcgcgtctacgttggactccgcccctctaccaccgtctccaacgccgccattgaagcctgttgtccctgctcaccccggcgagcaggctacacgccaggtcgccgcctctggcgcactccgttggctctatcctgacgctcgccatcgccgttgagtaactcgtcaccctcaatgttcgcctcacgctcgccaggtgtttgagggaatggtggtaccaggagcagtgatcgtcttgcctattgtatttatacggaaacatttgcacggttttgtctatgtttgcatacacctattgtatttatacttctaactgttggtatggaggtgacctgcaacttctcaaccaaggcgagcacagtcacctttgggccacagcatgccctggactctaccaccaccgtgaaggcacgctacaacagcaatggaatcgtcgatgccctcatccagcacgagtggagacccaagtcaatcttcaccctttccaccggggtcgaagtcaaaatgttcaacgtgtttgctatcttgaagccccccaagattgggttgtcactgcctcactggtcctcaagccctgatgataatgtcgatcccctttagtcctagcatagtcaggttttcgtatcaatacttgaggtcgagtgaaataattctgaaccttgggtctctttctgtcatcctgaaagttcagtcttcctagctggttttagatgttgagaacagaatctacaaatgacattgtgatcaaatacatcacttcgttgacatct

SEQ ID NO: 173962 - DNA, 466 bp, Zea mays
  Clone ID: MRT4577_90233C.1
aacaatccctatccacttgagataccattactggcatgctaaacaaaacactagggacacatgttacacaaacacaaccagatcaggttcttgtctcccagtagtggaacaccgttctggcttatcctgtagctctattccgtaccactacctagacaaaccgacaaacgctctaccttggcggggcatgatcacgcgacctttctgagcctgacagtccatgtgctcaccaacgaacaccgggtcactgctctggtgaaccatgatcacggactggcccatcgcgatgccctggctatcgcgaactgccaacccttgcctacggccctcggttgatcacagcccaacttagtaaactatggctagacccacactgccgaggtccagaaccggtcccctagagaaaaccacacgattgaccacgtaaaagaagctaccaaatacacgccgctcctacttgtgctct

SEQ ID NO: 173963 - DNA, 400 bp, Zea mays
  Clone ID: MRT4577_90234C.1
ctattgaggcccgtcgctatgatgctggtgtataaggatctattatcagtcgacaagctagtgacaaagtgattgacctactacgagctcacgaacgtcgtcttgctctaggtctagagactgtcggtcaaccgatgacctgtcgaagtcgacattgcagcaaattcatcaccaaaaggtagcaaggactatagagctactgacacaactatcatggtgtgtgaaatcatggacacattgctgatacgacagcaacctgctacagccacgagatcatgaaggtctaacattaacggcatacatacacgaatctcactgctgtgtcgaaatcacagaatgctgatgaattcacaccggctgtatactgaacatccatgcctatgactagcacgctgaacga

SEQ ID NO: 173964 - DNA, 552 bp, Zea mays
  Clone ID: MRT4577_90235C.1
tgtgcaggcgctcgatggcggtcgtaccacctgtatatctgatccgcgaatttcttctgtctctggtactccgtctgcttctgagccatcctacataggaatctccatgatccgactcggaggagcaccacttctaatctgagtgccgacgctggagcgtccatacctacccgcagcaagatgaaaccgcccataagaacggcttcttcataatcaagaaccgcccctgcatggatgagtaggatactacctccatcactgccaagcatgtccacggccaatgccacttctcgccttcatacacatattcaatgggaaaaagcttgaacatagtgctccttcatcacacaactgggacgttcacacatgtgaaccgtaactgagtatcacctgattgatatctctgacgatgcatctgtgagccttctatacttcaaatgccaacactatcgatgatcttaaactcccaactgatgagactcttgaggcccatattaaggaaggattctaaagcagaaacgatcttgatgtgactgtccacactgcaatgtt

SEQ ID NO: 173965 - DNA, 338 bp, Zea mays
  Clone ID: MRT4577_90236C.1
gtgaactcatgccgagattgtgagaactgcaatagctctctagagaaccactgcccagaaagagtttttactttcaatggcattgatacagatggaactgtcacaaaggggggttactccactcacattgtagtccatgaaaggtacaattggctgctcaaacacgattttctatattgataaaaactagttttaggtatgaaaacaggtcccattgtattttgttccacttcaagatgctgtgtagtttcttatgagagtcggtaaattttgggtcagtgctctccatccaattgttatcaaaaccaattcatgatgaaagaataatatataggtcc

SEQ ID NO: 173966 - DNA, 355 bp, Zea mays
  Clone ID: MRT4577_90237C.1
ggtacgaaatctataaatccaatacttaatacataccgctgatgagttacaattgcgaggcaaatctattatccgagttcttattccttgaaaaacgctttaaaaaggcccctaaaacggaggggtactgtttgtttgtccagaatgatgtgtatgtgccaagtgcactgacactgttcatgcttgttcctaaaaacgcacactcaaaatagtaaattggaaatattgtgaaatccagtgcagctctacataccattttttattcactgaccttttgcttgattaaatgttcatctaagaaattaaatgatagtctaattatatgccaaaaaatggtacccttaatttggggaga

SEQ ID NO: 173967 - DNA, 122 bp, Zea mays
  Clone ID: MRT4577_90238C.1
cgcacgcgtgcgccaaccctttggcgaacacttaaattcatctacagccccactggcgagggatatactattaatcacactatctctccgcgcagccgcttcctaatctaaccctccttatt

SEQ ID NO: 173968 - DNA, 1735 bp, Zea mays
  unsure (1)..(1735): unsure at all n locations
  Clone ID: MRT4577_90239C.1
ccggccggggtaggcgtcccaattttgacgcacggttctgccatcgccgatccgcctgcttcctcctccatcccgcgcaggccgatgagatccgcggacgcatgcccccggggcggtcctcgcccccaccgccgatggcagccgccacgcccacgcaagatttaagcccgtgattctttccctccattgcagccgcatccatggcagccgcacccgcaaatcacgcgcaggtcgacgagatccgcgcaagggaagttgcttcccaaatctgtcaggcaagatttaatctcgtgattcttcccatccatggcagccgcatgcatggcaggcgacatcgtgcccccgtcagcctgcgcgagcaccccgccgcacccgcgccccctaggaatcccgttcgagattgctgccgaccccgcgcgaccatcaaaccccgcgtgaatctcgcacaagatgcaaaccccatccccctcgctctcttcctccccatgtcgccgctaccccaccccccaacaatgcctcggatcatgtcgtcctccaccttcgacgacgcgccgttcgaggagcccaaggccatggtcaagaaggtcctcgcggagttaagtttagtgcggcggcgacggcttcctgctcctgtcgaagccaccggcgtagggcaagctctgcaggcctaggggctgactcgtggtgcggatgtccttcttccggtgcagcaggtcgtgtccacgatgcagggatggagtcagatattcattcagtcgtgtccacgctgcatggatgaaaacagatattcattcagtctgaaatcttattctttcgttggatgagatctaaatataatatatacgatagcctaaattcagactgccaagcttatccgtagtagtagcctcactaggcatgagcaagaaaagcagccggattgcatgttagtatctatcctgaagttatcaaaagaatttgctttcattgaggaaaaattattagtggaaagaactgagaataggtcagacgatttgagtgatcactgcagccagatcatcctacaagtcgtggcactaataaaatcgggatatggtatgaacaaataattgaagtgaggtgttctgagctccaaaagggtgaagccaaggttgtgatattgggtgacaagaccattgcgcactgaagccttcttcaaaagatatacttagctcttgatgcttactctcctacatntcagtagcatcctggttatgcagctgctagacgctttcttaaagacactgttctgatctaagaagtaatcatcgagtgctgttgcgagtgcagcccctgcaaagccaatgttgagcagtaccgcaacaagatgatatggtcctacaacgacatctactcaggctggcttcgcttccaccatggccgtctaccagaagtgacttcttggaactgaaaactaatcaccagtttcaacactatcttggagcgttctagggataatttctattgtttcttaaagggttggtctgaacaaagctagaaatacttgaacttcagttatatttgaacttttgtgaagtggatgatgatgtccaaatcttctagaaaaggtggaggaaagtacatggatatgggacaaaattgccatcgagaaagtcccattatcatctagctgcaaattggcgtatgaatgcctgctaactggtaaacggtaaaaaaaaaaaaaccccccgggcgaacgctctngaggntccaagct

SEQ ID NO: 173969 - DNA, 359 bp, Zea mays
  Clone ID: MRT4577_9023C.1
ctcactagataggaacacaggggtatgcatttctcagaagacacacacactcccaccctattgtgtaccacattccaaagaatacttatctcacaaacaacccttatagtggaaggactcaacacctgaccgatccatatctggaacactaaccaatttaatccacctcctccatcttgggaccaggaccgatcccactcagacggggcatgctcatccatgccaggaggagcggccatgcgcgggcccttgggctggtacatctttgcgattatggggttgcagatcccctcaaggtgcttcatcttggcttcggactcctccacctaaaccagcgtggtggtggccacccagcttat

SEQ ID NO: 173970 - DNA, 337 bp, Zea mays
  Clone ID: MRT4577_90240C.1
gggaccgtgtccggaatatcccgggggcgcaccacagcgcgcgtttgtcatcgactgacgaatgatatcacttagggggccatttagaaaccgcttcgggtacaccaaccaactgaagggacgcacacactttcaatgagcggacaagatcggcactcaaaggctatatatgtacgatcatcagggccacctatctctaggacaggtgaggcgcttaatcgacatgggaagcaaagccaccggtaccgggtacctacgacaaagggtgaggatgcgggtacaaggacacgaacaagaccgggttgactggctagaggacgcgcggtaacgtacgcat

SEQ ID NO: 173971 - DNA, 1306 bp, Zea mays
  unsure (1)..(1306): unsure at all n locations
  Clone ID: MRT4577_90241C.1
aattcggcacgaggcttttatttgtctctacactctatcttctcccttgcaaccccgcctgcaaccaccccttgcttgctctcgtgctctcatgcatggcggcttccagatccacacggacacctgaatcccacgcgttggatctagtaggcatgaacatctctgaagcggccagcgctggtgtcatcaagtctatcctcttcacgacaatcactaaccaatttattagagttgcctgctcccgattaccggttagcatggttgataatctgttcttgaagagtaatcactgactgtgtgcactgactgtgtgcactgcatagacaatttgaagagtatggatttcagtttagtgctcctgccgaggccaccggcgtagggaaagccctgcaggcccaggggctgactcgtggtgcggatgaccttcttccggtgcagcaggtcgcgtccacgatgcagggatgaaatcagatattcatccagtcgtgtccacgctgcagtgatgaaaacagatattcattcagtctgaaatcttattctttcatcggatgagatctgaatatagtatatacgatagcctaaattcagactgccaagcttatccgtagtagtagcctcactaggcatgagcaagaaaagcagccggattgcatgttagtatctatcctgaagttatcaaaagaatttgttttcattgaggaaaaattattagtggaaagaactgagaataggtttgtttctatccatcctcattacgcttgcttcctagacatttttatttccttatcaaaacacgattccggtgtcgagcatggtcgtttcaggtcagacgatttgagtgatcactgcagccagatcatcctacaagtcgtggcactaataaaatcgggatatggtatgaacaaataattgaagtgaggtgttctgagctccaaaagggtgaagccaaggttgtgatattgggtgacaagaccattgcgcactgaagccttcttcaaaagatatacttagctcttgatgcttactctcctacattgcagtagcatcctggtgtaagtacctcagttggagatgtcttgcattcctatattttgcgacgaccaatttaatattcagaacatcgggaatactaacatggttgccttagtatgcagctgctagacgctttcttaaagacactgttctgatctaaggtgagggatcaactnttttatttggtaatgctcttgctctgatcgaccaaagttttttcttctgtttggtctgttacacacgaaaatgttggttgtgaacaacattcaacaaa

SEQ ID NO: 173972 - DNA, 380 bp, Zea mays
  Clone ID: MRT4577_90242C.1
tggggtttctcgacctgtgtgagaaggtcttcttaatataatgcctggggctgtcttacccccgcaagttgatttttttaaaagaattaacacggtagcaatgcattcaccattttatgctggggaaacataatatatacatataatgtatggatcttccattgtcaaaactctacacaatatttttccaagatttctgtcaccagattattattgaattttagggtgaataagaggatttgtcagcattattccagctaattaagtcttcaatagtggtactaattgtgctgttattgaactacctacatggctgcatatattgtttgtctgccagatccaacattggccctgtttgggaccgtggtctgtggccgcac

SEQ ID NO: 173973 - DNA, 250 bp, Zea mays
  Clone ID: MRT4577_90243C.1
attgcacaatccccattttgggggaattttttaaacatatgccggttttagggcaccatcaccgatcacataaaatgtgtgagctaaacagatggcatccgtccccatgggttgggggcccgcccgggcaagttttattagagagaaccagggggggggaaacccctgtacatactgttggaacgccgtgtccaatggccaagaaacggggagcgcctcaaaaaacggggggggagccccccgggacgca

SEQ ID NO: 173974 - DNA, 180 bp, Zea mays
  Clone ID: MRT4577_90244C.1
ggaccggcccggaatcaaataaccaggtgccgacgagtttatatacggcggccggcccagcactaatggtggttttttttaaacgaaagggggggaacaccccacgacaacggcagcaacgcacacggaccgccccacggagaaccggggcccggaagcccccacgaaacacaaaaggcg

SEQ ID NO: 173975 - DNA, 213 bp, Zea mays
  Clone ID: MRT4577_90245C.1
atagtgcattgatagtcatacctctttgaaagtagtcaggtaattgtatttcaagggccatagtgtgaaaacttcgggattgggaaaattagggcgttagcaaaacaaaacgctttgaagaacaggccctttacggaagatgtcgtaatggataggaggtcgaaactgttggccaatctcaagagttaaggaggaaggaaagggtaaggggac

SEQ ID NO: 173976 - DNA, 762 bp, Zea mays
  unsure (1)..(762): unsure at all n locations
  Clone ID: MRT4577_90246C.1
gactcctaagggcgattgggttcctcgaggccggccgggatccctccatcttgaactttgtcctcaccaaaattactaccaacaaacccgaacctcaactaccctcacaaccacttcacaatgcctcgtcaacgatccgtcggccgcgctccttcgcgccctaccgccgctgcttctgctcccaagccccagcagactcgacctgccgccacccatgctgctcccgctgctcaccctcctgcccaggccatgcctcctcaggctgccggttcccagggccctggactttttggtcaaatggccagcactgctgccggtgtcgctatcggttcctcagtaggccatgccatcggtggtatgtttggtggctcctccgagcccgctgctcccgtccaggctcaagccgccccccaagagcagtcctggaaccaaaacaactgcgccggtgtcgctcagaactttacaaagtgcatggatgacaacaacggaaacatgcagatctgcaactggtaccttgagcagctcaaggcttgccaggctgcttctggccagtaagcgttgggaaatacgaataatagaacttgatatcattatgggaaaggaaacaacatcggggataaatcccctggcagcgtgcgtgctaatagagactcggcgagaatactgttgcatctcggcacaaccaattgtataatacaaaacaagatctcactcaacccacaaattgngaacccaaaaaaaaaaaaaaaaaacccgccggcc

SEQ ID NO: 173977 - DNA, 238 bp, Zea mays
  Clone ID: MRT4577_90247C.1
aagttatatgtattatagttgagttaattttggttgtgcacgaaatgtgggttataatgagtttggtttatggtagaattgttttgtgtagtagagtgttttgggttaggtattgtatggattagtactttttgttgttgtaggtacgtagagatttcgaacattcagtttgttaatggtgtagtgttgttgtaggtatatggttttcacatctgcttagtcagagtggttaatttgt

SEQ ID NO: 173978 - DNA, 141 bp, Zea mays
  Clone ID: MRT4577_90248C.1
ttcgttcggacacgcacccgatcgctcacgcttgcagcttgatcatgatttagctggtctagctctagccctagctagtagctagccactcggccgtgcagacatcaaggctgttgaccttaaacatggccactgccgagg

SEQ ID NO: 173979 - DNA, 271 bp, Zea mays
  Clone ID: MRT4577_90249C.1
cagaccattagctttatctttttttgtgcgcagaagaacccgatcgacaccaggagggtgttgctcgttgccctcgctctcctggctctcgctgctagcgccacctcctcgcatacaagcggcggctgcggttgtcagccaccgtcgccggatcatctaccgtcgtcggtgctattgccacctccggttcacctgccaccttcggtgcatttaccaccgccggaccacctgccgacgtcggtccatctgtcaccgtctggtcatgtgccgt

SEQ ID NO: 173980 - DNA, 261 bp, Zea mays
  Clone ID: MRT4577_9024C.1
ctttgtcttgcccgtcgtagctcgaattcggtcaggcaggagagcgggtgcagctggccgggagggcagctcaccgcaccctccctcgctcctcccctctataaatgcagaggcgccgaatgctccccaacgccctgtacaatccgggggagaggtcaaggaaggcgagcgacgctcggcaggcagggcatcccgcgaggccgcgacagaggcggcactccggtcccaccaacccacaacaccgatcccctcctcgccgag

SEQ ID NO: 173981 - DNA, 601 bp, Zea mays
  Clone ID: MRT4577_90250C.1
ggcgcagcgtgaggaagcacatcctgcgcgcgcccggcccgccgccctcggagccgctcgagcctcggccccgcagaccccggctgcagccgccgcgctccgccgccgcccagcgcgcccaggaaaaccaacatgtctgacaaaagtgacttaaaagctgagctagagcgcaaaaaacagcgcttagcacagataagagaagagaagaaacggaaggaagaggagaggaaaaagaaagaggctgatatgcagcaaaagaaagaacctgttcaggacgactctgacctggatcgcaaacgcagagagacagaggctcttttgcaaagcattggtatatcgccggagcccccgctagtcccaacccctatgtctccctcctcgaaatcagtgagcactcctagtgaagccggaagccaagactcaggcgacctgggaccactaacaaggaccctgcaatgggacacagacccctcagtgctccagctgcagtcagactcagaacttgggcgaagactgcacaggctgggtgtgtcgaaggttacccaagtggatttcctgcccagggaagttgtgtcctactccaaggagacccagactcctc

SEQ ID NO: 173982 - DNA, 515 bp, Zea mays
  Clone ID: MRT4577_90251C.1
tgttgggaaaatggcaaaggtgatgggaaggaggaccagagaagtgaagagaaggcagttgctgcagcttcaaaatcaagtcttgggcttgaaaaaaagcaaggatgagtatgagtctgatgattctaatgagggtgagtgattatctcctgaagaaggcaatgttgtgatttgaagggtatggtgcagaaaagttttgtctgcatgtcatgacagtttcatacaatgcacgggcgaacgcaccgggagcctaccacctcccgtgctcaccattgctgtgtttgatacctgactactactgctgttactttgaatctccggggtgctcatggagtcatggtgcatatgctcatgtttgcagggtgtcagtttttttcatcgtctacttctagagataacaactttagcatgttggttaaagattcttggtgtgctaagcttttcttttttgcttcatttgaaactcaactatatatatggtgccctactttacattttgcaaacacaatctgctc

SEQ ID NO: 173983 - DNA, 543 bp, Zea mays
  Clone ID: MRT4577_90252C.1
gctccttctgctccagctgcccgtcgtctccgtctccgcaagaaatgctcacgagcatccgcttcgtcgtcggcggctgctccatcagcgccggtggcattctgtggtcccgagctacacttacccagccacacaaggcgggggacctgggggtgcttgaccctacgctgagtaagctccccaggaccaccgggtcgatcttttctgctgcctggtgtcaggccccggggggcgaatctgctgcacaggtatgtcgacgcgtggctttgctgaccacaacaagggcggatcagtgactgctgaacggccggatgtgccatagacgtcgacagcaccattcacgtacatgcagggtgctgtcagaaagaacatggtggcacagccattgctgcccccaccttcagggtgtggtgtacaccatgacgagtgatgccctaggtcagctctacgaaaaaattagcgcacgggggtcacaatgacaacattgttcgctaaagcgacctcaatgggtctaggtgaccattctgccgttaactgctgctg

SEQ ID NO: 173984 - DNA, 204 bp, Zea mays
  Clone ID: MRT4577_90253C.1
tccaaaaaaaacaaaaagggtacgaaacgcgacgaaagcacaaacccccaccgatactcgcatacgtctccgactgcgcacgtcagatccaggtgcgccgcgacccccctacgcctacagctgcgacgatccatccatcgcaacaggcaggatgaacgggactccatggcatctcccgagccaagggcgggtatcagcttcgac

SEQ ID NO: 173985 - DNA, 225 bp, Zea mays
  Clone ID: MRT4577_90254C.1
atccgcgtcccacccagagcctaagcccttcagcaatgcaaaaacgaagctacgaaggaaaggaggacgcccgtcacgcgcaccaagagatcgggaaacggcaatcgcgagagacaatggccgagaaactcgcaggtaagcgccgcaacacacgcaacggtgaagaacaggaaggacgccgtcacctcgagcgccaagctcatcagtccgcgagccgcaggcgac

SEQ ID NO: 173986 - DNA, 561 bp, Zea mays
  unsure (1)..(561): unsure at all n locations
  Clone ID: MRT4577_90255C.1
ctgcctgtgccccccatactaccccctgcctgcaggctcctgcaactgcaatgtcggcgctcgggacgctctccgggggggccggcggagacaccggcctcatccgtcttcgccgatgtgtggcccccgcactcgcggagccgaggcaccacgccgctagaacgttcgactgcgccgccttgcccgatgccgcgccgctcgtgtcggtacgccatcgtccgcccgtcgctcctcctccccagccacactggtcccgtcgtcgctcgcgatgcgccnnttagcacacgccacggcggaccgccgctaccataacggaatgcaagtgtgtgngtttcctgctggaagacccgaccctagtcactggcttcttgttcttcatggtgtacttccatgacgtcatattaaacatcctcaacaaganaaactacaactacttaccctatccatactagatnagcttgatccatcanctaatggggtgtcgtgtacctgactcatcagcttggaatagtcggccgtaccccagcgagcgccttatcaatggcacgnctcctgaaagct

SEQ ID NO: 173987 - DNA, 388 bp, Zea mays
  Clone ID: MRT4577_90256C.1
cccaaaaaaaaagggtttccatttttcccaaaaaaaaaaaaccaacttgggggggccccctgccccaaaaggggatgaaacgtttctgacccccccctgggttccccataggggccccaaagacaaaacccaggaatcctttttgatttggggttttgcagttaaaattccattttattttttacggggaaggaaggggctgcatttttggggctggaaaaaccccacccccggggtcccttaacccccgggggacccctttagggggccccaaggggagaaggggggccccggggttcccccccttggccccattcccccccccccatttttccctggcaaaaaactttcccgcaggggggaggaccgccctggggacccggggccc

SEQ ID NO: 173988 - DNA, 1529 bp, Zea mays
  Clone ID: MRT4577_90257C.1
atgaacgccttcttcacgtccctggcgcgcgggctggacgagctgggccgtgcaggcgggctgtcgtcgctgccggctctgctgcgggcggcgtcgctgctcagggggctgcactcgcagctcacgctcatggtcggccagctccacctgccgccgggcggccgctggctcgacgagtacatggacgagaccgcccgcctctgggacgcctgcctcgccgtcaaactcggcctcgcctccgtcgagcggtattgcgcagcggcctcgtgcgccgccgcggcgctggatgactggctccaggatccctcccctctgtccagtagccaggtgatgcgggcgatctccgtgtcgaggagggaggccatggccgcggaggaggagaaccgcgcgctggcggacgcgaggatcgcgccgctctcgctgcagctggacgagcggcttctgctgcgcgcgacggacgccaggcttacgggcttcaacggcttccgggggctgctgcacgcgctccacaacgcgagctcgctcctcctgctcatcctcgccagcggcgccgtctcgtgcgccgccgcggccggcggcccgtgcggcgcggacgacgccggggccggcttcgtggcgtccatcgtgatgctgcagcagcggatggcggaggaggccgctgacgctgagtccgacgggcctggcgcgcccgggatcgggatgtgcgagttccggtgcgcgcgcgccgccgtggaggcggcgcgggaggaggtggagcgcgccgccgccgccgccgccgccgccgccgccgcggcagcgggtcgcaagtgcgagggcggcggtgtcgtgaaggacaaggtggaggagctcaaggcgtggctggacgtgctccggaccggcacccatagcctggtgtgccagctggacgacttcctggacgacattgtcgagggcaggaaggagctctccgacctgtgcagccattgatgtgatggatcggtcacaccacacctcgtgcccgccttgaaggagagcatcatcatcatcatcacaaattcgcatgaacaaacgaacgatgctgagctcgttgcttgcttgatttgcatggtaggtagtacaagcaaagtcagatacgtacgtactagcactagctgcagtgtccctatgctattgcaatagcatgttgttgccttgcccctctttctaaccccatctctccgtctctgtcgaggggatggagagagcgatggagcattctggttggccatgatgctgttcctgtctcgctgttgcgtctgcgtctctgccatgaaaggaggaggcatgatgtggtgggggtgagagagaggggtgggagtcggaagaggagaggcataggcaactgatcgatcgcaacaagatatcttggctcaggaatcgtcgccacactcgcagctgctgcgtatcgaaaggttgctttttgtttgttcgcctgggcgcgaagaaagcggcctataaggttggacccttgccatcgccgcggaaaacgaactggcaactttggttgcttc

SEQ ID NO: 173989 - DNA, 184 bp, Zea mays
  Clone ID: MRT4577_90258C.1
cccacgcgtccgccctcttcgagagggagggagagagcaggaggactgtaggcaggagtacaatctatagtagaactctactacctccagctttaattgcccagattatggtttaacttatcatttaaacctcaatctagttaaggactactaaaaattctactaatgccttcgcaatattaaa

SEQ ID NO: 173990 - DNA, 157 bp, Zea mays
  Clone ID: MRT4577_90259C.1
acccagcaaccacaccatcttcttgctgtgagaggtctcaacccgggctacctcctgtaactactcactgccctggggtccgtgggcaagttgcccagggtgggggtgcctagccaggtgcagtccccgctccgcctagtcctcggcgtcacgcaat

SEQ ID NO: 173991 - DNA, 603 bp, Zea mays
  Clone ID: MRT4577_9025C.1
ccgcaacctgcaggtcgtcgacgccgacaacagcctcgtccccgccgccgcgctccgcctcgtcgccgaccgcccgggctgctacgacatccagggcggatacaacaccgcctgcgggaactacttctactacggagggcccggcaggaacgtgcactgcccgtgatctgtctctgtctctgttggtagccgacgcccgacgacgtacgaccatgaatatacgtgcacagatagacatacagagagtgaagaagaacgtacggatcaccgaccctgccggagttgcatcgtcgtcgctcatcaaccggccggacatggatcgtataatagcaacactgctagtcatatataagctacatctagtccctcgtttagttactgcatgcatgctaatgagtttttaagcagcccgactgcgtatacgcggccgggacggtagcagagaggcaaaaggtttcgaactttcgatatttgatgtatgtgggcttctttcgtttgcattggtctgattgttttttttgtcttgggttatgtatatacatgaagaaatccacatatagtattttcttcataaaaaaaaaaaaaaaaaaaaaaaaaaaaaaa

SEQ ID NO: 173992 - DNA, 241 bp, Zea mays
  Clone ID: MRT4577_90260C.1
cctttctttttttttttttttttttttcttttttccatgtttcttttcataggctctaaaggaccacccatgctgctgacgacctaataccccactagatgttgtcatgcgctggtctccattccaccagctgagttgccgaagaaagcccagtgcggctttgccagagagccctttgtagccttcactgacagtagggcgccatccttgcccatgaggcaagttccctacctgacgtttc

SEQ ID NO: 173993 - DNA, 304 bp, Zea mays
  Clone ID: MRT4577_90261C.1
agcacgaaaggttgggctaattacatcccaaatagaaggattcgtgataactgtatgccaccgtataatcagatacaaattctaatcatcaacaagattacaatttatgtgagtcacctattcatgtaattacatccctcctcccaagaatcccacccattcagcgtgtcgataccgcgagatcaacttagaaactttacctgccagaaacaagatggatctaggaggacatacaacatgctgccttggccggaggggccggctcctggccagggatgataactttcgttcctttcaacaagct

SEQ ID NO: 173994 - DNA, 515 bp, Zea mays
  unsure (1)..(515): unsure at all n locations
  Clone ID: MRT4577_90262C.1
ggctggcggcgaacggggacaagacgcacgaggtgttcaccanccagggcacgccggagagcagggcgccggagcgggacacggagacgcacactgaggcggnggacatcnacacgaacggcatgagcgcgcaggagaaggacacgcgggaggagcccaacgccgagagcggaagcgtcgagcagagcgaccacaacgacacccggggcgagccgcccgcggcgcacaagcggcgcaaggacgccgagcggcggggcagcaacgagcgcagcaacggccagccccggaaccggcccacggccagcgagcacctgcaggaccccagacacaacggcggccgaggcggggacgacgacgacgacgccacggcgcacggcgacgcccacagcggtgacgccggcacgcccgggccgagccccaggagctacggcgacgaccgcgacgggcaccggctggacagaccagaccgacccgcccagcgagaggccggagaaaagaaccgggaaaccggcgcg

SEQ ID NO: 173995 - DNA, 2321 bp, Zea mays
  Clone ID: MRT4577_90263C.1
cccacgcgtccgactgtatgcattgctagtgtagtattctgtgacaaaaccaataatcaaaccagcccacatggcctactttgtatcttcgagtctcttcttccactttctcccgtcccgttcatttatttatatataaattctgctaagctgtgctctgcttctcgccctcccatcgcctgaccgacgcgcccgttttctcctgaaaacagaaggctccggcctccggcatccgccaaaaaggggaaaaaaggagagagaacacacacacacacaaaccccaatcccctgcggcggcgatggacccgtcatcggcgggctccggcggcaactccctcccgtccgtcggccccgacgggcagaagcggcgcgtgtgctacttctacgacccggatgtgggcaactactactacgggcagggccatccgatgaagccgcaccgcatccggatgacgcactcgctgctggcgcgctacggcctcctcaaccagatgcaggtgtaccgccccaacccggcccgcgaccgcgacctctgccgcttccacgccgacgactacatcaacttcctgcgctccgtcacgccggaaacgcagcaggaccagatccgcctgctcaagcgcttcaacgtcggcgaggactgccccgtcttcgacggcctctacagcttctgccagacctatgcgggcgcctccgtcggcggggccgtcaagctcaaccacggccatgacatcgcaatcaactggtcggggggcctgcaccacgccaagaagtgcgaggcgtcgggcttctgctacgtcaatgacatcgtgctcgccatactcgagctgctcaagcatcacgagagagttctgtatgtcgatatcgatatccaccatggtgatggagtggaggaggctttctacacaacagatagggttatgactgtctcgttccacaagtttggtgattatttcccaggaacaggggatatccgtgacattgggcactcaaaagggaagtactactccctgaatgtccctctagatgatgggattgatgatgaaagctaccagtccctttttaagccaatcatgggcaaagttatggaggttttccgccctggtgcagttgtgcttcagtgtggtgctgattccttgtctggggataggttgggctgcttcaacctctcaatcaaaggtcatgcggaatgtgttaggtatatgaggtctttcaacgttccattgttgctccttggtggtggtggatataccataagaaatgttgcacgctgttggtgttatgagactggagttgctcttggccaagagcctgaagacaagatgcctgttaatgagtactatgaatacttcggtccagattacactcttcatgttgcaccaagtaacatggagaacaaaaatacacgacaacaactggatgatatacgatctaaacttctggataatctttcaaaacttcgacatgctcctagtgtccactttcaagagagagttcctgacacagaaatacctgagcaagatgaagatcaagatgatccagatgaacgacatgatcctgactctgatatggaagtggatgaccacaaggctgtggaagagtcatcgaggaggagcattctaggtataaaaatcaagagagaatttggtgaaaatgcgaccagagtacaggatggtggcagggttgcatctgaacatagaggactggaacccatggcagaagacattggttcctccaagcaagctcctcaggcagatgccagtgcaatggccatcgatgaaccaagcaatgtcaagaatgaacctgagagctcaactaaattgcaaggccaagcagctgcgtaccacaagccatagctgcgaccatcaagagttgctgggtttctgctaggcaacttcctgcttgatttggacagtccagaaaacagaagtgaatccgcaatacgtccctgccatttcaaatttgacttggttacacctatctgtgacaatgttaatgtaatgagatcccatggcactagtgaagttcccaggtgtccacctgggattgcttgcggttgagagagacgatagtctgatgacccatgtatacatgaagcccatgatctcagttgtacagtcattagccaatacaaatatgcagtggactaaagggtgattcattgcgtgttcttaaaaaaaaaaaaaacgaaaaaaaaaaaaaaaaaaacaatggcggccgcatgggttcccagggcccgtgccgcgttcccgccgggcctcctgggtgcgcttgcggttgcgtgcgccgtctgcctgatgacccatgtatacaaaaaaaaaata

SEQ ID NO: 173996 - DNA, 563 bp, Zea mays
  Clone ID: MRT4577_90264C.1
aaaacaaacaaaccaaaaagcttttatgggaaaagggcaaaaagaataaaattttttttttacattataaattaaaccacccctaaccaattggtttattaaaacacttaaaaaacaggctttcaaactaaataaccctggaaaaacacatttatggatatattaggcccgaaatcggcagttaaacccaaagcttacttttaaaaaaaaaaccaacccaaggaaccagcttttttgaccaaaaacaaatttaaatttccccgcatagggccccgggcaaagtcctaagcccttccccaaaacaaaggagtttgggatttaaaacaaaactggcggaaacaaaaacaaaaaagggggggaaaattggaatatcctcccaaaacgatgggcataaatagggacaatagtcccggaaaaacatctttggggggcaagattttttacctttaaaaacccaacccgggtggaaacagccttccccaaaaaaacaaggatggacaggttggaaaacggggaaaaaacaaaaaatcgggtggcccttccaaacatagggggggcttaaa

SEQ ID NO: 173997 - DNA, 307 bp, Zea mays
  Clone ID: MRT4577_90265C.1
agggggacctttacatgacttgtgggttagcaacaaggaacacaaatttgggttccaaatacacggttgacccaggtgtgcagcgtccaaaggaaagccaaaactgcaggcagacaactaggttatacacaacatgtttggatccactcagcccagatcaccctctttggcaggaattccactctccaggagatgtttaaatcgcacatagattttttcaacacagacgtttatgttgatatcatcccatgttgtgacgctaggcgcacaaaatagaaacggcttagccttcctattgtaagggatt

SEQ ID NO: 173998 - DNA, 613 bp, Zea mays
  Clone ID: MRT4577_90266C.1
gacaaaagcatggcggcgggctacggcgaggaactcctgggcagggtgtcgggcctggtggcggcgtgcacagtgcgcgtgtcgcgcgcgacgcggcgcctcctccggcgccaccagaggaggaggccaacgaagcaccaccagacgacggccgacgtggtggcagcggcgctgtgcgcgcgtggggcggccatcgacaagggcagggcgtcgtcggggtcggcgggcgaggtggccctctggagccggcggatcctgatgggggagcgctgccagccgctggacttcgcgggcgccatccactacgacagcttcggccgccggctggcgcgcccgcccgtgccgccgcgctccgcgtcctccctgtcgtgccgcggcgacgttgacgcgggctactacccggcggccgagaacggtgacgccgtctaggtcagctggctgatgatgtatgttatggccctcatcattcatttcttaggttaattgtcgtcgtcgatggcatgtataaagacagtgtacgcgcgtacgtacgtactccattcgattcctcgttcgttgccagatgatccacatgtgtttctaattataatttatgaaaactgtcctttttgct

SEQ ID NO: 173999 - DNA, 313 bp, Zea mays
  Clone ID: MRT4577_90267C.1
gagctcacctgacggcggccgcccgtccttttttatggggggttttttttggtgtaacccagtaggaacccgcctgccaccaaggccaaaagtcgcacggatacaccacaagtgagcaaaagggcacagcagcgacgaaccccatgggacctaaaaggctatggaaaatggataaaagctttacatacaacaatacaaagacgacgtgcgccaaaaataggcaagcaagaggcgatcaaaaacgtgcacagaagtaaccacccggacatagtgcagcccacctagcaagcttgcaggccgtaatcaacaggcc

SEQ ID NO: 174000 - DNA, 321 bp, Zea mays
  Clone ID: MRT4577_90268C.1
cggacctggccgaggccgacgccgacgcccacgccagccgcgtcgccgacgtacgggccgcggaagccgacgcccagagtcgtgccggagcccacgcctccggcgcccgatgagcgcgtagccgttcttcaagaagaagccgatgctcaagttcatgcgcgagaagaaaccgtgcccgtcgctctgcgacgacgacacgacccggcggcctacggcagcagcgctgcagaggcacgagaacgtgcagatgaaactgaattagggcatcggagctggctcgatcggggacatcagcacagctctcagatggtgcagtgtcag

SEQ ID NO: 174001 - DNA, 308 bp, Zea mays
  Clone ID: MRT4577_90269C.1
ttcgtccgcccttgtttgtgtccacgtgggcaacaacaactacacgcgctgtttcatgtacgccatcggtgcctgcaaggcccccaccattatcaggcagggcaaccggttcatcacgccgcccaacctcgccaggatgcatcgtcaccacgcagcatgacacgccggtgtccgggttgaagaactgggtgtggcacttgcagaacgacctcttcatggagggcgcctacttcaccagcaccagcggtgagatcaacatacaggtcatcaaggaggacctcatgcagcccaggaccgggtcctacatt

SEQ ID NO: 174002 - DNA, 959 bp, Zea mays
  Clone ID: MRT4577_9026C.1
cattgggtacctcggccggggccgtcatcttatataaaaataggtttatatatcctggtgctcttgccatggctggtgcatcgctcctctccccatcctgcacgctcctccgcctgattcccagcgcgtcgcacatctgctgctcgtcgcacttcaagagattcgatcgggttcgccggttcgcgcccgccgccatggcgacttcctcaggaccaaaggaggcgccagcgaataaccctgggctccagaccgaggtcgaccccgccaccaaaggctacttcttgcaacaaacgatgttacgtgtgaaggacccaaaagtgagccttgacttctactcacgtgtgatgggcatgtcgttgctgaaaaggttggattttgaagagatgaaattcagtttgtattttctaggttacgaggatgtgaccttagcccctgatgatcatatcaagcggactgaatggacttttaggcaaaaagctactcttgagctcacccacaactggggcacggaaaatgaccctgaattcaaaggttaccataatgggaactcagaccctcgtggttttggtcatataggagtaactgtggatgatgtccacaaggcatgtgaacgctttgaacgtcttggggttgagtttgtgaagaaacctgatgatggaaaaatcaaaggcatcgctttcatcaaagatcctgatggttactggatcgaaatatttgaccagacgattgggacggtaacttcttcagcatcatgatgaacagtagtggttccttatatggtgcgcaagatcatacaactctggcataagagcttttcatatgtgtgtctggagtctggactcggattaagggctggaatctgtttacttctagcatcttcttgctttaataatatgcgaactatgttgaggaatgaaataaaataagttcgggtaaaaattcaagtttctgttgtcctg

SEQ ID NO: 174003 - DNA, 314 bp, Zea mays
  Clone ID: MRT4577_90270C.1
agagtctcggtggggagggtttccaccaatggcggcgcccaccacctcccgccgcggccccggcggcgcgcgcaacatggacgatgaaaacctcaccttccagacctcccctctgctcaaaatcttcagggggggggggccagatgggcatcacagacgacctactcctcggcatctactgctactgtcttccaaaagccctccgccatccagcaccacgccgatctccccatcatcaacgaccacaacctcatcacacatgcccattccgacaccaccaatacatccataatctccctcacccaataccaaat

SEQ ID NO: 174004 - DNA, 2085 bp, Zea mays
  Clone ID: MRT4577_90271C.1
cctcgagccggcgggctaccttccctttccccaacgctctatctgagacatccctgaagctattgctcagtaccccaaacttaccgtgcttgacctgagctccaatcagttacgtggtcctatgcctgctaatttgctaacttcgtccatgctgcaagaactctacatccgagataacatgctttccggcggcctatccttacctggctcctcaccccagaagaagagtgcccaggtgcttgatatctctgggaatcgcttcaatggaagcctccctgatgatattgcctccttatctggcctccgagttctcgacatctcaacaaacaatttctctggcccactacctgctgctgtgagtaagcttggagctctcactgatattgatatatcaacgaatcagttcacggggccattgcctgaggatcttccggataacctccaatccttcaatgcatcctataacgacctttccggtgtcgtgccagagaacctgaggaagtttccagaatcttctttccatcctgggaactcaaagttagaatatcctgctagctcgtctggatctggcagttccccatctgggtcagcaggtggaaaatcactcagtacaggtgctaaagcagcaatcgtagcagctagcattgttcttcttgtcatcctcatacttattgccattgtatgccactacaagaggatctcacggcagttttctagctctgaaaaggtttcagacaagagcctccacaggaccactaaagacagtgctgtcatgcaaggaaaggacaacaaaggtggtttggtgtcagcagatgagcttgccactcctcgaaaagggtctacatctgaagcactcagccaggaagagaagtcagccgcggggggcttctcgccgtccaagggcagccggttctcgtggtcaccggactctggagaggcatatgggcaggaagggctggcgcggctggacgtgaggtcgcctgacaggctagcgggggagctgcatttcctggacgagacgatcacgctgacgccagaggagctttcgagggcgccggctgaagtcctaggcaggagcagccacgggacttcgtaccgggcgacgctggagaatggcgtgttcctgaccgtgaagtggctgagggaaggcgtcgcgaggcccaagaaggagttcgcgaaggaggccaagaagttcgcaaacatccggcatccgaacgtggttggcttgcgcgggtactactggggcccgaccccgcatgagaagctcatcttgtcggactacgtcgcgccggggagtcttgcaagcttcttatacgatcgaccaggaagaagaggtcctccactgacctgggcgcagcggctgaagatcgcggtggacgtggcgcgcggcctcaactacctccacttcgaccgcgcgatgccccacgggaacctcaaggccaccaacgtcctgctggacgggctggacctgaacgcccgcgtggccgactactgcctgcaccgcctgatgacgcagtcgggcgtggcggagcagatcctggacctgggcgtgctgggctaccgcgccccggagctggccgcgtccaagaagccggcgccctcgttcaaggccgacgtgtacgccttcggcgtcgcgctgctggagctcctgacgggccggtgcgccggggacgtcgtctcggggcccgagggcgccgcaggcgtcgacctcaccgactgggtccggctgcgcgtggcggaagggcgggggtccgactgcttcgacgccgccatggcctcggactctgagagcaacccgcaggctgtgaagggcatgaaggaggccctgggcattgcgctgcggtgcatcaggccggtctccgagaggccggggatcaaatctgtgtacgaggatctttcgtcgatctagctagtcggtagctagcctcgtcgcgtagcttttagattaacactgcgtgttaaaattgtgtgcgtgttcgtcttgaactcgtagaactgcgtagcgaatccaagtgttattatggcctcaccttgatgccagaaatttgaaatgaagaatgtgttgcattgttctttttgtctggt

SEQ ID NO: 174005 - DNA, 821 bp, Zea mays
  unsure (1)..(821): unsure at all n locations
  Clone ID: MRT4577_90272C.1
ttgggtacctcgaggccggccggggattgattccctcattcttcatccatagacatggccaccgtcacttctgcagccgttgctattccctcattcactggcctcaaggcaagcgcaggcaaagtgagtgccgcagttaaagtctcagctccccaagccacaaggttgggcatcaaggcttcgctgaaagacgttggagtcgctgttgtggccactgccgcgagtgcagtgctggctagcaacgccatggccattgaagtgttgctgggtggtgatgacgggtctctggctttcgttcccaacaatttctccgtggcctctggggagaagatcgtgttcaagaacaacgcaggtttcccccacaacgttgtgttcgacgaggacgagattcctagcggcgtggatgcagggaaaatctccatgagcgatgaagaccttctcaatgcgcctggtgagacttacagcgttactttggatgctaagggaacctacagtttcttctgttcgcctcaccaaggagctggtatggtgggaaaagtcactgttaattaattattgtctcaagggctcgtctcctacgtctaagttctcatatggttccttcttctaatatttttgttttttctagaagagcttggttgatctttcttgttatggcctatgggatgaatgaacgatataatgcgtttctgtaattcatttacttctttcagatcctanaaaaaaaatttgtggaatcttcataatatttttgttgtagatttgaaccttgccatgcaatattttttaatatttgaatttattggcaactttttcattcg

SEQ ID NO: 174006 - DNA, 271 bp, Zea mays
  Clone ID: MRT4577_90273C.1
cgacccacgcgacccacgcgtcacatacaatgaacactagtgctcctttaccgttctacaaactattaggcacaggggggcttcttgttctatctactagtgctgctacaaccaccatattacttgcatgcatccaagctactattcattcagttatttgttgtcaactctcagcaactgcgtccatacaatcaaaagacccaattgtactatcctgcttgattcaagacgcaaccactactagcattcaacctttttgacggttggacct

SEQ ID NO: 174007 - DNA, 617 bp, Zea mays
  Clone ID: MRT4577_90274C.1
ccggccgggccgtgatttaagagaggcccatgagctcgctgctcttgtgcccgcggtgctactgacggttgctctagatccgttcatcctggtggttttgtgaggtcgaaagcggcgagcgaattagaagatgctggacaagctgtgggacgacgtggtggccgggcctcgcccggagacgggcctcgagaagctccgcaaggccaccaccgcccgcccgctcgtcatcaacaaaggctctacagcgacgagaccaggagcaaccaccgctagatcgggcgagatggatggacagtgaagaggccatgtttgctggtccttgtggttatctaaaacgcacgcatgctctattatagctagtcatcactatatatatacttgtgtttgtgtattgttgttcttgttctgctggtgtctccgccgtttaatttgacctatgttatggagtgagtgatatatgtgccgtcactcctagtatatagtagtgagtgactagttggtatgtgtagtactgtactatcttttctccatatgcatgttttgccagcgcgtaatgaatgtaatgtcagtactgctaaaaaaaaaaaaaaaaaaaaaaaaaaaaaaaagggcgaggg

SEQ ID NO: 174008 - DNA, 593 bp, Zea mays
  Clone ID: MRT4577_90275C.1
gacgacgccggtgacgccgtcgtcgtcgtcgacgccgcgcggcgccggcaacgtgtggcgcagcgtcttccacccggggagcaacctggccaccaagggcatgggcgccaacctcttcgaccggccgcagcccaactcccccaccgtctacgactggctctacagcgacgagaccaggagcaaccaccgctagatcgggcgagatggatggacagtgaagaggccatgtttgctggtccttgtggttatctaaaacgcatgcatgctctattatagctagtcatcactatatatatacttgtgtttctgtattgttgttcttgttctgctggtgtttgaggataaagactccgccgtttaagttgacctatgttatggagtgagtgatatatatgccgtcactcctagtatatagtagtgactagttggtatgtgtagtactgtactatcttttctccatatgcatgttttgccagcgcgtaatgaatggaatgtgtactgcttaaaaaaaaaaaagaacaaaaaaaaaaaaaaaaaaagacaacaaaaaaaaagaaaactcaaataaaaaaaagaggtcattgatatttggt

SEQ ID NO: 174009 - DNA, 731 bp, Zea mays
  Clone ID: MRT4577_90276C.1
tgcccgcggtgctagaacagttgctctagatccgttcatcctggtggttttgtgaggtcgaaagcggcgagcgaattagaagatgctggacaagctgtgggacgacgtggtggccgggcctcgcccggagacgggcctggagaagctccgcaaggccaccaccgcccgcccgctcgtcatcaacaaagacgcggacggcggcagctacaagcgggcgcagtcgacgccgtcgaccccgacgacgccggtgacgccgtcgtcgtcgacgacgccgcgcggcgcaggcaacgtgtggcgcagcgtcttccacccggggagcaacctggccaccaagggcatgggcgccaacctcttcgaccggccgcagcccaactcccccaccgtctacgactggtgagcagcagtgcagcaccgtctccgtcgtctccatctcttgcgtagctacgtgcgtgatctgcgtgctcaaacaggacagagcagcagatccaggaccaaactaattgagcaagaaccacgcgaatggttcgattttaattttttttaaaaaaaatcagtttttcatgtgtgtaataattcctcaggctctacagcgacgagaccaggagcaaccaccgctagatcgggcgagatggacagtgaagaggcccggtgtctctgtcaggccatgtttgctggtccttgtggttatctaaaacgcatgcatgctctattatagctagtcatcactatag

SEQ ID NO: 174010 - DNA, 814 bp, Zea mays
  Clone ID: MRT4577_90277C.1
cgggagcttatcgagccggccggccgggagcggcgcagagcttcacgctctcccacgcagccctcctccagacctccaccactaccgctaccagcggcagcagcgtcgcccccctccgcctctccgcttccttctagccctctcatcggcatctctagcgcggcgcatctgtagcggaggaggaagagcggagcgtcgtctcgccccgcccgcggcattggctgcgggaactgggaaaggaggaattgaatagatacaagcttcgggaacctgcctgatccggatccgaatccgcgctgccgaccggcggagtttgggggcaacatagcttgctcgagagatggaggacctgttgggttcggagatcgggaagaacgactacgattggcttctaactcctcctgggaccccacgtgttcctgcactggagtttgctgaggaaacaccatcctcaaatatattactgaagcgcactgcaactagatcgtcctcaactactagagcatctaggcttccagtatctcaaacagagaatgggcattcgatggttcccactagaccaacaagaagtaacagccgaccatctatccaatcggctctcatgaatggcaacaacaggacatcagttccgaacacaagcatttcttcagtgacttcaagacctacaacccctagtaggcgaagcagcacagttgtcgcaccaaaacaatcagttccagctgcacgtacagtgcctgcaagatcctctacacctggtaaaactcgtctatctacaccagcaaaaacccgcccatctactcctacaagtactcgc

SEQ ID NO: 174011 - DNA, 389 bp, Zea mays
  Clone ID: MRT4577_90278C.1
ggccacgccgccgtcctcgagccgtctgatgagctgcctccgccgggctgcccgcctcacccggggtctgtcttcctcctcggcggcggaggcggagacgctcccgccgccgcgcccctctgcgggtcgccgcgtggtcgtgacggggctgggcgccgtcacgccgctggcgcgcggcgtgggcgccacctgggatcgcctcgtcgcggggagatgcgccgtgcgctctctcgccgcaaaagacctccgctttccggaggaagcaacggggaggacgctcgagcaactcccgtccaaggtggtcgccgccctgccccgccggaagggcgaagacaaattccccgaggacacgtggaccaaggataaatctgtatcaagatttatttccc

SEQ ID NO: 174012 - DNA, 809 bp, Zea mays
  Clone ID: MRT4577_90279C.1
gccggccgggtcggggtgcccgcggtgctagtaacggttgctctagatccgttcatcctggtggttttgtggggtcgaaagcggcgagcgaattagaagatgctggacaagctgtgggacgacgtggtggccgggcctcgcccggagacgggcctggagaagctccgcaaggccaccaccgcccgcccgctcgtcatcaacaaagaaatgaaagacgcggacggcggcagctacaagcgggcgcagtcgacgccgtcgaccccgacgacgccggtgacgccgtcgtcgtcgacgacgccgcgcggcgccggcaacgtgtggcgcagcgtcttccacccggggagcaacctggccaccaagggcatgggcgccaacctcttcgaccggccgcagcccaactcccccaccgtctacgactggctctacagcgacgagaccaggagcaaccaccgctagatcgggcgagatggacagtgaagaggcccggtgtctctgtcaggccatgtttgctggtccttgtggttatctaaaacgcatgcatgctctattatagctagtcatcactatatatatatgcttgtgtttgtgtattgttgttcttgttctgctggtgtttgaggataaagactccgccgtttaagttgacctatgttatggagtgagtgatatatatatgccgtcactcctagtatatagtagtgactagttggtatgtgtagtactgtactatcttttctccatatgcatgttttgccagcgcgtaatgaatggaatgtgtactgctagctacaacgtgctctgttacttcc

SEQ ID NO: 174013 - DNA, 1317 bp, Zea mays
  Clone ID: MRT4577_9027C.1
ccggccggggagcgggatatatcctggtgctcttgccatggctggtgcatcgctcctctccccatcctgcacgctcctccgcctgattcccagcgcgtcgcacttcaagagattcgatcgggttcgccggttcgcgcccgccgccatggcgacttcctcaggaccaaaggaggcgccagcgaataaccctgggctccagaccgaggtcgaccccgccaccaaaggctacttcttgcaacaaacgatgttacgtgtgaaggacccaaaagtgagccttgacttctactcacgtgtgatgggcatgtcgttgctgaaaaggttggattttgaagagatgaaattcagtttgtattttctaggttacgaggatgtgaccttagcccctgatgatcatatcaagcggactgaatggacttttaggcaaaaagctactcttgagctcacccacaactggggcacggaaaatgaccctgaattcaaaggttaccataatgggaactcagaccctcgtggttttggtcatataggagtaactgtggatgatgtccacaaggcatgtgaacgctttgaacgtcttggggttgagtttgtgaagaaacctgatgatggaaaaatcaaaggcatcgctttcatcaaagatcctgatggttactggatcgaaatatttgaccagacgattgggacggtaacttcttcagcatcatgatgaacagtagtggttccttatatggtgcgcaagatcatacaactctggcataagagcttttcatatgtgtgtctggggtctggactcggattaagggctggaatctgtttacttctagcatcttcttgctttaataatatgcgaactatgttgaggaatgaaataaaataagttcgggtaaaaaaaaaaaaaaaaaaacagctgcccggtggtcccgcctgcatgcacactccccagcgcgggcacgtcctgtgccactgccttgtgggcccggccgcatgcaagcgcatgccttggagttacggttggagttggaggttcccccacctggcgacgcgaattagggctgggcaaaaaaaatccgaaatccgaattttgttcgggaattttgggtagtaacttgcaaaacccgaatttattttgggcatcataatcgggtacctgaattacccgaactttcatgtgtcatgtactcacgtcgtgtttaattattaatttgtacatctataattatgtgtacgtgtgcataacttgtgattgtagattgtttgtgttttatatgtccatgtatattaaaattcaaactatatttttatgctaatttaataggt

SEQ ID NO: 174014 - DNA, 461 bp, Zea mays
  Clone ID: MRT4577_90280C.1
tcgcgcttgtagcccgcccacgagtcaggcctttgtgagctcgcgagtggagagaaaaaaaggagcagcgaagagcgaacgaccgagatgctggagaagctgtgggacgacgtggtggccgggcctcgcccggagacgggcctcgagaagctccgcaaggccaccaccgcccgcccgctcgtcgtcgtcgacaaaggtgcgttttgttgcagtcgatgccgtcgaccccgacgacgccggtgacgccttcgacgacgacgacgccgcgcggcgccagcaacgtgtggcgcagcgtgttccacccggggagcaacctggccaccaagggcatgggcgccaacctcttcgaccgtccacagtccaactcctccaccgtctacgactggctctacagcgacgagaccaggagcaaccaccgttagatcggaacggacgaatcgggtggtagtggtggatgaaga

SEQ ID NO: 174015 - DNA, 1092 bp, Zea mays
  Clone ID: MRT4577_90281C.1
gccggccgggttccggtgcccgcggtgctagtgacggttgttctagatccgttcatcctggtggttttgtgaggtcgaaagcggcgagcgaattagaagatgctggacaagctgtgggacgacgtggtggccgggcctcgcccggagacgggcctcgagaagctccgcaaggccaccaccgcccgcccgctcgtcatcaacaaaggtacttactgagctatactgctgatcgtgtcggggatcgggatgaagtcgaacaagtaccagcggcaagcaactaatataataacagtagaaatgaatgaatggatctctccactgtaactaacaacaatatgttctcataaatgaaagacgcggacggcggcagctacaagcgggcgcagtcgacgccgtcgaccccgacgacgccggtgacgccgtcgtcgtcgacgacgccgcgcggcgccggcaacgtgtggcgcagcgtcttccacccggggagcaacctggccaccaagggcatgggcgccaacctcttcgaccggccgcagcccaactcccccaccgtctacgactggtgagcagcaccgtctccgtcgtctccatctcttgcccagcctagctacgtgcgtggtctgcgtgctcaaacaggacagcagcagcagatccaggaccaaactaattgagcaagaaccacgcgaatggttcgattttattttttatttttttaaaatcagtttttcatgcgtgtataataatttctcaggctctacagcgacgagaccaggagcaaccaccgctagatcgggcgagatggatggacagtgaagaggccatgtttgctggtccttgtggttatctaaaacgcacgcatgctctattatagctagtcatcactatatatatacttgtgtttgtgtattgttgttcttgttctgctggtgtctccgccgtttaatttgacctatgttatggagtgagtgatatatgtgccgtcactcctagtatatagtagtgagtgactagttggtatgtgtagtactgtactatcttttctccatatgcatgttttgccagcgcgtaatgaatgtaatgtcagtactgctacta

SEQ ID NO: 174016 - DNA, 1157 bp, Zea mays
  Clone ID: MRT4577_90282C.1
gcccgcggtgctagtgacggttgctctagatccgttcatcctggtggttttgtgaggtcgaaagcggcgagcgaattagaagatgctggacaagctgtggaacgacgtggtggccgggcctcgcccggagacgggcctcgagaagctccgcaaggccaccaccgcccgcccgctcgtcatcaacaaaggtacttactgagctatatatactgctggtcgtgtcggggatcgggatggagtcgaacaagtaccagcggcaagcaactaatataataacagtagaaattaatgaatgaatctctccactgtaactaacaataacatgtactataaattaaagacgcggacggcggcagctacaagcgggcgcagtcgatgccgtcgaccccgacgacgccggtgacgccgtcgtcgttgacgaccccgcgcggcgccggcaacgtgtggcgcagcgtcttccacccggggagcaacctggcccccaagggcatgggcgccaacctttttgaccggccgcagcccaactcccccaccgtctacgactggctctacagcgacgagaccaggagcaaccaccgctagatcgggcgagatggatggacagtgaagaggccatgtttgctggtccttgtggttatctaaaacgcacgcatgctctattatagctagtcatcactatatatatacttgtgtttgtgtattgttgttcttgttctgctggtgtctccgccgtttaatttgacctatgttatggagtgagtgatatatgtgccgtcactcctagtatatagtagtgagtgactagttggtatgtgtagtactgtactatcttttctccatatgcatgttttgccagcgcgtaatgaatgtaatgtcagtactgcaaaaaaaaaaaaaaaaaagggcggccgcccttttttttttttttttttttttttttttttttttttttttttttttttaaaagaaaaactgcaacatgtgatcaaaagtttttcaccaacaaacacagaggggacggtataattacaatagccccaaagcttaaaatcacaaaaattccttctccgaagccatacccccttctggggaaattaaaaccaaaagcctaacagcttgggaaaaaaatctacaacaattacagaaaggtttcgttt

SEQ ID NO: 174017 - DNA, 925 bp, Zea mays
  Clone ID: MRT4577_90283C.1
cattgggtacctcgaggccggccggggacacgactctcggcaacggatatctcggctctcgcatcgatgaagaacgtagcaaaatgcgatacctggtgtgaattgcagaatcccgcgaaccatcgagtttttgaacgcaagttgcgcccgaagccttctggcggagggcacgtctgcctgggcgtcacgcgtgcccgcggtgctagtgacggttgctctagatccgttcatcctggtggttttgtgaggtcgaaagcggcgagcgaattagaagatgctggacaagctgtgggacgacgtggtggccgggcctcgcccggagacgggcctcgagaagctccgcaaggccaccaccgcccgcccgctcgtcatcaacaaagacgcggacggcggcagctacaagcgggcgcagtcgacgccgtcgaccccgacgacgccggtgacgccgtcgtcgtcgacgacgccgcgcggcgccggcaacgtgtggcgcagcgtcttccacccggggagcaacctggccaccaagggcatgggcgccaacctcttcgaccggccgcagcccaactcccccaccgtctacgactggctctacagcgacgagaccaggagcaaccaccgctagatcgggcgagatggatggacagtgaagaggccatgtttgctggtccttgtggttatctaaaacgcatgcatgctctattatagctagtcatcactatatatatacttgtgtttctgtattgctgctctcgatctgctggtgtctccgccgattaatttgacctatgcctatgttatggagtgagtgatatatgtgccgtcactcctagtatatagtagtgactagatggtatgtgtagaactgtactatcttttctccatatgcatgttttgccagcgcgtaatgaatggaatgtgtactgct

SEQ ID NO: 174018 - DNA, 795 bp, Zea mays
  Clone ID: MRT4577_90284C.1
atggagataaatgtttgccgagaaatgatggataacataggttatccgaagcttgaacttggactatctgcaatgacgaaggatcaacttgaagacaaccttacttataacaacttgaagggtcttattcttagcaatactttgaaggcccagaaagatgctgaagtcaaaagcactcggatagccttcggaaacttgcactcggaagtcataacacttcagaatgaggcccttgagaaggacaaaatcctactttctttagttgagaggtccgaagtgcaaggactggagaagaagcttggtgagatcaccgaaaactttaacgttgaacaagcgaaacacgagatatctaatactttgcgtttgagagttcaaaaaaatgttgaggagcttcgtcaagtaaaagaggagtgctacaatgatgctatagaatgctacaagaagtttaaaaatagcaatggtattaaggaggcttcagctgaagctactgtccttggcgagaaattgtactctgaagtgtggatgaacggtggaagggagatattaaatgaagctatcatacaaaatgaagaagaaacccatcgagccttagaggaagcgaggcaagctggcgaagctgcagagcgagaaaggcgtatagcggaactttctcctccagagctgtacgacccagaggccgatccagccctgaagggcgctcttaatgtaatcagaatagctaatgaagccattgacaaagctgtgaacatgcttctgaacgaagctgctgataaagtcttaaaagaggatgattag

SEQ ID NO: 174019 - DNA, 811 bp, Zea mays
  Clone ID: MRT4577_90285C.1
ccggccggggtgcccgcggtgctagtaacggttgctctagatccgttcatcctggtggttttgtgaggtcgaaagcggcgagcgaattagaagatgctggacaagctgtgggacgacgtggtggccgggcctcgcccggagacgggcctggagaagctccgcaaggccaccaccgcccgcccgctcgtcatcaacaaagacgcggacggcggcagctacaagcgggcgcagtcgatgccgtcgaccccgacgacgccggtgacgccgtcgtcgtcgtcgtcgtcgacgacgccgcgcggcgccggcaacgtgtggcgcagcgtcttccacccggggagcaacctggccaccaagggcatgggcgccaacctcttcgaccggccgcagcccaactcccccaccgtctacgactggctctacagcgacgagaccaggagcaaccaccgctagatcgggcgagatggacagtgaagaggcccggtgtctctgtcaggccatgtttgctggtccttgtggttatctaaaacgcatgcatgctctattatagctagtcatcactatatatatatgcttgtgtttgtgtattgttgttcttgttctgctggtgtttgaggataaagactccgccgtttaagttgacctatgttatggagtgagtgatatatatatgccgtcactcctagtatatagtagtgactagttggtatgtgtagtactgtactatcttttctccatatgcatgttttgccagcgcgtaatgaatggaatgtgtactgctactaaagaaaaaaaaaaaaaaaaaaggccccta

SEQ ID NO: 174020 - DNA, 761 bp, Zea mays
  Clone ID: MRT4577_90286C.1
ttttttttttttttgagagaaaggaacaatctgcttcttattggaatatatcaatccgcatacataccatgcatgacccaatgatacagactgatgatcagcttacaatacctgagcaacaaatcttcaatttgatgctttttttgaaagggaatcttcaatttgatgctgggattcagatatatatacatacatacctcttgcgctgctactactactacgcacacttattagcgctatgaactcatggagaaaaccaattaacgtacgggatatatatatattgatgaaaactaaagcatcaaacacacagcaataacaatcatagatgcatgcaacttactagctttatatttgccgggatcgatggcctgggtttggatcggagctgctgcttgcatggtaggagtagctagctattagaggcacctccctccgtagccagcactccgaaacaaggcctgttttatctcgtcggggcttaaaacttgcctcttattattaccgtcctcctcctcctcttgggagcaagaggcctgcatgccaaagtcgctgaagcagctcaccacgcactggtcgatctccaggcccagcacctccagcgcgcttaccggggacagcagcacctcggggtttgtggcgcagcagatctcgatcctcgtgctcccgttgccccgcctctcgacgtcgaactttgtggagttcctcaccatcatctcgttgctgccgctggacgaagaagctttcaaggtgttgaaaaa

SEQ ID NO: 174021 - DNA, 418 bp, Zea mays
  Clone ID: MRT4577_90287C.1
cccacgcgtccggaggccttcagcctcttcgacaaggacggcgactgttgcatcacggccagggagctcggaactgtcatgcgatcactgggtcagaacccaaccgaggctgagctccaggacatgatcaacgaggtcgatgcggaccgtaacggcaccatcgacttaccggagctccttaaactaatggcccgcacgatgaaggacaccgactccgaggaggagctcaacgaggcgttcacggtgttccacaaggaccagaactgcttcatctctgctgcagacctacgtcacgtgatgaccaacctatgcgagaagctgaccgtcgacgaagtctatgagatgatccgcgaggccaacgtccatggctatagccacatcaactacgaggagttcgtcaaggtcatgatggccaact

SEQ ID NO: 174022 - DNA, 374 bp, Zea mays
  Clone ID: MRT4577_90288C.1
ggtgcttaactgctgattacctttaaaaaacaagcttgttccaacgaaactaaaaggtattttttttttctacgccccaacattgctgcctatctgtgtacagactcccaaccatacgggctttgtggaggactgaaaaattctgccacgctaagaaaatctgaggtattttgaaacataccacttaacattctgttgcaagcctataacacttggacaaataacctatgggtgcccaaatgttcgggccgttacaacctaacctgtagtgctgaacgctcatttgacgtccggggagtgtttccggcacctgcttatttttgtggatgggtgcacccagggctcctcggtgttaacaaatgtgccggaacctg

SEQ ID NO: 174023 - DNA, 418 bp, Zea mays
  unsure (1)..(418): unsure at all n locations
  Clone ID: MRT4577_90289C.1
ccccactgacaaaagggccaacaataatgagcagtgccttcgccccccataagcgggggcgcctacttccatgagtcttggggctcagtgtgggggggcggagtctgtgacaccttanctccaaaatgagaaacaatcattgggggggggggggggatagacttatagggggatattcaggcggtgcgagtgcggcgntctttnggaatgcgtggggggctnagtgagattgtgaatggggcttatcattgtggtgttcctcgtggggtggtgntgntgnctgctccctctnagtgntgggggggggggggggactctangtgtgctttgtttgaggcgcattacgaacataggggtgtggagaggtgctcataatgcgtattatgagtaaggagtattgagaagagaggtataattt

SEQ ID NO: 174024 - DNA, 365 bp, Zea mays
  Clone ID: MRT4577_9028C.1
aaaaaaaaaggggccctagcgggagcatttggtcattaaacggggctggttttaaaaacaggggcggaaagccggggtcaaccccaaaaaaagcccagggggtccaaaaaatcccggtcaaagaacccttcgggggccccccggggggggagattcacaaggtaattttgggggtccaaaaattggcccccattaacgggaaaaaaaaaaaacagggggggggcaggggcaaggcccccctggggggacaagaaaaagggaactttggggggaaccaaaaaaaacccccccgggattttatggcaggccttctgattggccgaaaaaagaaaacttgcaaccatgtttagcccgcgatttaggga

SEQ ID NO: 174025 - DNA, 361 bp, Zea mays
  Clone ID: MRT4577_90290C.1
gaacaaaccgcgcgagtcgacactgaaagggattgtcataggaaggcgcaacgctgggaggaatacaaccttcagattgcgtggattattggctggcgtggcactctagtctgtctttccactttactgacccaacatcaaacaaatcatggtcttggacaggaagaaagacaggaaagctaacctgtattacctgagggacaagatgaacacacttaaaagatgaggatttcaacttgtttctatgattacttttgaggcgagcggatcaccatggtttgtcaatatgcaatcacattgtttggggttgcatctttgaaaaaaatcatagcttggggttgtcaggtcgcatgctccgatc

SEQ ID NO: 174026 - DNA, 322 bp, Zea mays
  Clone ID: MRT4577_90291C.1
ctgtatcaattttggttggtatggtctgacggtgagagtttaagcgaccacctacacatatatggtcacccgtctgctattggaagtgaaactaaataatgagccggcccggccgcgccgccggctccatgtccgctacaccgacactcggaaaaccttggcaccccaacaagggccagggtcagggggcgactcctatggtggatttacagagggcggaaccgtcttgatttcttgatccatggctgagtcctcgcgtgagctcctaactgtcggaacccgacggctccggcgggttgtttggcctggaccctgggagatg

SEQ ID NO: 174027 - DNA, 323 bp, Zea mays
  Clone ID: MRT4577_90292C.1
atcatgggacgggaatattttaaaagccctaggcctcatcatctccctttacataaaactctatttcctgtatctccgtacatagaaaggattcattaccaacacacttctattccctaaatcaactactaactctccactgtttatctctccaacaattccaaacctctccactttctgcatttcaaaaaccaaccccgatctaacaaacacgcaatcctactaatccacaatccacaccttttcattctttataaaaccaataccaatcttgttctatccgaacattaatacattgctcttggcacccataaaaacattac

SEQ ID NO: 174028 - DNA, 450 bp, Zea mays
  Clone ID: MRT4577_90293C.1
ccgatgcatcaaggttccagcagcccgcatgttccacgagacgagctctctcgcctttaatttgcggaaggcgactcagcgaaaggtcgtatccggtatccccatcatgatcgtccagcagaggacggactcgggttcaccgacaaccccaggtcaaccgaaaccttttaggcccagtttaaattgagaagaataccacatcagtaggagtatgatatattttagggtcggagtcgttccaagctaagctatagtttcagggttatggtgtggaatctctagttgtctcttgtattttgaaaccgaaccgaaatctcagggagggttgtacgtgcccttaaactatatatatgatcacatatgtatacaggccgtaaccggaagcctgggccccctaaaaaaaaaaaaaaaagggcgggcccgctatagagtacccgcgcacgcgcgcgc

SEQ ID NO: 174029 - DNA, 926 bp, Zea mays
  Clone ID: MRT4577_90294C.1
gggcatggcctatgtggttaagcccctaggtggtgatcagtttacgttggtggctaatgtacgggcggaagagtggttagagcttggccagtaaggattaggaagtaatcggcttggtgaaaccatctatctaaaaaattccagaaaagcccatgctatgataatgattatcattatttagaagtttgcccgtgatggccatggggaggaagggcattgtttttcccttggctgttgcctatattctcgataatttgttggctaattcctagggtgtgaggactcctatgttaagaaaactgtcactagtgtggggtttgggtgccctgatggcgatcgccgggggagggggggaagctttagccgaaccagggggcaaaattgaacctttgcagttcggtcaatccgtggaagagatggactccaaccccatgggacagatcacttccgtgtcggagcttagggatgtgcagcccaccgcctgggcctacgaagcactcaaaagtttagtggagcgctacggttgcattgttggttatcctgaccgcacttttcgcggcgatggagccctatcccgttgggaatttgctgcgggactaaatgcctgcatgaacgtcatggagcggttaatccaggagaacgtagcggttttacgggaagacgttgataagttgaagcgcttagcccaggagtttcagggggaattggccgccctgggggcccgggttgataatttggaagtccgcacagcttacctggaagaccatcaattttccaccaccaccaaattaagtggacaggtggtgacggccctgagtggcattgtcagcggcgacaaaaataatggcactgaatcaattaccagaaacaccaccttgggttaccgcacccgtttggagctcaatactagctttcggggagatgac

SEQ ID NO: 174030 - DNA, 269 bp, Zea mays
  Clone ID: MRT4577_90295C.1
actccacgctgtgctggatcgaccagggcccgtcacggtgaggcgtgcacacttacggggctacgggcacgatgtgcgcgtctcggagcgtaaagggccatacgccgctaccacgagcacgatctgctaggacattacacagcaagcagggccgcggaacggataattgcaaaccatagagcagccatgtaacggaccggagcctacccgacggaggagcagcaaccttggacacacggcatcgaggccacccagcgggccgcgcagga

SEQ ID NO: 174031 - DNA, 447 bp, Zea mays
  Clone ID: MRT4577_90296C.1
tgcgagggctgacaccccgtgggattacatcgaaaaatgcgtttttctggatgttaacgaacctaatggctcgggggggcgtcattctagatataatactagtgactccccatacttcatagttcataacagaggcatccatcgcttgatgtttcacaaataacttcacgtaccactaaactaaagacttttacgtgcatgatggtcattcatcatactttgagcaatctgccaaacatgaacacttttcaccacttttgtagcaaatagccacgttaaatgatgcactgtacaaaatccacattcaacagaactggttttaggcccaaattgaccgctaagcaatctctaaccacaacattatcatgatggcagtccacaaggcactctaccattctgcgtcactgatccttgcctgcgtcatacaagtctatcttctgtgccggc

SEQ ID NO: 174032 - DNA, 268 bp, Zea mays
  Clone ID: MRT4577_90297C.1
gtctgcctagcaattaactcatcgagtccagattggagatctcgacgccatgaatgtgctgatcgttgcccttgctctactggcgctcagctggagcgccgcctccagtacaagcggctgctgcagctgccagacaccaccgtttcatctaccgactgcgttgtatatgccggctactgtctatctgtcgtctcagcaacatccgcaaccatggcaatacccgactcaaccaccgcatctaagcccgtgccagcatgttctgatcctg

SEQ ID NO: 174033 - DNA, 725 bp, Zea mays
  Clone ID: MRT4577_90298C.1
gggaccctcgaggccggccgggaaatccataccatgagtaccctccgacatctgacagactctctcgctactacaccaccacacaataaatgcagcgacacattatcctctctgctcagataagatggtgtagctgaagctgcagaatgggctccccgcgagcgtccacaagagagggaaacgcaaaggctggcttgatcgcctatgaatccagccagatctccatgcctaactcccaccagaacatccgcaacttggttagggatgaccttatcatcacgaagcctcagaaggttcactctacgacccgtgcaacaaaggcacatgaggccaaccatcacgaaagggactctggatatggtaagcgtacgtccaccatggaggctaggctccccaccaagattctgtgcagtgtaggaggatgcgagttctgaggcgcctgctctgcaagtaccgtgaggccaagaagatcgacaagcacatgtatcatgacatgtacatgaacggcaagggtaatatggttaagaacaatagggagcattatggatagtatccacaagtccaagggtgagaacgccagatagaagacactttctgatcagtttgacgacaagagtgcaaagagcaacgtaaaccacgagaggaagattgctacgacggacgagaggctgctccaccgtccaagataaccaacaggacctgttgcagccccagctccatctact

SEQ ID NO: 174034 - DNA, 201 bp, Zea mays
  Clone ID: MRT4577_90299C.1
aacggacaatggtgcatgctaaggatgctccatcaaccgaaccactgctaggaaggaagcatccgtagcgctaggattacgattagccctgtatctttgatattgctcctgataatcattaccaatgtgaaatggattatattttgaaaataccatcttgatgatgaatgacaaccaaaaatgattgagaacaggcgtgga

SEQ ID NO: 174035 - DNA, 847 bp, Zea mays
  unsure (1)..(847): unsure at all n locations
  Clone ID: MRT4577_9029C.1
cttttagataagaccgaatccctttctctcccaaaaaaaaaagagagcaaaaggacgattctcggcggcggaggcggtttgatctcatcggcggcgatctactccttccttcaccacccgccctctccctttctctctccagttacaggagcggtcgatccatctgtggccatgtcgtcggccaacgcaacctcttgtgtttatggggaaatttggattgacggctttgccagactgcacaaaggggatgatttcacttctagcccatcatcaaatactctccaggagttcagtgatgtttggcttgctgccgccgagcgccagctcagcctcaggcccaagtcgccgtcgcctgaggagctgacgaaacgcagacaggagcgtaagcgcaagggcttggtcatagcgctcaacacatatgccaagcgaaacaacatgcagctcactgatttagaatttgtggaagagaaagagaggaaccaagtctatggatgcggagcactatatgtgcactccaactttctggtgaaaggttcagatggcaaacctactatgttctttgctgagatgcatcctgactgcacacaggaagaggatgttgtctgctgcactcctttggaagaaaacgactatggtcattgtgtcgagtgtgacgatcgagcaaaggagcttaggcatccctcgggcggtggctacttgggtggacatgagatgatttttcactttgaggagctggacagtgatgatgactgttttatgtgaaaggaatctatatatccaacacagaaccacaaactgatctgtttggtcttggnnnatgtgggtttgtggcacctgagagctccat

SEQ ID NO: 174036 - DNA, 166 bp, Zea mays
  Clone ID: MRT4577_902C.1
aaccaagctaccttatctataagtactacggctcgaaagtgtcgggcggtaatcaccattacatttgatccgtcgcgcgcggaccgatcgacgagcgagcctcattcacactccgatctagttagataggtaactgaggaaagaaaaatctgaccaccggaatgcg

SEQ ID NO: 174037 - DNA, 427 bp, Zea mays
  Clone ID: MRT4577_90300C.1
ccgttttgctctgccctcgcgcccccacgcagccggggggggggtcacactacggggggggggcccaacccaaccacagacatggtggtggccggtgcagtccaaaggagaaccgatgacaactggcccacgagagaccagcaggaccagggccagccacggcgcaggaactcctctgcagcgtacaagggctcggtcaagaaatggcaccccgacaagccgccctcggcctccaggccggacgcctcggctcgactaaaggccatcatcgaggcgtaccaggcgctcctagaccaggacgacaacacagccgagctgaggccgaacaacagacgccgttcggcctagaagtcagacggaggcgccgaaacccgcgcgcagaggaccagcaacttcactcattgaacgaggagtagggcccgcaccc

SEQ ID NO: 174038 - DNA, 189 bp, Zea mays
  unsure (1)..(189): unsure at all n locations
  Clone ID: MRT4577_90301C.1
gaaaaaaagcgtgtggacatatgggacacacgggtccatatgggacacacggtcacattagggacatgcctgcctggtncaaatttaaagggggtatacgagggagcagcgtccctgggaataaataaagaccgcgtggggggaaggataaaccaancagccnaaaggacatggccggctctccgtctt

SEQ ID NO: 174039 - DNA, 268 bp, Zea mays
  Clone ID: MRT4577_90302C.1
cttcttcgttgttttttcatcactgggaagatttgctaaaagaaccgggtgatcccatcttatttggggaccagactgttctgaggttgactgcctcctggtacgaattatgcatgggccggtgggtgccggcctgtgtgattacatatgcctatgtgggccaacagggtgcaattggatagggggtacatgcttgttgcagccttctcttatctggggagctgcttgcggttatcaaccgctagcaggtagttgcttttaacccagc

SEQ ID NO: 174040 - DNA, 610 bp, Zea mays
  Clone ID: MRT4577_90303C.1
cttgcatgtgaggcgaggccgcgagaacagcgcgagccatgtcgatcgcactgcagagcgggcgcggggtgggcggcggcgcccctaggttcggccacgtcgcccgctgcggctacgcggcctcgccgccgccggcggcggggcgcgggcgcggcggatcgtcctcggtgggacgggacagagacagccccggggaggcggcgcaacgggagtgggacggggaggaggtcgagggcggacgacggggaggagcaaagctcatacaagggctccgatttcgacaccatggacgcgctccaggaggccctgccctccaggaaaggggtatgcaagttctataatggagaggctggatctcttgcgaagatacaaggggccggagcaccttctacgctgaaaaagctttcgaaggaagagagaccatcccctacgaagcgcaaaggtcttcttccattcagtctcaagatggggcaaaccacagaatagagaggtgttccccgacaatgatgctattggcacccccacaaactgggtagtgatggctatatcgcctgctgacacaagcagctcaggaagcaacagaggtagcgacggatgaacataaccggtg

SEQ ID NO: 174041 - DNA, 804 bp, Zea mays
  Clone ID: MRT4577_90304C.1
aaggtattcatgtcaccatacattagaaattcactcaaccactaataaatcttatcggcaaagcgctataagtactaaacgttgtttttacattattaacttgaccactcaattcatatacaataaccaaattatttatacttgagaaatacccttaccaaagtactctacgtataatccacttacaagcatcatgcatatctctaattagtttcataatacaatacatactcgccttaattctaacttatgccataccacacattggcatacatatttatcgacagagggctgcaagaaatgacattgatttataggtttggcattacataaaacacaaggcatgcagggatagcgaggtctcagcggggtttgacgacaccgcaaccgggctgcccaaaaaaaaatcatggagctgacgacgtgctgctcgaccactaccaaggtgctgctgctggcttcaagtgaggagagggcatcgatccatggggagaagatggagaggggatggaggactcccggctgcaggcgccataaacagagggaggaagcttgcgtgagggagatgaagagatggaggagaggcgtccatgggaggagaaacaacaacctgctcccaggcgtgacttcaatgaggaccgagcgcaggggaacgacagggctgagggcgagctcggcgagcaccaagggtgaggtggcggcggcacccgccgcggctgagggagggggcgaccatgggagagggctgacgtggggaggaagggagttccctgctggaaaaatacaccccggccggcctcgagg

SEQ ID NO: 174042 - DNA, 608 bp, Zea mays
  Clone ID: MRT4577_90305C.1
ccggccgggagggaactcccttcctccccacgtagccctctcccatggtcgccccctccctcagccgcggcgggtgccgccgccacctcacccttggtgctcgccgagctcgccctcagccctgtcgttcccctgcgctcggtcctcattgaagtcacgcctgggagcaggttgttgtttctcctcccatggacgcctctcctccatctcttcatctccctcacgcaagcttcctccctctgtttatggcgcctgcagccgggagtcctccatcccctctccatcttctccccatggtgagctcgccctagccctgcagttttttttttattttcctgcagctcgccccctccagccatggatgcaccctcccttttgttgctcgccgtgaacaggatcgatgccctcttctcacttgaagccagcagcagcaccttggtagtggtcgagcagcacgtcggctgctccgtgattttttttgggcaagccgcgtgtggtggcgtcaaaccccgctgagaccctgcttatcctgcatgccttgtgtttgatgtaaagccaaacctataaatcaatgtcatttcttgcaaaaaaaaaaaaaaaaagcggcc

SEQ ID NO: 174043 - DNA, 288 bp, Zea mays
  Clone ID: MRT4577_90306C.1
gggggggggggggggggctgtaaaataaacgagctaggagaatgtacgatacgagagatagagataggtgaggtatggaggttaggttgagcaataaaaaggaccctacctttgatgccgtagtaaggatagagctgggagttactggtggtgtgactcataaaccacttcacaaagggaatcctcacaatagcgtcgtagagggccagggcccactacctggcaatgtcgaccccttacttggccgtttttaaattgccggtttggtcgtcgtaaaattgggcgttt

SEQ ID NO: 174044 - DNA, 151 bp, Zea mays
  unsure (1)..(151): unsure at all n locations
  Clone ID: MRT4577_90307C.1
gtcttcgccttcnngcgtcgtctggcgctcgcttggctctgtcanncaggtcttcaggcgggaggagggggcngngtcggctggtctcgtgtgccgtgtgcctgtcgacaggttggggttcgggnaattgggcgctaggcngnngtggtgc

SEQ ID NO: 174045 - DNA, 410 bp, Zea mays
  Clone ID: MRT4577_90308C.1
aataaaaaccaaaactttattatgaccatgcatatattatggggcataccacaaatgaaaagggggggggtttaacggcattattacatatatagatggagggggagggatgggggaaattcccaaaatataatgaataagtagtgggggggaagggcaggggaaaccccaaaggggtgggggcggtagctgggcagttggtactggaagagtccacccatggccggaatgttttgcgccataataatggccatggggtggagaccctgggctgccagaagttgttgttgttgttgaataaaagctggttagaacaggttgttgttggcggaagcggcaccctaaagctgaataataattggaagttggtgcgcgacggactgcacgcccataatcccaaaggggggggg

SEQ ID NO: 174046 - DNA, 367 bp, Zea mays
  Clone ID: MRT4577_90309C.1
tcgggtaatgcaatgccagatggtctaatgcacactgggagttcaagcggtataatacatgacacatcctgtggggatcattctcttaatgcttgtcaagacttgcatggccttcatacccaaataaatcgcttaaactagtctacagccataccaaaatgcaactgctgtgctgattggcagtctacaaccaagacaggctcaacattttagaaccgagtcttgctactctgagctcatgctcgcatatgtgccttctgtgggaacactgtgcttgaatccatgtcaacctgtaggtgatgcctctggtggtggatcctttatcagctcagagttgaataggggaaccacttaacgattcaatgtt

SEQ ID NO: 174047 - DNA, 231 bp, Zea mays
  Clone ID: MRT4577_9030C.1
agactgcatctgagtcgtccaccgaagctcccgctggagctggcactggcgctgcaggtggacatccgcatcttcgtctattaccacaaacgggcatccaccctggggggggtgcctacggggttattattctccatagtcgtgtactaattccagtaaccttctacatgcctgcctacgacttcatggtccacgacggatactggtacagtagcgattacactgtcctgg

SEQ ID NO: 174048 - DNA, 254 bp, Zea mays
  Clone ID: MRT4577_90310C.1
cccacgcgtccgctcacgcgtacgtcgacgcttggggtttaaaactgtcaattggcgtgtggggcatcatactcttatgtgtcggcgtcagtttgtttgcgtcatcagtttcgttgtctgttgcatgtcacggcttacttatgtgcttatggattgctactatacaagtattcgttttggatgtgttaaaaagacatgaaaatggagctacatgccagaagacagacggaggcttctttggaagctgctctgac

SEQ ID NO: 174049 - DNA, 251 bp, Zea mays
  Clone ID: MRT4577_90311C.1
ctcgtctgataaggctccaaggcctgatgtgacagcgcggatctacaaatcctgtcgctgtatcattaacgggaacctgctgagggctctatctgtcattcaccaaggcaatgctcagaagacggggccgctaaagtcctcttatctcattttgatccctacaaagatggatgcttctttggctggtaattttaggctaattagcctaattcacagtgttgctaagttggtcacaaaattgcttgctaatc

SEQ ID NO: 174050 - DNA, 371 bp, Zea mays
  unsure (1)..(371): unsure at all n locations
  Clone ID: MRT4577_90312C.1
gaacaagacgcgctgatggtgattgacaacattggacgcttaacccaggcaaatactgaggtgtctgatcttcttgcacgtatccgatatcctgtggcataccagccaaccctcaacactgatcttgcaggactggaagagcgtataaccacaacaaagaaaggcaatattacgtgtgtgccaggctatatatcgtgcctgctgatgactcagacagaaccagctcctgatatacctttgcccatctacgatgctacacctgtgttgtcacggcagatctgtgagctttgganacatcctgcagagcatacactgtattccacataaagaacgctttctacacacttgctagaagaggatcattacaatac

SEQ ID NO: 174051 - DNA, 526 bp, Zea mays
  Clone ID: MRT4577_90313C.1
ccgcccactaccacgatattctgaagccactccaatgcaccattgtttcttgttccctatagaaactgatcaatttggagagtggggaaaaacaccttataaactccagccaaatgatactaccctaaacatagaaccaaaatcttctactaccatctggttactctctaaatcaggatcccttgaacttctccatataaaaacagctcatgaaaggctcgacagggaaaacaactcgaacttaataattactgcgccaagcgtgctataccagatgaactgtgcttactgttaaacctgaaaatgtacaaatccatcctttcttccttaacctattaagcggaggtctatataataaccatatgtgaatattgaaatgcttacaccaaaatattatattgctgtcaataatggaactgactcaagacagaacatgtgaattcaaagaaatgaactttatcacataaagcagggccaaacttatttatgagctaccactaacaaaaatggttggaaatttcttttt

SEQ ID NO: 174052 - DNA, 699 bp, Zea mays
  Clone ID: MRT4577_90314C.1
gccggcaggtccggggaacgaagccaatggaaggactggaggaggggagtagcgtgatagtgatgccgtagtggtcgagctcgcggcggagtagagaccagagagtgagagcgagcagagcaaccaaagcgtaggcgacctcaacgcgaagcggaattgattgcgcccaccaccacgtcttctccccctccgtccgacccgtcctcaagtcaccaggccaccatcattgccgccatcgcgccgcccggccgcgggagcccagctacgcattcataactgtttctctcttggcttctcggcgaagtgttgcggttgcgggtactggagtgcggagagcagcgcggcgcgagggaggaagccaccacccaccaccacctccattaaaggcgctcacgcgccgcctccgcctccgcctccgcctccacgagagagctaggcgagaggggcgtacgagacctcagctgactcctgtcgtcaaggccatcgatctctcccctcacgggggcagccacgtacaaaggcaggcagctcgccaacgcccagcaccctctcgccgcgccaccccacgccgtgcgcctttaaagagagcgcacgacaagcttaaagaggtgacagagtgccgagccgtcgcgcgcgcgaaagcagaggagcggcaatggcagtggccgcgcggctcggcgccgtcgtggcgtggtcatc

SEQ ID NO: 174053 - DNA, 607 bp, Zea mays
  Clone ID: MRT4577_90315C.1
cacacaacagcgcatatttagatttttataggataggatacaagaacacaagttacataaacaaattggaaaaggaatcttcgacccggttgcattgaacggtaatgcaggtcgtaccatgtgcgcgaagcctgaattattgggttaattttagtccacaacaactcaaagcattacgccagccgcacctgcggaccggggggctgtcctgtgtcttctcctcccagtagcgtcgccatgatttacgcaagcttgcagaacgggaggccatggcagcgcgcacgggtatgatggcccgacgtcccggttcctcacgtgctcattttccacctccatggtctccaggtcgacggagaagagccaggttttctcccccggcgtcagcaccacggaggtattgtctgcagcgacaatactcgccggcagcctaaagaaccagtattcccaaccggacagattctcggtcgcgtccctcagactgatgctcctctctatcacccactcgccggaatccggtagctgacagaacacctcgaggtcatcgccgtccaagcgcacgacgcgcaacgtgtcccaccgtccacgccaccatgacacggaagctgat

SEQ ID NO: 174054 - DNA, 2510 bp, Zea mays
  Clone ID: MRT4577_90316C.1
accggtccggaattcccgggtcgacccacgcgtccgccgagtactcgagtgtcgctcgttttccccgcaggtccgccgcccgccggggttatattccactgatgctctgacgcatcgagtccagacaccaggcaaatgcggcgaaggcactgaagaagccacaccgccgccgctgtagcctgtaggctgtcgccacgacccacgcccgcgcgcgcgctgctgccgtgctgcggtctgctgccactgccacgcacctgacctgtcagcagcctccggaggaggcccggcccggggcagtgcggcggcatggctggtggtggtggtggagggccggggccggggcgggtgaaggcggggagccgcccgccgtgggtcgggctggcggcggcggtgtgggtgcaggtggctgcggggagcgcctacgtgttcccgctctactcgcacgccgtcaaggaggcgctcggctacaaccagcaggcgctcaccatgctcggcgtcggcaacgacgtcggcgagaacgtggggctcgtcccggggttgctcgccaaccgcctcccgccctggctcatcctcgtcatcggctctgcgtgcgccttcttcggcttcggcacgctctggctcgccgtgaccaagaccgtcgccatgccttattgggtgttgtggatagctttatgtattggcacgaacagcagtgcatggttgggcactgctgctcttgttaccaacatgaggaatttccctctcagccgaggcactgttgctggtctcatcaagggttatgttgctgttagtgctgctgtctacactgaaacgtttaatggaatgctaggcaattcacccacaaatcttttgatgttgcttgccttggggatcccaacagcatgtattgtggtgatgtattttgttaggccttgcactccatcactggatgaggacaactcaacagaacacagccatttcatgtacacacaaatctcaagtgtggttctcggaatataccttatggttgctacaatacttggtgatactttaaaactaagtcaggctgtcacctatctattgtttggcataatgatacttttgctccttgctccacttgcaataccaataaagatgacactttatccaaacaaacaaacaaaggaaaaaggccagcaccccttgctccatcttattcaactgatagtctgtctggtgcggatccagagaactcacaaccacttttgggcagtgcctcaacaacacttgctacaggtaccaatgaatctgatgacagtactgatttggatcttctattggctgagggtgagggagcagtgaatttgaagaagaaaagggggccaagaaggggggatgatttcacattccttgaagccctagtaaaggcggacttctggctactgtttgttgtttacttttgtggagttggcacaggggtcactgttctcaataacctggcgcagattggaatgtctgttggtgctaatgacacaactattttgttgtgcctctttggcttctgcaactttgctggtcgtatccttggtggatctgtctctgaatatttcgtaaggtcaaggatgctccctcgtcctttctggatgatgtgcacacaaataatcatggtggtaacgttcctgctcttcgcgactggtcttcatagcttgatttatgtttcaactactctcctggggatatgctacggggtccaatttgctgtcatgataccaacggtctcggagctttttgggctaagggacttcgggctaatgtacaacttcatgctgttagtgaatccactcggtgcattctttttctcagctcttcttgctggctacatctatgacaaggaggcagcaaggcagcacccaggtgtactggagccttccgactgctatgggcctgactgtttcagattgactttctatgtctgcgccgtcgtgtgttgctgcggtaccctgttgggcgtgttcttcatatcgaggataaagccggtctaccagatgctctacgcaagtggatcgttcagacatcctcggagccaacagcagctccactgatgttgcatatacactacagtcatatgctaagaaatagtcctattgagttttgggaatgaaatcataatgttctggagtaaatcatctgctggatgccatgttccggtgctgtatcgcattaacggtgcttgatttgcccctgtttgtatcagagttttattctgatttcatttgtccctgctctgtaaggtcgccagcctagtagatataatatagcgggtcatcaatatatactggtaaaccagctgcctatttatatggcagctcgtgtgcatcagcaagtttgaggacgtcataaagcgaatgtatcttctttattctgttgttcctatacaatgggtttcctccattgagacgctgctgcttctttattctgttattcctataccatgagtttcttcccttgagatgctgctgcttctaaaaaaaagaacgtggtacaactgcaag

SEQ ID NO: 174055 - DNA, 845 bp, Zea mays
  Clone ID: MRT4577_90317C.1
cattgggtacctcgaggccggccgggaaaaaaattcaaaaaaaaaaaaaaaaaaaaaaaaaaaaaaaaaaaaaaagaacgaagccaatggaaggactggaggaggggagtagcgtgatagtgatgccgtagtggtcgagctcgcggcggagtagagaccagagagtgagagcgagcagagcaaccaaagcgtaggcgacctcaacgcgaagcggaattgattgcgcccaccaccacgtcttctccccctccgtccgacccgtcctcaagtcaccaggccaccatcattgccgccatcgcgccgcccggccgcgggagcccagctacgcattcataactgtttctctcttggcttctcggcgaagtgttgcggttgcgggtactggagtgcggagagcagcgcggcgcgagggaggaagccaccacccaccaccacctccattaaaggcgctcacgcgccgcctccgcctccgcctccgcctccacgagagagctaggcgagaggggcgtacgagacctcagctgactcctgtcgtcaaggccatcgatctctcccctcacgggggcagccacgtacaaaggcaggcagctcgccaacgcccagaacccttgggcggacgcgtgggcgccgtgcgcctttaaagagagcgcacgacaagcttaaaggttcccacgccgccgctcgcgcttgtcttggcgccgcgacacagctggtcggtgcctttgatccgttccttccttttccagctgcagaaggtgagcagaagtgcagagccgtcgcgcgcgcgaaagcagaggagcggcaatggcggtggccgcgcgtctcggcgccgtcttggcgtgcgt

SEQ ID NO: 174056 - DNA, 373 bp, Zea mays
  Clone ID: MRT4577_90318C.1
aggaaaaaccaaccaacaaactaaaccatggggcgtacatgttagggccccgttatattgacaacgcagcctggcgaaaatatattatcttccttaaaaggcaggggatcccgccccattggtggtgggggagcaaccccgggatgaatggcacccccagctgggggagccagggctggccctggatgaaactttcgacggggtacttttgcaacgcgggctggtaggggatgtttttgatacccctccactttacccgttcgcttatgttggggccgggccccgggttttccaccttggcgtaataacaggggctgaggcccaagttgcccaaccacgggagccaaccctgggggttgatgaacccgcccat

SEQ ID NO: 174057 - DNA, 1054 bp, Zea mays
  unsure (1)..(1054): unsure at all n locations
  Clone ID: MRT4577_90319C.1
tcgagggccggccggggggacggtctttcgatancggatcacacgtcgctgtccccaccacgccaacctgccccaccacccggctcccttggctttccccagtccccacccgccccactgtgacactgacaccgttcgaagcaaaaagagcgaacacgagcacgaacacaagcgcagagcagccaagcgccacacacacgccgacgcgaaccaaccaaccagctggtagtaggttcgccgcgctgacgatgatgcctcgccgcgcccttctcttcgccgcggtgctcctcgcggcctccgccgccgcggtctccgggttccacctgggaggggacgagagcggtctcgtgaggggtgtgctcgccgcgctccgcgagcgagccgaggccgaggacgccgctcgcttcgccgtcgcccactacaacaagaaccagggcgccgctttggagtttactagggtgctcaaatccaagcggcaggtggtgaccgggaccctgcatgacctgatactggaggcagctgatgctggaaaaaagagtgtgtacagagcaaaggtttgggtgaagccgtgggaagatttcaagtctgtcgttgagtttcgccttgttggagactctgaatctgaacccgagccttctgttgcttctgatgttagctctgggcaagatattgtacaagaagaggctcgcctgcacaccattgagaatgatgggctttccggcgatttcacatcatcatcttaggattccaggcaaggatggaaagcgtaaaggtttaaaatgaagatttaggtatttagagtatgtcaagctgaaatgctttgccttgtttattggaatatgtatgtttcgtttcaaacgtgggagcatagaactgtatattcggtatttcacactgttcatttccatgtctgtatataggaaggttcttctggctatatatatattattttgatccccaagtactttttctctgtcttctgtggactttaaagaatcagtcctgccgcgtctttggttagtgtgtaatatggaatagaggatgccaatttttt

SEQ ID NO: 174058 - DNA, 427 bp, Zea mays
  Clone ID: MRT4577_9031C.1
cacaggaccagaacaacgcccgcacccacacagcaacactagtcatccgcctccctttattttttctgtcacaaaaacatagcgggcgggcgggaccttcttttttttcgctgcgccacgacacgaatcgatctaaccaaaagctacctcatatactacccatatcaagcaatgcaaccaaccaaccaaccgcaccaaaagtacccacacgaacaaagaagctctctacctcaacagtacacaacacccacccacgaaccatcgcactacgattcaagcgacgaatgcgcaaacacacctagccgagaccgagagcgagagagcacacctagacgactactgcgcaggccacaacctcctggaagaccacagatccgacgccgccgcccgtgcaggcccacgactcccccacgccgtccttgacggt

SEQ ID NO: 174059 - DNA, 271 bp, Zea mays
  Clone ID: MRT4577_90320C.1
ctctcctctagcgcgcagccactcctttctctctctctggtctgcttccagccgagcagtgccatggcgttactctctccctctgcgcacggcgctcgcttctccctggctcccggccagaatttcttgcggcgcgaagcttgctccctgcgcccgtcccacatggcgctcggccgcccagctgtatcttgctccttgcgctcggatttcctctgctacctggcgaactcgccccagccccagcttaaatgtcttctctgccgtgcgcgct

SEQ ID NO: 174060 - DNA, 475 bp, Zea mays
  unsure (1)..(475): unsure at all n locations
  Clone ID: MRT4577_90321C.1
cctgtcgagtaccggtnccggnnatatcccgggtccgaacccacgcgctccgcacctcgatatagcgcactacacaagtgtggctcaccatattggtgatcttggtctgccaggccggggcgccctcctcgcgccgatacttcgtagccattgaaacagctttcgggaaggtcctgcggtgccaggcagccagtcccgctaagcaatgcatgaggcaaggatcaacagacactgatggcatctcgatgtatctcacaattaccaaacatctctcaaagacgacgtctgatgaacctgatccggaataggtaatcctaagaacggcaccatcacaccggagacaaaaattacggcagcgtatactgcagcattgcagctgctgttgttgaccatgtggacacgacacactatgcatgatggtggtcaatgctcggctgagctataactagcgtgccaccaaccatgctaatgtcag

SEQ ID NO: 174061 - DNA, 1475 bp, Zea mays
  Clone ID: MRT4577_90322C.1
cattgggtcactcgaggccgcccggggggacggctcggctcgccgggccggacagggacaccgttcgaagcaaaaagagcgaacacgagcacgaacacaagcgcagagcagccaagcgccacacacacgccgacgcgaaccaaccaaccagctggtagtaggttcgccgcgctgacgatgatgcctcgccgcgcccttctcttcgccgcggtgctcctcgcggcctccgccgccgcggtctccgggttccacctgggaggggacgagagcggtctcgtgaggggtgtgctcgccgcgctccgcgagcgagccgaggccgaggacgccgctcgcttcgccgtcgcccactacaacaagaaccagggcgccgctttggagtttactagggtgctcaaatccaagcggcaggtggtgaccgggaccctgcatgacctgatactggaggcagctgatgctggaaaaaagagtgtgtacagagcaaaggtttgggtgaagccgtgggaagatttcaagtctgtcgtcgagtttcgccttgttggagactctgaatctgaacccgagccttctgttgcttctgatgttagctctgggcaagcaattgccaaactctctcttgaagcagatattgtacaagaagaggctcgcctgcacaccattgagaatgatgggctttccggcgatttcacatcatcatcttaggattccaggcaaggatggaaagcgtaaaggtttaaaatgaagatttaggtatttagggttcacatagtatgtcaagctgaaatgctttgccttgtttattggaatatgtatgtttcgtttcaaacgtgggagcatagaactgtatatttcggtatttcacactgttcatttccatgtctgtatataaggaggttcttctggctatatatatattttgatcctcaagtacttattctcttattatattttacatttttactacaaaaaaaaaaaaaaaattcttcttagatatgatttcatctcttttttttcttcttgtgcaacgggtgccacttctggtctcttgctatttggttaaccgacctatgatcacacgagccaaggacaggctgccagtgatcccaatgactgtaaccatgatttgtttttatcttgcattggtatcttgtatagtaatggttcagtgcatgatgcaaactaaacaatgtctatatagttgcttttatctttgccatggctattgtgggaactgggaagtatctagtcctgatgtgggaccttatatgttggcatctggaagatggtttttactggatggatactgttagttgaattcgtcgggattgttatttgtttttttatggaaaaccaagagtgatactcttcatgtaatcatgtgaagcattcgcactgttgctttgggcccatcaaaccgtgtactatcagtagacagctttgctgttcggattcttaacagaaccttgtatgcaggcata

SEQ ID NO: 174062 - DNA, 344 bp, Zea mays
  Clone ID: MRT4577_90323C.1
gcaggccaccgatgctataaaaccctccgccttcaccggcagctgggcgaactccaattctaatggtagggcattgctgctctccgaccccgagctactaacgccgcagcatcatgcgcgtcccccctctcgtgtgacccagatggcgctgccacatcaggggaccgtacattaccccagcttcaagctcgtcataaccggcgatggtggaactggtaaaactacatccatgaagaggcatctcactgcagacattgagaagaaatatgaaccaaccataggagtggaagatcatccgttggataacaccactaactgaggtcagatcacgatctactgctggg

SEQ ID NO: 174063 - DNA, 437 bp, Zea mays
  Clone ID: MRT4577_90324C.1
cccacgcgttcgggacaaaatcggcaaccatgggtgacagcgaacttctccatggtgggggggaacacagggcacgaccggcgctaaagtaggtcagggacacgaccgacgatctctgatggccaagcacacgtaacgacaatgcccacgagctgggaggaaggatgcatggcacggtgtcaacggtcggatccgagcgcgaggtaggagctcgacactacaacagctacagtcatttttggcgtctaggagccgacgaaaataggtcctttgctgccaaaaataagctattattgacggcttgaggcttattttcggcggctcgtgtctgccaaaaaaattagcccaaaaataagattttattttcggtggctggagctcgggcaccaaaaataacatattttcggcggcttgtgagctgaccacggaaaataaca

SEQ ID NO: 174064 - DNA, 422 bp, Zea mays
  Clone ID: MRT4577_90325C.1
gggtggatccacgcgttcggattcattcacgatgccgccgacttctatctgctggttctctttcttcttagactctccgtgcctgggcccggtgtcgcgaccaacagtcagacactgaatgcgcattgcctagccgctcgacaccgcgctttatgggtccagacaacattgaggctaccacgcttatacgatcattgtcagtcgaccttcgtcgtcgccttatcgaccccagctccaccgttggcaccggacacgctaaccgtgcttccacaggagtgctgcccggcattataggggtggtgcatctgctcgtgtcgttgggcaatatctgcttcgccatggacaagttcctcaagcaggcatatcgcttcgcgttcattaagtacccgagatgccctttgtggcatgattcgtgtcaatct

SEQ ID NO: 174065 - DNA, 501 bp, Zea mays
  Clone ID: MRT4577_90326C.1
gatggctccccgaggagatccatccaccacccggactgctcgcgttccactacaactactagtgctagcataaatacaaacgtacgacacgctgtgtggatcatacgccatcctccagatgaacactgatgcacctatgtttatgatatcactgctgccagacatatatatgactgccagggacagaaactatcattctccctcccactactgcccacgaagaacgaatctaccaactcatgattgaatccgacacctcctattccaatcccccaccgacctccctattcctcactctctccaatattacatgaaatgacccatatattgtcttgaatgaaacatttccattatctatccttgatctacctgatggggaacatacattggaggactatcctgatcctgttactaattaagactgctgctcctcataacctgattatgtaccaacctcatgatggtcctgctcatcaaagagtagagcacaaacgtgtgctc

SEQ ID NO: 174066 - DNA, 245 bp, Zea mays
  Clone ID: MRT4577_90327C.1
gggaacaacaatattttttttttaattttaggtttaaaatgacaaaatcattttatactttttttgggaatcacttaaatgcaggaaagggggttttataaccacaaaaacattcacctggggtaatttggggttataaacctaactttaatcaccttttggaactacttttccttccaggggcctttttttttaatttttttttccaacaaattaaacaagggggaagggccccctgtgtttcc

SEQ ID NO: 174067 - DNA, 230 bp, Zea mays
  Clone ID: MRT4577_90328C.1
tcgcacctcttaagctcaaagccaagtctgctagtggtcctcttgaaccagtcaactgtaagcgtattctgggtgctcatcatctgacgactcagtaagtcaacagtgtgcggcttaatgctcaagctgggctccatgtgtctagcgcactcgtctgtctgtcgtttgcttgtccatggcttggcactcacttagctgtccggcatacgattcgcaagtagtacctggtg

SEQ ID NO: 174068 - DNA, 301 bp, Zea mays
  Clone ID: MRT4577_90329C.1
cacacaccagtacctaccccccttgttgtcttcatctatccgggccaccgatctaccagggcgggtgccaagtcgctgaacgcccgcctggacttcaaacatattctgcgtctgctgatcaccaacaagcatgggaagaagaagatcatgtttgacatgacactaataatgggcgttgtctaccagatattcaacactttcagcaacaacgccgacatcgacatgaacaagacggctctcgagctgacgcatgaacagttgcagcacctcatgacggtcgtggccaaccctatgcagttca

SEQ ID NO: 174069 - DNA, 330 bp, Zea mays
  Clone ID: MRT4577_9032C.1
cggacgcgtgggttttgtgtattaaattatgaacactaaaataaattatatgatgaagataattggagatgttgaaaaatcagtttcccttcttaaacagaaataaatattgtaaatgaagggaaatgtaatagaacacccttttcgccacgggtaaaaatgacagaaatgtatggtttgttttaccttcatttctgttacaattaaaacttgttagtctaaacttttacttcttcccaacttaaccctaactctttttttttattttcctttatggactgcattcttaatttctaactggtaaacacttgattggagactttttttaaa

SEQ ID NO: 174070 - DNA, 451 bp, Zea mays
  Clone ID: MRT4577_90330C.1
ccagccagggaaagggaggcaaaacaaaaaaaaagcggcccacccaaccctgggggtaattttaaaaaaaaaaaaaagaagttccgggtgacccgaccccgacacaaatccacacccacacacaccccattgggggcccggggcaggaaaaggggtcccatccccaacccaggaagggtttgggaagccaaagccccgaaaccggggggggaaacccccgctttttttaaggggaaaagctggcccaaaacgtcttaaaattgggccttaatgggccccctctaaaaaaaaagccccgccgaaaccagcccggactcgggggtccacggttaaggaagaagttagatcttcgccggcccccaaaatccccccacccccccggttttcggggccttgaaaagggagggggaaacctccaaaaccgccgggccattggggaaaagctctaaaa

SEQ ID NO: 174071 - DNA, 593 bp, Zea mays
  Clone ID: MRT4577_90331C.1
ccggccgggatcactccaagtgcaacaaccgtcggcgtcgagcagcgatagcggtggaggagatgacgacgaggctgaagaagaaccgcaagaagcgcggtcacgtgtcggcgaagcacggacgcatcggcatgtaccggaagcacaccgagaggccgcggcaacgaccgcggcactgcaccaccatcgcatcctcttcgataagtacagaccggactacttcggtaaggagggcatgcgctacttacacaggctccaaaacatgttccactgcccgaccgacaacgaggagcggctctggtcgatggtgccatgcagctaggagcgtacatgcgggcggagcggaccaatcctcgctagtcgacgtgacgcaatacatgctagttcagagtgactcggcaaggggatgctgtacgacaggcccatcgcttgcaagggcaagctcatctacaaggactcagagaagaagatactggtgccggaggctctcgtcatgatgaccggttaggtccttgtgcatactggctaactatctgcgctaagaaatactctatatttttttgggtggatctatgagaccctgggttttgagc

SEQ ID NO: 174072 - DNA, 593 bp, Zea mays
  Clone ID: MRT4577_90332C.1
aagcgcaacggtttgacggaggcagaggctttagctcgcattactagtcaaatgcccttggcggaaaaggtagctctagcggatgtggtgttggacaactccgggcaaattgcggacctagaaccacaaattatcaaggcttggcatcaccgttaacatttccttgcactgatacttccatcaggcgatcgccagggcgaaaactggactaagattaagttccgcagaaacaaatcgagctctatgccgtcagtgggcataaatcgccagaattttaactttttagacgctaccatatttagtgttttgcccctacaatgagactccccgcacactagatatggagtcttgttccggcaagaccgatggcaaaatgaatcacttgcaagaatggcggcaaagttgtgtagacgaccaactaacccgcctcaatgtcactccccttttaggggatgcccccgcccaacatttgctttatgctgaagcgctccagcgccgtaatgacggccgagttagtgacggtttaatgaaacgttatgcccacgtggcctcggggggctggtggtgttctggcattgatttactgtccgggg

SEQ ID NO: 174073 - DNA, 584 bp, Zea mays
  Clone ID: MRT4577_90333C.1
tttttttttttttttttttttttttttttttttttttttttttttttttttttttttttttttttttttttttttttttttggaccaaggagtagggagcattattggatttggacccttggacaaaaagaagggtcgaatttttaaagcaaagatactggacaaaggaacacgggaatcaaactgatatttcaggaaaagccataaaccatgccaatgctcgcgcatttcgcaagcaaagggaaagggaggaaaagcgaagatgtatcatgcacgtcctatttgagcgcgggcgcgggcgactccaaaagcaaaaaaggagctcgtataaatagtttaaagctaggggggaatgattaaactggctagggcttgatctggaaaagaatgcaagggacgtccttgggggggggcccctccttgggggcgtccttggggcaaaaaaaggggaagcgcaaaaacaacaggaactgcttgtcgaaaccggcgccggcaaagggggggtttatgggctgggcgtgctccccggccttaatgacgcggggcaaccacttgacgaggccgaccacctccttcgtttgggt

SEQ ID NO: 174074 - DNA, 718 bp, Zea mays
  Clone ID: MRT4577_90334C.1
tcctgccccgttcggccgttccccatttgcctcgtcgcccaccgccccattagcgccgccctcccttatccgacccaacgccgccgccgccgccgcatagacctcgccggcgcctcagcgccgccccgtggcctccggaggtgctattcgcgcgcgatccgccgctgcgtccgtcgctctggcatcgattcggcggcgctgggagccatactacctatatgttacatttcagctgtagaagcgagttggttggagatcagaaacaggctacccaacttgaagatggcactgcgacgggctctaggatggtcggaaggggaggttatgcgaccagagtcaaagccctgctcccgccttcactatggtccaagaatcactgttccaaggagtctcagatgggcgtcatgcggagcagtctctatgagcgcgacatcagcattgcttgtgcggctctttagcccagagtgtgagcctcaaaacatagctgccttcgacaaacctgaactaaaggccgaatagcataaccgaaaactggtgttaatctaccaagacccatgcaagtttttgttaatctaccaagatctatccaagtttctgtccttataataatccaggcagttcctgtaagatacttttgcgtgttacaaccagccattaattgtttgtttgggactgctacaggtttcagtttcagcatggaagatgtggtttataatat

SEQ ID NO: 174075 - DNA, 1010 bp, Zea mays
  Clone ID: MRT4577_90335C.1
cggacgcgtgggcaacccccgatgcgatgggtgcccctgcccctcgatagtcgcgcgccggaaaaaaaaaaaaaaaaaaaaaaaaaaaaaaaaaaaaaaaaaaaaaaggcagaaggcaccgggccgagccgaacgtggctcggctcgccgatgggtgcccctgcccctcgatagtcgcgccgctctcctgccccgttcggccgttccccatttgcctcgtcgcccaccgccccattagcgccgccctcccttatccgacccaacgccgccgccgccgccgcatagacctcgccggcgcctctgcgccgccccgtggcctccggaggtgctattcgcgcgcgatccgccgctgcgtccgtcgctctggcatcgattcggcggcgctgggagctgtagaagcgagttggttggagatcagaaacaggctacccaacttgaagatggcactgcgacgggctctaggatggtcggaaggggaggttatgcgaccagagtcaaagccctgctcccggttaatgcggcagactgcgggcatcttctccgtcggtggtggtctggctttctgggtgctctgccgccttcactatggtccaagaatcactgttccaaggagtctcagatgggcgtcatgcggagcagtctctatgagcgcgacatcagcattgcttgtgcggctctttagcccagagtgtgagcctcaaaacatagctgccttcgacaaacctgaactaaaggcccaatagcataaccgaaaactggtgttaatctaccaagacccatgcaagtttttgttaatctgccaagatctatccaagtttctgtccttgtaatgatccaggcagttcctgtaagatacttttgcgtggtacaaccccgccattaattgtttgtttgggattgctacaaaaaaaaaaaaaaaaaacgccccgtttaaccgcagcaaggaaactggggtctataatataatctaatagttaaaatatatttttatttgattataatagaatgcc

SEQ ID NO: 174076 - DNA, 245 bp, Zea mays
  Clone ID: MRT4577_90336C.1
aagaatctagaatgtactttcttatttctgggaagccacaaacatcagacaaaaactttattattgaactataacccatcattggtggggccctcttttagatttcttatgagttatagttaaataataaagtgaggggggggcgccgccaatgatggggcatggttcactgctgatgtcagggggcggaagtgtgaggcgccccgggcgtgagaagcacattcctggatgcttggagcaacagg

SEQ ID NO: 174077 - DNA, 400 bp, Zea mays
  unsure (1)..(400): unsure at all n locations
  Clone ID: MRT4577_90337C.1
cggaaancccgggncggcccaaccctcccaagaaaaccccatgcttgggtttccggggggccaggttgggtttatggacccctgaatggccggggttccaagcccgggccattttggaagctgttttagcaatgaccaaccagggggttcaagggttcccagagataatggttccttttgttggaacaccacaggaactggggcataaagggacttttatccgccaagttgctgaaaaagggttcgccaatgggggcaagactttcgggtccaaagttggaacaatgattgaaatccccagggcagttttggtggctgatgaaatagcggaccaggctgaatttttttccttcggaacgaacgacctgacccaaatgacctttgggtccagcagggatga

SEQ ID NO: 174078 - DNA, 283 bp, Zea mays
  Clone ID: MRT4577_90338C.1
aaaaaacatacaaaaataaacataaacaagaaaaaaacaaaaataaaacaaaaaaaaacgggattcaaaaactggagaaacagataaagagcaattaaacggaacagaaacgtgacatccccccattcatttcccctgtttatttacaggttcattttccttctggctgcggtcagctagccccatggctgtacatttctaggtcaaggactagtgaaaacgcggcattgttgaactggaccgtgaatgcatgtagccgcacatgtacatccttataaaattt

SEQ ID NO: 174079 - DNA, 198 bp, Zea mays
  Clone ID: MRT4577_90339C.1
ggcacaactaaatggggccttttatttggagcactgacctgtgcatttgatggccaaatgattaaacggctggtgaccaaggtagccatgataacttatggaccggtctttattggccggtgcaacgaattaaccatcagatgcatatgttaaagaacctgggatcggcacgggaactcatgctgcactagcagcttg

SEQ ID NO: 174080 - DNA, 773 bp, Zea mays
  Clone ID: MRT4577_9033C.1
tttcctctatttgttgggtgcctcagcctccttcgtcttcgtccctggcggcgccaagccgccgaagcccctaccccacaaccactctcaaacaaatccatagagaggtagttgcttcatgctacactccaccacctcctctacctccttgttcgccctagaaacaccgttgttttcttcaccaccacaaacctaaccactcaagaacaacgacaacctaggcgtcggcttcacccaactatcttccaccacatccttggtggtaggcgggcgcatcaccatccctttcgtgaaccgccacaccaacgttgggctgatagtctccctttggttacactctagtcaggaatccactaaattccccaacctctagttatatctcaaaaccctaacacccctaaccggaaccaagtccgccggagttggccctcggtcgaggagaaggatagctcatatcacacgaaggaatgatgcaacaatctactattgttgaattatttggtaaggaatttgtgagatttctccccataaatttatttcagcggatatttagcatttttccgattctagataagtaacagttttcaattcgatttcctagaatgcgagccatcaggaccgatatagtagtcataatctaataactaaaatgtgctaaaatggaaccaccgaaccatgatactgtcaaatccccgtaattaaatgttgcagcatggaaaatttttatacgctttgggcactctccctaactaaattaggtgttttataccatt

SEQ ID NO: 174081 - DNA, 423 bp, Zea mays
  Clone ID: MRT4577_90340C.1
tcggccaagcgttcgtccacgcgtacgcccacgcgtccggccacacgtccgcgggggagcttgcgaggttattacttcgcttgccattaagccttatgccgcccctttgctataatgaacctaaccatccgaatcctctaacctaccaagaaacaaaagacttaacccatgtggaggccgtcgtcattgacttccccgtacaccgtgggaaaaaactattaggcgaggttttggcttccccaaaaacaacctgtgaatacccctggggaatctacgggtggattggccatccaaccccggtaaattcttgtgggagaaacgggtacacacctcttcctgtattgcgccatcaacataacgactcgggagagaagaagtccccgataagaaggcccaactaggaaaaaaaccttatttaggggg

SEQ ID NO: 174082 - DNA, 242 bp, Zea mays
  unsure (1)..(242): unsure at all n locations
  Clone ID: MRT4577_90341C.1
gagtcattgtaacagaatgggatgagtatctgtaatagtaggaatcctcaacttcnnncctactgagccctataaacaactatatcttcctccacacctaatcttaattatacttcagattttccccacagccagattcttaccatatccagatttttataaaagccggtccaaaaaaagtctaaccatacaggtaccaaatcggccactgattgaagatttttcatgtactgcctaccaac

SEQ ID NO: 174083 - DNA, 430 bp, Zea mays
  Clone ID: MRT4577_90342C.1
cccacgcgtccggatgcctggaatgcctggtttggacaatgataactgggaagttccccgttctaaatcaatgccaagaggtgactcgattcgcaaccagggattgttgcttaataaaccatcaacagttcacaagacatcatctattaacacgaggcttcttcctcaaggcagtggtgcggcactaataggcaagagtgcacttttgggaaccggtgtctcagcatctcgtcctctcagctttacgcctgggcccacaccagctcaaactacaccaaaaccaatacgtgcagcaccagctgttgtccctgctcctgataaacaggccagtgctcccaaggggaacactgctgagcttcagaagaaaacaataactcttcttgaggagtattttggcatacgtattttagatgaagcccatcaatgtatc

SEQ ID NO: 174084 - DNA, 333 bp, Zea mays
  Clone ID: MRT4577_90343C.1
gccgcagcagcctcttccacccattctccatggacctcttcgaccccttctacagcatgttccggggcatcgtgcgcgacggcgtcttcttctacttccgcctccgagaccgccgccttcgccagcgcccgcatcgactggattgctactgcccccagctcacgtgttcaaggccgacctccctggcgtgaacaacgaggaggtcaaggtggaggttgaggacggcaacgtgctgctcatcagtggacagcgcaccacggagaatgaacactaggccgactagtgtcaccgtgtggagcgcaccatccgtcatttcgtgcggcacttgcgcct

SEQ ID NO: 174085 - DNA, 1296 bp, Zea mays
  Clone ID: MRT4577_90344C.1
aactttgatggcctattacatgtcgtccctatccctccctagtccgatcttcttcttcctccttcagtcacccggcctgtcgtgtcgatctcactctcagggtccggtccggtgcatcatatatacccttggtcgatcgatcgaccagatagatacactagatagctaggattgcattgtgttccaccaaaagccagccacaacacatcgacatgatgcaggacttgttctcggtcccttcgtgtttctcggcgggcgagaagcttccggacgtcccggcgtccgctgcggccaccaccaggtccgggcagagcgcggcgacgctggtctaccgcgcgggaatcgccggccacgaccgcctggtgacggtgacgtggtgcaggaacctgctcacccacgggctgaccgtgtcgatcgaagggtcggcgggcggcggcaaggacaagagcggcggcggcagggagtggggcgacgccgacggtggcgcggcctcgtcctccaacaagggctgcagcaccgcctgcaaggtggagatgcagccgtggcacttttggcgcaagtacggcgccaagcagttccacgtcgacggcagggccgtggacgtggtctgggacctcaggagcgcgaggtactccgacgagcccgagccgctgtccgactactacgtcgccgtggtgtcggacgaggaggtggtcctcctcctcggcaacctcaagaaggaggcgttccggcgcaccgggtcccggccgtcgctgcgggacgccgcactggtgtgcaagaaggagcacgtctttagcaagaagcggttcctcaccaaggccaggttccacgacaggggcaagctgcacgacatcagcatcgagtgcagcagcagcaacctcggcggcggcggcgtcgacgtcgacatggtcatcaagatcgacggctacgtcaacgtcctcgtcaggcacctgcagtggaagttcaggggcaacgagtgcatctccatcaaccagctcaaggtgcaggtgtactgggacgcgcacgactggatctttggcacgggggtgaggaacgcgctgttcatcttcaagcccgagccgctgccgtccgccaccaatgagtactctgatttctgcctgtttctgtacgcatggaagcttgagtgagctaggattcctgttcctgcattatactggacacctcaccatatatgttatgaaccaataattcatacgtatcatgtaactgatggattattgggcgatggaagtgtatgcgaaatgaatgattggggccgttttccctttccccttg

SEQ ID NO: 174086 - DNA, 290 bp, Zea mays
  Clone ID: MRT4577_90345C.1
tattaatattaggggccgctcggaacgaaacggaaatcatgaacagaaactgtggagggaccgccaaaaaggatcgaccccgatttcaccagtttgccaggtccaatgcaaatatcggccatgaaatgcattttggaacaccctcgtaacgcaacaaaacgcgagtgacaactgtatgtggatacacagacacagtaaataacggcggaatctgacccttcctatgaactcctaatgtttgaggcgagggcttcatgtaatcaagcggccctcatcttcccacacctttg

SEQ ID NO: 174087 - DNA, 256 bp, Zea mays
  Clone ID: MRT4577_90346C.1
caacggcaggggtggtgacggcggcagcaagggcggcggcagcaagggcagcaactaggccagtggctaggcaccactggtttttagatgttagtgtagattagtagtagaaatagtattaacaaaataatgtagtagtagttagtagtatagagtagtggaatgtaatgtagtagtagtagggaaagcatcaactcataacgagttgatttgtaagttctgtagcttcgctttatgaagaatgattttgtctatt

SEQ ID NO: 174088 - DNA, 765 bp, Zea mays
  unsure (1)..(765): unsure at all n locations
  Clone ID: MRT4577_90347C.1
aaccctagctccccaccttctccccatccctcccctctcccactatgctgccactgagcaggccgccaggatggcaacggctgggccctttggtggtgtggtggcgcgagttggcgcctcgtgagggctcgtagctggacgggccttagcctgagcagtggtggatccgcgggatagagctcggccggagacagatccgtggggtggtgttcgccgcgtcagccgggaaggggctcgacaccgacgcggctgtcgagggcggagaggagttcagtgcaggcacatggctgccggagatgggagtggatggttggagatggccctcggtgtcgatgcctcgacggtcctcgtggttggccggttttggcagacctcgtgcagggcttggacgtcaacgctcggggaggggcgcgggcggagaggacgcgtccagtggtctggcggggtgtgtcggcagggctgcgcaaccggccaaaatggcggcgataggtcctctcgtttggttgcatatgacagcgccggggtggcgttggccggcagcggcagggcctggcgcagacagtgtggcgcacgtggccaggtgttgctcggttctgtgtgcccagccagagaggatggtgatcatcgcagctttgcggctgctgcggcacccagcatgtcgatgcccctctaagggcttattcggttattttcaatccatatagattggaggggattgatacagattggagagaattttgacttattanggattgaaaccccctc

SEQ ID NO: 174089 - DNA, 457 bp, Zea mays
  Clone ID: MRT4577_90348C.1
tatgacgtaacctgcacgcctccgtaagctcggatcctgtatagcgggcgccctccactctttctgtattgtgattggatatagaggattaaagagcaggggctgattccagcacaaagctccaaatgctaataatttatcacaggacatgatgaaggaggcgtgcaaatacatccagtgacgcgttttttaagtgggcttagcaccatatcttggtgacgctgcaggcgtactgaaatacaccactcttctatgtttttcacttacccaaggtaccctggaaccccatctggacgtcctgccaaactcttaccactgagggattggtctacttgatacagaacataagattacacacttggctcctgatcattgatgacccaaccttgtttattaggttcgccaggcttaaactgtatgttccaaactggcctccccatgggctttaagattcagg

SEQ ID NO: 174090 - DNA, 581 bp, Zea mays
  Clone ID: MRT4577_90349C.1
aagctcggaattcggctcgaggtggccagccgtgagagtacatcgacctattgtgtgtcggaacctgagatctttgataccatatattattgcggagtgtcggaacctgagatctttggtaccagatattattgcggatgttatggcagcgactaaggttgaggtgacgcaaggggggcggccggagatcttgtccacaaccgagcaagaggaaaggattttcttacttaatgcttgctttattagattgatacatcttctctccttatagagagacttacttgacccctaaagaaatgtcttaacgaaatcaatttaacttatctcttcccttatcctaactaaccgaatattttatatcctaactaactaaatcaatttaacttattttttccttattctatcggctccacttgccataacatattgccatctagaaatgaacggtttgttgttaataatgatgtacatgtactatgagttgatttagatatatgaaaaatcagttttcaaatattagtttgtgtatcagttttcatgattgtttgaattatgatattaaatttgggaatctctcatag

SEQ ID NO: 174091 - DNA, 139 bp, Zea mays
  Clone ID: MRT4577_9034C.1
ttctgttcatatacgtgcagctcagttctgcttgaaaatgcagaggcgtgttgcctgatacatgtcgtttcaatcagtgtttgattctttttcgttatttggttcagcatccgaattgtgagtacagctcttcttgtta

SEQ ID NO: 174092 - DNA, 964 bp, Zea mays
  Clone ID: MRT4577_90350C.1
gatggagagggtactcgagaagcaggctgagctaattggacagttcgaggctcaagataatgctcagagggagtgggaggagaaattcagcctgagccgggattcagttatggtacacactttcctttttcagatatgaaacattttacttaatacgaagttctttcatttgactgtataaaaaataaaatgagctaatattttcatatgtgccactcatttctgctctccaacttccaggataatgttaacttattaaacaacaagctaaatcaggctgaaaatgcttgtgggaggagggaaactgctcgggttgtagataaagaagtggtttgtgaacaggcaagatcaagtgacaataatttccattgcatcaacgacccctctgaatgtctaccaaatggccctgtttcagaattgccccaaaatgtagccaaagatagtgttactgaacaccggaaatttgatgggtttggtcatgattgtgtagtgactgctgcagcagtaatttcaagccacggagaactgcaggttaggaaggatgtgctgacaactaaaagctatcctgaaggaagtggcaataatcttgggaaatcagctctgccaccacaaggaagctgtggtagcagactaaatgcaggacatagaaatggtcaaggagatgaaaattcagacagtggttcaagctaccatgtgaatgctcgatcttctgagcaatacataaacacatcatcagttgggagccagctaagtgatacccctaaaagcgaagtctcagaatggagctcctcttgctttcataaccataccgataaccagcttgatacacaacttcatcaatcatcaaacaaagatgtaggaggggtgctagaggcccttcgacgtgccaagatgtctctcagagcaaagttgagctggccaagtccagccagcaagaacatattggcacttgaagcaccggatg

SEQ ID NO: 174093 - DNA, 687 bp, Zea mays
  unsure (1)..(687): unsure at all n locations
  Clone ID: MRT4577_90351C.1
aacacaaactgnncagcnnagacgagagaagaggaaggcnancacacaggggcaggggagcaanagcanccgnccctgctctgnnccaccccagggnacaccagctcgncctagaggagggcaacaggccaaccaangaccngcncagcangcaccataggcgactctgcatactccacatactcgtcagggtgcctccactggcacctcggtgagacctgttggacggagtacagtcaccactcgcttcaagtgtggtgaggttgggcactacgccaatgcttgtacgaagaggaaccccaacacacccgctcgaaacaatattcagggcaagcaacatacttcgactattggcaagggtgtaatacccaaataattggagttgtagaatgtacaagaattgggaaatataaaaggtctattagaccacttgtgtggtgtttctcatttttgcgcatttaaatcatggggtcaccatgaccactaataaccatattaaataaaggaaatagggcatcatgttggagtttatttatttgggcatttaataataataataatacattaatgattggggatgagggttaacctaattagcaagctagaaattgaaaaggaatagaaaacaagagaggggaaaaggaaaaccctattataatgtaaagaaaaaaatataaataaatatac

SEQ ID NO: 174094 - DNA, 358 bp, Zea mays
  Clone ID: MRT4577_90352C.1
actggaacaagggagaaggattggagaggattgcatgaagaatgtaaagcattccgtgtaccacattaagggacttcttatcaaacgtgggcttgcaaaaaatcctggtttagcccatggaaattgggacagatttcttcccaaggtcaagaaaaaaaatgtccagccgaaaaaggcctaaacttaggggaagaaaccggtcacacccttttcaacggcttaacaggcttaacagaatgatctttgacttgggaacggtgagtatttcatgagtgacaaaaagaaatcagcaaagaaatgggcagagaagctggacaagcaatctgggagagctgaagaaaataaaagaaaaagagag

SEQ ID NO: 174095 - DNA, 495 bp, Zea mays
  unsure (1)..(495): unsure at all n locations
  Clone ID: MRT4577_90353C.1
gttcttcgagggcattgttcgtctacacggcttcccctcctccatcgtcagcgacagagaccccgtctttacggggcacgtctggcgcgacctcttcgggatggcaggcgtgaagctgcgcatgagcaccgccttccatccacagacggacggccagtccgaggtggtcaacaaggtgctcgctatgtacctacgctgcgtcacaggcgatcgaccccgtgcgtgggtcgactggctcgcgtgggcggaatactgctacaacacctncttccacaccgctctgcgagccaccccctttgaggtggtctacggtcgttccccgccgcccatcctgccctatacaccagggtcagcgcggacagaggcgactgggactcttctacgcagtcgggacgagatacttgctgaagtccgtcaacgtcttcttcaagcccagcagatgtccaagaaatactacgacgccaaccaccgcgacgtggagtatgctgtgggaga

SEQ ID NO: 174096 - DNA, 1128 bp, Zea mays
  Clone ID: MRT4577_90354C.1
aattcggcacgaggcgccgccgaccagccagcaggctgctcccttcctcttcccctgccctgtgcgttgtgcaacccccgttgtcgcgtcgtccaccttgtccttgactgcgccgacgcccagtagcacctcctatcttcaagcttctcccgttgttagcgtcaaactcccctgccaggtccagcgcaggcccatgtccggctggacccaccctgctgccttccttcttcgtcgccttcgctgtcgtggctttcccggccgcatccaccgctgccgcgaccttcccggctagatctgtcctccctttggccgaatcaccgtcttcatggctggatccgtagttgtcgtggcttttccgaccagatccgtcgatacccttcttttcggccgcaggcgtggccaccctgaccgacacagacgcgtgcgctgccgtcggcctctctggcaaggctcctcgacgaccggtcgcgggacgaagcaagaagcccctgagttgctactgtccttttgtgttgcctcgccgattattgacactcgaacatcgactcctcctgaagatcaggcttctgccacgtgtcttccgatcacgaccacctcgacttcggctacctcgtcatcaaggggctatcgtcttcttggagcgcacaccagtctctactccagccgcaacactcgcaccctcacgacgttgcgatcgctgggggatttcaaccagtcggctcctaccttcagcttctactccagtcccatcgtatgcggtgcctccattgtgactgcgggggatgttagactgtgtgtgtgggctggcaccacagttgggctgccggctcattagggttagggtttcatgtgagtctatatattgtaaccccttctctatgcaatacattaagacacccattatcttacaaacttaatattcattcagtgtactcacacttgattttgtagtgttctgtcatagttaactattagcatgcatacagtttgtccaaataatgaacatgtagaacacactactaaagaaacaatgtttatttgctccacctagcattcccacaatggtattatagccttttttggttcctaaggactcttaggacacactatattggaactggaagcact

SEQ ID NO: 174097 - DNA, 1527 bp, Zea mays
  Clone ID: MRT4577_90355C.1
ccggccgggcgcctcgccatctaccactccaccaccgtccacacacccacgcacaccacgccttgcattggggccgatcgaactcgccggtgattccttcgtctactcgactcgttggtattcggcctcggcagaaagtttgcgcaaacatgcagcccaccaccatcacggagatttggcagtggcagtgtggcacgtgcagagctgactggaagatgatgcgccagctgaccacctgctgcccgcacgtcggccgctgctgtcagggtcagggtgctccgcctccgcagtctgaacggaaccctcctcactgccactgccatcaccatcaccaccacggccatcgccatcaccaggagcagggtaccaccgccgccgccatcaccaccaccggccgggctttggcggcgggtgccgagggttccaacgccgggtctgctgggcgtcacaccaccatcgctacactgaatcctgttgcccctcccgccgtcgcagaggtctgctgggacccggacccctacctgatggtgcagcagctcagggagttcgagaccctgaacgacgggctggtggcgctcagggtgcagctgcaggagtacgcggaggaaatcagcaagagcaaggacaccaacgccgaagtttgcgcaaacatggctcccaccaccagcgcggaaatttggcaggggcagtgtggcacgtgcaaagctgactggaaaatgatgccccagctgaccacctgctgcccgcacgtcggccgttgttgtcagggtcagggggctccgcctccgcagtctgaacggaaccctcctcactgccactgccatcaccatcaccaccacggccatggccatcaccaggagcaggtcaatgtcctatctactccttcggtcccaaaactcctatgcttatcaccatcaccaccctgcgattaaatcgacttgaccaagtgtcttgctccgccgcccttggacaagataacaaccttatcacagtacacttctatgctgcagggtaccaccgccgccgccatcaccaccaccggccgggctttggcggcgggtgccgagggttccaacgccgggtctgctgggcgtcacaccaccatcgctacactgaatcctgttgcccctcccgccgtcacagaggtctgctgggccccggacccctacctgatggtgcagcagctcagggagttcgagaccctgaacgacgggctggtggcgctcagggtgcagctgcaggagtacgcgggggaaatcagcaagagcaaggacaccaacgccgggatggactggctcctcgctctcccggccagcgtcagggacgtcgtcatcatggccagggacgtcatcgagtctttctttgtcatctccactggcgctgcaccgccataagctagcagctcagcaactgtagtcatatggatattattatatcattatacagtgtgaaagagtcagttcgtctattttctcctgtcatgtactcatgtgtgagaagtttatattactgtgcagttttcgtgct

SEQ ID NO: 174098 - DNA, 152 bp, Zea mays
  Clone ID: MRT4577_90356C.1
atagctgcttccaaaggagacgagcaatgtgtcaagcatcttctcagactacggagctgatgcaaatgctagaggtacgcataaaactagaactgtgatacatcgttttacagattgtccagaactggtgacgttctcgccaccaagaatac

SEQ ID NO: 174099 - DNA, 1844 bp, Zea mays
  unsure (1)..(1844): unsure at all n locations
  Clone ID: MRT4577_90357C.1
cgggacgtaccgaaccgtctacagtccaccgtattgttctaatttgaaatgggcgtggggggggtgcttctaaaatgcttcccatgggatgctgtctacaggggttgtgggagtaaagaagaagtaagatacctgctgtggattcgcttgacacgggttaccaagggcacagaattcttctggggtgtagagaaggacatacgtatgaggggggggcttcactangatagtgaanctcatagttgtggagctctactgtgcgcacacaggagcctgtgtcttctattacctgggtacaacgcttcctgaatcaatggaaggatacacgtggattgggagtctgcagttgggggactacaagtgggcacatttcagggggatcgatcttgccaagcgctatataacatgcggtatacttcgccattgtgaccatgggaacaggtggttacggtgacattcatgctgtgaacatcaggggaatgatattcatcatgatctacggttcctttgacatgattctaggagcttacctgattgggaacatgactgccggcatcgggaaattcggctcgagtttagacaagatgaaggaggtgatcaggtacatgaacagaaacaaacttgggaaggaaataagggagcagatcaagggacacctgaggttgcagtatgagagcagctacaccgaagcatccgtccttcaggatatcccgatttctatccgtgcaaagatttctcaaacgctgtataagccatatatcgaaagcattccactgttcaagggatgttccgcagagttcattcaacagattgtgatcaggttgcaagaggagttcttcctaccaggagaagttatattggagcagggaagtgcagtcgatcagctgtacttcgtctgccacggtgcactggaaggtgtaggcatcggtgaagatgggcaagaggagactctgctaatgctggagccagagagctccttcggcgagatctcaatcctctgcaacatcccgcagccctacacggtccgcgtctgcgagctctgccggctcctgcgtctcgacaagcagtccttcaccaatatcctggagatctacttcgtcgacgggaggaggatcctgagcaatctctccgagagcgagtatggcggacgggtgaagcagctggaatcggacatcacgttccacatcgggaagcaggaggcggagctcacactgcgggtcaacagcgccgccttctatggcgacctgcaccagctgaaaagcctgatccgggcaggtgctgatcccaagaacaccgactacgacgaccgctcccctctgcatctcgcggcttccagagggtacgaggacgtcgtgcagttcctcatcaacgaaggcgtcgacatcgaccttaccgaccagttcgggaacacgccgttgctggaggcggtgaagcaggggcacgaacgggtggcagcgctgctgttcgccaagggtgcgaagctgagcctcaagaacgccggcagccacctgtgcacggcggttgccaagggggactcggacttcatccggcgcgccctggcctacggcgccgacccaaactgcagggactacgaccaccgcacgccgctccacatcgccgccgccgagggcctctacctcatcgccaagatgctcgtcgaggccggcgccagcgtgttcaccacggacagatggggcaccactccgctcgacgaagcgcgcaagtgcggcggccgctctagaggagcgctgctggaggaggcgcgggccagcgagctgtccatgttcccggagcgcggcgaggaagtcagggacaaggtgcacccgcgacggtgctcggtgttc

SEQ ID NO: 174100 - DNA, 326 bp, Zea mays
  Clone ID: MRT4577_90358C.1
aaagaacttgggcccgcctctcgtctcttaccgcacatgcgcgtcggaccgcgtctacatagctgcttgccgtcgacacccgcagccgcaatggccgtcgcccacgcgccgacgagccagggcgtgctaccgctcctgctcgtcgccgcgctcgtggcggcgttgtcggccagctgcgccgcgggcaggagctagaagctgtacacggccatgttgagcttcagagactcgctctgcgacgccggctacctcatcgggaacggcacgcccaaggcgcttaccagcgcgcgcgctacctacgggatgaccttgttacgaagcccacc

SEQ ID NO: 174101 - DNA, 466 bp, Zea mays
  Clone ID: MRT4577_90359C.1
ccggccggggccggtgcaggggtcgacgacccggaccccgactgtgtcgtcctcaacctcccgagacagtctcacgctgtcgcggtgccgaggcgtaccgcctcctgctctgctctgcgcctgatgatgagtgcaaggaaatggagtgcttcgatactcccgctattgtgtgcctctgctacatggagttgtgagacgggataacgtacacccacgacaagctgactgctgtcggctctctgggttgtcacttaatatatgatgatgctgatcgcatactacttgtagtgagtgacgagagagacaatctcgacaaccaccttgaattttagacccggagatgatagaggccaactaggggcctctgcatgacttgaggattactcatgaactcactcagatgtatgcctatggtagtgattgaggctatctcatcgcctttgctattgacaaaagaagcgtgcct

SEQ ID NO: 174102 - DNA, 585 bp, Zea mays
  Clone ID: MRT4577_9035C.1
gactatcaaggacaggaaaaaccattattattataaaacattaaaactgcatgacttgatgactagctagctcatcgacccagcagacctgagcacgccagagccgaaactacagctaccagtaaccaccaatgcaatgcagacagagtctaagacaggtcacctactaacaagaagtaacaagaactgagttcacccgtgtttgctgccgcccgtggcatcaagaacacatgcatgactactgggacgactcatcgttggctgaagctcccttggccttgatcaaagacccgagcttgggctctccgaacaaggtgatgccctggcgggtcctgagcatggcgtattcgctggcgccgcgggccttcctcttgatgctggcccactgcgtttgtgcccaccacgtcggctgatgggtcccctccggctccggtgcggtggccgccgccggcttcggcgcgccgtccttctccatcggtgatggaagggtggacttgctgcttgatctctgtacgtaggtcagagacgagacaagacgagacgctaagaaactggagctaagagaagatgttgcggacgcgtgcg

SEQ ID NO: 174103 - DNA, 1066 bp, Zea mays
  Clone ID: MRT4577_90360C.1
ggccgtcgcactttcgcgcttcatccagcggagtggtgccccatctgtcggtggtgaacacgctggcgccggcctcgacaagcatcttggcgatgaggtacaggccctcggcggcggcgatgtggagcggtgtgcggtggtcgtagtccctgcagtttgggtcggcgccgtaggccagggtgcgccgaatgaagtccgagtcccccttggcgactgccgtgcacaggtggctgccggcgttcttgaggctcagcttggcgcccttggcgaagagcagcgctgccacccgttcttgcccctgcttcactgcctccagcaacggcgtgttcccaaattggtctggtgaatcgagaacaccaacatgacatgatcagagtggtagcaatagtcctagaaaggaaacaggaagacagcagggatgtcatgacaatggcagtggatcgcgtgtggcggcgtaccggtaaggtccatgtcgacgccttcgttgacgaggaattgcacgacgtcctcgtaccctctggaagccgccagatgcagaggggagcggccgtcgtagtcggtgttcttgggatcagcccctgcccggatcaggcttttcagctggtgcaggtcgccgtagaaagcggcgctgttgacccgcagggtgagctccgcctcctgcttcccgatgtggagcgtgatgtccgattccagctgcttcacccgtccgccatactcgctctcggagagattgctcaggatcctcctgccgtcgacgaagtagatctccaggatgttggtgaaggactgcttgtcgagacgcaggagccggcagagctcacagacgcggaccgtgtagggctgcgggatgttgcagaggattgaccgccatactcgctctcggagaagatctcgccaaaggagctctctggctccagcatcagcagagtctcttcttgcccgtcttcaccgatgccaacaccttccagtgcaccgtggcagacaaagtacaattgatcgactgcacttccttgctccaatataacctctcctggtaggaagaactcttcttgcaacctgatcactc

SEQ ID NO: 174104 - DNA, 627 bp, Zea mays
  Clone ID: MRT4577_90361C.1
aattcggcacgagggtctccctccccaggctctatggccaccaaggctagcacggccggcgaccagcacatcgacagcaggaggcacgaccacgaccaccacggcagcaagtgcaagaagaagccaccggcatcaccgcaaccgtcgtcgctcgcgtcggcgccgagaaccccgccatcaggggcacgaagccagcgcgtgatggtcatggctgcgtcctcgtcatctcccaggaagaaaagccccaaggcccccgcggcgggcaagaacagccgcgcccagtaccagcagcaccgaggccaggcgacgaagaagaaggccactgcggcggcgtcctcgtcctgggagcaggtgaagagcctgctgagctgccggagcgtgacggcggcggcgcgcgtgcacgacccagcggctccgtcggcgctggcgcggctccgcggcagcggcgcggggacgtgcggcgcctcgctctgcgccatgcgcgacgtggtcgacgccgcctcctccgcggcgtcgtccgccgccgcgtccgcgtccgcgtccgcgtcgggcgaccgcgacacggcaccgctgaaccggcggcgcgcgcaccgcggggcctcgtcgtcgtctgccggcgccggcagc

SEQ ID NO: 174105 - DNA, 725 bp, Zea mays
  Clone ID: MRT4577_90362C.1
ccggccggggacgcctcgacctcgattccccattcccttttcccctcccgcgcctctgcctctctctccgtctctcgtcgtcttctaccggcacggcgcagcacggagcatggagatggacccgccgccgccgccacccctgcacgccgaccgccgccgccgcttccgcgactacctgctcgcgctggaggaggagcgacacaagatccgggtgttccagcgcgagctgcccctctgcctcgacctcgtcacacagactatcgaggggatgaggagtcacatggacagcgtcgtcgtcggcagcgaggagacggtgagcgaccacggcggccccgtactggaggagttcatgccgctcaagcccacaaccctctcgtcgtcctcctcccagccccattaccaggacgagcacgacagcgcccactaccttgaacaccgccgtggttccgccgccacggccaacgacgtcgtcgatgccgacaaggacggcgaggcgctgggagatctggagacggcagcagccagcagcagcaggcggttgccacatccggagacgaagaaggcgatgccggactggctgcagtccgtgcagctctggagtaaccaacaacagccctccgcctccccgccgcagcaccaggatgagctgctgctgctgccgtgcaggccggtggcgctcaacgcctgcaggaagcccgggggcgcgtccagccgttcgacaagga

SEQ ID NO: 174106 - DNA, 373 bp, Zea mays
  Clone ID: MRT4577_90363C.1
cccacgcgtccgcccacgcgtccgcggacgcgtgggactggagctgctgaagaagaacggagacatgacctttggcgagggagcaggggccgtcttatcccgttggaaaaccacgtgatgtttggagtaactcaacttgcaatattaggatagatagataagggccctatcctacacgtgtctactgaggttatacatgcttaaaaaacggttaagcttaccatcatgattgaggaccctagagatatagaaagaaagagaacactcgggatagaggatcctgatgaaattactagggatgatttagctgacgctttggctgaggttaacgaaagaaagattccagagaatcgtgttgcacttcagttgcttg

SEQ ID NO: 174107 - DNA, 556 bp, Zea mays
  Clone ID: MRT4577_90364C.1
tttatatctaaactttgaaaagttctagaatgtcaaatttcaagccaaatagtcgagtccgtaaggtatattccaattcctccagaacgaaaggatccaaacaggccgttaagagtttatatatttcagatttaagttccatttcatccacgatagtttgtttcttcttaactcctgatacaaatggagaggcgttaacttggtatgcttaattgtgcaggttgaaatgctgaagaagcaaaaggatgaggtaaggaccttccatttgaggaaactactgctgttaagatttttcatttctgtagaagctttaccaagttctctttagactctgcctcatcactattgcatgttttcttgatgttggggaaggaggcgggggctgatgataatgatatgcttctgttaagcaacaacttttctatgttggtttaatcctttccatggaactttcacagatccagcctcgcagcatttcagtggggctctttctagttcctactttcccatgatagaaacctgctgatgtttggctggacatgaagttgattttttt

SEQ ID NO: 174108 - DNA, 410 bp, Zea mays
  Clone ID: MRT4577_90365C.1
aattctgctctttgactcaaggggcggatctattaaaccggaaaccgggactaatctcattgtgacattttttaggggatttcatcacatttaatcctattttataaactcaaatgtcatccgaaattctatttaacttatggaaaaataaaataatttctctttcaatcccctccaacttctgattatttaagttcctaaacttatccttattgaacttaaatccttttttttgaattgtaagtgtttatagaaaaatatatttacctgcttgtgatatatttttattttttttattttttttttttttttcttatttttttttttttcttattttatattttaaatcttacacttaatctcttttttattattttctttacttttatttaaatttttattttatattt

SEQ ID NO: 174109 - DNA, 350 bp, Zea mays
  Clone ID: MRT4577_90366C.1
gcgtgtggccgttcggctcccgtttggtacgtccaagccccccttggggggaaatggcccccaagcaagagtggcagggcagccggttgctcggcctaataacaagacggataaagtgaccaaccctctattcgagaagaggccgaagcatttccgcatcggcggggcgttgcctaccaataaggacctgctccggttcttgaagtagccgggggcgtacttatccatcgacagcccctttatcctcaagcagcgcctcaaggtaccaccggctctcaaccagtttacccgtaccctcgacaagaacctggctgcgaacctgtttaagatgcttctcatgtactgggctg

SEQ ID NO: 174110 - DNA, 218 bp, Zea mays
  unsure (1)..(218): unsure at all n locations
  Clone ID: MRT4577_90367C.1
ccaataatgaagtcggcatgccatcgcatgcgactcattgtttaggaataaaacaagctaataatgacttttctctcattataatgtatatctctccctgtcaaaaaaaaaaaaaaaaaaaaagcttgnacctcngcccgggacgggggggggggcgatttccaccccactcacggccaccactggtcggtccaagcctcgccccaagcttcctctta

SEQ ID NO: 174111 - DNA, 358 bp, Zea mays
  Clone ID: MRT4577_90368C.1
ggaaagaaagaacataattcctggtcgggggtaggggatggagggccctatccaagctcttctctgggtcctactacggggccaaaccaaaaaaaagacaaaccgggggccggggaaccaatcaaattcccaatttggttgaaaggggaagcccccctgatttcccctctttttttctagcaatagtactggccttgggaggagcagcagcaggccagcagcagcagctagcctcctcaatcccggccattttatggccgacgagctgagcttctcctgccgggcgggaatggcgaattcattcgatcattcctaggaagaggaagaggaagatgaatatgaacaggaaaaggacccc

SEQ ID NO: 174112 - DNA, 294 bp, Zea mays
  unsure (1)..(294): unsure at all n locations
  Clone ID: MRT4577_90369C.1
aaacacggaacccaaccccaaaggacaaggcaaagcaacggccccgcgcccaccggcccacccggcggacaggccgcgggagcaaagcgaagccgggccgaaangnggccggnngaccggngnnnccaggggggcccccgnngcacgcggcgaggnagaggagcnnccgccgncaaccccanccgancggcgnagggccgcggggggccgacaacnnngggccccgcnccccacnngggcgccacggncgccgcgcaagccgcgggcncccgcgcccaccggaccccggagaca

SEQ ID NO: 174113 - DNA, 753 bp, Zea mays
  unsure (1)..(753): unsure at all n locations
  Clone ID: MRT4577_9036C.1
gtgagtagcggcctcgtagacaatcttccctgtcccgacgaaaccctaaccctagatcgccagcccgcccgccatggatctcctccagtcctcgtacgcgcctggcgacgcatcctcgccggaggacgagtcgctctcctccccggacacctccccgctccgcctcccctccaagtccgccgcccccgccgtcgatgagacagcgctcgcgctatccgccgccgccgcttccacctcccgtcctctcgacccctccctccacctcatccccttcaaccccaccgccgaccagctctgggcgcccgtcctcggtcctcagcacccccacgcgcctatctcatccgcatctggtcaccgtaaccacaagctcggtcatgtcgaagacgcagcgctcctccccttcctcttcgacgagcagtataacactttccatcgcttcggctacgcatctgacccctccggcctccacatcatcggcgacgcgcagccacaggcgcccgacctcgacaccgtctacaacctccctccttctgagcacaagcgccgccgcatccaatccagggaggaaaaccacgagcccctccccccagaggcccaaaaccctgcatccgacgagtgggtcgtgcacaacaaaaagagtccctgggctggcaatcgggagggcccgcctgtggagctcacggacgagcagagacagtacgccgaggcacatggcgccaagaaggctgagaagngagcacgaggtgaagggaa

SEQ ID NO: 174114 - DNA, 470 bp, Zea mays
  Clone ID: MRT4577_90370C.1
cccggacccggtcccgggcaggaacatggagcgaaaaaatgggcccaacggggtccacgacggaaggcccaaacggggaaccatccagcaaaatagaaataaggggggctaacacaactacggacggttggaaaggaaacgggcctaacttgttggacgggtttctggggaggaataaaaaaacatgtttgggggcccccctgggttttcccacgggggggaaagggccacacggccggaccggcctaaaaatggggggggggagtcccggaggcaaccaaaaggcaaggggggggctaataatcccaaaaccccccccccaaaggaacaggcattaaggctccaccggtttaattgggttaaagacaaaaaaacccccctaaaaaaaaaaatcaacgggagcaccccccccccagggaagggggcaaggcaaacggccaatttgcccccaaaaaaaaaattaattgggg

SEQ ID NO: 174115 - DNA, 393 bp, Zea mays
  Clone ID: MRT4577_90371C.1
ctaaaagtgtgggggggggggggggttttaaatgagattttcggaaatatttttttttttattcgggagaaagtaagtataatgtactttaagaaaacggagaaggatgagccggaaaaattcaaggggaaacgtgatcaaggttcaagaatacaggtggagaggagggggaaagagagagacggggaaaaagttgttgactggtttgcaggtgatggaataaaatggtggtggagggtgaaaaaagttgaaatgatgaagaggaaaaagttttttgatggtaaagaagggaaaaaaggaagctggggaagacagcttaaaaaaaaaaaaatggggtgggtgcaggaaaaaaaaaaaaatgggaaagaacaagatggtaaaaaaaccttaaaa

SEQ ID NO: 174116 - DNA, 447 bp, Zea mays
  Clone ID: MRT4577_90372C.1
gccacgcgtcctggtggacgccctcctacagctccaccacatgctgggcaccatatgggccacactcgctgccaggctggccaacaggaccgacaacgagatcaacaccgacttgaacacgcacctgaagacgcacctagagccacagccagccagccagcacgcgcccaagcagaagcagacgaagaagcaggagccggagcccgagcccacgctcgtggcgacgctcgaggcgccgcccgcagccgtgccggcgctggcactgtagacgacactctccaccacgacctgcaccaccaactactccgccgactactcgctcgactacgcggtcgacaactcgacctacagctgaaactactacgaggtctactaccagatctactacaggtagttgtccatgacgctgaccatgaccacctccgaggacagcttgcagtacggggt

SEQ ID NO: 174117 - DNA, 386 bp, Zea mays
  Clone ID: MRT4577_90373C.1
atcaccgcggccagcgactacaaccagtcgctgcagttccgggacctggacagggagaagaagaagatcgacatgcaggtcacccgcgacggctaccgccagatagtgtccatatatgacattgtcttcggggatatcgtccacctgtccatcggcgaccaggtgccagcggacggcctgtacatcgacggctactcggtagtggtcgacgagtcgagcctatccggcgagagtgagccagtgcatatgtacagtgcaaaacctttcctgctcggcggtaccaaggtgcatgacgggtcggccaggatgctggtcaccgcggtcgggatgcgaactgagtggggaaacctcatggaaacgctgagccaaggctgtgaggacgagac

SEQ ID NO: 174118 - DNA, 512 bp, Zea mays
  Clone ID: MRT4577_90374C.1
ggtcagcggcagacgggttctcctcccgttcgggctgccgcataggtcttcgaacatcggaaatggcgtcgtttggtcatctcttttgctcccaaccaaaacatcagaataacgttttcccgtttctctcctgtcgttgcatgtttcggatgcccctcctgtttctttaatttcattccactaatgctcgagacctcataatggatgctggattgagataaatggattttaagtttccaagaaaagaaatcgactccccctgctctaagcctctaaccattcttctggcacagggacggtatccagtgtgaaagttgcgcctctgtttctaaaatgctttcgtttcctgtgttgttcctaaccaccaacagagtaacggagagaccgaaccatgagcggaggggtggaaccggagaccccgccgggtagcagcagcaggagcgggggcagcaggagcgtcggtggcaagccgccacgccaccacctgacgtgtattcgccactgcgccagca

SEQ ID NO: 174119 - DNA, 762 bp, Zea mays
  Clone ID: MRT4577_90375C.1
ttgggaccctcgaggccggccggggtctttcctagggtttcgtaccttccagtcgccgcttggtgcgcctcgctatgtgcaggagacggcgcaacacatcgctctcttgatctcatgcatggcggaggtgaatcaccaactagacacgccgaagctcttcaaccggtggaccttcaatgatgtacagtggaacgacatctctctgaacgactacctcgctgtgaacgctacgaaatacgcgatgtacctgccgaactccgcgtggagctactcccagaagaggttccgcaaggagaagtgcccgatctgtgaacgccttacaaactccctcatgatgcacgggcgccacaacggctacaaggtcatgactgtgcgcatcatcaagcataccctgcagatcattcacctgatcaccgatgcctaccccatccagaccagctccaaagcgatcataaaaagtggcccccgcgaggatgcacccgtatggggtccgctggtgctgtgacaaggcacgccgagcatatctcacccgctgaagagagtggaaccaggctcatctacctcctcacctatgtagccatcgacagagctttcctgtaacatcagaagcattgtcgagtgactggcatgatgagatgatcaacgctgccaagggctcatgcaacagtgacgccatctagaataatgacgagattgagcgagctggcaaggtcaaactgctgaacggagcttgtatcctggtgcactctgcgctggaaactt

SEQ ID NO: 174120 - DNA, 563 bp, Zea mays
  Clone ID: MRT4577_90376C.1
gacggagcgaacgtagctggactggccgcctggacatgcaacggcgtaaggatctacaacctgccctactggggcgggctcatgcggcagggctactcatacttggagcgcatcatcctgcactggaccttataacttagcttggattggactgtagaagactagtaactataagactaaggcgcatggacgcccttctcgatagcagtgtgcactacaatgcatgatgcatatggacattaaataaattaccgctacgcagcatgaacctacatcggatagctacctaaaggataagagctttatgctagagtctgtacatcgacttgaaggagcatctccatacatatatatcctagctggattaagggagctgcctcatgctattccacggcttattgctgtttatggtggaacatatatgttgaataaacccgagtgcaaggtggagtgtgacgatgaaggcaaagtttgtggtgtcacatctgaaggtgaaactgccaggtgtaagaaagttgtttgcaacccttactacttgccaaacaaggttaggaaaatcggca

SEQ ID NO: 174121 - DNA, 174 bp, Zea mays
  Clone ID: MRT4577_90377C.1
aagttcgacctcacccgcgaataccgacactgtttgttcaccggcgagtaacctctagctaggacgccgtcttgccaactaacggttcccgcgatcaggagatctccagctatgtacggcggagaagagggttcggcaatcgtcatagatttgggctcttacagctgcagggcg

SEQ ID NO: 174122 - DNA, 1484 bp, Zea mays
  unsure (1)..(1484): unsure at all n locations
  Clone ID: MRT4577_90378C.1
aaacaatcagctagcacgggtatatcagtttttcagcgtttaacagaaggactcgcgagcaagctctccaatgatgagtggggaacggtcctgttgtgcttcaaagaatcagcagcacatacatttgttgtgtttgacaaaatagttaaaatgatgaaagtcattgaaattccagatagaaatgaatcttactctgaagctgagcaatattcagatcatgacatatacaatgatgaagaagaggaagccaatatggaaacggcgtcttatgctattgtcagaatgaagaatcatatggctttgcaactcttaattgttgagggcatcatcaaattgtatgaggttcacaggagctttcttggtgctgagcatatagtcataatgttggagattctatctgccattgcatcacatgcaagtgaagtgaactctgaatctaacttgcacaggaaactacataaagcatgctctattttggaggtacctgagccagcggttatccatttcgagagcgagtcctaccagagctacctcaaacttctccaagctcttcttcatgataacccatctttgtcagaaactatgaatgtggagtcacaaattatgctcgtctgtgagaaaatactgcgaatgtatctgacctgcgcagagcatgaactgtctaatggtgtttctggtaggggtccagctttacatcggatgcctctgggtacttctaaaaaggaggagctgggtgctagaactccatttgtccttcatgtgatgcagttattgggcagtttagagaagaactgctttaggagaaacttgccccgctttttccccttattagctaatcttattcgctgcgagcataactctggagaagttcaagttgcactgtatgatatcttccaatcatcaataggccccataatatcagcatagcgtatattgtttcctcgccagttgtacaattttgtcagattgtggtataagaaaagggtacagctttacagtactgtaaatgattcatggttgaggcatttctggtgttgaagctacatggaacatcgacccagatgtctaaacaaggtttttgctgcgcacatttgccattcttttttctaacattcactgggtaatcattgacacgttaaagaggatggacattggaataagtccctaattcctgttttggtgtcatttcccccctttcatcttggctctgtatagtgtcgtctcccgaacctcagctaccagtgaagagggacttctgtcatatgttactgttcaacatattcgtctgtcgaataccattttaacagtatctacattgtagttagtatatatatactttcattctaacagcaatggatatcccaatggatgtctattaaagaaaggtgagcaatatagttcaaaaaaaaaaaaaaaaaaaaaataaaaaaaaaaaaaannnnnnnnnnnnnnnnnnnnnnnnnnnnnnnnnnnnnnnnnnnnnn

SEQ ID NO: 174123 - DNA, 354 bp, Zea mays
  unsure (1)..(354): unsure at all n locations
  Clone ID: MRT4577_90379C.1
ccggaanggaagggtcgggtcaagcgaccggtcacgcgtccggtggggtgctaccggagaaactcataagtacggcgccggcggacgcgttttggcgcgcaccggtcgatccaagtgctnatacgtacaccccgacttcgtgcagtatatgacgccctgtcttcttccttgggggaaaaaagggtgcaaaatatgggctttttgaatatgagagaatgcattctggaagtcagggatgcgagtttgaaatggtactttgagaacgatttaaacggccctgaattttactttactctcaactttataggaaagaactgggaaagaacctcacaacatgtcatcaagggacttgac

SEQ ID NO: 174124 - DNA, 411 bp, Zea mays
  unsure (1)..(411): unsure at all n locations
  Clone ID: MRT4577_9037C.1
ggggggcaaaaattatctccccttttagcctttataagcccaaaaaaaaagaaattggcctggggtccaaacgggtggggggaactaagggtccccccaaccgggggggttttttacattaggaaagacatcggttccaaagaataagccccctgggggggttaaattccctagggcccaaagaattggtttagggaattgttaaagaaaaaacgggaaattaagcctgccccactatttggttggtcacgggaanaaaccccgcaccggcgcacaccagagtgctgngaccttttccaagtaacgctgatctaatcccgacagcgaactcncactcagttcctccaaaccagccaacaggaccggcatacattccacggtcaaaaatttcacaatcccgtatgaattggc

SEQ ID NO: 174125 - DNA, 183 bp, Zea mays
  Clone ID: MRT4577_90380C.1
gccggcggaacccggggacccactcacgaagatttggagaatcagaaccacatacaatacgtactgaatgcgacgtaagtgaaatattaccagcgacctggccctatggaaaagacaggagttgttgcgactaagtaagtgacatttaagcttttcctgatcgtttagcatttacagttattt

SEQ ID NO: 174126 - DNA, 384 bp, Zea mays
  Clone ID: MRT4577_90381C.1
ggttggtggcaaaagctaaactttatccatcggaaaaattaggcattatcggctaattttacacaaacagggacaagaacctctatcagctttacaatttggctggagcttgagaagctttgatcaacgaataccctttttacatacaaaacagccccccttttttccgaaacgcctgggctattttcgccttgggattaaacaagctggctcacattttatttacctcttttggaaggtgaatattttgggcgagagaccaaagagcaggggaaagagcccaggaaacgcgaccaccaccacagggaccacccacaggagggcgggatgggacccaaaggagtcttcaacgaaggcaggttttcgcaccccaccggcactgaa

SEQ ID NO: 174127 - DNA, 2134 bp, Zea mays
  Clone ID: MRT4577_90382C.1
gggacacctggagggctgggccggggcacacacacaccctatacgcgccgtcatggccctctctatcatcccgagtacaagcagcggggagcacgctgcggcgtcagcatcggccacggccacgaccacgacgaagctgggtcagctgaacgcggcggtggagcggtcatgggtggggcgacggttccgcctcgcagcgcgcgggactacgttcaccacggagctgcgtgccggcacggccacgttcctcaccatggcttacatcctcgccgtcaacgcatccatcctctccgactccggcgccacgtgcacggtggacgactgcgacgtgccgtccccagggtgcaagttcccgcccgtggaccccgggtacgccgcttgcgtggcgcgcgtccgccgggacctgatcgtggccaccgcggcgtcgtccgtgatcgggtccttcatcatgggcgccttcgccaacctccccatcgcgctagcacccgggatgggcaccaacgcctacttcgcctacacggttgtcggcttccacggctccggcacgctcccctaccgcacggcgctcgcggcggtcttcctcgagggcctcatcttcctctttatctccatcgtgggcttgcggtccaagctcgcgcagttcatccccacacctgtgcggatctcggcgtccgcggggatcgggctattcctggcgttcatcgggctgcagagcaacgagggcgtggggctcgtggggttcagctcgtcgacgctggtcactctgggtgcgtgcccagcgtcgcagcgcgcgtctgtggcgccagtgctgacgttccccaacggcacggtggcgctgatgccgggtggcaccgtttccggcggcatactctgcctctcggggcgaatgacctccccgacgttctggctggccgtcgtggggttcctcatcatcgccttctgcctcatcaagcgcgttaagggcgctctgatctacggcatcctgttcgtgaccttcgtgtcctggccgcgccacaccgccgtcaccgcgttcccggacacgcccgccggcgacgacagcttccactacttcaagaaggtgttcgacgtgcaccggattcggtccacggccggcgcgctcgacttcagcggcatcggccagggctacttctgggaggcgctcttcaccttcctctacgtcgacatcctcgacacaaccggcagcctatacaccatggcgcggttcgccggattcgtggacgatgcgacgggagagttcgagggccagtacttcgccttcatgtccgacgcgacggccattgtgtttggctcgctcctgggcacgtccccagttacggcgttcatcgagtcgtcgacggggatccgagagggcggccggacggggctgacggcgctcacggcggcgatctacttcgcggcggcgctgttcatcacgccggtgctcgcttcgatcccgtcttgggcggtcgggccgccgctggtgctggttggcgtgatgatgatgcgtgcggtggcggaggtggactgggacgacatgcggcaggccgtgccggcgttcctaacactagcgctcatgccgctcacctactccatcgcctacggactcatcggcggtatcgcctcctacatgctcctccactcgtgggactgggcgtgccaagcgaccaggaggctcggctgcctcaagaagggcggaggcggcgccgacagcactaatggcggcgtggcagagcagagcgtggaagagcagagaaaggatatggaatcggcataacatttctttcgcctttttgtcctctctgcctttcaaatttcttattttttagggaatttaggtacttcggtcaacctcaatggccattgtttcattttacagtttttaacagtgctacgtcaggtccataagatagttttatgttgcggtttcatagcccatactgaacctttgacagggcgtaaattaatagaggaactagggtagatgattacatgacagtcaactgaactactacaagaagaaagtatatctcccagtttccttcttgtacaccaccttctccttgtacattaccttcaaaagttacacagaaatcagcttacgttcaggaacaaaaaaaaaaaaaaaaaagcggcc

SEQ ID NO: 174128 - DNA, 1081 bp, Zea mays
  unsure (1)..(1081): unsure at all n locations
  Clone ID: MRT4577_90383C.1
gntgcttgtttatctcaaaagtaatgtaggccagcgagtgctcgggcagatagaagagagagagagagagagagaggagatgcagcggctcacggggcgggacatgtgggacgtggaggagtgccagagcccgcgcatgggcagcgtcatcctcggcgtcggcggcaccagcaacaccgtctgcgtctgcatccccgccgccatgcccttcaacgaccccctccccgtcctctcccgcaccgtcgccggctactccaaccacaactccgtcggagaggacagggcaagggagacgctggagagggtgatgtcgcaggcgctgctcaaggcgcgccggcgacggtcaaatgtctgcgccgtctgcttggccgtagcaggcgtcaaccatccagtcgatcagccgtccgcgctggagtcgctcagggcgtgggttccaagccatgtcaagctgttcgtggagaacgacgcggtggcggcgctggccagtggaaccatgggcaagctgcacggatgtgtgctgatcgcagggacagggaccatagcgtatgggttcaccagtgatggtagggaagctggagcagcaggtgcagggccagttctgggtgactgggccagttaacgaagtggagcacctgaactagcagtcacgtctgcaatatacacaccagcaaaacactcctgtaacactaaacagttcatgcatatccttgactgaagacgatgttgcaaaggtttcagacatcagctttggcgttgacaagaaacaagatgacgagtacaatgctcctgatgagtacaacgcagtgtataaaattgctttgtactacaacgcagtgtataagtttgctttgtactgcttgagaccatctctggaaggcgttcatattttgacgatgatgtgctcctatattttcctttctgaataccaaattctttaatatgtcctcttgtgtggaaccaagttcctaatttagctagagcaatacttgaaaagaggaatcccaattagttgtttttccatgtgattgtataacaatttctcgtaaatgaatataatgctgactaatttactgtttgtgtg

SEQ ID NO: 174129 - DNA, 235 bp, Zea mays
  Clone ID: MRT4577_90384C.1
gccacataaataatctgtgtagtacactgcacaaagtgtgggtatatgagaatagaagccaaacaggctcaaaaggcacgatgaaccgaactgtacgaaacggatccggtccactatactacagagtacacgtgactactactgtactgaacacagagacacaacacataacatgggacgacgagggaacatacatagctaccagtgcacatagcaagcgagcgtagcacacacg

SEQ ID NO: 174130 - DNA, 340 bp, Zea mays
  Clone ID: MRT4577_90385C.1
ggccccaccttaaaaaaataaatcaaggacccctggcgggggggggttattttcttaagcttttttgcccagcacctgaccctgttttccagggtccaaacttaaaaatttggggcttattggggtggataaaaaaaaccgctccccttaaaagtttgggggatcaaaaacccaacaaatgaagttcaagccttggggggttgagttttttttacaagaccccaccctcccaggaatagctttacaaaacatttgggtttactaattttatggccgggctgttgaacagacattttagccctccctcagttccccatgccgggagctttaatttttccat

SEQ ID NO: 174131 - DNA, 328 bp, Zea mays
  Clone ID: MRT4577_90386C.1
ggccatcaaaaccgccagacatgtaacagatgcttaggcgaaccattattttatccaacagttcaacacagttcaacttatcgggggcttaaggggaagtacaccactgatcacatattaggggctcttattattatttcacgaagtctccgggattgttattctagccttgtggggacgggacttttagggccccccgaagtccagcgaccatttgtttcaattcagccctggagatcgattaacccacaaggaaaacggtcgccagcgtttccggggctcttggtgagctcgtgtccaacctttttaagaatattgggttcagggt

SEQ ID NO: 174132 - DNA, 407 bp, Zea mays
  unsure (1)..(407): unsure at all n locations
  Clone ID: MRT4577_90387C.1
gctttcggggnaagananagattgccagtgaaccaggataagtgaggaggagatcggcaaggagcggacggccgtggcggtagccatggacgactcggcggaggtgaagctggtggacgagatcacgggagagggaggggcggcgggggactggggctacctgggctccgacgggatgggctccggctcctacccggcgttccccttctccagagacgtcctatccacgccgacctccgcgtcgttgctcctctccatggaccccgcggcgctcttcgacttcaacggcaccttccctccctcctccgcggtggcagcgggagaggcaagaagaaagggatgccggccaagaaccttatggcggagcgccggcgtcgcaagaagctcaatgaccgcctctacatgct

SEQ ID NO: 174133 - DNA, 485 bp, Zea mays
  unsure (1)..(485): unsure at all n locations
  Clone ID: MRT4577_90389C.1
tgcggcgctcgagcgncgggtccgnatctcgtctngtgttgttcggtgcgggcagcagcacacagccccatcccaatcctagtcgatcttcttcccctcctcaaggaagaaaagaagctgaaccatggggaagagaaagtcagctgctaagccacctcctaagaagcggatggacaagcttgacactgtcttttcctgcccattctgcaaccacgggagtagtgttgagtgccgaattgacatgaagaatctgattggcgaagcatcttgtagaatctgtcaggaaaacttcagcacaactgttaatgcactcactgagcctattgatatatatagcgaatggattgatgagcgcgctcgtgccagtacagtaataaaataaccattatttaagaccattgtgtgtgtttcgatggacatgaccatgccaggcccagttgctttatagtcctttaattgaggtctgcgtatcctcttgggtcttc

SEQ ID NO: 174134 - DNA, 249 bp, Zea mays
  Clone ID: MRT4577_9038C.1
gattctggggggaatcgcttccgggacggtggatcacgccgtgcgtgcgtgattctggggggaatcgcttccgggacggtggatcacgccgtgcgtgcgtggtgccgccctgcgcgagccgagtctgatcgtctcgcgcgggcttggtatctcgtgttccgtggttcggttccgcacggtccggccgctgcgtactgtgaggcgtctcgtgcttccggcgccaccgccgtctgctatggttcttccccg

SEQ ID NO: 174135 - DNA, 456 bp, Zea mays
  Clone ID: MRT4577_90390C.1
atttccatctcgacttgtgttgttcggagcgggcagcagcacacagccccatcccaatcctaggcgatcttcttcccctcctcaaggaagaaaagaagctgaaccatggggcaagagaaagtcagctgctaagccacactactaagaagcggatggacaagcttggacactggcttttgcctgcccattctgcagccacgggagtagggttgagtgacgaagtgacatgaggaatcatattgaggaagcatcttgtagaatctgacaggaaaaattcagcacaactgatgatgcactcactgagcctattgatatatatagcgaatggattgatgagtgtgagcatgacgacactgaagaacgcgacgatggtgtgtgagcctgccccgtgtgatggaacagccaccaactaacccctggtaatgtagtgcaatcctctaacgatctataccgtaa

SEQ ID NO: 174136 - DNA, 516 bp, Zea mays
  Clone ID: MRT4577_90391C.1
ggtttgttatgaaccagaatttggcctccagggatacttaggatgacaattccccaacggatgatgccgcatgagtcgtaaacaagatgaaagattccagtttcagtggcaatggatcaaagcataaggaaccaccatgggcagcacataagcattcccattttacttttaggactgaaaatcagatagatgtgttctagttgaaggggggggggggtgttctggaacttgggtaaatgggggaattttgaaaacagtgtaaatagaagtctgctccctttggatattgttcatgcatgaagcaaaatgttatatctgaaaagcgcgtaccttgtaccagagtatctagtcttaggtgctccttgttttaatatatagtactgtaatatggcaaaaattatgtatctggataacacatgtagcttggttttgtcggcactgcatatttaggattgagtatgacttgtaccagcatagctaccgtctgctggtaacattaatatacctttatccggg

SEQ ID NO: 174137 - DNA, 827 bp, Zea mays
  unsure (1)..(827): unsure at all n locations
  Clone ID: MRT4577_90392C.1
ggagtnnntctttttctanngtttatctgcactttttaagggtatgtctgtgtttgcatacctttcttgaacatatacttaaaggtgtagtttttgcaaactagagatgtccttttggtataatcgatcatttgtttcttaagacactgttatgtatattggatacctctgagcctaagaattcattgtggattactgtttttgcgtagttctcacaggtctctccaaaattgaacaattcaataattgtggaattgatttactttacgctccttatatattcctcaccaggcagcgtttcaatagcacactatgattccatatgtgtctttttgctaactcaaagtctcaaataacgcaacattcattcaacagtaggatgctctaatgctttcatgtttgattctgaactgaccagtaaaaatctcgaccaataagtttcctgttgcttgatgagttattcaaaatttcctttttgagctcctttgttcatttctctatatacaaaattcccatttggaagtgaaggggaaaaaatctttatgtacttagtggaaatgatccctgactagccaatagcaagtactagaatgggtgcagtattgtgcattttcttttttgtctaccttcttatttgatttcctttacttttactctttctgtgtggttgaggnnaagttntnttnnnantttttttttgtttcttactcaaagggcctaagctgaccatcataacacattttcataatttttcagtttggtgataacttgccagagcacacagatgatttcttatataaggatagtacgcattaggatacacatct

SEQ ID NO: 174138 - DNA, 1113 bp, Zea mays
  Clone ID: MRT4577_90393C.1
ctttcacgtggcataacaaggctgaacaaacgcgcatgccaggatgctgctgttttgggcctggggtttctcaaacttgatgctcgtgcacggaaggatactcaaaagattgaccacacagtgaaggagagagcagcgcttcttaaccattttgccagagcatttaaggagcgagctcagtcagacttgaagaaagctgcagacaaacattggagtgatggtgccttggaggcagacctgcgacgagctgacttggttgttaaacgacgtgccatggaagacgctttcatggcattgaagtttgttcaggatatccatgacatgatggtgaacagattatatgagcagcttccgaaggacggttcatcttctcgtacaaattcaacagggtttattacacttgagaagaacgggaaggctcttgaactgtttcctggtgaagtttctgctgatcagatttatgccatagaggaagcataccagagtatggcatctgccttttctgaagctgatggtattgactacacagatcctgaggagcttgaattgttggtagcaactctaattgacctggatgccatggatgggaaaaggagtgtttccttgattgctgaatgttcaagctctccagatgttaatactaggaaagccctagctaatgcattggctacagctccatctatgtggactcttgggaatgctggcatgggtgcattgcagaggctggctcaagatcccaactacgccgtagctagggctgcatcaagagccattgatgaactcaagaagcagtgggaacttgaagaaggtgacagtctgaggtttgtgatgaaccagaatctggcctccagggatactgaggatgacaattcaccagcggatgatgccgcatgagtcataaacaagatgaaagattccagtttcagtggcaatggatcaaagcacaaggaaccaccatgggcagcacataagcattcccattttacttttaggactgaaaatcagatagatgtgttctggaacttgggtaaatgggggaattatgaaaacagtgtaaatagaagtctgctccctttggatattgttcatgcatgaagcaaaatgttatatctg

SEQ ID NO: 174139 - DNA, 431 bp, Zea mays
  Clone ID: MRT4577_90394C.1
aaaaaaaatcccacattttttatataaaaaggcagggggggtcatatgacgatgggcgaacagttcatagctcattacaccaaacagaatccaggggcaagacaacccctatggccctatatggaatttaattcccaaaacggggattagacgggccctccaccatggaaaaaaacaggctcaaaagttttattggggggccaaaacgaacaggggacatcaaagctcaaaagggttttagaaaaccaaaaaggggagttcaccccacaagctgctggttgaaggggctttttttttttttttttggagggggaagccgggcactccttggtgggggctcaaaaaggggagttcaccccacaagctgctggttgtaagggcttttcttttttttttttgcagggggaagccgggcactcctcggtgggggc

SEQ ID NO: 174140 - DNA, 143 bp, Zea mays
  Clone ID: MRT4577_90395C.1
cggcgcgcgcgctcctctcgccggcactctcgtccttttctctcgcgtccaattttggtcctggggggccgcgccaacgccacctgcgagggccgcctccagcacgaaaaccttctctatctaccggtggcacccggactcga

SEQ ID NO: 174141 - DNA, 497 bp, Zea mays
  unsure (1)..(497): unsure at all n locations
  Clone ID: MRT4577_90396C.1
gactagttctagatcgcgagcggccgctcgcgagcggccacggcacgctcgtcccgccggtcgtaccggcagcggccatggtgaccgcgacgacgaggccatcgtgccctgcgacttcaacctcatcacagacgtggacttccgggagctggtggatcgcttgccgcgaggcgccaccttcaccatggtgtccgactcgtgccacagcggcggcctcatcgaccaggagaaggagcagatcggtccgaccaccgccgccgccgactcctacctccacggcggcgcgcgcgccgcccggttcctcccgtacgccgcggtgcttggccacctgtcgggcgcgtcnggggggggcgcgtnngcgtcgcaccacgtcnccgaccacctcgtggcgctcttcggcgccgacgccagcgccaagttccgcttccaccgccaccacggcnaccgcagcggcgccgccgcgcgcactgacgacgacgacgccgggatcctggtga

SEQ ID NO: 174142 - DNA, 236 bp, Zea mays
  Clone ID: MRT4577_90397C.1
cccacgcatccgaactaattcttataacggctttgggcccaacactaattctcaccaactgctcactgccgttcctaagccatcttctgttcccattccttcacatattgaagtgcaacatctggggctggcatcagtcgtaacctatcacgtcaggggttagcctaagcttacagatctttgcaactgattaccgaactgtcatcgagcctcatgaaattacttatgtaccaact

SEQ ID NO: 174143 - DNA, 220 bp, Zea mays
  Clone ID: MRT4577_90398C.1
cgacccacgcgtgcgcggatgtgctgtcacaatggtttagtttttacacctacccagctccaaatgggacaggtatcctttgaaccgactgatgatcgcgaccacaaacgctcgcgaactcgactctactttgcgctataaccaccaaacctatcatgtccaactccctttcgtgacagtaccatgattactcaactatcagcacccttgtcgaccccag

SEQ ID NO: 174144 - DNA, 268 bp, Zea mays
  unsure (1)..(268): unsure at all n locations
  Clone ID: MRT4577_90399C.1
ttttctttttttttgngacatcagcaagngaaacaagcacccggagacaaggaggaaanaccnaagcaaccccccccaaccgcagaaacagcnaaccaagccaagcgcacgcccngaaaccgcgaacgcncgagcagcaaggccgcgacgccgccgaggaaaaaaaaacagggcgancgcgacgaccgagaccagcngcaagagcagcgcggcgcaaacggggagcggcacgacccagaaaaaacccaacgggaaggcggggcgcaag

SEQ ID NO: 174145 - DNA, 362 bp, Zea mays
  unsure (1)..(362): unsure at all n locations
  Clone ID: MRT4577_9039C.1
ggggagggcggggggnaacannaggggggcanaggagagaggggganggcgggccggacanacaagcanaaaccaggcccaggggccagccgggcggcagcgaccgcaaaacccanacaacgaagaccgnagagagccgacaaccggggagagccgggggggggggggaagcnnagaacgaggagcccnacaaggnagaggggccagnagaaccaacgggccccggcgcccgncggcgccgcgccngggcaggcagcggcggcggcgcnagacagggngaaagcagagccaaaccggaacnccgccgggcgggcgagggcgcccaccgggcccaggaacggcgcgccgccgcggcggaagaa

SEQ ID NO: 174146 - DNA, 799 bp, Zea mays
  unsure (1)..(799): unsure at all n locations
  Clone ID: MRT4577_903C.1
gccggccgggtcgggcttttatattgataatatggctgtcggaaaaaacaagcgtcttagtaaaggaaagaaaggtttgaagaagaaggtcgttgaccccttcacccgtaaagactggtacgacatcaaggccccttccatgttcgaagttcgtcaagtcggtaagaccttggtcaaccgtactcaaggtcttcgtaacgccaacgactccttgaacggtcgtgtcgtcgaaatgtctcttggtgacttgtccaaggacgaatctcgttctttccgtaagatcaagcttaaggttgatgaaatccaaggcaaaaactgtcttactaacttcaacggtatggacatgaccactgacaagctccgctccatggtcaagaaatggcaatcccttattgaggcctttgttgatatcaagaccactgatggctacttggttcgtctctttgctatctccttcaccgctcgtcgtcgtaaccaaatcaagaagaccacctacgcccaatcttctcaaatccgtcaaattcgtaagaagatgtttgaaattatgactgaagaagcttctgcttgtgatcttaaggaattggttgccaaggttacctcttctgcctctcaatccgctcaagatgctatcgctgtccgtattgaaaaggcttgtcaaggtatctaccccctccaaaacacctacgttcgtaaggtcaagatccctcaggcaccccagtttgatgtctctgctctcttggccttcacgntggtgctgctgctgccgntgatgacactggtgctaaggctactaaggaat

SEQ ID NO: 174147 - DNA, 1102 bp, Zea mays
  Clone ID: MRT4577_90400C.1
tgggcatacaagagccaagaaagtgggaaaatgcatgcttgtgggcacgatgcgcacacaacaatgctcctaggagctgctaagctacttcaagctcggaagggtgacttgaagggtgctgtaaagcttgtgttccaaccatcagaggagggctatggcggagcctactacgtcttgcaagaaggtgctcttgacggcgtgtcagccatatttggcttgcatgtggacccagcacttccagtaggtgtcgtcgcatcaaggccaggaccattcacagcgacagcgggtcggttctctgcaactattcgtgggaaaggtggtcatgccgcagtaccccatgaatccgtcgaccctgttgtggttgcagccactgcaatcctcagccttcagcaaatcgttgctcgtgaagtggatcccctccatggtgcagtggtatctatcactttcgtgaaaggaggagaagctttcaatgttatcccggagtctgtcacctttggcggcacaatgaggagcatgacagatgaaggtttgtcgtatctcatgaagagggttaaagagattgtggaaggacattcttcggtacatcactgtactgcttcattggacttcatggaggaggagatgaggccatatcctgctgtggccaacgacgaacggatgtatgcccatgcaagggcagtgggcgagagcttgctaggcgaaaaccatgtcaaggttgctccccaagtgatgggcgcggaggactttgggttctacgcgcggagaatggccggcgccttcttcaccattggagttggcaatgaaagcaccatggtgactgtgcagcaaccccactccccctactttgtgatcgatgaggacgcgcttcctgtcggagctgcatttcatgctgcagtggcaatcgatttcctgaagaaacattcgtaaacaaaaacttaaataattaatggagagaagtaggcttttgattttctttgggtgttagatatgcatggttatatcgcttcttctatattatgttttaggtgtctgattttttctgttgtttagatgacatgaaatctttttattctttgactattgaaaaaaaatcgttaattgc

SEQ ID NO: 174148 - DNA, 254 bp, Zea mays
  Clone ID: MRT4577_90401C.1
agtgaaagtgcatacactttattatgtacattgttggaaagggaggccacctggagaaacttctgcactggcactgtgttcctagagctccttctatgcgtccctcccaagtgatttaatttcagctgattggactacgaattcacaaggcagaaaagtcaaggtcatttggtatctggagacaggagaactcaaggaaccaaaagtactgttactctaagtctcagaaaaggttttcagtcaggatatggagg

SEQ ID NO: 174149 - DNA, 488 bp, Zea mays
  unsure (1)..(488): unsure at all n locations
  Clone ID: MRT4577_90402C.1
aatgacaatggacacaccatattccttgttggtcgaaaataaacaacatcatcgtgacaaacccaaaaacaacagtgtcgctgacatgctgtaacacacatctaacggtatagggaaaatcctacctcactcagcccacaacaaaacatatggctttaggccaatccaagaggatgcactgattcatcagtgggggcactgagggattaaaactgtcccttatccttgaccatggaccgaaccaataatgccaacatggagaacttgtcaaggctggcctgaattgaccttcttcaccttcagctcaataaggcctcgcttgcatcacagatgcccatcgggctcaagctgccagaaggattgatggtgtcaaccacctggccgaactggcagcagctattgcggtacacagnacgcattaacagacaccctaatacctgaacagaacctgcatgcgtaccaaatatatctatatttagtgccattaa

SEQ ID NO: 174150 - DNA, 887 bp, Zea mays
  Clone ID: MRT4577_90403C.1
gtcagcaccagagcaaactccagaatcaaaattacaagaaattgttcatcagcgcagtcagtggatttataaacacctgattagaaaagaaattcttaatccctcagtgccagagaaagagtatgtctctggtgaaggatttccttatttagggagaaactatcgcctacaagtcattgcagatgatgctagtcaagaaaaacttaaatattaccgaggacgatttcagctacaacaatcatcgcaacaccaaggtcgagaattatttattgaatggtataaaagtcatcttaaagcccatcttcagagtaaagtggagcagtttaagcatcgagttgaagtcaatcccaactcaattcagatcagagagcttgggaatcgttggggttcatgtagcacaaaaggagatctatattttcactggcgagtcgcaatgcttccaagcaacatagtaaattatgtagttgttcatgaaatggctcatcttaaagaacgccgccacaatcaaactttttgggaaactattgaatgtatattgcctgattaccaagactcaaaacaatggttagcgactcaaggtatatactacgatctctaatagcgagatagtaatgaaaatgagcagattaatcgagagggagaaaaacaactttgagggccatgcatgaaggaaccgccggtctaggatgctaaatcctcgtcgctgatactgatagggtggtttttgtcaatgaaaattttaattttaagctataatattaaattattaaagatattgctgaaaaatagtaatgttttatatgatattagactccacactagcccatccattaatccttatttctcagaaaggtaggggaaaaatctggcaaaattatagttaaggt

SEQ ID NO: 174151 - DNA, 627 bp, Zea mays
  unsure (1)..(627): unsure at all n locations
  Clone ID: MRT4577_90404C.1
gggtacccctccgaggnnccggccgggnaagttcaaaagaatagaatgactgaacctcgaatcctagcgatacattagctcctcccgtcccctcgcctcccccgccctcctccctctgcctctcgctccgcgaggccatcgcccgggccacgttggacctgccgtcctccgcgcacgcgctagactggctcgccgacatcgtcgcgcagggcaaggaggcgctctctcagggcggcgactccaaccccagcaccgcctctggggccgacctcctgtaccccgctgacggtgtcgctgtaggaggccctgtgggggtggcggatgtcttcagaggatgccaaaatatttgcaagttgtgggttgtggtgttgtcactaatgtcacctctacttgattctgttcattagtgtgctatgttgcacggataccgatcatattttggatttcaaatctcactattttctacttgcctactggcagggtagtacttgtgcagaacatgagaaatcaaacatttaaattaacctaggcagtcaggcaaaactgttgcttatcatatcaatatttgtaggtgctatagccagggtgaagacatgaaagtcagcacttaatattaatagtttcatc

SEQ ID NO: 174152 - DNA, 291 bp, Zea mays
  Clone ID: MRT4577_90406C.1
ccggccgggctggatcctactgacgcctgtggcgaactacgcgccatacttctacgacgcgctcagtgcgcgcctctgcgagtcgcgcgtgcttgatgaacggtgtcatgggcgtggtttgctttagtgccgggcgagttggcttgcctgatgggggacccatttcctatggatgaatggtagatcaagggcggatcaccaatgtagctgtttcaatcccagcgatcggtgatcgagacactgtgtacgacggactctatgagtgtcatcgagaaccatagttggatatat

SEQ ID NO: 174153 - DNA, 340 bp, Zea mays
  Clone ID: MRT4577_90407C.1
gaagacggtcaacgaggaaatgcggtggggggggaaaacaatgccatctgtgggcgcccaaacctgtcgggggaagcggggagggagccaacattgagacggcgacgaaagacattgaggaggccttactagggggaaagggggggtcgacgcgggccacgaagagacgggaaacgtaggggccggtttcggagggggcgaattggacgttggggggctggggttgggttgagatcgaggcacgagtgtgggtgacttccgagacaggttgggtgccgggagccggggcggctcgtgcgccggggctgtcagggctttgtggagggggttggcttctggg

SEQ ID NO: 174154 - DNA, 298 bp, Zea mays
  Clone ID: MRT4577_90408C.1
cggttcgacccagcgtccttttttttgtccttttatgtggtggccgggggggggggtggggctgcgctgtttgccggtgctcccgcccttgggggggcgcggcaccctgcttggggcgcgggtggggtggctcggtgctcgtgggatggtctgctgctgggcggttttgtcttttttctggcaagggcggcggggggagggggctcctctgctgcgctgtcggggcgtggattgcgctcagcgaccgtgtggttctcctgtctacgaggggtggccggctgccccttgctgttgctgg

SEQ ID NO: 174155 - DNA, 416 bp, Zea mays
  Clone ID: MRT4577_90409C.1
ggaaaaaaattagatgatctttgacttgcttaggatttaatcctgactcattctcactctatattcagatcgattgagagctaaccgaacaagccctaatgggttgttctgttatttcttatacacatgtgttttatttaatttattttatttatatgtttttatttttttttttttttatcccttttttttttttttttttctttttttttttatttcttttttttctttttcttttttttttttttttttttttttttctttttattattttttatttttttggggttgttttttttttttattttttttttttttttttttcatttttttatattttttttttttttttttattatttttttttattatcttttcattttttttttttattttattttttttttttttttttt

SEQ ID NO: 174156 - DNA, 827 bp, Zea mays
  Clone ID: MRT4577_9040C.1
gacccaaccctcccgtccgcagatcaacgtcgtgttccgcaggacggcgtgcaggtacgggggcaagaacatcgccttccacgtgaacgagggctccactagcttctggctctccctgctggtggagttcgaggacggcgacggcgacatcggatccatgcagctcaaacaggccaactcggcgcagtggcgagacatgcagcacgtctggggggccacgtggagcctcaccccgggcccgctcgtcgggcccttctccgtgcggctgacgaccctgtcgggcaagcagacgctcacggcccaggacgtcatccccaagaactgggcccccaaagccacctacacctcccgcctcaacttcgcgtagaggccttctgccttggcccgccgcgtatttatcgttctgtgcagtttgatgtcgcgtgaaggggataagctggtatagtagtggataaacctggtgtttagggcccaggtagccctctccgaactggagagagagcgtctgattggtcggcgtgggccgcatgcttcctggaggctggaaatgggagctcgatccggtgaagagcggctggggaaccaaaggcgtgagcgtgacgtgactcctcttcgttttcgatggactcatgcagtgcttatttctgtgttcttctctcttaacttatctattgttgttgttatattttcgtgcccttggtacatgggctgtaacttgctgtcacctatgcgccccgtaaactataataatcatgtattgttcgttaaaaggtatgttagtcatcaacgactgttgccgttccaataaaaaaaaaatgcagagctcc

SEQ ID NO: 174157 - DNA, 676 bp, Zea mays
  Clone ID: MRT4577_90410C.1
gggtacctcgaggccggccgggaaacgacgttcacaggtccccgccagccgttgcccatcgtccgtccaagactcatgtgagccgcgagcccgcgagtgatgagcgccgccgccgccggtgccaagaagcgtctcagcgtcggcgccatcgccggcggagggttcgcgctcgggtgcggctgcagggacgccaaggccgtggcggtggcgtcgtcgtcgtcgtccacatcgccctactccgcggccggcacggagacgacgacgaccacagcgacgaccgcgacgtggcgcagggccaggacgccgccgcaccgcccgtcgtcgtcggcgtccgggtccacgggcacgctcaccgtgccctccgcgtcgtcgtcgtcgtcctttccgtgggagcgcgcggacgccgagggtgacggcgatgccggcgacgaggtggactgcaagggggacgccacgaccacgacgagcttctccggcctgctgcgccagctcaacgagctcgagcagagcgtcgtgtcgtggggacggaagagcgccagcaaggatcacttttcgccacctccacggccgttaccagcgctaccagtgaagcaacgacttgcgcacagcggtgatggcgaccgcaaagaaggccacggcaacttctctccgccgccgcctcctcctcctccttcct

SEQ ID NO: 174158 - DNA, 431 bp, Zea mays
  Clone ID: MRT4577_90411C.1
gtcatctttgtcatggcaaatggcatcgtttccgctctcgagttgatgtctggcgaaatcagcgaggtcagagagacgctcaactccagcactatctttcccttcgagagcttctatactccaggaatggggggtgcataaggatctcactttccagttcgagggtcttcttcagtgttatacatctaccctggtagcattgcaggaagatagcgttcttggcctttctgcaagagggtaactgcactagaattgtagtactctctttgtgcttgggaactgaactgatggtaactgcagtagaattgtagtactactctctttgtgcttgggaactgaactgatggtaactgcagcagaattgcactgtagttcgcaatcagacaaggagaatcatacgattcctcatgttaccttgatgaatttttggt

SEQ ID NO: 174159 - DNA, 207 bp, Zea mays
  Clone ID: MRT4577_90412C.1
ccggaacggcatggccggcccgccccacccgtctccgatccccaattactacttcggatcttgcattcagcgcagcgcaagtgtgagagggaggggtacacggtggaagatagagctcgcgttcggtaagctcttcatacggttcttttccaaaaaggagatgcggatccttatggtcggcctctacaccttctgttaaactcacct

SEQ ID NO: 174160 - DNA, 128 bp, Zea mays
  Clone ID: MRT4577_90413C.1
gggagagaagctgaaacgaattataaccatatccatattaaccacagaacaccagctagttcgaggaaaaatcgctttaaatccagtataaaaaccgcacacttaagtacagggaatcattgcaatgc

SEQ ID NO: 174161 - DNA, 354 bp, Zea mays
  Clone ID: MRT4577_90414C.1
agaggcgttcgcccacacgtccgaccacgcgtgcgatcctacgtcaccaccaggctctggagtgtacagtcctgcaccccctgcaccaggtcaagctgccccaccctccggtgggatgcaatattcaccaccaacaccacccgcatttttttctatccgctgaccaggcactgctccatctagtgatggagctcaaaactatccccctgggggaacaaccagcaagttgtggctgatccactcaccctgttggattatcaggttaagcctcatctggtgcaccaaaagcaccacgcgatatttcctccaccagcttataattcactcttaagactgcccctgcaccatttgagg

SEQ ID NO: 174162 - DNA, 379 bp, Zea mays
  unsure (1)..(379): unsure at all n locations
  Clone ID: MRT4577_90415C.1
agagcattagatgagtaccgccatgatctcanctgaagagagtttgaggacaatgaagcgtcgtggacatcaccaagagacttcgagctcgaggagaccgacgaggagaagaaggcccgtgaggaggaggagaaggagtacgagaacgttgccaaggctctcaagaacgtcctcggcgacaaggtcgagaaggttgttgtcagcgacaagctcggcctctccccctgcgccatccgtaccggccaattctgttggtctgccaacatggagcgtatcatgaaagcccaagccctccgtgacacctccatgtccagcttcatgtcttccaagaagacctttgagatctcccccaagtctcccatcatccaggagctcaaga

SEQ ID NO: 174163 - DNA, 277 bp, Zea mays
  Clone ID: MRT4577_90416C.1
catatatgtcactttagcactgtggccacaagtaacccagaaaaaggcgaatggaaatggtttctggtatctcggcttactgttgaaactagcctttctgctgctgtgcatatgtttcttggcatattctcagggtgcgtttgagaagatcttttctctttggccactttccaaatgttttgaactggaagggagtgtgtatgaatggtggttcagatggaggttagaccgttacgtcgtcctccatggggctctgtttgccttcatttatctggct

SEQ ID NO: 174164 - DNA, 811 bp, Zea mays
  Clone ID: MRT4577_90417C.1
aattcggctgcatccttgtgctcctcgcgtccctcgccgctgccgtcgccgcagcatcctcgcacactcactcgctctcgcgttctgcctcggcctgccaccaccaccaccatctcgcctgctgctcgccaatggcccctgcctcgtcgccggttgcaggctcctccactcgctccgtcgcctccgccacatcctcgggatatgatgctctgtccccttcggatccggctagccgtcgccagggacacaaccaagcttggcctgggcgcgacaaccaggtccaaccgagccagcggccggggagatctgaaggggtgagggggtggggggacacgagcgcgcactctcggctcccgccccgcgggggaagcagagcggagacgggcggcgaaggcggaaggccatgaggtgttgggatttgggaggggtcaggtcaggagtggccgtcccgctcgtgaactcctgcgccaaacgcaaaactgtcggctgcagcctgcagtcgccggccggaactgggacgagtttggtttggtgatggtggcctgctcttggatcgagacggcccgattggatgaatgatcgcgtcgccgattaaataatcaccatctgattctattggttttaaatctactattgagtttgtgatttgtctttcttattttggttgtccagttactaaaacaacaaaaagacaacaatgtaatggtgggtgttctgaaggagtttgggaacatgctagcctatggtcgtctagatttgtcaattaccctctattttacaataaataaaggagatgattttatgttacatc

SEQ ID NO: 174165 - DNA, 361 bp, Zea mays
  Clone ID: MRT4577_90418C.1
cgcaccagggagccccaaccaaagaagattcaatattttacccaccaacaaccgccggggaccggggggcgccccacaacagaggagcccccagccaccccgccgctacatccaagccgacgcgcccgccaccggcgtggggacgccaacccacgccgaacatcgacgaagaagacccgcacctcgtcaacccaacccctaaccaagagcactaagcggaacacgcacaggcggcgcacccctacaaccctgcggaaccccacaccgaccgagcgggcgcactacaccgcttacacagccgcggacacaaggcgaccgctacccggccgcgggccctgccgcacagagagcagggaccacg

SEQ ID NO: 174166 - DNA, 1986 bp, Zea mays
  Clone ID: MRT4577_90419C.1
gggtacctcgaggccggccggggaaaaccgaccaccatctccacctcgccgccgccgctcggatttccctctacctcaccctgtccggctccatggcgaccgccgcggtggagagcaagaggggcagcgcccggggccgcaaggcgctcgtggccgtgctcgacaacgaggctaacatctccgccgggaaggctgcccaggccgccgatctctcgtcctgctcagcgcagaagaaggcgaagcgggcgccgtcaaggagcagcaaggccaaggccgccgcggcgtcggcggtcgtggtcgtggacgacatagccgagctgcaggggatgctggagcgcctgcggctggagaaggagaaggcggaggagatggttagggagcgggatgaggtcatccggaagaaggaggaggagatcgagaccagagacaaggagcaggagcgtctccaggccgagctcaggaaggcgcaacgcgccaaggagttcaagcctaccgtgagcttccccctcgtcaagtcgttgctggagaaagagcaagaagcagacgacaagggaaagaagaagaaggggaagggcggccacgagaggaagaagccgtgcccggcgtacgtgctctggctcaaggaccagtggaccgaggtcaagaaggagaaccctgagcccgacttcaaggaggtgtccaacacgctgggcgccaagtggaaggctctgggcgccgaggagaagcagccctatgaggagcggtaccgccaggagaaggaggcctacctgcaggtggttggccaggagaagcgcgaggccgaggcgatgaagcttctcgaggagcagcagatgcagtggaccgccaaggagctgctggatcagtacctcaagttcaggcaggaggccgaggagggtgactgcaagaaggggaggaagaagaagagcaagaaggacaaggacccctccaagcccaagcagcccatgtcggcctacttcgtgtactcgcaggagaggcgtgccacgctggtcgcggagaagaagaatgtacctgagattggcaagatcaccggcgaagaatggaagaacatgacagaaggtcagagggctccctatgaggaggtcgcgaggaagcagaaggaagagtaccacaagcagatggaggtgtacaagcagaagaaggctgaggaagctgctagtcttgagaaggaagagcaggagcataagaaaatcatgaagcatgaggctctccagctgctcaagaagaaggagaaggcagataatatcatcaagaaaaccaaagaaaagcgccagaagaagaaacaggagaacgctgatcccaaccggcccaagaggccagcctcttcctttcttcttttcagcaaggaagagaggaaacagctgatcgaggaacgcccgggcatcaataactcaaccctgaacgcgctcatcacggtgaagtggaaggaactgagcggcgaggagaggcaggcctggaatgcaaaggccgcgcctgccatggctgcgtacaagaaggagatggaggagtacactaaggcccaaagctcatctgcttgacagaataactaattcctgcgagtgagctttggttacaaggatcctcatctctgaatcctggtgtggtagattacttcgtgtgatctttagctttgtgtgaccttattagtcgcagcaatcagtgtaatggcggttcatatggtttagtggcagtttatattgttgccacgagcccaggaattgagtaatctttcagttctgacagaataactaattcctgcgaatgatctttggttacaaggatcctcatctctgaattcctggtttggttagattacttcgtgtgatcgttagctttctgtgaccttattagtcgcagcaatcagctgtagtgccccccaccccatggttttctgatcctgttttattgttgccgcgcccccccgaattgagtaatctttcagttctgacaaaaaaaaaaaaaaaaaaa

SEQ ID NO: 174167 - DNA, 304 bp, Zea mays
  Clone ID: MRT4577_9041C.1
aaacccctactacataaataaccggggtttgcaactactcactggctaaaaaaaaagggcaaactaaaaaaacctagcgctgggtgactacaagaagacaactcagccccttaaatgtttttagaccatgcgaacatttccggaggagtaattacaggtttggaggactaataaccgttgccagcacgacccacaaaacttggtttttagcctacacaaaacaaaattattttttaaagggcccaaaaatgggggcccctaatcggggattcaagcggttttctttgaggggaaaaagtttgaa

SEQ ID NO: 174168 - DNA, 312 bp, Zea mays
  unsure (1)..(312): unsure at all n locations
  Clone ID: MRT4577_90420C.1
gtccgnatcccggtcgaccccgcgtcctgagagncgtagctcaggacagcgccactcgaagaagcctgaaggcgacgcctccagatcagggaaaggggttctgaggtcggtcgctggaggaatcacccttgtcggcgcagtgttcttcatgttccatctcaggtgcgctaccatgttgttagcactgctttccagattctcgctgcgaggtcacactgatacatcctctgagataatatccttcagtgccgcgctgctgcnnnngtagcctggggggatgctttcctgctttttttccttttttttgtggtt

SEQ ID NO: 174169 - DNA, 349 bp, Zea mays
  Clone ID: MRT4577_90421C.1
cagagaaaaaacaatttttgggtcctaacaaaaaccagaaaacttaaatcttcaaagccaataataatcctcaaagtactttttcctaaggtgaacatatacaggctcccgggcccactaattgactacaaactatgccaaaagggagaggttaaacaccggcctaatgcctttccaagaaaaaatgggtgattataatcccttcgtttctccagaaactcctccgccccaaaaaatattttgtgatcttgaggaaactgttgcgggaaaatgtggccgcccttgcggaggcccccttgatgttccccttggggaatttattttgcagcttggcctccctggtgccagg

SEQ ID NO: 174170 - DNA, 209 bp, Zea mays
  unsure (1)..(209): unsure at all n locations
  Clone ID: MRT4577_90422C.1
gttaattaattggtaacagagcttcacatttgattactgaggtgcttaatggactattcttccataaggggtgttgggtnntnncncttcananacttcatttaatatttacaattccattatcttnctttcttnnattantnccatcatttntacccaaatctctcattattnacctctactattttattcnncannattcaaccacc

SEQ ID NO: 174171 - DNA, 198 bp, Zea mays
  unsure (1)..(198): unsure at all n locations
  Clone ID: MRT4577_90423C.1
atccctttcagtcgcagcaagtgcccanaaggccggaagcagaaccatgtttgttggtgcaacctcatatcatcccctgccacgcacctccgtccgccgcgccatggaatcgaggaggagggccgtgcccaccgtgacggcggttgcggtggcgacgctgctgctgctgctgatgtcgccaggcgtgggcggcgactt

SEQ ID NO: 174172 - DNA, 299 bp, Zea mays
  unsure (1)..(299): unsure at all n locations
  Clone ID: MRT4577_90424C.1
ttcctaaatactactttgatattctttaaggggtgtgtgggggtttccctctgggtttttgtgactcggggggggggggggtgtgttattntgctttaaaatccaataatttgcgcgagtgggggggaaananaaaaaaaaaaaaaaaaaaaaaaaaaaaaaaaaaaaaaaaaaaaaaaaagggggggggggtcttgggggggggaaacttacttacccgtgcgtgcgaggggatangtgggggggtgggggccctaaattaaattaattggggcgggcggttacaaccctccggactg

SEQ ID NO: 174173 - DNA, 312 bp, Zea mays
  Clone ID: MRT4577_90425C.1
tcagcatttgtttcagcaaaccagtcccctttcttcacgccacggtcactgtctgcccgtgtcccagagcacactgaccctgagaacaattgctcctccaatggtattgtgctgaaaatcagtgatatactctctggtgattccttcacaccacaggaggagttaccatcagctagcgttggggtcttgccgtcagatgtgtctcctcctattagcctgtgcacttcaagcaactttggcactccagcaattgtctacaacaatcccagctttgtttctactttcaatggcccatgccaaggcagttcatca

SEQ ID NO: 174174 - DNA, 371 bp, Zea mays
  Clone ID: MRT4577_90426C.1
acaaccgattgcttcgatggccggaagcagcagggcagatttacaaagccccagtttggggaatcaatggataaagacaaattctacctgcaaactgtcttgcatctgaacggatattcggatagcatatggtcctaaccaatattgttggcgaaggtgtttgtaaaacatagcactccaacccttgtgatagaacataaacatccctaccacacacggcgactgccaagactgggccttaggcctcggcgggcgtcatcggcaaccctccttgtatgtgtctggatgttgcagccggttctggaagaagagtgagcttctaagtcgaagcgcccttctgaggccggccgtccaggggggaattgccgaca

SEQ ID NO: 174175 - DNA, 439 bp, Zea mays
  Clone ID: MRT4577_90427C.1
aagcagtggtaacaacgcagagtactttttttttttttttttttttttttttttcttttttttttttttttttttttttttttttttttttttttttttggcaggcaattcaaccgccccaaacaaatttatggaaaataaaaactaaacagggggggcataaaagcataaaaaagacggggcccaaaaggtaaccacataaggcaaacccggggcaacacccagggacccctgcacttgggtttgccatagcaaaagccagctcaagccaaagggaggtctttggagcaatccttgaaacactttttttttcgattaaggttttgagaaacagaattccaagggagggaagttatttggggccaaaatccttaagggggcaaatctgttcctcccccaaagcaaacgggcccgggaactctgcgttgttaccactgct

SEQ ID NO: 174176 - DNA, 455 bp, Zea mays
  Clone ID: MRT4577_90428C.1
cctcgaggctggccgggcagtgccttcctggctgcgctgcccgctgctggtttgtaacggggtgtattttggcatgcttgttggtttgctggctgcagaacagcttcctgatgaataccaggaccggtgccagggagcagggaagccactgttgatctcttcttgaagtcagctgagtatttggactgcgcagtccatcatgtactcatacatataccacctcaaagactgaacatgggagttcaccgtagaagttcagtggtaacactgatgatgactacgtactcttttatgaaagccttgccaaaagatgtccttctcattattgagtacaagaataattatctcttgtatcttattgtaaaatctgaagcatcttttctgtagatggttagcttgcattttattatgaaacagatggacgatttacgctaaaattcatactcatttacgtt

SEQ ID NO: 174177 - DNA, 923 bp, Zea mays
  Clone ID: MRT4577_90429C.1
ttttttttttttttttttaccgatccgcaatgatttttacaccttcatggtcatgctgatacaccgcagaaatctcaagctaatacatctcccgaaggtgaatggaagagaagggaaatctgtgtaattttgctaacatccctaaaaagagacagagacagagagagagagagagggaaatctgtgtaattttgctaacatcccgaaggtgaagaagggaaaagggaaagctgtgtcgctaaggatgtacagagctacagatgtgtgggctggacggctggtccttggttcaacgtgcatgggctgtccacaggcaaatggttagctgcaaaatcgggcaactgtcctttatgttagtttctgtgcagtgtgattattctcaaccatctgactggaagctgtaaacgccggatgactgtacgggtttggcaagagctcctccacctcgatcctagagctgaaatagcccgcgtttctccttctgtgccggatgctctcgacctcggccatgaagatactgtacactggtctgtggtcagagaagcgagactctccgcgaacgtacgacagctgcatgagaccgctaccatgccacagaatgcgatcgcaccaagctgggattcaccgcttttctttgggccgaaccccagaataacggtctgagttgaatgagtacttatatgttggaggaaaataaatcctgccttctttccatccctggaaaacacgcccacatctccgttctatccgtagctgatctttctccaacagttgcttccagctatgcatttcaacaagagctttagctgagcagtacgaaagagcgatccggtaattcaaatccccaagccaaatgatacgatcatgttcaagaattgtttctggtgacttgacatcagcagcaccgcggacctgtggaaatc

SEQ ID NO: 174178 - DNA, 580 bp, Zea mays
  Clone ID: MRT4577_9042C.1
attgggtacctcgaggccggccgggagactggatagactggaggcgtagaggagtttttccttctccaaagtgcaaatcaccacatccccccattaattgaaggagattttatcgtcacactgtcaccgccagcgctcaactaaacccggcgacagacaggacgagcatggtggcctcaatgctcgcctccccggctaaacccagccatacacacgactcaccacaaaaatgaccccgggaccaagagccgcccgctccggccatgtgcatgtgctctcggctggccgatgtctccgtctccgtcttcgtgggctgcagcggcatcttccgcttcctgccagccgggggcggcggcgagcgcagtaaggctatgaccgtgtcgacgatgccgactacgtgtgtatcgtcgacaccaggctgtgcgacggtgaggaggcgccggttgccagcatgaggagcgcacagaagctcggccgcgacgcggcaggtggtcgcgcctcggcgccgacatcatcgatgggcgggttcgcgtactcctcccccgatgagctcgacgtcgtgcgttgcatgcgtcatcga

SEQ ID NO: 174179 - DNA, 610 bp, Zea mays
  unsure (1)..(610): unsure at all n locations
  Clone ID: MRT4577_90430C.1
agcagtggtaacaacgcagaggactttnttttttttttttttgtttttttgggnngttttttttttttttttttttttttttttttttttttttttttnntttttttttttggagggnnncnggggnttttccccccctttttttttttgtttccaaagtacaaattcgaattgttaaaagccttttttttgaagcaaagccaagaaattaaagggggcagaccctttggggggggaagggttcctttgtaaaataggggccacgtcttttttttttttggccttaaagaagggggctgaacttttaagctttttttttaataccggagtttttacacgggtgcttggaggcacccccacgcaggggttttttattttcaaaaactttttttttgaaacacgggggcggaaaaaaaatttgaggggttggaaattgcaagtcccaaaaagagccattttttgttattgggggtttttaccttttggccccccttatgtacaaaagcaccagtggttgggcctcaccctcagtaaaaaccaggagacaggggcttgtctttgaagttcccggggtcctttgggttgttaccatggtttaggggcaaatttt

SEQ ID NO: 174180 - DNA, 312 bp, Zea mays
  Clone ID: MRT4577_90431C.1
tacgcaccttttgatccacacgagaattctgttcgctttgagctcatcttacgacacctgcggtatggtttaactgatgtgccgacacatccaaactctccacctaacaatgtcttccgacccgatctgcccagctaagactgtccttcgacccaaaaggacgggcgatgccccgctttcgacccacggaataagtcaaataacgtttaaagtactggtatttcacttgcaccccgatgctaccacttatcctacacctgtcaagtcatttcacaaagtctgactatagtcaagcttaacagggtcttcttt

SEQ ID NO: 174181 - DNA, 268 bp, Zea mays
  Clone ID: MRT4577_90432C.1
attcggctcgagctactttccccccccctttattcacctcacccaccccacaacggcaggggggccctgattaaactgtggggcgggctactccaacaactccatgctctacactatcgacaacatgaactacaaggccctccacggacataacctgaccgttaaccaggcccacagcccttgacagtggccgaggctcaagacgctacccaagccgacgccaaggccactacgctatatgggcgcattcaccgcaacaaaatttatg

SEQ ID NO: 174182 - DNA, 275 bp, Zea mays
  unsure (1)..(275): unsure at all n locations
  Clone ID: MRT4577_90433C.1
cggaactgttagngtgttcagagctctgtcatggtgcttgccacgctgtgtagtgatgctgacagttgacgaggtagatgaactgatggctggtcagtgaagactccaatggctgcatcaactatgaagcatttgtgaagcacatcatggccagctgagcctctcaggaagcgcagggcaggctaagctggggacatgccatctctcaaccataatgctgacacgatgtctggagcttcgtgaaggataggagtgtccagactcgagcacatggt

SEQ ID NO: 174183 - DNA, 1314 bp, Zea mays
  Clone ID: MRT4577_90434C.1
gggtaccctcgttgtcggccggggcaaaacccccaaaccccgcaggcatcctctcttcctctcctctccaatctccattgcagcagcactgcagcggcgggtgcgggtggcatggctatggcgtccgcgctgccgctcctcctcgcgccgcgcgccgtctttgcgtccgcggggccgtcttcgcctcatctccgctcccgccgcctcgcgctgcgtctccctccccctccccgacccgccgccctctccgcgccaccagccgccgtgcagccgcgcgaggcccggcgcgtccagcctccccgcgccgcctcctgctgccaagatcccgctccggccgcgggaggaggcgccagggactggcggatgttcttagcatggtacctgatggctctggacaagaacccgattgtgactaaggcggtcacttccgctgccctaactctggccggggacctcatctgtcagcttgttatcgatcgagttccagaacttgatttgaggagaacatttgtattcacatttttgggccttgcccttgtggggccaactttacatgtctggtacttgtatttgagcaaattagtgacaatcagtggggcatcaggtgccattgctcgccttatacttgatcagttcattttctctcccattttcattggcgtctttatgagcttactagtcaccttggagggaaagccctctcttgtggtgccaaagcttaagcaggaatggttatcatcagtgttggcgaattggcaattatggataccatttcagtttttgaatttttacttcgttcctcagaagtttcaggtccttggtgctaattttgtagcccttgcatggaatgtgattttatcatttaaagctcacaaggaagttatcgcgaaataggtatgaaggagcgcagtgaactcccccggtcggtccaggatagggataggatagtggcagctgaagctgtagggcttgtaaattgtcgccatgtgggactggagtggatcattctgatcagtagtcaacacaacactgaatggatgattgtgatggacatgcctgtgtgatctcttttgtgcatgctacaccaatacgtgtttggccagcatgtatgcctggacatgtgtgttactatttgtgctgtgatgggttgttcgagatctaggaaacacattgggttgttgataaaaaaaggccaaatgtggaagcgtctattttttttaagaaactggtttatagaaattgtggtggttctaaacataatagtttataactcagttcacttaaactactaaactttagtcacttttgtttcag

SEQ ID NO: 174184 - DNA, 477 bp, Zea mays
  Clone ID: MRT4577_90435C.1
tcatgcttccgcccacgcgaccgcccacttttttttgttttaaatgttaaatgtgacatatgattatctagatctaatggattatacaaatgtagattattcacaaagacaacagtacttgtttgttgtttatttaagataaggaaagaaagatgctatttattgtaatttctattttgctaactatagatagtgagtcttttgtcaaagataatctcaaataagctacttttgataagattcgtgagattatcataatataggctttagattatatattatgaatccataatctaggtatttgtttaactgctaaattatttacgctggattatataatctggaatataatctggagagattataatccgaaacaaaaggtcttagtttatagaaactggattcttagttttctaaaaaaaatagaaacttacaagctggccttttctacaaaaaagataagtcagtttctttaaa

SEQ ID NO: 174185 - DNA, 162 bp, Zea mays
  Clone ID: MRT4577_90436C.1
atcccattatttttttttttgtgtgtaaatgagaaccttaaccactcgttttcccagctttcaaacaactccactacaaacaccaattttcctaaacctaaaccaatctacctaacatttattctacttgggaacacctgctcctcacaaaaccctaacact

SEQ ID NO: 174186 - DNA, 441 bp, Zea mays
  unsure (1)..(441): unsure at all n locations
  Clone ID: MRT4577_90437C.1
cccacgcgtccgcccacgcgtccgcccacgcgtgcgaggatttccgcagcattatatctcaatgcaacatgttgcaggagcatgagaagtgaggatgacgagtgttgctggtctgcagatgcttgtactctagttttgcatggcctaacctgtgacattgcatcaacattgttggaatgaggggcggacataaagccattgcacataacctttgtaaaaaaaaaaaaaaaaaaaaaaaaaaaaaaaaaaaaaaaaaaaaaaaaaaaaaaaaaaaaaaaaaaaaaaaaaaaaaaaaaaaaaaaannnnaaaaaaaaaaaaaaaaaaannnnaaaanaaaaaaaaaaaaaaaaaaaaaaaanaaannannnaagggggggnnnnttaaaaaaggaaaaaaaaaaaaaaggggggggggaaaaaaaaaaatttttttgtggggg

SEQ ID NO: 174187 - DNA, 586 bp, Zea mays
  Clone ID: MRT4577_90438C.1
gcgagtacacgcttttttttttttttttgttttcattttattagtgtggtttccccttttggttgcagcaactgtctggactataaaacatccatatcgctgccagtatgtcaactggatgaaggaacaggtaatggatggccccaccgactcacaaatggaggcgcgtatgcgcgaaatacagcaggctcatgcgcctgcatgagggcacgcacgtatgtagagtcgaccaaataactgataggctattgatgaaagcgcacccatgagtgatgccacaacatggctggcaccaacgaagacgccgagtatgatgcctgaaacaaagacgcctaacatcatgtccccgataaagaggtccaagtatgatgccaccgatgataaggccgagactgaaggcatccatgatactgccaagaaagataacagtgccacaatgcatactctgattgcatctctgcacattatacaacatcaacagggacaattcatgcacactccccacaaacatggagaggctcacccacgtgttcacaggcgacctttgttagggctacattctagacataagcataaatgttgtacc

SEQ ID NO: 174188 - DNA, 297 bp, Zea mays
  Clone ID: MRT4577_90439C.1
gtgcccggtaattcccagggtacgcccccatcgcgtccgcgcgatcaagggactgccacggatcccgccgtcagctgaccatgaccgcgcggctgaactcgctgcacgccatcgtgggacggaggcgtgaggaggaggagcgatacggggtacccccgggcacgacctcctagctctgtctggtctacaggaccgcatggccgtcggccggggccgtatgtgaaagtctatctcgttcaagaacccggcctgtctcctacgccgacatataaattcattcctgccttatctacagcc

SEQ ID NO: 174189 - DNA, 148 bp, Zea mays
  Clone ID: MRT4577_9043C.1
gcgatgatctgctccacgccttctttctgcacctcggccatcacgtttgactaattgctcggggcacgcggtggttccacgcgcgtcctacggggacacctcctccagcgactctttcggccccaacgacaccgttgtgtgcaacctt

SEQ ID NO: 174190 - DNA, 563 bp, Zea mays
  Clone ID: MRT4577_90440C.1
tcgagcaacatatgaaagcacaaaagtgtaccaacataggcaggtaaaatctcatagcctacttatgctacttgatctttgtgctagtgctgatacgaaaaccataagaggcacaccgccaacaagctgctatagctagaatgcttgctgggtacgtctaaccaagggggttgaatggcatgagaaagcgcaatttttcagacgtacacagatccaacacgcaatgtgctgtgagatcggaccaacatgagctggtactaagcatcatgatcactacactggatgtacttatggtgcatgtattggctcataacattaagccacagcatctactgcagctagtgctagcaaacctagatgcctactctgagcagcagcagatacttgcatgcaaccaactagctgcattgaactatgctagtcatttgcaacagcaacaactaccatgcaggcagctatctgctgcctacccagagcagtatctggcatgcaaccaactgacagcatagaactctcctgcttatgtacagcagcaacaactactaccatgcagacagctagct

SEQ ID NO: 174191 - DNA, 384 bp, Zea mays
  Clone ID: MRT4577_90441C.1
attaggctcagcatggtcatatgcatttggtgtaccatagccttactagaggtagtatgcgtagttgtttactcaaaaggagcatgatgaaagcatctacaccttaatttgattttgatagctaaagataacataattattatgactaagggtgttttatagaaacactattataatgtctgcgcattgcgatgtacatcaatcacatttgatgctatagtgcaatagttatacgacattcgagggagctgtgtcaagttagtgtgatggatgctccccataaaaaaattaaaattaaattagatcctatcataaaaaataaaattaaaattaaagtggacatatttcccacatactgtatattaatttgtagataccacactt

SEQ ID NO: 174192 - DNA, 1637 bp, Zea mays
  unsure (1)..(1637): unsure at all n locations
  Clone ID: MRT4577_90442C.1
aattcggcaaattcggcacgagggacagagaggacaggggaggtcagactcagaaacgctcgctcacgacggcagcagccatggcagcatcgtgcggcggccgcgtggtggtcttcccgttcccgttccagggccacttcaacccggtgatgcgcctggcccgcgcgctgcacgcccggggcgtcgggatcaccgtgttccacaccgccggcgcgcgggcgccggacccggccgactaccccgccgactaccgcttcgtgcccgtgcccgtggaggtggccccggagctgatggcgtccgaggacatcgccgccatcgtcacggcgctcaacgccgcctgcgaggcgcccttccgggaccgcctctcggcgctgctctccgccgccgacggcgaggcgggggaggcggggggccgcgtccgctgcgtcctcaccgacgtcagctgggacgccgtgctgtcggcggcccgcggcctcggcgtgcccgcgctcggcgtcatgacggccagcgccgccacgttccgcgtctacatggcgtaccgcaccttggtcgacaagggatacctgccggtgagagaggagcgcaaggacgacgcggtcgccgagctacccccgtaccgcgtgaaggacctgctgcggcacgagacgtgcgacctggaggagttcgcggacctgctgggccgcgtggtccggcggcgaggccggccgggccgggtcattgtccgtccgcttctctctccccatctccatctgcaatcctcgctcgcccacgctcggcagccatggcgtcgtcgcgcaccggagccggagccggagccggagccggcggccgtgtggtggtcttcccgttcccgttccagggccacttcaacccggtgatgcggctggcccgcgcgctgcacgcccggggcctcgcgattaccgtcttccacagcggcgccctggacccggccgactaccccgccgactaccgcttcgtgcccgtgaccgtggaggcggacccgaagctgctggcgtccgaggacatcgccgccatcgtcacctgggcgccgcaggaggaggtgctcgcgcacccggccgtcggcggcttcctcacccacaacggctggaactccaccgtcgaggccatctcggagggcgtgcccatggtctgctgcccgcggcacggggaccagttcggcaacatgaggtacgtgtgcgacgtgtggaaggtaggcacggagctcgtgggggaacagctggagagaggccaggtcaaggccgccatcgacaggctctttggcaccaaggaaggggaggagatcaaggagaggatgaaggaattcaagatcgctgcggccaaaggcatcggcatcggcgtcgacgtcgacgaaactgcgtcgccccgcacggatttaaccgatttggttgatctcataaaatccttctgagctcatgacgatcgatctgttgggtgatgcctactctgtccatcgtgatgtaccactgtctgtgctcacttccacgttcctgacggtgttgtgttctagtgtatcattgtgcgatcagttccatgttcttggccatgttttagaataaaacagaaaacttgtgttaaaaaaaaaaaaaaagggcggccgcccgcgtnctagaactagt

SEQ ID NO: 174193 - DNA, 639 bp, Zea mays
  Clone ID: MRT4577_90443C.1
cgagggcatcgccgccatcgtcaccacgctcgaagccagctgcgatgcccccttcaggcccgcctctcggcgctgctggccgccgaggggagggacagcgtccggtgcgtcttcaccgacgtcagctggaacgccgtgctgacggcgtccagcgacctcggcgtgcccgcgctcggcatgatgacggccagcgccgcctcgttacgcgactacatggcgtaccgcaccttgatcgacaagggctacctgccggtgaaagaggagatcaaggagaggatgaaggaattcaagatcgctgcggccaaaggcatcggcatcggcgtcgacgtcgacgaaactacgtcaccccgcacggatttaaccgatttggttgatctcataaaatccttctgagctcatgacgatcgatctgtgttgggtgatgcctactctgtccatcgtgctcgacttgtcttcctactactgtaccactgtctgtgctcacttccacgttcctgacggtgttgtgttctagtgtatcattgtgcgatcagttccatgttcttggccatgttttagaataaaacagaaaacttgtgttcttggtgtaccattgtgctcactttcatgttcttgacggcgagttggaataaaacaaga

SEQ ID NO: 174194 - DNA, 475 bp, Zea mays
  Clone ID: MRT4577_90444C.1
ccattacataaaaccagtgcaagcagaagcagcgcaatgacgagcagcaccatggccctcttctccacagagcttgctcggcaaggcagtgaacgtgccgccatctgtcttcacaaaggcccgcgtgacgatgcgcaagacggctgctaaggcaaagccggcggcgagctccggcagcgccgaatacggccccgaccgcgtgctgtaccatatcgcctgagaatgatgcgccacgctgctgcctacatggcactgccttaacttatctgcggatgcacacacaagctcatgaagaacaatccgtttcatatcgccgagaaccaggggcctgttggccatggctgatactgctacaaatatctgggcgcatatagcttatgagccttgaagcttcattgaaagttatggcccttatcctttatatgccgttgcctgacatttttctatgcagttcatggtgtaattaatagctgct

SEQ ID NO: 174195 - DNA, 2541 bp, Zea mays
  Clone ID: MRT4577_90445C.1
tccgcttctctctccccatcttcatgtgccatccctccatctgcaatcctcgcccgctctctccccatctccatctgccatcctcgctcgcccgccctcgccggccatggcgacgtcgcgcaccggagccggagccggcggccgtgtggcgttcttcccgttccgattccagggccacttcatcccggtggtgcgcccggcccgcgcgctgcacgcccggggcctcgcgattcccgtcttccacagcggcgccctggagccgggcgactaacccgccgactaccgcttcgtgcccgtgaccgtggcggcggacccgagagttgtggcgtccgcgcgacatgcggccggcctcaccaccctgaacggcagctgcgacgcccccttcagggcccgcctctcggcgcctgtgttcgacgacgggatggacagcgttagaggcctctctcttatggtgccataaacctgctgacggcggcatgggacgcgccgtgctgccggcgtccagcgacctcggcgtgcccgcgctcggcatgatgacggccagcgccgcctcgttacgcgactacatggcgtaccgcaccttgaccgacaaaggctacctccccctgatcgaggagggggagggcgctcgggcacccgagctccccccgctccgcccgtaacgcctgcaccgggtcgtgcggcccgagccgtgcgacctggaggactccgcggacctcctgcgccgcggggctggggcccgcgggccggccggccgggagcactgtccgtccgcttctctctccccatctccatctgcaatcctcgctcgcccacgctcggcagccatggcgtcgtcgcgcaccggagccggagccggagccggcggccgtgtggtggtcttcccgttcccgttccagggccacttcaacccggtgatgcggctggcccgcgcgctgcacgcccggggcctcgcgattaccgtcttccacagcggcgccctggacccggccgactaccccgccgactaccgcttcgtgcccgtgaccgtggaggcggacccgaagctgctggcgtccgaggacatcgccgccatcgtcaccacgctgaacgccagctgcgacgcccccttcagggcccgcctctcggcgctgctggccgccgaggggagggacagcgtccggtgcgtcttcaccgacgtcagctggaacgccgtgctgacggcgtccagcgacctcggcgtgcccgcgctcggcatgatgacggccagcgccgcctcgttacgcgactacatggcgtaccgcaccttgatcgacaagggctacctgccggtgaaagaggagcgcaaggaggatcccgtacccgagctacccccgtaccgcgtcaaagacctgctccgggtcgacacgtccgacctggaggagttcgccgaactgctggcccgcaccgtcaccgcggcgcggcgcgcctcggggctcatcttcaacaccttcccgctgatcgagacagacacgctggccgagatccacaaggccttgtcggtgccggtgttcgccgtcgccccgctcaacaagctggtgccgacggccacggccagcctgcacggggtggtccaggcggaccggggctgcctgcagtggctggacacgcagcagccgggctccgtgctgtacgtcagcttcgggagcatggccgccatggacccgcacgagttcgtggagctcgcgtgggggctcgccgacagcaagcgccccttcgtgtgggtggtcaggcccaatctcatccgcggcttcgagtccggcgcgctgcccgacggggtggaggacgaggtgcgcggccgtggcatcgtcgtcacctgggcgccgcaggaggaggtgctcgcgcacccggccgtcggcggcttcctcacccacaacggctggaactccaccgtcgaggccatctcggagggcgtgcccatggtctgctgcccgcggcacggggaccagttcggcaacatgaggtacgtgtgcgacgtgtggaaggtgggcacggagctcgtgggggaacagctggagagaggccaggtcaaggccgccatcgacaggctctttggcaccaaggaaggggaggagatcaaggagaggatgaaggaattcaagatcgctgcggccaaaggcatcggcatcggcgtcgacgtcgacgaaactgcgtcgccccgcacggatttaaccgatttggttgatctcataaaatccttctgagctcatgacgatcgatctgtgttgggtgatgcctactctgtccatcgtgctcgacttgtcttcctactactgtaccactgtctgtgctcacttccccgttcctgacggtgttgtgttctagtgtatcattgtgcgatcagttccatgttcttggccatgttttagaataaaacagaaaacttgtgttcttggtgtaccattgtgctcactttcatgttcttgacggcgagttggaataaaacaagacttgtgtcatggtgtaccattgccatcattttcatgttaatataaagatttgacgcccccccccccccccccc

SEQ ID NO: 174196 - DNA, 147 bp, Zea mays
  Clone ID: MRT4577_90446C.1
ggggggaaaaacactaatttatagaagggggaagggcctttaataaaaatacccggacactgaaaactaaatttttttttacaggaacatgaaagctaaaagaccaaaagcttacaaaactcgaaagggttggggaacttatggttt

SEQ ID NO: 174197 - DNA, 362 bp, Zea mays
  Clone ID: MRT4577_90447C.1
agggggggggcctgacccaaacaacttttttacttacagtagctgaaaaataatggggcattatgtaagttgaaaaggaaatctcaacttattttttaattctacaggggcaaatgggcaattgggtaaaactcctaacgaatacacgtcaatgttacccttttttggactttaaataaacccaacccacctaaatgcaccaacactttgcaacagtcaggttttaactggggctagcggtattaactgggggtggggtacaggggactcaaacattggcacctgcaacattcaggttccagcaccgctttgacatgaacagcagcaaatggtgcacaaccctgcttgttcaagggagtttg

SEQ ID NO: 174198 - DNA, 404 bp, Zea mays
  Clone ID: MRT4577_90448C.1
ccttcgacgagggccgcatcaccatgcgcaagaccttggacaatcccaaattggcgctgtggggaagctcctgggacggcctcgaccgtgtcacgtacctaaacacatacttttgcagctagcgaactacatacctgcaattgtgccaacaacatcaggtaatacaccgcctgccttctcgcccatctaaatacattctgcaagaactagacgctttaccttattcaatgccgttcagccatgcttgtctcgctcttctgcttctgttccaacctgatgttatgaaacgccgttaaattctaccataccgactacttcaagtctcatctgctagactttaacttatatctgcactgtactactcattaatcgcctagcttgattatgcccagagcatatacctc

SEQ ID NO: 174199 - DNA, 540 bp, Zea mays
  Clone ID: MRT4577_90449C.1
atggggcacctgttccgatccccgaggcatctgttctgggccctaaggaaccctcttatgttagcccctagggtaccttgtgcgctgtcccacgacccctatggtatctctttcgaccctcatggtacctcatatgctaggccccgaggcacctccaacgctggcctcaacgccctaggccctagggcatctgttctagctctaggggcacattgtgtgttggtccctggtgccttggccatcgaggcatctgttctagccttgggggcacctcctcttttgggccttaatgcaactcttctgacccttagggcacctaggcttcagggacttcacaatgtgacatggactagcaatcattcgacaaggagaaaatgtggagttccttgcaggcacacactgcatagcattgccacattccacattgtcctccgtaagagcatctccaatggtcgttgttgcatttcttgtgccaagccccggcgccccagtccttggggcatctattttggcccctttgcacttcttgtgtcagcctaa

SEQ ID NO: 174200 - DNA, 281 bp, Zea mays
  Clone ID: MRT4577_9044C.1
ctgttttgatggggatgaatctgtaatccaggtgagctcccatggcggtggcgcggcggtggccgactgggtggtctgtcgcattttcaggagggccaggccagcccaccgcgcccgccttggtgacaggcaagaagaagaagaggaagaggaagaagagcagcacgcggcggtggagagcgcgtcgtccacgtcgtcgtgcgtcaccgacgcctccgggaccatcgggcaggacgacgatggcgacgaagggatcagtggcagcgcagcgtcgcctcctc

SEQ ID NO: 174201 - DNA, 749 bp, Zea mays
  Clone ID: MRT4577_90450C.1
gttgccatcaaggcactccaccctcccagtcgcgccaaggataatatgctgaaaaacggagacttcgaggagggtccgtacgtgttcccggacaccccgtggggcgtgctggtgccgccgatggacgaggacgacgtgtccccgctgccggggtggacggtcatgtccgacaccaaggccgtcaagtacctcgacgcggcgcacttcgccgtgccgcgcggctcgcgcgccgtggcagctggtggccggcacggaggccgcgctggtgcaggaggtgcggacgacgcccgggcggtcctacacgctgtccttctccgccggggacgcggccgacgggtgcgcgggcgccctgctcgtggacgcctacgcggcgcggggcaggctgccggtctcgtacgagtcccgcggcacgggcgggttcgtgcgcaacgagctggagttcgccgcggtggcgaacctcacccgcgtcgtcttccagagcatgggccactacatgaagcccgacgggacgctctgcgggccggtcgtcgacgatgtctccctagtcgccgtgcacaaacacgctgcccgccggttgttcatgtagtccgtttccccgcgtgcagtgtcagtacaaccatgtaccagctttgacccgagaaactaacaagccccgaaccacagaacttttcattgttctttttttttgttttttactttcatcactagctgttcaatagtgcaagtaagcaccaaagggattcaaggtg

SEQ ID NO: 174202 - DNA, 858 bp, Zea mays
  Clone ID: MRT4577_90451C.1
taccggttgggaaatactgggtgggaccaacgcatcgggcccaaggcgcttcaagaatggatcccatctatggccactggcgctgcagaagagagaagaaggacggtgccctcttgagcccggtgagatcgctgtgatcctgcgggcactggggtacacgagcggcacacagatatacgtcgcgtccgggcaagtgtacggcggcaagaaccggatggctcccctcaggaacatgttccccaacctggtgacgaaggaggagctagcgagcgcggaggagctggcgccgttccggcggcacgtgacgagcctggcggcgctggacttcctggtgtgcctgcggtcggacgcgttcgtgatgacgcacggcggcaacttcgccaaactcatcatcggggcgcgccgctacgcggggcaccgcctcaagtcggtgaagcccgacaagggcctcatgtccaagtccctgggcgaccccgacatgggctgggcctccttcacggaggacgtcgtcgtcacgcaccgcacgaggacgggcctccccgagcccaccttccccggctacgatctctgggagaacccgctgacaccctgcatgtgcagggcatgagacgggccatccctcagatcagagtggccgtctggccgagtcctcgtcttcgctaggctacgactacgagtagtttcgtgctcccttccatcagcgggcatttcagcgagcatatgcttttactagttaaacccctagatttgtatgtatttggctggcctaatctgtagtttcccatagatcccttcatgctgaaaatgtcttggacaaggcagtgaatgaagataacatcagtaacgccccgcttttcc

SEQ ID NO: 174203 - DNA, 309 bp, Zea mays
  Clone ID: MRT4577_90452C.1
ctcataatgttcctccaacaaatggtgaactttcaagccccaacaagcagagcccaaagaggagcccatcttgttcacgctcttctgatgccaagcctgaataaaattgctattctgttaaacgattgcatatggagtcaagagctcttcttttcttaacatttgtactctgctctactaccatcatagtctcatcgcagtacgagattgcatgatattaactatctgcatcagcttgtatcgatggactccaaatgttgcatctctcgttgactagagcactgaacgacccatttactttagctaaac

SEQ ID NO: 174204 - DNA, 847 bp, Zea mays
  Clone ID: MRT4577_90453C.1
aattcggcacgaggcacattgataacctccgccgccgccgacgtcgatgcccaggctctccctcaccgtcactgacgccgccgctgccatgccctttgcgctccggcttggtggttccccagcgctccgcccgggcccgcggtccccgtcgtggctgcgctttggcggcatggccggggcgcggagggcgctgttctgctccgccgaggacgccaggcggtgtggctcggacgactacgcggaggcggaggagggtcggaggggaggcgggagccgcgtgccatcggagaggaggataaggggcgggaatgcggccgccgcggtggggacgagcgtcgagctactggggattcctggtgtggggccgcgcaaccttaggaagctcgtggacaatggcttcgagggcgtcgcgcagctcaagcagctctacagggacaagttctttggcaagtctagtgggcagatggtggaattcttacagtgttctgttggcattgtacataagaatcatgctgagagtataacctcattcattaaagagagtattgatgaggagctgaaagatacagattcatctaaacccactcagaagaagaggctaaccttttgtgtggaagggaatatcagcgttgggaaaaccactttcctccaaagaatagctaatgagacaattgaactgcgtgatcttgtagagatagttcctgagcctattgataagtggcaagatgttggccctgatcacttcaatatattggatgccttctacgctgagccacataggtatgcatacacttttcaaaactatgtgtttgtgacgagagtcatgcaagaaagggaatctcaagct

SEQ ID NO: 174205 - DNA, 431 bp, Zea mays
  unsure (1)..(431): unsure at all n locations
  Clone ID: MRT4577_90454C.1
ttcggccgggcgcaaaggcctacgggaccaatggcgcaaaacgaggagctcgtcggctctgctggggagaaactcaaggtgatcancanccctcttcatgctgatgctaccgggagatctgctccttcgttagaagcagctgcgtggaacggggcctccatctcttcnacccanagaancctgggtgagattcgggttgcccacaatgacgatgcgacgaacctcgaaatcttctatgacttgtgcttgggtgcgcggtgcgactctctttcacttctgactcgaacaatgggggagagacatcaagactaacaacctccggccccgagggaaggcgtcaacctcttcaggcaaaaccagcggctcaccacatggagggggctttccggctattgtggggtcttcggcatcatcgtggcaacatgggtcat

SEQ ID NO: 174206 - DNA, 118 bp, Zea mays
  Clone ID: MRT4577_90455C.1
tgaataattgaacttgtacgcaattcaacaagaggggacgttttctagagggtagaaggctatacacaccgcacaatagatccaaggaatgaaccctgagaagctcaccgtttgattt

SEQ ID NO: 174207 - DNA, 1985 bp, Zea mays
  Clone ID: MRT4577_90456C.1
gccggccgggcctccatatcctacaacacttcccgcaacagttgcatacgccgtgcccatctatctatagctagcactaggagtggtgcacactgaaatggacagcgccagcagcctcgtggacgacaccagcagcggctgcggaggcggcgcgtccacggacaagctaagggctttgggcgtcttcgccgacgactcggtgacgccgctggagcgcatgggcagcggcgccagcgcggtcgtgaacgcgcccgaggcgggcgccgaggcggactccggctccggtgccgccgtggtgagcgtcgacgggaagctgccgtcgtccagggacaagggcgtggtgacgcaggccaacgggcggtggggcgcgcagatctacgagcgccaccagcgcgtgcggctcggcaccttcgcgctcgaggccgacgcggtgcgcgccctcgacgccggccgggccgggtacgcgacacacacacaccatcactgcgctgcgctactctactccccaccaccgccgccacccaagagctttcctcgctgcacaagaaatggccacgaaccatctctcccaagggcagcacccgcaggcctggccctggggcgtggccatgtacaccaacctacactaccaccaccagcagcaccaccactacgagaaggagcacctgttcgagaagccgctgacgccgagcgacgtgggcaagctcaacaggctggtgatccccaagcagcacgccgagaggtacttccctctcagcagcagcggcgccggcgacaaaggcctcatcctgtgcttcgaggacgacgacgacgaggaggctgccgccgccaacaagccgtggcggttccgctactcgtactggaccagcagccagagctacgtgctcaccaagggctggagccgctacgtcaaggagaagcagcttgacgccggcgacgtcgtgcgcttccagaggatgcgtggtttcggcatgcccgaccgcctgttcatcagccacagccgccgcggcgagactactgctactgctgcaacaacagtgccccccgctgctgctgccgtgcgcgtagtagtggcacctgcacagagcgctggctcagaccacgcagcagcagcagccgtcgccttggagcccaatgtgctacagcacatcgggctcgtactcgtacccccaccagcagcccagccaattcccagcatgcctaccaccgccactcagctgaccatgaccacagcaacaacatgcaacatgcaggagaatctcagtccgacagagacaacaggagctgcagtgcagcttcggcaccgccgccaccgtcgcggcggctccggctgttcggcgtaaacctgactgcggcccggggccggagccggagacaccaacggcgatgtacggctacatgcaccaaagcccctacgcttacaacaactggggcagtccataccagcatgacgaggagatttaagattatgcctgcagaatccaaacagccaaagtagtagcagtagtagttgctagcagcagcagcagccgcctagtactacttgcacacgaagtgacaggattgaattgacctgtacacggggagaaaaaaaaaggaaggaaggaagtggagagagatcccttgtttcccgggcaatcttccttccaagttccatccccgcccccagaagaatgctgctgcctttttgctgttccgtttttttttttttaatttttattttcttctccatggcttccagaaaaccctacttactgtaggggatctggtagcagggggccgggcatgcgtgggaggtttgcaggaagcatcaagctgccaaggagctggaacgagagacaacagacagagagagatgtgtgtgtatgtatgtgtgtgtcatctgtacctatatgtcttaatttgtgggtccgatagagaacaaactgtgaagttgatgtgtgtgcctgcctgcctcctgaagaaacaatgcaatatccccatgg

SEQ ID NO: 174208 - DNA, 325 bp, Zea mays
  Clone ID: MRT4577_90457C.1
cctcgaggccggccgggccgggaactacattacatatcgttaacctccgcgcctttttcatctaactggtattcccgctgctatcggctgcaaccaagccacatgtcgctatgtatcagtgtgaagcagcaccttgtttgaatcagaagggcgaccacgaagtgtatgagatctaaccagcgtcggcatgttacctcctgagatatcgttttaatcgaagataacaacggctctgctgacgattctgcttatctccctcaaaggtgggaaatctgggccttgcccacttgcgcttatgttgcttaggtatgatcaagcgtgcaac

SEQ ID NO: 174209 - DNA, 358 bp, Zea mays
  Clone ID: MRT4577_90459C.1
aaaaaaaataataaaaaaaaaaaaataatatatccgggggccctctcgtagtggcaagaatgggacgccctggttcctgcgggctgatgtgacttttatggggccaaacttaataactgtagcggcctgagttgtacatggtgccacatgaaacaaacgagctgctccccatattaaggtggtggaacaacatcaccttctaggcaggtgtggtagtattgaggatgctcatgagctgcaaccataacagcagtttcaccatcttgatctatactacgacgcgctaatgtaaaatgatcataaacgaactgttgttatgttggtttgcttattcgaggcctttcttgttggaaggttt

SEQ ID NO: 174210 - DNA, 227 bp, Zea mays
  Clone ID: MRT4577_9045C.1
ggaaaaaaccgggcggtacccagaggtaacatttttccacacacaaacggtttaaaagggttcatgttttttgaacctatcaatgggggatgctacatttttgccggccaattttacgacgggtttaccaaactttaaaaagcatttgccacattgcagatgcaggggcagttagacatttacaaacgtgcttggccaaggaacattgttaggctttaaccaggagt

SEQ ID NO: 174211 - DNA, 510 bp, Zea mays
  Clone ID: MRT4577_90460C.1
ggggccggcccgacgggcaccatgtgttagaccccaacaccatcttcgacgacagaagccgtaccctcttgaatggaggcaagctcactggctattaccttatctacaatatcctcgactgtgccttgaagatacagcccaggaccgcctcatcatgaatggtcgagctactaaggttgatagattgagctcgcctatgaacgagcggaagaacaggggcaagaacatccgtgctgtcaagaagaccaaggctggtgacgcccagaataagtaaacaggcatttatattcttgtattactgacctgaactctgggtggtcgggtaattgcaatgccatcattatggactgagtaacgcatttgttccgcactcaacaggaagagacgttttgatatttctggatgtgaacctacccggattggctgcagcatgatgtgagacgagaaggctattatgtcatgctactggccatttgcaagcctgattaataggtagggatgacaggattt

SEQ ID NO: 174212 - DNA, 453 bp, Zea mays
  unsure (1)..(453): unsure at all n locations
  Clone ID: MRT4577_90461C.1
cccacgcgtccgcacccttggtgctaggcaaatctttcttcaagatctttcgacattctaggtggcctttctcgtcttatggtacccccattatgttattactttatggatccttcagagaggtgttcattgcgatgaatcgactttgtcgacctcatgtatagcttatctatacagatatatctttgttgtttatcttgaatgtgtgcaacgtagatgatcaatctcgggctactttgtttttagatttaacatcaatgcactttatatcagcttggttgttgaagaaagaaaacagatgatggtgaaaaggataatctaactaatccaagtaatccaatgcacatcatgaagctnttggttgtttaactttttggcaaaatttcattgatgctagagaagaaggcatcggcctgagcttctactgacctagtgtatggtctattaattata

SEQ ID NO: 174213 - DNA, 306 bp, Zea mays
  Clone ID: MRT4577_90462C.1
acgcgtttgactagattatgatgtaccagctcaggagccgagcctggggagggcagccaagcccatgccggcgctatcccggagttttctccctccgcaccggggcttcggcgatggcgggcgtcggatccatgctgcgtgggctgtacctctgcatatacagcggggtcgtgttcttaggatgggcgcaggtgctcaactacagagtcctgacgctgcgtttgagcggccacaaggccggctatcccggcggcgagagggacgtgcagtatgcgcagacagtcgtcatcatggagatcgatcatg

SEQ ID NO: 174214 - DNA, 793 bp, Zea mays
  Clone ID: MRT4577_90463C.1
ggccagcgacaaacaaaaagaacgggggaatccattctttctcgacctacagggagtttagtttcgaggatagcgtattcgtccgaagtcgtattagttggcattgtcactggaacagtttccttgatatcatctgtgggctctccattggtttggtccggcatcttaggtttcgcaggatcacttcacttaacttatttcatttcgagaaagagaacgattcttcttcgatctagaaagaacgattcttcttcgaagcatgaaccaacccgcacctgccctcaaagcagatacgaatcacggaaactttgcctcttctgaagcgcagaaccagaaaacccacggcctgctgcttgattagaaaaaggagatccacggcctgtgagtaactacgccatgttacgaatcacagcctgacttcctctagatgaaagcataggtagtgacgacctattgttttcttctcagcggacccaatgagtaactacgccatgttacgaataaaagcgagggaaaatcggatgagcaacttttgcagctatatgaaatgcactttggaaaatcaggtcttgaggacgaaaaacacgataaaatggacttgcctacttttgcaccgaagaaactcataagtaatccaatttccgaggacacgaacggaagtaagctgtttttggtatttgtatcggaattagccagaagaagaaaccattttcactgcccttcattctttggcctgcctgccttagtggcccctctctgataaggttttcaaaacgaaaaaaaaaaaaaaaaa

SEQ ID NO: 174215 - DNA, 265 bp, Zea mays
  Clone ID: MRT4577_90464C.1
ccacctttctataaaatttttccgggagaaccgggcaaaccgtttgcgggtacaatcccaaacaatataaaggcaatttctcttatcacagggaaaacctttggctacttggaattccaagcctcgaagcccactaacacttctcccaaaaatataacgtggggcagctaaaaaaactatttccttttaaaaaaagggttcaagggccccaagttgcaaacctgccgcaataaccataccccccgggagaggaaccgcaaccaac

SEQ ID NO: 174216 - DNA, 444 bp, Zea mays
  unsure (1)..(444): unsure at all n locations
  Clone ID: MRT4577_90465C.1
acgccgagggacagcgagaagagccagacacagaccgcgcgcggagaagccgccggacccagcgnagcgggcgcgcgccccggcgcagaccnggcccaacacctggaccgcagagggcaccgccgtcgacaagggcggccccgtcctgggcgagcgatggggcatccgaaccacggggagcacccacataggggccgccatcaaggcgcccagcagcactgctaagaaccgcagcagtggcaccttctgcgaggctcgggcaaaccacggcgcaatggtggcaatcatcctccagacaaagaaggacagtgtgccaacagcgcaaaggtatgagccggagtccctgcgagctggcgatgcaagcttggcatgaggccctatcgtcggctatgcaaatcacgcgcgcgggggaatgcgtggggaaaatcggaagcagctgagcac

SEQ ID NO: 174217 - DNA, 1065 bp, Zea mays
  Clone ID: MRT4577_90466C.1
gggtccagcacgcgtccggaggcagcccttttttttttttttttttttttttgagtactgtcaaaactggtgtgatttataacagtaaagattacgagcagtgttttacggttctatctgcaaaaaaaaaaaaaattacagctagtctgtgctttacaactgctgcatcattgtcctcgccagctacccgttaccctcgccatcccaatcctaggccgcatcttcgccgtgcatgggttcggacggcgagctgacctccttcacccccgatctcttcttggccttctgtgcccagcccagcacgccctgctgcacatgctcgttgaagatctccttcttgtagtagctccccatctgggtaacaattgcataaagcggcagcgtgctgtagctgcagagaagctgaatgacgaccccgagaacgagcctgggcaccaggaaaccgatatggtccatgaagcaggactccaatccataggtcatcagtatccagaagaagaaggcgagctcgaacgcgttctggaagaggatgaagtggatgaggtgcaggatgatacgcggccgcccgaaccagaagatgctggtccgatggcgtcacgaccagatcgccctcgaccgccgtctgcttctcggctacgtcgtaggctagctgggctattacgtgctccagctttgtgccaacggctagcagaagaaccaggggaaggaaagctatccaaaagtacgcgtgcaaaccgttgacattgagcagcagaaatatcaccacgaagatccacaagtgccagcttgtaccaactattttcttaaaatcagactctaaaaccctcaccatgtatctgtggaaatcaaatttcaggtttccgcgacagtgagtcatgataaaaccaagacgcattgcggcgtagtctgatttagctaccgaaccataaaactgcttacgaaatgaatgcagccaacacaacgtcttggaatctgtgccaatacccttgtaacgttctctgataaatgaaacttgatgcataggtaacaccttcttgggtccattttctgcagcgatttactgac

SEQ ID NO: 174218 - DNA, 767 bp, Zea mays
  Clone ID: MRT4577_90467C.1
ctcgaggccggccgggatgttgccaggatgtgcaaagatacgcaaatggaagaagtgggaggaggaaattcagaaaatcgctgcggaaaatggacccaagaaggtgttacctatgcatcaagtttcatttatcagagaacgttacaagggtattggcacagattccaagacgttgtgttggctgcattcatttcgtaagcagttttatggttcggtagctaaatcagactacgccgcaatgcgtcttggttttatcatgactcactgtcgcgggaacctgaaatttgatttccacagatacatggtgagggttttagagtctgattttaagaaaatagttggtacaagctggcacttgtggatcttcgtggtgatatttctgctgctcaatgtcaacgcctcaacggtttgcacgcatacttttggatagctttccttcccctggttgtaagtgcagactctgaagtcctttatcgtctgaagttctgaacaaatccaattcagttctttcctcaaagtgcgggacactatatatgttactctcaacactggaaatcaaagatatgtgcttgagcgctgtgtaagcattgaggattactaggcgcttaagggcgtttaattacttgtttgcagcttctgctagccgttggcacaaagctggagcacgtaatagcacagctagcctacgacgtagccgagaagcagacggcgatcgagggcgatctggtcgtgacgccatcggaccagcacttctggttcgggcggcc

SEQ ID NO: 174219 - DNA, 355 bp, Zea mays
  unsure (1)..(355): unsure at all n locations
  Clone ID: MRT4577_90468C.1
atattggggtgggggtnaaaaacatcaaacatgtttaaatattatataatttaattccaaaagaaagtaccatagggtcaactaaaaaaagctacatttgagtacgacgtttcaaaaattaaaaagtgcatggatcattccaacatgaagctccaatcataagactagtttaatttgttaaggggagggtgagccgttgacatgaaactccaaccgcataagtggacaaagaacacatatattattcctatacatggagaagatgagaaaaaattatttttacaacataaaaatataatggccaaagaaaggagttaaggacttaaaattttacacaaaaattttgatataaaaa

SEQ ID NO: 174220 - DNA, 563 bp, Zea mays
  unsure (1)..(563): unsure at all n locations
  Clone ID: MRT4577_90469C.1
cgggncgacccagcgnncgctagcaacatagaaagcacaanagcgnaccaacaanggcagccaaaanannnngcnncccnangccccnaggacnaacagcaagagcagccaccgcaaccannnacccacaaagcncacaagcnccnanagccaccnaacnacccccaaaccacacaccagcggagacnacagnaggggaggacccaannccncaacccnacagganccaacaggcaancgcagcaggcancnnaccnaaaacacccnagagcccccaacaaccgacagcccaaagacagcaganaccngnggngcanagggaggcacaaaacagcaaggcacaacaaccacaacaacnagngccaggaaacccggccgcccacccacagcaacagcaggggccagcaagcaaccaaccggccgcaaagaaccccgcngacgaagagcaacaacaaccgaccagcagacagcaagcngcngcccacccccagcaaggggcgccagacaaccaaccggcagcaaagaacgcggccgccnaaggacaacagaaacaggaaccacca

SEQ ID NO: 174221 - DNA, 1182 bp, Zea mays
  unsure (1)..(1182): unsure at all n locations
  Clone ID: MRT4577_9046C.1
aaacggatgaactcaagcatcaaaaaggctacacataaatccaacctcatgaactagaatatcctaccgaatgattaacaccactcttagtactaagaaacaactcattattaagaagcatagaattttatagtatagtatttatcttaatttaaaggtttaaaacacttatatgcataaacactagatgcttctgattttatacaatcatgaactttgaggtaatcagacctaacccaaacattaggtaacaataactaaacacattaaacatgggacacatgttcactttaggttagctacttcaagacttcaccacaacgcatcacacncactcgggatctaacaangcagagtattattatatgatatagggttttacaaaactatttccgtaacaacccaagatttaaagcgcttatacgcactatccattgatagttcttaggtttttaccaaaacggacttatcgatgttattcgcttcctaattattttgggtaacaacaattatttatttatgacatttaatttattaataaacctagataatacatccgctactagggcaaggcatcactttcaccataccaataagaactctcactaataacactgatagtactatcaacaaacgctaaacttacttttcgcattactagttagcataatcatattgcatataaatctactaatattcttcgcataaatctgtatctaaaatctagatttcaacacctaacgcgaccacttcacaatcacctcactgcatgaaacgatgtgttagaaccacactaatatagtcacaagatcatcacgactaacacacctagccaagccattcatcaaaccagctaacaaaaataataaattagctcaccaaagctaaatccggattgaaaccattaaatcgacgacgctgtccggcttgcgtatatcactgatttgaccagcgtggcactagtgcttccctttcatctttcggcgtgatcgcaaggtgcaacaaggctgctgaaacgatgacgatgctgggatgcagatgttgatgtctcggatgtggacacgaccaaaacccgcacgaggacaagggaagccagaacgacaatggcgcggcgacctcgacactaagcacccgagcacgacgatgtcgcggcgcaacaggaaatagcccgacccggccggc

SEQ ID NO: 174222 - DNA, 387 bp, Zea mays
  Clone ID: MRT4577_90470C.1
cttccgtgcgagaccccatgctccagcgcgggggctgttgcggaggctggggcgaccatggttgaccgcaagaacaagaggatctccaagggaaagaagggtggggagaaaaagaccgtcttccctttctctaagaaggactgggatgacactattgcaccggtggtgttcattgggcgccacatgggcaagactctcgtattctggacacagggtaccaggattgtttttgaaggtctgatgcgcagagtctttgttgtttgactagctgttcttaagggccacgaggatcacgcttacaggaaaattaggcttcttgctgaatatgtacaggggaggagggtgcttacaatcttttggggcatgaattttaccactgttaaactc

SEQ ID NO: 174223 - DNA, 346 bp, Zea mays
  Clone ID: MRT4577_90471C.1
gccgtggtcgtcggtgctgaggtggtggctgccgctggtgaggctgccccttgcagaggtggttgcctccgctgccgggaccatcaaggccacctgccgctgagtccctgactctttggctttaatggcctcactgctccccctccgcaggaggatgggggcgaggccctattcgtagcagcgcttgccatgaggcgatcgctgctgctgtctagctgcccggggcggaggtcgttgtcgctgctaatgcagaggtggtcgccgccgctggtgaggcagcccggagcagcttctagcgcgactcttgttggtgcaacgtagtccattcctgcagagatggagctgg

SEQ ID NO: 174224 - DNA, 410 bp, Zea mays
  Clone ID: MRT4577_90472C.1
cttggctggacctttggtctgatttatgtgcttgttacttctcgttccgctgactacttactgattgttcttcgtctggtcctttatgtttggcgttcgtgccgtatattagggaggagtcttcttgattgattggttacgagtcattaggtcttcttcttgggtattctagttcatttgttgttgggtatggttcatttcttgttaggttagttgtaggtgcatttgttgttggtacatggtgtgttgttatttacggttgttggtgggcatttctttttgttgtagtaggatctcaagggtggtaatgatggtccttcgaaaggacgtccggttgtctctcgtcgtcgtcgtacgtctgatacgcgtcctcgagcctgctgctaggggtcctaggtatggggacggtg

SEQ ID NO: 174225 - DNA, 306 bp, Zea mays
  Clone ID: MRT4577_90473C.1
ggaagcgcaaatttttgtttttccggagacaacccggggggcacttgaccacgcctcaaggggaccaacccatgcaatgttctttacatgtgctcccctcaactatggtgctccccacttagatgtagatgctcaactgttggtttaacactatgccgtctgagctcttagaccaacccaaataagcgagcgcctacggtcagccagacgttctttgccgcacaacctgaatatttggttgtcacaatgaataacaggtgaagaatttcgaccagcttcattttttggaggcaaaagagaaagatc

SEQ ID NO: 174226 - DNA, 1407 bp, Zea mays
  Clone ID: MRT4577_90474C.1
cctccggccgggtgggccgggatggttacactgcctagaacgccctagggtttgctcttatcgatcacgaccagacagaccttcggctgccctgaaagagccgcatcactccgacggcccgcaccacccttctttaaccccgccacccagatccagccgcgccgcactccaccacggcccccacaactccaccgctagcagcagccaacagactcccgtcgggatggccgtggcgctcctcctcctgctggtgacgcccgtcgggctgctcgccgcgctcgcgctcctcacgcggccccgggccgcgcgggtcccgctcaaaggccgccacgtcttcatcacgggcgggtccagcggcatcgggctcgccatggccacggccgcggcgcgggagggcgcgcgggtctccatcctggcccgcaacctcgcccgcctcgaggacgcgcgcgccgccatccagcgcgactcgggcagggacgacgtcggcgtccacgcggccgacgtgcgggacgccggcgccgtcgcgcgcgcgctccaggaggccggccccgtcgacgtactcgtctgcaaccacggcgtgttcgtgccgcaggagctcgaggggcaggacgtggatgagatcaagtggatggtggacatcaacctcatgggcagcttccacctcatcaaggccgcgcttccggccatgaaggcgcgcacccgcgagacgcgcctccctggctccatcgccatcatgtcctcccaggccggccaggttggtatttatggttacactgcctactcagcgagcaagttcgctcttcgcggattgggtgaggcgttgcagcatgaggtcatcgcggacaacattcatgtctcgttgatattccctcctgacaccgagactccaggattggaagaggagcataagaggaggccggaattgacaaacatcatagcagggtcatccggtggaatgaaggccgacgatgttgccaagaaggctctggacggcatcaaatccgcaaaattcattgtcccctgtaatttcgagggcgcaatgttagccgtagccaccgctggtttatccccgcagagctccccgttaatggcattcctagaagtggttggcgctggactcatgcggtttgcggcaatttgtttccagtggaattggttctccaccatcgagagctattatgccaagaaaaagaagagcgagtgatagcacaaaccacagctggacattattttcctagatcccgtgagagtcaaaagaaacaaataagtcacgtctgacctaatgtaaatgtagcgtggtagtattagagaagttgaagctatcttctttttaatggtttttttcatcagatcatgtctacaatatcagattctgttaaaaacaatggttcgtgagattttgatgac

SEQ ID NO: 174227 - DNA, 243 bp, Zea mays
  unsure (1)..(243): unsure at all n locations
  Clone ID: MRT4577_90475C.1
gggggggggggcggtccttatncccggggcgggcactctttcgcccacactttcgttctcttcctacctcgattcacggttcaccgaattcggacagaagccggggtgtccggggggagggggccttccccctgcgagcctgcgacgaggcttcttccgttcttcccggccgggctaaatggacggggtcgttggcatgagggtcatcccttctgatatcagttgcctttttaactctttggg

SEQ ID NO: 174228 - DNA, 538 bp, Zea mays
  Clone ID: MRT4577_90476C.1
caagatgttcaccatcaccaacaactgcgtgcacacggtgtggccggggatctccaccggagcgagtccggcgccgccgctggacaccatgggtttcgagctcgcgccgggggagtcgcgtgccttgccggtgccgtccgggtggtcgggccgcgtatggggccgaaccctgtgctccaccgccgccggtacgggcaaattcacctgtgtcactggcgattgcggctcaggtctccaggagtgcgcgggcggcaacgccgcgccgccggtgacgctcgcgcagttcagcatggacgggagcggcggcatggacttgtacgacgtgagtctcgtcgacggatacaacctgccaatggtcgtggtgcgccagggcgccgccgcggaggggaactgcgtgccggcagggtgcgtggtggacctgagcggcgcgtgcccggccgagcggcgggtgcccggccgagctgcgcgtgcccggccgagctgcgggtgcccggcgcggatgtggctaatctaccgacatgaggagggaatatagata

SEQ ID NO: 174229 - DNA, 255 bp, Zea mays
  Clone ID: MRT4577_90477C.1
aagaccaatgagacaatctaccggatgacattaatgataggcagcaggcgcgatatattggagaccgaaagccaattaagaggttagaatagaataaccaccacatgagtaccatgcgatcacaaatacagcattaagcggccacaccgaacagatagactactatcacgtcctgcatcgattgggccatcgctatggatgtagtgagctcaggagtgacagcacacagcctagtcaagcgcctggttctggggg

SEQ ID NO: 174230 - DNA, 387 bp, Zea mays
  unsure (1)..(387): unsure at all n locations
  Clone ID: MRT4577_90478C.1
ggcgcagagaggancgncgaacagaacagcgcgaagaggggcattcgccccgccgggggcccggcgcngccagctgccagcgccaccgcaacgcagaagcccggcccccgcgcggggcagcagggccagcacggcgcagacgccggccggacgaccangaagcgcgccggcgccctgcacccccacggggagnaccagaggcagccgcagggccgcccgcgggcggcggcgccccaccacgccgggagagggcagccgagcgacangagccaaccgcaccgcaaacagcgacgccagcagcacaggaggaggacggacgcgcagcacgccccggaccaggaccagaggaggaagcaacccgagagcggcggaggcgccaccagcagc

SEQ ID NO: 174231 - DNA, 207 bp, Zea mays
  Clone ID: MRT4577_90479C.1
aacgcccacgtttccggcgagaacccggaaatcgctcatgagggacggactgcaagagaccgcgccgcaaacaactccaagcacaaggaggcaaaaggagaaggagggcgaaaggggagaaaggacaactacagacggaacggtggcagagggggagaaacaaaggacccgaatgagcaaaggggaacgcacaaggaaaacgaacaa

SEQ ID NO: 174232 - DNA, 173 bp, Zea mays
  Clone ID: MRT4577_9047C.1
gacccacgacccactcctacgaatagccttcccaatctgcttttttatttaactcctatcatcatcaatgggagagctctcacatactcccggctgttacaccctgactaaataatcacttctaactattatgcatcacgacacactcttacctgcatcactaaaacacacat

SEQ ID NO: 174233 - DNA, 265 bp, Zea mays
  Clone ID: MRT4577_90480C.1
tcgagccgggccggggccccttcagttctcggacagccgcgcctcctctcgcctgcctgtctgccccgaccgcccgcccgcctacgtccttggtcttcctcctcctccctttgcccgtcaaccgctttgatgtctcatccgctgccgatctagcaagcggagcaacgtaaagatcgcgcctcagaactgatgctccaccacgctccaaaccacagactccacagaccttctcgatcccgatcccaaacccggtgaaaaaagcaaa

SEQ ID NO: 174234 - DNA, 573 bp, Zea mays
  Clone ID: MRT4577_90481C.1
acgccctcgtgtacctgtcaggcacacggtgcgccgcgaagactgttttttggaagcctgcggagggggaccctgcactcaaggaatcatggctatcaagcaccttggaaatcagtatcaatggaacgaagctcctcgcctacgtatccgtggctatcaatcgactcgaagccctcgcagggtgtctcaatcgcacgcagactgtgttctgccatattccagcgattggagcgtccgtggagttcaagcgtgacacctctttatcctttgtcgagagcacgcgtgctgccgctagcggtgagaacaatcaggagcagaggactgtgactgctccgatgccgtgtaaggtgctgtcaacgctcaagaagaacggggagcaggtcaaatcaggagacattgtaatggtgatcgagagcatgaagatggaggtgacgatcagtgcctctgcagatggtcagtttgagacaaattggaaggagggtgatgctgttgaggagggaaagactctgtgtactgctaagtaatatttagcattcgttcaattaatatgcttaacagttctggttgtcggat

SEQ ID NO: 174235 - DNA, 1374 bp, Zea mays
  Clone ID: MRT4577_90482C.1
tctcgcgtccgctttgggattggaattggattactcccctcccggacaaaacggggcgagagcgcatggagagcagagaggaggagaggaagggcagcggtggcgccgccgccggcggcggctcgacccctggggcgaatctaagggacctggtgtcgagggaatactacggccacaagaagaaggtgcactctgtagcatggaactgcctaggcacaaagcttgcttcaggatcgatcgatcataccgcacgtgtctggagcattgatccacatgtccattctaaggttaaagatattgaactgaaaggccacacagatagtgtagatcagctttgctgggatccaaatcatcctgatacagttgctactgcagctgctgacaaatctattcgtctttgggatgctcgaagtggaaaatgtcaagttgttgaacttagtggagaaaacatcaacatcacatataaacatgatggcactcagatagctgttggaaacaaggaggatgagctgacgatattggatgttaggacacttaaagttgctaagaaacacaagtctacttacgagatgaatgagattgcttggaataaagctggagatctattctttattactactgggttagggcacgttgaggtggttaaggatcttgagtttttaaagccctgcaagctgaatgctcatacagcagggtgttattgcattgcaatggatccacttgataggtatttcgctgttggaagtgcagattcacttgtcagtctttggaatgtcaaagagttgttatgcattagaactttcacaaaacttgagtggcctgtaagaacagttagcttcagtcatactggagaattcattgcatatgccagtgaagatcctttcattgacattgccaatgttgagactggacgatcaattcatcagattccatgtaaagcagctatgaatagcgttgaatggaatcctaagtacaacctcctggcctatgcgggagacgacaagaacaagtatatgactgatgaaggtgttttccgggtatttggcttcgaaacacataattgatgctgacttagactaccctcatatagaatggtttgcattgtagattcactttcgaattttgtttacactgatacattttgtagatgttcagtgtaacttggatgctaatcaatcttctgccggcttgaactgaacgtcattgttgtagtgtatcacaggatacccatgtgactaacgtatttccgggatccaattctattttttattatacttactttttattatagtatggagatgtattcattttctttgaattgatttcgatccgcaatactatcgaagtaaaaaaaaaaaaaaaaaaaaatccgta

SEQ ID NO: 174236 - DNA, 660 bp, Zea mays
  Clone ID: MRT4577_90483C.1
ggccgggccggggtacaaacaagaccacaccatggacatggttacaatactattggcctgccatacttgtgcttctacggctcctgcttcctgcttgcagtcgtagcccgtgtcctgcttctcagcggcgagaaagctggcccgcagcggctgcctccgggcccagggcagctgccggtgatcggcagcctccaccacctgcggcgggggctcccgcaccacaccatccgcgagctctcgctccgtcacggcccgctgatgctgctaaggatctgcgagcgcacggccatcgtggtctcctccgctgaggctgtgggggagatgttgaagagccatgacgccgccttctcagagcggccgagcagcccgtgcatcgaggagctgtcgagggacggtcagggagtcattttcgcgccgtacggcgaccactggcgcctcctgcgccgcatcctcatgacagagctgctcagcaagcggcgcgtggagtcgttccgccacatccgcgaggaagaggcggcccgcctggtgtcgtctctgtcgtccctgcctccgggacagcccgtcgacatggacgagcggctggaggagctcgtcgtcgactcctccgtgcgcgccatcttgggcgaccggctggcgaaccgcgccgcgttcctgaggatg

SEQ ID NO: 174237 - DNA, 770 bp, Zea mays
  Clone ID: MRT4577_90484C.1
gattgcaaagagaggagtttgttgagctttcaatctgttgactggtgcctttgtcatattgagctagttctcaattctcacctacctgagctcttctgtcaatgattgagtattacagaaacactactgagtaatacaattgagttgatccttgttctatcaaaaatttgaaatcaaactacagattcagtgtgtgtcaatacagacatggggcagcaattaactcttaagtcactttctagtaatatattgactccattctggggggtaactgaacgcaagacaaagttgcagatgatggtcattttcctgcctaagcatggcttacagctcctttggaataaacaaaatttcctgaatcatgtgtttttcctatgtttttgaactaattcctgtgaaattcctgggttccaaagccggggcagtcttggcagcagtcacgaagaagcagaccttgttcttcctaatccaaactcaaatgaaacgcacgtggtggtcattatagcggttccttcagatcctagaaaacgtccgaaaaaaccggctacggaaaaagtagtgagtagtgaccgaatgttggttgtccaaaatcttcaaaaatcccggaaactcattttaggatcatcataccttgagttccctcgtcgtcctctaccccggctgcttcctctgccccgacctctccctctgcctcttcctctccctctccgaataaagaatgacttaccatgcttcatttcaatgagtgaatgcaacagatcatcacataa

SEQ ID NO: 174238 - DNA, 103 bp, Zea mays
  Clone ID: MRT4577_90485C.1
tggcgtggacgaagcagcttcgcagtcaccaagagagagcgcaagagaagcaggtacatctactctccctatagcgacacaggcagcctccaagaaaagaagg

SEQ ID NO: 174239 - DNA, 593 bp, Zea mays
  unsure (1)..(593): unsure at all n locations
  Clone ID: MRT4577_90486C.1
ggccgcttttttttttttttttttcgtcaaacgagcattcctggatccgatctgcagagaataacagggctgtacagtatacatttctcgagttgcaaacatccaattcctggatccgatcatcaacttctaacctcatttttgagatcacaagcataagctaagggcgtactgatcgcggccgtcgatccaacgaccagcagcaaacgttattagcagcagcgagcaaaattcggctcgagtaccaccagagaccgccatcactcacaatggcagcaccgagctccgagcgcgggaatggcgcgagaagaacgacctcgggacgccgctgggagccagcagccagtcggtgctgaggttgctgcggtgccccgaacccgatgccttcgggcgggacgggcacgggcacgggcccgtccagcgcttccgcctcccaccgatctgctcctcttcaggagctgctacttccggcagccggtctagctccgcgacgctcgccgcagttgacaccgccacggcatccatggaacgcccgcgcgccgcacgttacgcggcagcgcacacaanaattcttgccgccggcggcggcgggc

SEQ ID NO: 174240 - DNA, 781 bp, Zea mays
  Clone ID: MRT4577_90487C.1
cattgggtacctcgaggccggccgggatagcagcctatgccacatttgcactcaagcaagtgagcagctcccccgccctccagcaacatggagacggccaacgttgtcatcctctcgttcttcttcatctttgcaatccaccgcctcttcaaccgcctccatagcaggagcacgaagatgaagccgctgccaccgggccctctagccatcccggtcctcggccacctgtacctcctcctcgagaagaatattcaccacatgttcacgcgcctcgccgcgcgctacgggcccgtgctctacctccgcctcggctcacgtaacgccgtgatcgtgtcctctgtcgactgcgccagggagtgcttcacggagcacgacgtgaccttcgcgaaccgcccgaccttccccacgctgcatctcatgacctacgggggcaccacggtcggcacctgcgcctacggcccgtactggcgccacatccgccgcgtcatcacggtgcacctcctgtccgctctccgggtgaggtccatggtccccgccatcgaagcagaggtgcgcgccatggcgcggagcatgtaccgtgctgccgtgaccgctccaggcggcgccggcgcagcgaaggtggaactgggggggatgctgttcgagctcggccttagcgcccttatggaaaaccgtcgcgaagaccaagacatcccgtacggtggatgccgcggacacgggcttgtcaccggaaggccgagagttcaaggagtccatggacgtcatgatgccgcttctgggc

SEQ ID NO: 174241 - DNA, 2012 bp, Zea mays
  Clone ID: MRT4577_90488C.1
gcagttttgaatttagacaaactcataatcatagatggtttgacgctgttcaccatagcagccatcactttaccatcattaagctgccatgttttgatatcagcagcattgcgacgatcatcagcaagaacaggtgccgcatcggtcaaatggaagagtaatccatgtcctcggagtgcagtctcaacacagaaagcccactccggataattttgaccatcaagagtgatatttaccacaatagcatttgtcgccatattgaattgaatcaaaaatcagggagaacaggagacctgagaccaaacaaaccagagcaacccgacttggacgagttgacgggagtcctgggcgcggaagccgagttgaacagtggctggcgggagcagcaacgtcgcagatccgcagccctgtccgcaacggcgacggttggtgcagatttccggcgggagcagcggatccacggccctgcgcgcaacggcggctggcgggaatccgcagaacttgtcccagcggcggaacggcgcaggcagaaatagaaatccgcccttggcggcagatcgatgtagcgggcggcgctctgcccctggcagcaggaggcgcgctgcccctggggaggacggcgctctgcccctggcaaagaacccccggcagaaggcgcgctaccactggctgacggagggagggagatccgcccctggctgacggcggattgatgaagaaggcgggccaaggtccctggcggcggactgcgcggccgagatccttggcggcggacggtgaagtgagagaggaagatccgcccctggctgacgacggatcgatgaagaaggctgcgcggccgagctggcggctgcacggccgagatccctggcggcggacggcaggccgagatcgatctggtccctggcggcaggatgaaggaagggggtggccgcggcggcagagggaagggggtggccacgacggcaggccggagagctggtcgcgatggcagcacagcgacggcgcgatagcgccaaaaatttggatcagaatcgggtttagatgtaaaccctaaccctaacctgctctgttaccatgtgactaaccttgattaggcgagatgagagataagaacccccctcgggtactgtagcatatatataggcatatggaccttatgggccttaacagaagcttgttacagtcttttactcaagtaaatgcactcgaacgcttcaaagatgatgatgatatgctttggagatctcctggcactcctgttttcactgccccggagtgctgtcaaggttcagcctaccatggtagagcatctgatacatgggcagttggtgtaactttatattgtatggtctctgggcactatccatttctgggggatacattgcaggaaacttatgataagattgccaatgatcctgtggaaatacctggcgacgtgaatccccaacttgccgatttgctcctaaggcttctctgcaaagatccaggagatcgcatcacactgcgtgctgcggctgagcatccttgggtcgctggggatgaggggccagtccctgaattcatctgtagatgtgggtttggccgcaggaagaggaatgatgtccgggaagaagttcaataacaaagcatcctcggatggtctaataggtctagcgtagataattgatgatcggcaaagcgaagccctgacgatgagttcgttgttccgtgttccctgtttctaatacgcgctcgactgaacatatttctttttggtacagaatatatactgcgtaaccctatgccagtaaggcaacgtttgtcacagtttcacgttgtcaaacgcagcttaacgggtgatgttttttttttatgatccgagaggaatggataagtgaatttttttttttttttttgaaaaaaggtgtatctttacggatggtctacgggtgaagcttccatttcatataaggagccattggtgaagctgttttactgaacggtttttataacagctcaaattctcgctt

SEQ ID NO: 174242 - DNA, 929 bp, Zea mays
  Clone ID: MRT4577_90489C.1
cccaaatccactgtcgcgcgcccttgccgctcaatctccgctcacatccacccagaagcacttctgtccccctccaccgccccctcacccccccgtaggcactgcatccacgttcacgtcgcttgaggaggtgagcagtcggatctggctaggtgctgcaagcgagaccgtgccatgttccacctccgcgcacttttctcgtgagcgccctctaccatcccgcctcctcctggtaacgcgctgctcaaggttactagatctggtgagtcaccgttcagagttgggttcctgttcctggggcgcttcttcttacgttcgcaggcggagcgtccgtggaggaggcagcggggtattgatggaagtggtacccttgatggacagacactggttccccttggctggacagatttcaaactgaatatgaggttgtctctatcagcagcaagggaagaaaacttgacggttaatcctggaagatggcgagtgctctatcttggagacttggaagatggcgaatcttggaagaacaatcaaaagaatggaaacaccttgccacagtaatagcgccagaacagtcgtcgatggcttcaagctcctacttgtgtttccggtgtttggctgttgcggctgtaaaaggctggagtcagcatgtacggctgtaccatgctggattcaggcggcggctgtaccctgctggactaggcggcggctgtactaggacctaaattgatgttagtcggtgggctgtaccatgctgatttgtacctcacgtgtgtatggacctggtcgatgtgggcttttttgggcaaaatagatttcaacatgacatgggtctagacatatatggatctagacattatattatatattatatttattattcatgtttatattatatattataattattcttccaaaagaaaaaagaa

SEQ ID NO: 174243 - DNA, 376 bp, Zea mays
  Clone ID: MRT4577_9048C.1
ggttggggtgttctttttttttttttttttttttttttttttttttttacaaaaaaaacctttgtgccaaaaacggagggggtcaaccaatgctgggctcacccccccgcaaccggaggggggggggggggggacaaaccctgggccttccccccaacttatctttgcagggccccggcccaggccctcctatccccggtaagaataacccccccccaggaccagggaaaccccgctggcttgggcttccgctctctaacttcttgctattttcctcccagattctgggctcccccccgtcgggctttcgggtgtgcagggctccttttcctggtttgggggggggggccccttctttttttgttgcctgcccccc

SEQ ID NO: 174244 - DNA, 405 bp, Zea mays
  Clone ID: MRT4577_90490C.1
atagccttgccaactcggtggagatggacttagcgaacaacggggaggtgtccggggtcacgctgttaaactacaagtttttccacatgaacatgtcccggtgcaaggacatgctgatcaaggacgtgaccgtgacagggcccggtgacagccccaacactgctggcatacacatgggcgattgatacgggatcaccataactaacaccgtgattggcgtacgcgacgactgaatgtgcattagacccggaacctccaaggtgaacatcaccgtcgtgacctgcggccctggacacggcattaccatcggacgcgtatgtcggtacaaggaccagaaagacttaacggacatcaacatgaaggattgcactcttaagaagactatgctccgcgtccggatcaagg

SEQ ID NO: 174245 - DNA, 968 bp, Zea mays
  unsure (1)..(968): unsure at all n locations
  Clone ID: MRT4577_90491C.1
ccacgcgtccgtggttaccagtaccggcaaccaagagattgtctggcttgatatcaccatgaataacattatgggagtgaagatacaaaagaccagatattatgtcttggttaccagtaccggcaacgtgaagatcggggatttcagtgttagccaggtttttgaggatgatgatgatatgctttggagatctcctggcactcctgttttcactgccccggagtgctgtcaaggttcagcctaccatggtcgggcctctgatacatgggcagttggtgtaactttatattgtatggtttctgggcattatccatttcttggggatacattgcaggaaacttatgataagattgccaatgatcctgtgcaaatacctggagacatgaacccccaacttgctgatttgctcctaaggcttctctgcaaagatccaggggatcgcatcacgctgcaggctgcggctgagcatccttgggttgctggtgatgagggcccagtccctgaattcatctgtagatgtgggtttggccgcaggaagaggaatgatgtccgcgaagaagtacaataacaaagcatcctcggatagtccacaggtctagtgtagataattgataaaggttggcaaaacgtagccttgacgatgagtttgttttttgtttgtttgtttgtttgtttgtttgttgtttcgtgtccccaatttccaacgagtgttgggcgctcgactgaacatgtttcttttagtaagagaatctcgagtgtaaccctaatgacagtaaaacccaccgtctgcccccanaaaaaaaaaaaaaaatctgctcccaattttttgttgccttgtatagggcatacatacggtcacaaaccaccaaggtgccgtaaacatgcactgccattcagatagtgtgagaagttgcgtttctaaaatgccgtgtgcagtgttttggaaaaaaaaaaaaaaaaaagcggcc

SEQ ID NO: 174246 - DNA, 539 bp, Zea mays
  unsure (1)..(539): unsure at all n locations
  Clone ID: MRT4577_90492C.1
gaaaagcagaaagctcttcgtcagtagagccaaaccatctctctgatgaacttgaaccaaagttggcggatgctcagaacggggagacgtctaactgaaaagtaaaagtgggcagcatcatgatgccaactgcccccctatcatggttttattggtctgcttgtttctcatttcccttgggagtcagcttctctgttttatgaggccacacaagcctcatttgtagtattacaccacagaagctggctgacccaaaatccgccactttggggggcagcaacttaacaaaatgtttgtacgagagtttagagccctatggaacttgtttggataagtatgtttattaccttgtacttagctaggaacctgcttatgtaagatgaagaactgtcatagcggcatagttctgccgcacgtcggatttaatctcctgttctttgttagacggaccagtcgcaaatgttgtgaaatgtcttgagttataaaccagtactactgcggtattgttctggtaaaaaaaaaaaaaaaaaaaanaaaaa

SEQ ID NO: 174247 - DNA, 699 bp, Zea mays
  Clone ID: MRT4577_90493C.1
gggaaactgaacgatgggcacactgcgggtgatcaggtggcagcgatgtgaggacggtcagcatggccatggagatgctgatgaagcctaggttggtcatcctagatgagcccaccattggtttggatagaaactctttcaggcatgaactaactgtactggagaaggttcgacactgtactatgttgttcagttcgtcggagctgtcactcaggacatacctatgatgattgtttctgaactccatgaagagacttatgagatgtatccagaagaaagcaaagttacgtgcgcaaaaggtgctaagaaatggccttgatatttccagtgcatggttcgaagagcttcacaagcagagttcagagagttgctgaattgaaaagggcaattgaagacgtctttaaattctatcgggaactctctacatgatggatggctcaatatgggcacctggaaggtaagggaaacacacgcccattctcacaattgagcagatgttcatgcttcctgcaactccccattttgcattcagaaggtcataatttggtaatacatggcaaacggatgtgagtttatagtataactgtctgtattgaaactataacatcttaggaaatagtcaaattaaatttgggcctggatttaaaatcgggattctatttcaaaaaaaaagcccgaagtatattccaaaataaaaag

SEQ ID NO: 174248 - DNA, 460 bp, Zea mays
  Clone ID: MRT4577_90494C.1
gggttaaacaaaactttttaaataaaaaaatagaataggacaccataacaacatacaacagctttgccttgatcgagagcatgcatgaatcacagggggcgtcgaattaaaagaaagggagaaacaaaatgatgtggggggggggggtttggtgcatggccgctgttgttaaaattcgacacacgacaggtgggtaaatagacctaggggaatcgggtgcccaaaccaatgaaagagcgagcgggggaagcaaaatttggggggggggatgaattgatgattgacgggagcgcggggcggcctggcaaactgggcctaggcacctggtccgatccatttgttttggtgggcctaggccccgccgcggggtttgggcatggtcctcttcttttttttcccaggggcgcggccccttctggttggggggctctttggggccggacggtggggtgacccggga

SEQ ID NO: 174249 - DNA, 464 bp, Zea mays
  Clone ID: MRT4577_90495C.1
ggaacagacctttccatttgagataaccaaaatgggcaagggtcactccctcacagcaggagtcaaaaacacaggggggggtttttaccccatctaacacgaaaaaaagaaggtcgaagcaactactccaggaggggcctaccaacaaggtccggtggtgactagtttaaaccatccaccatgcccatttactctttattaaatacccccagggggggggcgaccccccaacgggggcccccccttgttcccatccgggggctgttgttggagggggagccacaattgggtcccaaacaccgtcaggaggaggagctggagcaacaacccaatttgccccaacagctggaatgctaacaattggagctgcagttttcccagcaccccattcaccgccccaattgtaagcgcctggggcagtgtattctgcaacccccccatagtcaggggcaaccaaagccttt

SEQ ID NO: 174250 - DNA, 284 bp, Zea mays
  Clone ID: MRT4577_90496C.1
cctcagttgccacagtttgccatgcctaaggttagacaaatttgaccgagctaggcatgtgattggtttatagccaagatttttcttctactgtgtaggtcccacttgtcaatttgtaaaagtgtggcatattcctttaggcataccacagttgtggcgcagaatttgagtgaggcaagtgtggcagaaatatgtggcaagttttggcaacttaagcatacaaccaaacccagttgttccatgttggctctttacttgagaaaataatcaagataacatacatg

SEQ ID NO: 174251 - DNA, 559 bp, Zea mays
  Clone ID: MRT4577_90497C.1
gccggccgggtcgggcaacactccacagtgcccttgcaggatcgatgaaagcgtaaagaagccacagtaccctgtgcactgcatactgcagccgcaacgtgcagtatcgctatgctctgcggcgtggatgccgccgcgtcagaactactaaggatcggctacaactccgaccaacctgatggaaggaggggatacaactctgttcccatatgacgagcggcgagagcccctacgcaggggccgaagcctgcatcataaaaaagaaaaaaaaaaaatgcccctagggctcctcctactctagaagtagcgcattccccggcatgcaggaattagatataaagtttatccataccccccacccccagagggcgcccgggacgccattcctgcgatattgatgcagaataacccggctcagtgcaccgcgttctacaacgtcatgagtgacaaaatcctggcgttatccaacttatcaccttaaaatacatccctacttcccctactgatacaatatggaatagatccatatagaacggcctgcccaatactggctcatcct

SEQ ID NO: 174252 - DNA, 1065 bp, Zea mays
  Clone ID: MRT4577_90498C.1
gtcgtccctgcccacgctccgcttcctggcgctgtcgcacctcctcgttcgagtgctcgataagatcgggccgaccatggccgtgctgaggctcgacgtccaacggaacatcgagaggctgcaggagctgtacctgctggacccagccacgtactcgaccctgacggggatagtggagaaggaagtgaaggagggcacagcgaggaaggtcgacagctgcgcaagggcgatcctgtggcttgctagatccatggatttcacagctgcgctgttacagaggctggaggaggactctacgcagcagcagcagcagagcctcgcgcagctcgtggaggccgcgtacgaggccaccctgaagccgtggcacggctggatctcctcggcggcgtgcaagatagcgtggaagctcatccccgagaggaaggtcttcaccggcatgctgctggggacgggccaggactgctctgcacttgaagacgagatcgggcggctcgcgctgttgcttcggcccttccttgatgacatccactccatgatggccaagttcagactggacaggctcaagtcgacgtgatccatggcgaacccgacgcaagcccaagccatggacatggacatggtccgatccccgtccttcgctgtgaatactgcctgccctggcttccgtcttcgagtcgcatttgcttgcggttaggtctagtttagacgctgctgctctctagtctgtacataggtcttttgcttgtagaatagactcccaagatctgcatgcggtgcccttttttcatggtagggtacgtttggacagcgcccctcctcaattgcctctgcctgtgccaatacgttggccggccaaactttggctgcccaagaaacggccaactttggcagggaaaatgaactagcaagttgttcacgatgcctaacattgaaaggcagcaaccatccaaacatacaagatgccaatagtcaacgaccttttattggtttggatggctggtgatggactctaaatttaacgcaatccgccccagaatcgagttatatttttaatagaatataaaa

SEQ ID NO: 174253 - DNA, 1816 bp, Zea mays
  Clone ID: MRT4577_90499C.1
agagactggaagttgaagacgatattacataagcagaatcgacggccggggtttccaagctgtgctccagcgagcttctctgtagttcttccccaatcgctcgctctcagcctgtgagtgtcctgctccctcccgacaaagcaattggcacctcgagccggccgggctcgaggccggccggggcttcgccttcgactgcgggcggcgtacaaagaaccaaaagatgactccttgcgctctcaccgtcgactccctaaacccaaaggtgctggctctcgcggatcacctcggcgacaacgccattgcccgccgcgcgcagtgcatccagaacgagatagaagcagaaccggagtcacaccctttccgcgagataatcgattgcagcctcagcaatccacagtccatgggacagcggccaaacaagttcttccgagaggttcttgccttgtgcaaccatccccatcttctagaacagagcggaactaattccttgttcagctctggtgcgatagcaagggcacgggagattctagacctctttcccgggagagcaacaggaggatatagccactctcagggcactgaaggattgcgcgacataatcgccgctggaatagccgctcgagataatttcccctgcaacgcggatgacattttcctgacagatggagcagctccgccggttcacatgatgatgcacctgctgatacgggatcaaaaagacggcatcctctgcccagttccatcgcattccttgtacacgagtgctatgcttctccagggcgctactcttgtgccatatttccttgacgagtcaagaggctggggagtgagcatgtcagacctgaagaagcagctggatagtgcccggtcaatgggtgtttttgttagggggcttgtggttataaatccaggcaaccctactggacatgttctcgtggaggagaatcagcgtgagattgtggatttctgcaggaatgaagatcttgttcttctagcagacgaggtttaccaggaaaatatttacgcagatgagaagggatttcactctttcaagaagatagcacggtccatggggtacggcgaaggagacatatctttagtgtccttccattcagtttctaatggatattatggtgaatgtgggagaaggggaggctacatggaagtcactggcttcaactctgatgtaaagaaacaagtgtacaaagttgtatccctaagctcgtgctccaacatctccggccagatcctcatgagcctagtcatgaacccgccacaggtcggagacgagtcgtacgcctcttaccatgccgaaagacacggcgtcctgtcatctttcgctcgctgcgcagaggccatggtgcgctcattcaacgggctggaaggggtgacctgtagcgaggctgaaggagcagtgttcgtgttcccttcagtccgtctgccaaagaaggcggtcgcagctgccgaggcaagcaacacgcagccagatgcgttctacgcgctccgcctcctcgaaaccaccgggatcgtcgttgtgcctggctctgtttttggacagatgcatggaacgtggcatttcagatgcacggtcctgccacacgaagagaagaagacgatgacggtgatcatctccagctttgtggcgtttcatcgagcgttcatggaagagtttcgcgactaacagaattcagctcctcttcttctatctctgtattgtaccacaacttaatgctgtacttcggagaaaacctagaactctccaaatgcatgattcctgtatgaaactgtttgagtttttctaaaaaaaaaaaaa

SEQ ID NO: 174254 - DNA, 294 bp, Zea mays
  Clone ID: MRT4577_9049C.1
aaaaaaaaggggtaacactggacgaaccacaagtacacccccccaggaacaatacagcgcatattatgaccccccactgggaaaaaaaaaaaaggcccaaacaaagcaaccctgcccggccagttcaaaaaagaacgacaaaacagcaaattctatccccaccaaaataaggaaagcggcgtcctctagactcaccacaccccaaaggggaaacccccaggaggaaggacaagggtccgcccacaggcccaagcgaggggcctgacacgtccggtgactgcgccgggcccacca

SEQ ID NO: 174255 - DNA, 168 bp, Zea mays
  Clone ID: MRT4577_904C.1
caggtcgactctagatgcacatatgtcaagcactgatcactatcatggatctacatattctgagacctacatgtttaccttcctcatttaggccgagatgtccattgcatgacattgaagtcttgtcgtatttagttttttccatgccacactgcttgggcatatttt

SEQ ID NO: 174256 - DNA, 312 bp, Zea mays
  Clone ID: MRT4577_90500C.1
tgtctaaaacctccatcaagcaactggggaggtcgttggctagagctacgacctccacggtcgcagcactctgcttcctcctcagctgcgtctccgcgaccccttccacgctcgccgcgtcctccgccatcatccacgacatcatccgcggcctcgcggacaccacggcggcgcgcgtccgcacggacgccgaggccacggcgcgcgcgttcaccgacttcggcaccaacgcgaccgaagacgacgcggcccggccggcggccgtgttctaccccgtcgtgcgccgccgacatcgccgcgccggtgggggcg

SEQ ID NO: 174257 - DNA, 554 bp, Zea mays
  Clone ID: MRT4577_90501C.1
ccccctttcgagtttttttttttttttttttttttttttttttttttttgatcgtacaaattatttaatgtttccttggaccagtgattaacagtacgtatcatcatatcatatatagtagaatacataataacagctagctagaaccatgcaggtggtagctaataacaaaaggtggggataaaagctagcactactctgatttaggcccccgaagaaagaaagaacgaacgaccaacttaaacagatggcgcccagttcgcaccgaatgtcctgtggccgtcgcatccatggcgccatgcatgcaatgcaaggcaatgcagcttgttactgatcctcggggccatggctttacacctcgacgacctgaccatcggcggccctccccttgccaaagccgtgctcctctccggcaaaatcctaaacgccgccggcctgtccaccttaattattagtgttattattattgcccccgccgccgaaggcctgatacctgtccatcccaaaccccggggggccggtacgcacgcaaccatacttgaccaccacttcca

SEQ ID NO: 174258 - DNA, 482 bp, Zea mays
  Clone ID: MRT4577_90502C.1
tcggggaagtctgcatcccttccccggcctcaaacgccaccttgcttctgcccctcccgtcccctctccggcctcaaacgccacctacgccgctccatgggcgcttctttcccccatgcccacgcgacctcgttgtacgctcgctctgcgacacggccacaccacaatatagcccacatcgcccgctcgtcgacctaccaccttcgccccccccctcgccgactgcgctgtgccctgcgcgcgtgccgtgccgcgtccacgacaccacccgcttccgtaacatcagcgacacgtcgagctgcaccgaggccatcaggttcgcctgtagcaacgccgtgtcgtgcactcgtgctctactctttctgttttgtgtccttcaagtgttcgattcaatgatgtaaatgagtctgcttgcggggaaaaagtctccaattgtacaaatacatgctccattattctataagtattcacaggtatttttc

SEQ ID NO: 174259 - DNA, 385 bp, Zea mays
  Clone ID: MRT4577_90503C.1
atattacctacacttttttttttttttttataaggagggccacaacaacccttttctttagttttagtggggcgtcaaaatttccaagacaaaagaaggtttttattgtttactacaagctcttttatgttttgctatagcagcacaagcctgcaggtagcattatcaacacatacccttctcggctttttcgcccatttgtttggcccgccttaatatctcattggagctactatcttaccggaccaaaaacttggtttcctccctcctatcccggggaggtaactttgcaaatatccttcccacattaacttacatgcttctggtttccattattccgataggcttcttaagccctgctattaatttttgtgtcgggctacct

SEQ ID NO: 174260 - DNA, 489 bp, Zea mays
  Clone ID: MRT4577_90504C.1
gcgaaaccatctggcttctggagagaggagaccccaaaatcgcagcgcgccgaaaacgcaggagcaacccgcccactcggcaccaccggccgtgcgcacggcggcgaccgatggccccattcgtgccgctgttgcagccatgggtggcagaaataccggccaggacaggtcaaggatgtggctcaccaggaggaggtgtattgggtgctcaagaacacccttcagaccggcgacctgtcacacatgctgttgtactgtccgccgggaacggcaaagaccacgaccgtactagccatcgcctgccatctgtacggcgcatggctgactaagttaagggttaaggagctcactggtattgaaaatcgatgaattgatgtggcgagcactgagatagctagctacggtgtgcgagtgcgccgagctcacctgaagttgacttccctgcccaccttgcaaaatgattatatgttacaagacatatatttttac

SEQ ID NO: 174261 - DNA, 263 bp, Zea mays
  Clone ID: MRT4577_90505C.1
atcacagatcctgacaccactgtcaacgcacaaatcggtgagctcctcgctaccctgggatgacctgccgccgcacttcagcgacgcagacaagaccacaaccatcaccaccagagccaccacaagtccgcgccatgcgtgccgcactcataggaccttccctgtcaccaaccaccgcgtggcctgacacatcatagggcgcacgctcgagataagctccaagagcttagcactcacaaagcacaacaccgccacggccaggg

SEQ ID NO: 174262 - DNA, 578 bp, Zea mays
  Clone ID: MRT4577_90506C.1
aaaaccctccgccaaatgcagatcttcgtcaagaccctcacggggaagaccatcaccctcgaggttgagagcagcgataccatcgacaatgtcaaggccaagatccaggacaaggaggggatcccgccggaccagcagcggctgatcttcgccggcaagcagttggaggacggccgcacccttgccgactacaacatccagaaggagtcgaccctccatctcgtcctcaggctccgcggaggcatcatcgagccatccctgcaggctcttgcccgcaagtacaaccaggagaagatgatctgccgcaaatgctacgcgcgcctgcacccaagggctgtcaactgccgcaagaagaagtgtggccacagcaaccagctgaggcccaagaagaagatcaagaactagagtgctactagtcagtttcatggaccggttgaatccatcgctgtgtcagagtttatgctattatcgtctcggttgtcgttgaaccttattttactttgctttcagcctcctatcgttgtggtgatgataagtgacagtattggtatatggtagcaaacctataattttgccgg

SEQ ID NO: 174263 - DNA, 596 bp, Zea mays
  Clone ID: MRT4577_90507C.1
gcccccccccccccccccccccccccccccccccccccccccccccccttttttttttttctttttttttaacgacccacataaatttttttgccaaagaaaaacccttccaacaaaaaagggaacggggggggtcatgactttttgaaaaaaaaataacatagggtgcccccccaagtcacccccgtcaggcaaacctgcctattattatggggaaatttggggtttttggccaaaacaaaaaaaaaaacaatttttgaaaaaaaaaaaaacctttttcccaaaaagcgatgggcagggctgaggcctttatttactgcccccaaaagaggcaatttttttttttgtccttgccccccgaaaacatggtcccccggcaaattgtttttaataacggagcttgtgggcccggggtttaaaccatttgtagtctggaagtccttggatcggccccatcgcagaaatagcaacttcctgataaaaaatgaaggggtttgcaacacccttcacagggtttgcataaacagcttttttttttgcaaaaagcttgggggaaggaatttttcgcccatagggcaaaaggggggggccaatgt

SEQ ID NO: 174264 - DNA, 529 bp, Zea mays
  Clone ID: MRT4577_90508C.1
aaaaaaaaaaggcttgcacaaaagctgggggggacagataaatacatacccccaacccaaccccatgggttcatcgttttgggccctaaaccaccggcggtggaccaccaccattatcattacactatttttgggccacctcctttcctcccaccttcgggggaaaattttttttttttttttttataaaaggggattaaaaatcaaacccgtccaaaaacagcatagtagtaacaccgaaaacctttttgatttcgcatgcctttcccccctttcgcccttggaaatttcgttttccctttttggaattccttcctccgcccgccgggcgaaacaaaacctaacgattttggccgcgcgcaccaccgggttttcccgggggaaggggtcccggggggggcccctgtaattttaacggaagccgggggggtccaaaaaccggggcgcgccccaaaacaggtcgccgcaggggcaccggaaccccggtagccccacgcgctttcgggaggtggagcaccggttggcaaaa

SEQ ID NO: 174265 - DNA, 477 bp, Zea mays
  Clone ID: MRT4577_90509C.1
gggcaagggcccccaagacccttgccccacccgggacaaaaacaagggcccacccaaaaaccggggggggggggggttatctaaacccacccaaccaaccaggattcacccaaagcaagccctaaagcgggctaactaacccaaacccttcgcaaagcacccatgctaaacaccgagggattctattaagcccctggagggaaaaacccctgggaaaggccaccaaatgcccggggatggcccttgggcccccccccctggaaaaggcccggtgggggggatttatagcccccaacacaaaactagcccgtggaggaaaggtggtgctttctggggggcaccgaacaagccggggcccctggttgggggggctaacccgtgggtctgtcaaaacagggaaccggtggcccccaggctttatgccccggatagggtggacttcacaccggacaggccaaagggcttccctctatgggg

SEQ ID NO: 174266 - DNA, 1402 bp, Zea mays
  Clone ID: MRT4577_9050C.1
gtgacttcgccgcggctcctcactagctatgctgcgcgtggtggccgggacacacgtacatacagaacagagcgcacgcgcaggcacagcccatccagccagcagggagggacacaagcaggcggccatatggctgctggtggcgctggtgcagctgttgcggcggtgctcacgacggccgtcgctgcagtcctcgttgcggtgttgacgacgacggtgtccggacaggacgacccagcgccagcggcggcggcgtgcgcgcggcggcccgtggtgttcgcgttcggggactccaacacggacacgggcggcgtggcggctgggctcgggcactactacccgctccccgagggccgcgtcttcttccgccgatccaccggccgcctctgcgacggccgcctcgtcatcgactacctctgtgagagcctgaacatgagctacctgagcccgtacctggaggccgtgggctccgacttcacgggcggcgccaacttcgccatctccggctcctccacgctgccccgcaacgtccccttcgcgctccacgtccaggtccagcagttcctgcacctgaagcagcgctcgctcgacctcgccgcccacggcgggacggctcccgtcgacgccgacggcttccggaacgcgctctacctcatcgacatcggccagaacgacctgtccgccgcattcggtagcggagcgccctacgacgacgtcgtccaccagaggatcccggctatcgtgtcagagataaaggacgctatcatgactctctactacaacggcgccaagaacttctgggtccacggcaccggccctctgggctgcctgccccagaagctcgccgcgccgaggcccgacgacagcgacctcgactacaacggctgcctcaagaccctcaacgacggcgcctacgagttcaacggtcagctgtgcgccgcctgcgacggcctcaggtcgcagctgcgcggcgccaccatcgtctacaccgacgtcttgctcgtcaagtacgacctcatcgccaaccacaccgcctacgggttcgaggagccgctcatggcgtgctgcggctacggcgggccgccctacaactacaacgccaacgtgagctgcctcggcccgggcttccgggtgtgcgaggacggcaccaagttcgtcagctgggacggcgtgcactacaccgacgccgcaaacgcccttgttgctgcgaagatcttctccggccaattctccacgccccaaatgcccttcgactacttctgccaggcatgaccatcgtacgagtacgacccagcatagctagctgagcaattcagctgttgcgagagaatcacattcgtgtaactaagaaatgtaacaagcaccgcagatcatatcatgctgaataattcgcgattgaccc

SEQ ID NO: 174267 - DNA, 318 bp, Zea mays
  Clone ID: MRT4577_90510C.1
cctacctgccggggccctcggcccaaaggccattctcgacccatgtggtgcgcgccacccgggggaccagacgggctaccaattggggggggggctgggcccaaggggccatccgtgagaaaggggaaagcgtgtcacccggtcaccgtgggggaccccactggtctgcgttaaaaacgggcaggggcccacgggcgtgctacctcgcattcatagccacacgctcacaggcccctgttcccgccgcaaaccgggggtgcccggcccgatccgggatgggtcctcgccccgcgcgaggcggggcgagccttgggctcc

SEQ ID NO: 174268 - DNA, 589 bp, Zea mays
  Clone ID: MRT4577_90511C.1
aattcggcacgaggcccctttttttttttttttttttttttttttttttttttttttttttttttttttttttttttttttttttttttttttttttttggacaaaaaaaactttggagatccaggaaaaacaaaaaacaacaaaatggggggggggtgggcccccgctttccaaaaaaaaaggccccccccttggtaccccctaacgggaggggacggacgaaaaaaggggcccccaaaaaaggccctaatggggggaccggctttaaataaaaaaggggtttaacgggggggggacccaacattttggggaatcaaaggtttttgaaaaccacacccgggaaacatgctcaaaaccaaaagtacaaaaaggggccggcctttccctaataaaaaaaaaaaaaaaagcccggccggtttattattattattacatagggggaattcgcgggaaaaaccccaacgacaacgttcttggttaattccggggccaccaaattcataaaagggggccggctttggaggcccatagacccaacagggcctgcaactttttgggcctgaactccggagctgggggccccccccc

SEQ ID NO: 174269 - DNA, 487 bp, Zea mays
  Clone ID: MRT4577_90512C.1
cgtttacttgttcctcttcgcctggctcgaggctgcctcgtttggcgcctactacgatcggttcatacgtctcggcgttgcggtcggctcccacggcggacccgtcgcgtacctgctcaccgagttcgcgcgagtccgagttcaggggattggcgcggttcttggagtatagctcagtgaggtggctttccctaatgtgggtaaaggagccctgttatgtgactgtgctcataatggtgcgtatgctgaaggtttagcaactttcatggatggtatggtatagtggaccctgaagaagtgggagatgtaaagcttctttatgaagacatggttcacacgcatttggttgaacacagtttatatccttagctcggatatgactggcgggattatgaaccctgcatctgcttctgcttggtgcgtgcgctcgctgagatcatacaccatgtgatcacctattggtagatcggctggagaccctgcagca

SEQ ID NO: 174270 - DNA, 693 bp, Zea mays
  Clone ID: MRT4577_90513C.1
atttcctccttttgcagtccttacagcgatcgatattcctccttccgtccttccttcctcgtggatgtgtcacagtggagtgactgcgctcttgctctcctctggtaaggagttgtaacagggagaccccctcgtattcgcgggttcttgccttcatctccgtcagggcagtgtccttgatacgcgagacagcttcccttgctcgcggcctcactcactgactcattcaccgtacggctcccagtgcactgacgagagacttatcacgatctcggacgacacggaacatacaggatggccgccgcgacgtcgtcctcggccgacaagctccagtcgttcacgcccgaggagcacctgcccggcggctccttctgcatctccagccccccgagcatggaacggtagggcatctctgctagggtaccacgcatttcgtcagccatgctgttcaccaccgtcatcatatgcagcgcgctcgttcctcagatggcaggcgcaaatgaatacaatggtcgggcgactcagaccatactggtcgctgctgggataaacaccctgttccacaccgtattctcgacgcgccttacggtcgggatgagcggctcgtacgacgtcgtcgcgtcgaccatctcgatcgtcttgcctgcacggtacgcaatggaccagaccctcacgagaaattactgcggacga

SEQ ID NO: 174271 - DNA, 385 bp, Zea mays
  Clone ID: MRT4577_90514C.1
cgaagctcggaattcggctcgagcttggcgaccagcacactttacggcggccgccctaaaatacaagaggggggattagtgcaacaaaacaacagacggcccgcacacacaagcgccaccgggcggccagaagaccaaaagagaacacggacaaggaagaacaactggtggacaatccttctgaaggaagaagaagaggggacaaacgggaggaacacaatcaaggcgagcggggccagagtggaacgccggccgggaacaacgagagacgcgagcaaagcgcaaacaacccacgagcaggcaatgcttaacaacacacgacagacaggggactgacggactagcaaaatgacgtgcccagagtgcacaagccttgccatggacg

SEQ ID NO: 174272 - DNA, 621 bp, Zea mays
  Clone ID: MRT4577_90515C.1
gccggccgggccgggatatacctcgatcctagctgcggagatctgcactgcgataataagagatcgatgtttccgtctaagcaagtagccgctctcctagtccttgtagtggtttcttctcccagtcccagcctcctcgtgagtggtaagccatcagtgagcaaagaacagaaggacaagatcctagaggaatgcgaccggttcatccgtctcggctaccccatctatgttgtgtcccggcatagcccctgctgcgatgctgttagggcggttgagaacagagacatggactatgttgtcctcctgctcacaaacgacgagaaggacaagtacagcatctctaagatcctggcgcttcatggcctctgtgaacttcctcctgcttctcttcatcagcaccagcaggtcatgggccgaagggcactgatgtgatgcgcaaaaacagagagagaaagaagcgtctgcaatttagtaataaaatcattcggagtctcgtcaacgtgtgacgtgtatctttatcaattaattaacgagaagtgattaatgataagattcttaattgaaaggatcaacaaaataccacacaaatatctctcataataccacctaataggcccctaa

SEQ ID NO: 174273 - DNA, 260 bp, Zea mays
  unsure (1)..(260): unsure at all n locations
  Clone ID: MRT4577_90516C.1
gnnnngacaccnccgcgccgccgcctccggaccgcgacggcaccaacgccaaagacggagnncgccggcncgaagncagcaaccancgcngggcgnccccccancaaaccnncgagagccanggcgaagcaggcgngcagacgcgaangcaacaacancagnggaggaggacgccgcacgcaggaccgcgnccgggcgngacaccnccccanagggcagcacancgccaacggcgaggaagaggaaggacacagaagcca

SEQ ID NO: 174274 - DNA, 724 bp, Zea mays
  unsure (1)..(724): unsure at all n locations
  Clone ID: MRT4577_90517C.1
ggccgggnaaaaaaatttaaaaaaaaaaaaaaaaaaaaaaaaaaaaaaaaaaaaaaaaaaaaaaaaaaaaaaaaaaaaaaaaaaaaaaaaaaaaaaaaaaaaaaaaaaaaaaaaaaaaattttcgggcccccttcacctttaaggttcccttccgaagaggggaaaaaaaaaaagcaccccaatggggaagaaaaccctgggccctttcccccagggctttccccgaaaaggccggaaacgggccgcctcccccccctttcggggagccccgggggacaatgccaaaaacggggggaaaggcaaacccgggggggggtccgggaaccccggggaacgcccccaaccgggggttgacccgggcccccttgccggggaaccccccaatttccttgagggggaattccccggggaattacggtgggaaccccgggggtttgtgggggaccccgaaaactttccccaaaaaccgggagtggggggggacccccccccgttggcccttgtggggggccttcggttggtttttcccggagttgttccccccaaaggggttaaatttcgggaaggccgggggtttaagggccggttcccaaattttcaggggggggggatgggattccctgggaaacccgagcctcttccccgggaaaagattcctccccttttggccctgccaggtcgggttcttgggccccgtaaagggttaccgattccccgggggcc

SEQ ID NO: 174275 - DNA, 509 bp, Zea mays
  Clone ID: MRT4577_90518C.1
ggtctcttggttttttccgggaaccccgggccggacccgggaagcccgccacgtttccttaaggggagccagtttacactttggggagttcatggacatagtgggttactgagggaaatagttgtcccctgagaaaaacacgacaatccgctcacaatgaaacataaaatacaaaccctggggataaaaaggaaagacctaactgacaaaaaagggagtgaactcacattaattttttcaggctaaaaacccgttttccaagctgaaaaaatgaatcgccaaatgcactaagaaaggcgccaaccctctgggaaaggagggtggtttttttttccacaagggggactgtcattaaacgattgacattgacaacatgtgattgacatagacccactaacccttaaagacttgtttgacccagcacacgaaaattctgcccaatgggggaaaaccctggtatataacaggaaacggctggatataacatgaaccccattaccgatatatcc

SEQ ID NO: 174276 - DNA, 369 bp, Zea mays
  Clone ID: MRT4577_90519C.1
atttagtgcattcagaaccacgcgaagcgaagcacattcactgcaacctaactgcattggagtgcggagatattatcctgcgttgcgcttcttgcgctttttgcgagcgcaacaaatgcgtacattataccacactgctgattcgctccaagttacatcattacacagatcctcccaccagttactgcaatgggcttctaacaccgagctgtgctagcgtatacgctacaacaagcaattgcgcggagcgtattacaacaaccaatttccgagatgcaacaactagtcttggcacatctaacaatacataccatcgcaacgcaacagcaacaacatttcctaccagaactgagccacctagccatggcg

SEQ ID NO: 174277 - DNA, 1554 bp, Zea mays
  Clone ID: MRT4577_9051C.1
gttaaacctaactgcctctcctctctcccagtctctcgccgctcgcctctcagccgccgcgtgcctcccagtctcccgccctcgcctctctcttcctctcctctctccctgcgcgccgccgccgtgcctcgccttgcccagagactaaggcgccaggacagtataaatttagttcacgtggttgtggacttctcgctttttggattcaacattttctgcttctctgctctggaatactgaagtgccattgtgggctcaggcgctcgcctctcagccgccgcgtgcctcccagtctcccgccctcgcctctctcttcctctcctctctccctgcgcgccgccgccgtgcctcgccttgcccagagactaaggcgccaggacagtataaatttagttcacgtggttgtggacttctcgctttttggattcaacattttctgcttctctgctctggaatacagaagtgccattgtgggctcaagaggataatgtacgggaggcgtgcatcgcaactgctgaaggagatcgactcctctgaggctggccagctcgtgccattcaacagtgacgtgtttgatcaagtgattagagagtgcaatgagcacaactcacaatttcaatcgttgatcaggaaaatggtggagcaaaacttagatatcgagacaactagaaatgaagatcactatggtgcagctatccaccatctttccctgctccgtaacaaaagatgccttatggcttacatgtacaaccgagcagaagttatccagagttttagatggaaaattggccctgtgctccctcatgacatacaagaaaagctccatttctcagaaaaggagtacttcaagaaccactctgcagccattaaatcatacatatcagagatggatatagatttgacagtggacatggttcctcccaaggatccttacattcaggttcgggtgctggaggacattggtgaagtatcgctcggtgaccattctgtgtcattgaccaagaactcactccatttcctaaggcgcacagacgctgaacagtttatatcacagggtcttatggaagaatttctggagtagggatcacatgtatgaatgtatgatggtacaataggatggtgcactgccctcgttctccccagcgctgctgcctgatgccctatttgcaacaatgaaaaggtacatcagtacatgagacgcgttctgtaccaaggagcttcttaactagtcgctggacgatgatttcgaaagttgtgcaggcagtcctatactagattcattgcctctatttacatgtggatgacttttagttagtgtgccatccaagaaagcagatgttgcaaacattgtaacttgtgtattaacattggttttgctggtagatttcatatttgtgtttccaagattccatgtaatcaagaaaaaaaatgaaatcttggttgaaacagtctttcacagtgaggagttagtttcattttatagctaacatgcaagagacaatatgtctagttaacatttcaaaaaaatctccattactcgagcccggcatcata

SEQ ID NO: 174278 - DNA, 292 bp, Zea mays
  unsure (1)..(292): unsure at all n locations
  Clone ID: MRT4577_90520C.1
aatatggggtcggtatctattacaaaacatcaagtacaagaccaagtttggaactagataatccatagaggctcaaaaaaatggatgtgtgggaaaatggcaagtgtccaagcactcgtgtctcctggaaattctaagcctaattggaaaatttagaacagccggtacacctttcccatagtgctctttaggtacaagcattttacattctgccaattctattttcaagagcgactcgaggaagntgacactcatttggcacattctggaagatctgttatttatccatgcc

SEQ ID NO: 174279 - DNA, 252 bp, Zea mays
  Clone ID: MRT4577_90521C.1
gtgcgacgtacgacgacgacgacgctagtgccacacatggcatcccaactctccgccgtcgtgcctcggttccacggcctccggggctacgccgcgcccagatccgcagtggcagcgctgccgtccgtgaggtttggtacgaggaggtcatcgtcgcaatgcatctgctgcgactacatcggctcctccacctacttgatcatggtgacgactacgacgctgatgctgttcgctgatctgttcgtgctgtcg

SEQ ID NO: 174280 - DNA, 273 bp, Zea mays
  Clone ID: MRT4577_90522C.1
ctaggagtgcgcctcgagcatctaccgactattgcaggttcttacttcagtttcatactctctggcataaccctcgttgacggtgaccaatcggtggatcaaacatggacaagagcatgctagcggatttggattcgctccctgaggctgataagcaaagaatgactgtcatgatcgatcagctccaaatccgtgacagtctgagaatgtataattcactgggtgagagatgctttaatgattgtgttgacacatttaagcataaatccctgc

SEQ ID NO: 174281 - DNA, 209 bp, Zea mays
  Clone ID: MRT4577_90523C.1
atactatatttttttttttttttttcaggcaattcccggcccaatttattccggcccacgccgggaaaaaaaaggttttttttcttggtaatttaaaggggctggtccatggctaagaaaaatggttttcccttgaaaggtttttttcctgggggaaggaccctttgggggcctttgaaaaacttgttgtggggcccttttggggtttt

SEQ ID NO: 174282 - DNA, 330 bp, Zea mays
  Clone ID: MRT4577_90524C.1
cggccgagaacgagctgtgaaccgaacagcagggtaactgaatgcatcacctacagaatgggctaggatagggactgctggaatttggaaagaagaggcggacgccccaccacaaaaaagaataaagcaagaaagggacaaaaggcaacggctgctgccaaaggaggagaatgaaaggcagcgacggaaaacgggtgaagaagaacaggtgacaaaaaagggggcgtggtgaatggaggaaaaagaccaatggacgcggagagagagagtcacaaggagttacagaagggacactgtgaccagatggacatgggcaccaatatacagcat

SEQ ID NO: 174283 - DNA, 1008 bp, Zea mays
  Clone ID: MRT4577_90525C.1
cctcgaggccggccgggaaaagcgtcctcggggctcggggtcgtactcgtcgtggaaggggtcgacccagtcccagttcagattccgcaaaacaggcagtcaggctcaggcaccaacaccaaccatggcctccgctgcgacacctgcgcctttgctccccgtgaccagcacggctgccggcggcggctccgcgccgtcctccgccacgggcctctccgacgcggcgctcgccacgccggccttccgcctcttcgtgagccggctggccgagacggcgcggcgctcgctcgcggaccggcgcccatggacggagctgctggaccgatcggctttctcccgccccgactccctctccgaggccacctcgcgcctgcgccgcaacctcggctacttccgcgtcaactacgccgccgtcgtcgccttctccctcgcggcctcgctcctggcgcaccctttctccctcctcgtcctcctcagcatcctcggcgcctggtgcttcctctacgtcttccgcgcccccgaccagcccgtcgtgctcttcggccgcacggcgcctgccgcattccagaggacctcttccttgatgatccgagcgctgcgtccagtggaaacaccaccagcaggctgatctccttccttgcgtcgcccggatctggggtttgatgcatcaaggaccggtaggaaattcttgtgctcggcgaattcagttgaagtcaaatagagatctgatccagaagctgtataaaccagctccttgctcatgtggtacctcacctgcgagtagcattgtataagtggatccgatttttctgttctactttgtgtggaattacgcaaggatctgcaattgctgtacttctcttgcacttcaccagatctggtgacaatgaccattaagcattgtcaaatgccaacatgtatcggtgtgatctttacattcatcattcatgtgtacaactctacatcatgacaaattttatggatctctggttatttttgcctcattag

SEQ ID NO: 174284 - DNA, 870 bp, Zea mays
  Clone ID: MRT4577_90526C.1
cgtcgtggaagaggtcgacccagtcccagttcagattccgcaaaacaggcagtcaggctcaggcaccaacaccaaccatggcctccgctgcgacacctgcgcctttgctccccgtgaccagcacggctgccggcggcggctccgcgccgtcctccgccacgggcctctccgacgcggcgctcgccacgccggccttccgcctcttcgtgagccggctggccgagacggcgcggcgctcgctcgcggaccggcgcccatggacggagctgctggaccgatcggctttctcccgccccgactccctctccgaggccacctcgcgcctgcgccgcaacctcggctacttccgcgtcaactacgccgccgtcgtcgccttctccctcgcggcctcgctcctggcgcaccctttctccctcctcgtcctcctcagcatcctcggcgccatcgtcgccgcgcacggcgcctgccgcattccagaggacctcttccttgatgatccgagcgctgcgtccagtggaaacaccaccagcaggctgatctccttccttgcgtcgcccggatctggggtttgatgcatcaaggaccggtaggaaattcttgtgctcggcgaattcagttgaagtcaaatagagatctgatccagaagctgtataaaccagctccttgctcatgtggtacctcacctgcgagtagcattgtataagtggatccgatttttctgttctactttgtgtggaattacgcaaggatctgcaattgctgtacttctcttgcacttcaccagatctggtgacaatgaccattaagcattgtcaaatgccaacatgtatcggtgtgatctttacattcatcattcatgtgtacaactct

SEQ ID NO: 174285 - DNA, 417 bp, Zea mays
  Clone ID: MRT4577_90527C.1
gcggtctatttccaggtttaggtttagggttcttcgccgccgcccacctccgccgccgcccggcttggttgcagccatccacaccgaaatggccgccgccaccgcctccctccgccgtgtcgccgccgccgccgctccatgacggcccaggcgagtctcctgctggacatgcctccggagatccggcgggagatttcaagggtcaagatggccgacatctccgaccaccgccagctcgcccaggaggtgtcgcggctcagcggagtcatcatcaaccatgaggcggccgcgcgcctcaagccagtggaggatgcgatgcacgtcgggacgttgtcctggtgagtctgcacctccgtgctcaccgtgagcatggctgcaacttttggcgacggacagatcgccatggccgggtggaaa

SEQ ID NO: 174286 - DNA, 758 bp, Zea mays
  Clone ID: MRT4577_90528C.1
ccgggactcgtcgtggttgaggtcgacgaggtcccaggggagattccgcaaaacaggcagtcaggctcaggcaccaacaccaaccatggcctccgctgcgacacctgcgcctttgctccccgtgaccagcacggctgccggcggcggctccgcgccgtcctccgccacgggcctctccgacgcggcgctcgccacgccggccttccgcctcttcgtgagccggctggccgagacggcgcggcgctcgctcgcggaccggcgcccatggacggagctgctggaccgatcggctttctcccgccccgactccctctccgaggccacctcgcgcctgcgccgcaacctcggctacttccgcgtcaactacgccgccgtcgtcgccttctccctcgcggcctcgctcctggcgcaccctttctccctcctcgtcctcctcagcatcctcggcgcctggtgcttcctctacgtcttccgcgcccccgaccagctcgtcgtgctcttcggccgcaccttcaccgaccgcgagacgctgcttggccttaccgtcgcttctgtgctcgccttcttccccacctccgtggcttcgctcatcatctccgggctgcttgtcgggggcgccattgtcgcagcgcacggcgcctgccgcattccagaggacctcttccttgatgatccgagcgctgcggccagtggaaacccaccagcgagctgatctccttccttgcgtcgcccggatctggggtttgatgcatcaagga

SEQ ID NO: 174287 - DNA, 351 bp, Zea mays
  unsure (1)..(351): unsure at all n locations
  Clone ID: MRT4577_90529C.1
nnttttttttttttttttttgttgaaaaccaaacgttacatttacccaagttatggtttcaattttaagtgaaactaaaaaaaaagcaggggaaacggcaacaaaaagcattttgaaggaaaactttgtttcttaaagtataattaattaacagttttttttaaacctgtaattatattacaggcagttgtgtcgagtttgaaaaacaaactgtttgttaataacataatggcatcgaatccatgtcttttttgcagttgtcctaaaatgtttgaattgattccaaatatgcgaaccttgtgcatgttcggcatttttgccacaaccagaacgaaaactgcaatcgtgttg

SEQ ID NO: 174288 - DNA, 467 bp, Zea mays
  unsure (1)..(467): unsure at all n locations
  Clone ID: MRT4577_9052C.1
caacataaaaaccggaaaaggaaactttttatttggggggggccacaacccccatccaaaaaacctttattatggaataccctcaaaaaaccaatcaaaaagaggccccccccaaggatgggttgtgggaagaaggctgcgggttttgccaaaccaggtggaacaaaggccaacaatggtggaatttgaaaaagggtgggggggttaccccaaaacggggggaaaaacggcacaaccggtggtggggcaaaaaaggaaccccggttggctgaacctagcgggcaaaagggaaaaaaaattggcggcggcaaaaaaccaggggggttcagggcacccaatgggtaaaaggaaaaaagttgttgttgttgaaagtagccagnacctaccggcgtaaagggaaaaagtgggggcggcaaaaaaccaccagggtccagggaaaacagtgggttgaaggaaaaaacttgctg

SEQ ID NO: 174289 - DNA, 193 bp, Zea mays
  Clone ID: MRT4577_90530C.1
aaaaaaaattgcggcctaaaaaaaccattaagcacctaaaggcccaacctaaacccccgcccgcccaaacaaacccctttttccttgtcaccgcctacccattcacacactaatacccctccctaacggcgactcgatcaccaccccttaatccctaaacccctccatagtgccctaccccctcctaattttt

SEQ ID NO: 174290 - DNA, 233 bp, Zea mays
  unsure (1)..(233): unsure at all n locations
  Clone ID: MRT4577_90531C.1
cggcgtccccgtcccgagtcaccaccgacncaancaaaaccgcacgcancctnccagcngncccccaactcncaacccaacccctactccagctagctngcggcggnggncagcggccatggccttccggctgagnaacaacctgatcggggtcctanacttcgtcaccttcctgctctccgtcnngatcctgggcgcgggcatctngctgggccancgntgccgacggcact

SEQ ID NO: 174291 - DNA, 572 bp, Zea mays
  unsure (1)..(572): unsure at all n locations
  Clone ID: MRT4577_90532C.1
gctacatcatctccccaagggcacaggcacaggcacagcagccgcttgcctgcctgcaggctgctgcaggctgctgccgcgcagcagtgccgctgccgatgcgtcaaaattagcagcaggggagtgtgcacagttcacggtctgctctctttctctctcttcccctattacgagtcccagcagctagaacaacacaaaccctctcctgtagctagatgtgtggtagtaagctctcgctgntaacctcggcaaagaacctactggaagtcggaagggaaaaagcaaagtaggagtagctagctagtatagcaaacaagctcccccgtgtgccgacgagccgccgactaggtcagccgccatggacttcgacgagcacgatgacggggacgaggagatgacgccgatgcccgtgagctcgagctacgatgcgccgatgcagccggggctgggactgggcggaggaggcggcgagacccccaagcacggggattctgctggagccgggagcttcangacgccgccagcaggcggcttcgggggaggaggcgcaggcgcaggcgcaggcgcaggcg

SEQ ID NO: 174292 - DNA, 561 bp, Zea mays
  Clone ID: MRT4577_90533C.1
cggggtgcccgcggtgctagtgacggttgctctagatccgttcatcctggtggttttgtgaggtcgaaagcggcgagcgaattagaagatgctggacaagctgtgggacgacgtggtggccgggcctcgcccggagacgggcctcgagaagctccgcaaggccaccaccgcccgcccgctcgtcatcaacaaagacgcggacggcggcagctacaagcgggcgcagtcgatgccgtcgaccccgacgacgccgggggcacaaatcgctggattcttatatgggctgagtccacaggacactcctcacgtctaagagattaggtgtatagccatccctccgctgcatggaacacaccagatggtgactctgccatcaaaccttcctgaacttgagttccttaatgatcttgaacccttgggatggttgcattcgcacccgagtgaagctccacagctgtcggcccgggacctggcgttacatgccaagattctggagaacatcatactctgggatggtggagaagtggcttattctgacctgctgcttttccccaggatctt

SEQ ID NO: 174293 - DNA, 467 bp, Zea mays
  Clone ID: MRT4577_90534C.1
ttaggtttttaattggtgaatctttacaagaagcccaatggcatctaaaatcattgggcaggtcgtaaaacagaccaccggactaacaggtttgaaagtttccaaaaacccagtccacgagttaactgttctttatggcaaaacgctgagagttctgcagaagatgcctgaagaagcggcttacagaaaatacacggaggaaatcatttcccacaaaaacgatatcgttcagaaggccacgtccattgctgacattgagagccagatcaactgcggccaggtcgaagagttgatcattcaggcggaaaacgagctcaatctgagccgcaagatgttgacttggcggccatgggaaccgctcagcaagcccccgcccccccaccagtggacttggccccccgtcaagtgaacctcacttctagagttgcaattttgttgttccattaataaatgtagcgttatgagtt

SEQ ID NO: 174294 - DNA, 552 bp, Zea mays
  Clone ID: MRT4577_90535C.1
ggtaccgcggcctttcctcgatttttttttttttttttttttttttttttttttttttttttttttttttttttttttttttttttttttttttttttttttttttttggaaaaccattccgggcaaaaccgccccccgggggccggcaatacaaaaccaaatggtaccagcagggggggggaaaaaaaaaaaagggggaaaaacgggcctccagggctccatgatttccaggggggcttacgttccgtagtagctaacaatacagtttttccacgacgttttttacagttaacagcacccttaattgtccaaaaaagctaaaacactgaaactgggtcctttcctttccacctcccattgggggggtcggggcatttggtcagtacagcacttattggaaaggcccctgccccgtcaccacaatcgggttacggacaacgtgccccccttttttccacgtaagcgcgccgttcccaaccaaggagctcccgggtttcatttttccttcgagggccgccttcacccgcaccggaaaatttaaccttttccct

SEQ ID NO: 174295 - DNA, 137 bp, Zea mays
  unsure (1)..(137): unsure at all n locations
  Clone ID: MRT4577_90536C.1
cgangctaccgcatcctctacaagaagcggactcgccggattgtcgactatgaagcgcgctgaagagtaaaggcaagggaatacactgacgatggtagatctatgactcgccacattacctatgtgaacagtcttct

SEQ ID NO: 174296 - DNA, 389 bp, Zea mays
  Clone ID: MRT4577_90537C.1
cacgctttagccaaggtcctcatcatggtttgcgccacgctgctcgccgatgctgcctgcgcctgttcgcaggatggcgtgttgagcatcatcacccggcccatgttccatagcatgctgagccaccaccgctactgcatgtgccaaggcgccttctacacctacgacgccttcatctaggccgccagcaagttccccggcttctgcaccaccggcgacgagcaaactcgcaggcaggagctcgccgccttcttctgccagacgtcccacgaaaccaccagtggatgggcgactgcttctgatggaccctctgcctgctgatactgccggctgaaggaacataaacagacggacccaccctactatggacgacgacccatacaactaac

SEQ ID NO: 174297 - DNA, 967 bp, Zea mays
  Clone ID: MRT4577_90538C.1
tgggaccctcgcgtccggccggccggacctaaactgacttccaattgagcatacttgataccctcacatattctttctagctagtttgtataaaaacagccgccaaaatgggtcgccaattcttcgtcggtggaaacttcaagatgaacggtacgatcaagtcgatcaccgaaatcgtcgacaacctgaacaaggccaagctcgacgagaacactgaggttgtcattgcaccaccatctctctacctcctcttgacccgcgaacacctccgcaagggaatcgaggttgcagcacaaaacatctttgacaagcccaacggcgccttcaccggcgagatctcagtcgaacagctcaaagacagcggtatcacctggactatcctgggtcactctgagcgccgccagatcctacaggagaacgatgacttcgtcgccagcaagacaaaggcagcagttgacggtggtctgggtgtaattctgtgctgtggtgagagtctggagcagcgtgaggcgggtgaaaccgtcaacgttgttaccaagcagctcaaggccgttgccgacaaggttaaggactggagcaagatcgtcgttgcttacgagcctatctgggctattggtactggcaaggttgctaccactgagcaagcccaggaagtctacgccgctcttcgtgagtggctcaagaaggaggtctcagcagaggcttccgagaagacccgtatcctatacggcggaagtgtctcggagaagaactgcaaggagcttgccaagcggcccgacattgacggtttccttgttggcggtgccagcttgaagcctgcgtttgttgacattatcaacagccaccaggcatgaatcccccggagcgatgctcgtctatagctgacggaagctcgcaccggaaggaaaatgatgaagttatgagaaatagatctttgccagaaaccacataggttggagcataaaag

SEQ ID NO: 174298 - DNA, 350 bp, Zea mays
  Clone ID: MRT4577_90539C.1
gtacatcgagccgtaaccgcacgacaaggccagaactgctgctaagtcatggtccctataaggccatccatatgatgccatgcgctctcaagcatgacagacatggaccatgacctaagagatcgccaaacgcgcatggactattaatataccacgcgcttacatgtgaaaactacatcggacgctgctgtgcagcaaccttcacgttctgccgattctttgcctgctttctcccttgtgtaagacgtaccctttttcatagctaacactgactgtatctcagacctgtgcaggtcggtctgtcaaagatgtgctctatacaaaatctgcctcttcaggcaaagctatta

SEQ ID NO: 174299 - DNA, 541 bp, Zea mays
  Clone ID: MRT4577_9053C.1
ggggatgagccttgcgcaggcggtggcggcgctggtgggcacgtgcgcgcggcggctgtcgcgggcggcgcggcggctgcaccacctgcgcccgccgcgggacgggatcgcggcgtccttctcgtcgcgagccatcgtgccgttcctcggcggcggcggcagcggaagcgtcaagaagccgctctcctcctcctcgtcgtcgtcttcttcgtccaagtcgaaaaggaggaggaggaaggcgtcgtcggcggcaaaggaggaggcgggggacggggtgtggaggaaggagatcatgatgggggagcgctgccagccgctggacttctccggggtcatctactacgacgccgacggccgtcgcctcgcgcaggcgccgccgccgcgctcgccgctgcgcagcccgcttccggcatccatgaagctcgccgccaacgccggcgccgcgtactagctagggaggagtgcctctgttttctcccctgctactactagtgtacatgatggttttcttgcccgctgctctgtctgttttcttctttta

SEQ ID NO: 174300 - DNA, 630 bp, Zea mays
  unsure (1)..(630): unsure at all n locations
  Clone ID: MRT4577_90540C.1
ctcgaggccggccgggacggaccttacaagcggagcttcttgttgctcttgtacccaggcgtcgtcgtcgtgttccttccacttccttcccacctgctcatctgacagccagccgcagcgcatgtccttccttccctcccctctctctccctccatcgatgttcctcaggaatttcttcgttttgccatactgttccacacgggtatcatttcctcgaccagtcgaccttgtgcacctccgtgctcctggatcacgaagcggctcgccgatacgtactcgagagggagggatcggaggacatggacagcgggacaggaaccgatcctgccttccacaaccaaaagtctcggacccaccagggcatcatcagaagcgatcggaggacattggaggtgagccactaccacgcacacttgggagttgaacttttttttcgagggaacgtgcgaataatgactgaaacatcagcctgaacaaagtcagggaagctggttgacctttgcgagctgtgcccacgagtccacgacagaggacgtccncgttccgcagcacccaatgcacacgactcacgagacacgagcaatgccactattgccagtatgcgtccaccgtccgnccatgagctgatg

SEQ ID NO: 174301 - DNA, 186 bp, Zea mays
  Clone ID: MRT4577_90541C.1
gtctcaactcttccttctccagcagcgggtcctaatgcgtcagcttgggcgccacctacagatccttttctcaacaattcttgtgcaccaacaacggcattcctaactcgtacttttccccccagccctacaactactcctctctgcggcggcaaaaccaatagctcaatctttagatctctcgga

SEQ ID NO: 174302 - DNA, 1831 bp, Zea mays
  Clone ID: MRT4577_90542C.1
aggagacagcgtccgcctacggcctatccgcgtcagcccgccggcgagtcgcgcacgagacctgcgaggcgcgatggcaggccgcggcggcgccggccggcggcctcgcgccgtcttcatggccttcggcactcagggcgacgtcttccccatagcagcgcttgctgcagcttttgcgtgtgaccaacaggagtatgctgtggtgttcatcactcattcagcgcaccggagtttgtcagcacatctagcggccagcagtgttagatacatgcctgtgtcaagcccgcctgtcctcgccgccgaacagttagagaatatctcaagtgattctattcaatcaaaccatgagcgcgagtccttttcaatgcggaaaaaagccattcaggcggagcacaggaaagaatgcttgtcttttgtggaagaagtttttggaaacgacccaagcatcagtggggattttattgtgatcaatttcttcgctttggaaggttggcaccttgcagaactattccaagtaaagtgcgtcattgctgctccctattttgttccatatagtgctcctacatcattcaaacgccaatttaaacaaacttttccgctactgtacaagtactttcaagaagctcctgcaaatacggtctgctggactgacattatccattggatgtgggcactcttcatggaaagttggggatcatggagaaatgattgtctgaatcttagccccattcctttcacagatccagtaaccaatcttcctttgtggcatgtgcgagaggagtcacctttattactgtatggtttcagcaaagaaattgtggagtgcccaggatattggccgttcaatgctcatgcttgtggcttttggtttctacctatggattggcaattttcttgtgacaaatgcatggagttgtctggaaatatcaattcttcatttggtggtatgttgtgtgcaaaccattcttccctggaacacttcctcacaaggaatgcttattcatcaagacctatatttgtaggattaagttccattggtagaatgggctttcttagaaatcctaaagcatttttaatggtgcttaaggctgccatagagtcaacggattatatgttcatccttttctcatctggatacaagccattggattctgcaattcaatctattgcttcatcagtaaatgaatcaagaggggtggattcaccttctcttggtggtgacagcgctctcctttttaatggccgccttttctgctttttaggatcaataccgtacagttggctttttcctaggtgtgcagccgctattcaccatgctggcagtggatcaacagctgcagcactacttgctggtatccctcaggtaacatgccctttcatgatggaccaattttactggtcagagaggctacagtggttgggagtggcgcctgaacccctacaaagacaaaatctagtcccagataatgatgacgccttgagcatccacaatgctgcagatgtgctagttggagctatcaggtcagctttatcgccggaaaccaaagctcaggcggccagaattgctgataggctttcttctgaggatggaattggagaagccctcaggatattgaaggcgagagtgttgactcagaacaaaatcatcagctcattcatcgcaagtaaataattagtactgatatgatatgaggcattgatttaaaccactaaatttaagaaatggacttctaatgcaccgccccatgtaagatagagtaatttctcaaaccaatcaactttacggggcgtttggatccctttattttagaggaattagaattcactcaat

SEQ ID NO: 174303 - DNA, 323 bp, Zea mays
  Clone ID: MRT4577_90543C.1
gtagccttgcatctccgtccccgtccgcaccgggcgacgctggcttttaaagcccgcgtcagcttcgcggatacagtgagcgtgcgtgttacccacgcggaggcatggccaggccggggatgggattgaagccgcttacgcgcgatgggggggaagcagcatgctcacatccatgacattgcccatgtccgcaatgcaggaaccatggtgcaggaccatgccgggggccgatggtagcagaaactggaggcgactaataggtgagctgctatcggttaggacatcgctgcaaattttgagccttaaaggaagtgcaaaaacga

SEQ ID NO: 174304 - DNA, 330 bp, Zea mays
  Clone ID: MRT4577_90544C.1
cggccgcccttttttactcattttttttttttttttaaaacagcaatccacaaacttctttattatcccagaatgggagcaaaatatactcccgcccaacgtctgccccgctttgctgaaatcccaaaattgcaaaagggacgggggctaccccccatgctgaacggccccccggcccccggggccagcccgaaacctggggacccagacccgcgggcccccaccactccccatagggggccccaaaacctggccgaaccggcccagccggccctggggaaattggatccggcacacttcccccgccaaaggagccgagcaaaaagggaa

SEQ ID NO: 174305 - DNA, 2393 bp, Zea mays
  Clone ID: MRT4577_90545C.1
ttggctgaaaggtgattcggcccattgtagccccgagacagcgtccgcctacggcctatccgcgtcagcccgccggcgagtcgcgcacgagacctgcgaggcgcgatggcaggccgcggcggcgccggccggcggcctcgcgccgtcttcatggccttcggcactcagggcgacgtcttccccatagcagcgcttgctgcagcttttgcgtgtgaccaacaggagtatgctgtggtgttcatcactcattcagcgcaccggagtttgtcagcacatctagcagccagcagtgttagatacatgcctgtgtcaagcccgcctgtcctcgctgccgaacagttagagaatatctcaagtgattctattcaatcaaaccatgagcgtgagtccttttcaatgcggaaaaaagccattcaagcggagcacaggaaagaatgcttgtcttttgtggaagaagtttttggaaacgacccaagcatcagtggggattttattgtgatcaatttcttcgctttggaaggttggcaccttgcagaactattccaagtaaagtgcgtcattgctgctccctattttgttccatatagtgctcctacatcattcaaacgccaatttaaacaaacttttcctctactttacaagtactttcaagaagctcctgcaaatacggtctgctggactgacattatccattggatgtgggcactcttcatggaaagttggggatcatggagaaatgattgtctgaatcttagccccattcctttcacagatccagtaaccaatcttcctttgtggcatgtgcgagaggagtcacctttattactgtatggtttcagcaaagaaattgtggagtgcccaggtgagctctggtgccctccacatctttctaaaatcattttagacatctatatatatcttcaaatttgatgtacctcatttcagtatactttacataacatcattgtaggatattggccgttcaatgctcatgcttgtggcttttggtttctacctatggattggcaattttcttgtgacaaatgcatggagttgtctggaaatatcaattcttcatttggtggtatgttgtgtgcaaaccattcttccctggaacacttcctcacaaggaatgcttattcatcaagacctatatttgtaggattaagttccattgaatgggctttcttagaaatcctaaagcatttttaatggtgcttaaggctgccatagagtcaacggattatatgttcatccttttctcatctggatacaagccattggattctgcaattcaatctattgcttcatcagtaaatgaatcaagaggggtggattcaccttctcttggtggtgacagcgctctcctttttaatggccgccttttctgctttttagggtgagtactagattgatgttatatgtttgcgttgtcctgtcatgtggaattggtggtgagaatgttaaaattttcagatcaataccgtacagttggctttttcctaggtgtgcagccgctattcaccatgctggcaggtaatggagcgctcaaatttctctcgttggcaagtgcctgatttataatcttgcatggtactggcacttccgcagaagattttatatttttactgctttgataacagtggatcaacagctgcagcactacttgctggtatccctcaggtgacaacaacactttctacagcttcaccccatgttttgaggctgtctttctgctgctcttttcttgtccttttatttattcgcaacctgtgatacctggatgtgtaggaagcatcaagcctggtaattctataacccaaaaaatgttctgatgccgactcaaacaaatacgttatctcccaacttctgcattttcttgatgatgctttgagatggatccattgtactaaattttttcgtgcaggtaacatgccctttcatgatggaccaattttactggtcagagaggctacagtggttgggagtggcgcctgaacccctacaaagacaaaatctagtcccagataatgatgacgccttgagcatccacaatgctgcagatgtgctagttggagctatcaggtcagctttatcgccggaaaccaaagctcaggcggccagaattgctgataggctttcttctgaggatggaattggagaagccctcaggatattgaaggcgagagtgttgactcagaacaaaatcatcagctcattcatcgcaagtaaataattagtactgatatgatatgaggcattgatttaaaccactaaatttaagaaatggacttctaatgcaccgccccatgtaagatagagtaatttctcaaaccaatcaactttacggggcgtttggatccctttattttagaggaattagaattcactct

SEQ ID NO: 174306 - DNA, 1103 bp, Zea mays
  Clone ID: MRT4577_90546C.1
agatacagtagagacatgtaaacttaatttaatgagactatatttggtctcgttacaacgcacgaatataaactagtacagtatagcatgcctcgtcatgtcatcatcttcttcggcatcgtcagattcttcggcatcgtcagattcttcttcatctgcaatgtaatgaactggatatgcatatgctggcttcgacggtggcgttttttttggatactgtggccagaaaggcttcaattcctcctcctccttcttcttcttctcctcctcctcctccttcttcttctcctcctcctcctgaggctcttccttcggttttaattctccgatgcgaaatagggcagcatgttggacaataagccacagtatggtggtgaggtcgccgccgcggctgagctgcttggcatggctctccacgctgcatctggcggccgcatagagcagcttgtccacccacacgttgaagatgaactccagcagctgcggcacttgctgtcgcttctgcacactgatgccagcctctattagtgtattagcaagcgcagctgcattaccaacaacgagcctgccttcgtttcggtcaaaccatctccgacctgctttcagtctctctagcagcatttcggcaagcttgtcttgaggaggcggagtatctttggctgctgtagacgacgacgacgacgaaccaccagtagttttcttcttgccgtcgtcccatatctcgtgcaaagtttggcggattttctcgagcaggctgtggagcacaaggccaggcagcatgtgtcgacgtacagcgacgaagaacatgaggtattctgacatcaccttgatcgccgtcacatgggcatcggcggcgtcggccgaggatccccctggtatgctgactatgctctccttgccgcttgatgacgagaagagaatgcaaaaaaaaatatgccacatgaggacgtcctcctcgaattcacggccgaagctgggcaatttcggtttcttgttacttgttttcctaccatttttacggccgcgaccgaacaggttcgtcttggcgtcctccagggcctgctgaccccagagtgtcctgatgtctaccagggtgtagcggc

SEQ ID NO: 174307 - DNA, 492 bp, Zea mays
  unsure (1)..(492): unsure at all n locations
  Clone ID: MRT4577_90547C.1
gagtgncttcacttgttctgcacggccacaccacctacccatcctcccagccagagacacaacacagctagagggaggaagggggagagggacgatcacagcactgcgctgcactgacggagagatgaccaaggacgtggagatggcggcgcggaacggcagcaacggcgccgtcgccggcgaggcctactacccccctcccccggcgcagggcggcgacgtcgacgtggacgacgacggcaagcagcggcgaacagggacggtatggacagcgagcgcgcacatcatcacggtcgtcatcggttccggcgtgctctccctcgcctgggcgacggcgcaggtcgtatgaggcgtggggccagacaccctgttgatctgcgcgtgaattcctgactgacctccggactcctcgggatgtggatgttccttcagatgccacgactcgtccagacaaattggccggcactaatgacagtattgtcataggttgag

SEQ ID NO: 174308 - DNA, 344 bp, Zea mays
  Clone ID: MRT4577_90548C.1
ccactctatcttttacctcttgtgtttgggaaacaaccctccccaagttttttcctgccaccctcggctcaaggggggaaaacatccagaataggccagcgaaaggcgggtaaccttaaaggggtccattacaccccccccctccccgtcctgggtccaaaaactcatagctagccgatttataaatgtgataaaccaacgtccttctccctcgggtattcaacctgccggttaatgacacagcccattactcctgggctactgaccccgtttacttcaaccctttggacctgtgaatccaacctccctccatgaaccctgccagttcatttggccaccgaggt

SEQ ID NO: 174309 - DNA, 443 bp, Zea mays
  unsure (1)..(443): unsure at all n locations
  Clone ID: MRT4577_90549C.1
aattcggcacgaggcaagaaatgaggcccgcactcaaggaaatagtgtgggcttggcaagagaggggacggggagctttggctggcgatgtctgcatccatcggtgaaccagtgggatggggagtgggggaggctcagcgaactgcttgttctattgcggtgattgcaggccccgtcgctttcagtttgagcggaacagagacgacgatagtatcaaggtttcagcttccctacttgagagtggcagggctttgtttggtgtcaattctctgcttctgctaaactcttgcagaggcgtaagatgttttagttgcggtctcagatggaaagaggatgcagcttaagcggcccaaggccgtcacgtgggctttgctacttctcgtgttttctataaaccatatagatagatcttgtttaaatgatatatttatttaaacananna

SEQ ID NO: 174310 - DNA, 189 bp, Zea mays
  Clone ID: MRT4577_9054C.1
attaggacgcgtgggccgacccagaaatttggaaccgtttcttagaggcgtaccaattttccctatggggaggcgttttaaggctctggacaaaaatgggaatagcttgcttctatgggggaaattagaattcgggtgaaaattccacccaacattccagacgcggaaggataaagggtaaagccctgg

SEQ ID NO: 174311 - DNA, 368 bp, Zea mays
  Clone ID: MRT4577_90550C.1
accgaactcatcacttcaatttctacaaatgctccacgctcggcctgaatcctttggggcggtggggaaatctgtaaaggaacacttatacaagcggatgcatgggggatcaccgtaacttacgaagacaatttcaaaaccctgcaactgatcgaaagcttaacaatatacgatggaggccggaggagaaacaaaaggatgagcgggtgtcaagatgctgctgaccgccgaactatatcaggccgactgctttgcatgctctgctctgaaaggcttatacaagccatacagaaaagctttgtgcgcaacaggacctagcaggaccagatgatgatgattaacatgcaacattctaacttcggtcttat

SEQ ID NO: 174312 - DNA, 298 bp, Zea mays
  Clone ID: MRT4577_90551C.1
ccctctcgttgtcccgcatctcatacattttcttctctctgtctatacgtatatgccgaagttaatctaattgatcacaccgatcacacctgactcaatagcgctgcatgttactctactcagaacatgcactagttttatgaaccatgcgtcgtatactgcgtatggtcaacgtcagcatactcctacttatatgaatcagttacctccatactgtccacaaatccattaagactcaacaatgacacatctcttgctacttaacatttattctacaaaacttgtctataaatctcat

SEQ ID NO: 174313 - DNA, 318 bp, Zea mays
  Clone ID: MRT4577_90552C.1
atatttttttttttttttttttttggtttttttgggttttttttttggggttttcggggttcccccaaccaaccaacatttttgcaagggacattttaacaaaaacagggattcggggttccaaggggggcgccaaacactttgaaaaaggttccttttttaaaacccgggacccccaaaaggggaacaacgggtttgttttttttaaaaaaaaagcttaattccaggcggggggggtatttattaagcccccagggcccacccacagggccgggaggttcccacaccccgggggggggggccaacacaggggacccc

SEQ ID NO: 174314 - DNA, 1075 bp, Zea mays
  unsure (1)..(1075): unsure at all n locations
  Clone ID: MRT4577_90553C.1
ttttggctaggaattagcaaagacagtaaacaaagcttgatcaagcaaaactgtgacattgactactacagaaaggtctagcactactactctggcagcaatgcgcctggatttcctggttcgaactggcgtaattgacagactgtaaaaagactttcgaaagctttacatgctcaaaaatatccaagtttatcagcctacaatctattccacctttaaatatgtagtagatctaattagagtaccagatgaaagaagtgtagagccttgacctgacctagaacatgctcatgatggagatgaaatccaccatctttacttttttcaggaagataaagtgtgtccactcaaggaaggtcagtccttctatctccggcaacagacacacactgatactggtatcattgtgtgtatgccataaatctcaaactntggtatgtttctccttgtaccgcattgaaatgaaagcactggtagaaaggccaaactaggacccgctatgtctaccaaaagttctggtagtcatgtatctgaagcagctgcaatccccagataaggatctgggagcgaggcgacagtgttcacgcgcggccgcgcaagggagtcgcatggtacagaggtcagccaggagccaacatgcaatggggccattggggaagggtagcaaggtgggactacatcgtatcttagaactctcgcttgaccccagggaaggacctggtcacgtcgacgaaagggttccatagctgcggatggaggtgcttgccgcaacagcgcttgatatcgagttttgcgggtgcgacacgagatcagatcccatatcagaactctggcttgacgccacagaaggacacactaacaaaggggttcattaaatgtgggtcgaggtgctcgccgcagtggcgcttgatgtcgagcctcgcgtgtgaccaatctgtcgaggcaatgaactccaggaggccctgcaacggccagcgaggtagagcgcgaagatagacctgtagaggtcctcgtggaggtcttcgatggcgaggagacgggatgaattcccggcccggccggcctcgaggtaccc

SEQ ID NO: 174315 - DNA, 1305 bp, Zea mays
  Clone ID: MRT4577_90554C.1
caacagacacacactgatactggtatcattgtgtgtatgccataaatctcaaactttggtatgtttctccttgtaccgcattgaaatgaaagcaccggtagaaaggccaaattaggacccgctatgtctaccaaaagttctcgaactttggtatgtttctccttgtaccacattcaaattaaagcagtggtacaaaggtcaaaatgggactctctatgtcaatcaaaattttctgcaacatccaaagctatttcattacgaatggcatatggctgaagtgcttaactaagaaaagacagtagaacaacaaagagagaatccaatctaagttgatattctgcaataactctagggagcaccaattgagttattgcaggatcacaactcactgagctgaccacgtctggtcatgacatgccctagtagccgccagctgcttccggtagcaccataaaattttctttaaattgaagttggttttagaaacctatgttcgggctcacaaaaaagtgaccataaaaccacgatcctaaacctgaacaggaacaacagcgaacaaataaaacaacacaatccacaaatcctcaaatatgcgctcgaatcagacaccttcccgcaacaactgaagaaacgaagctaatccaaatcctggacagggagatgagagtatgaacctagtagtcatgtatctgaagtagctgcaatccccagataaggatctgggagcgaagcgacaatgttcacgcgcgaccacgcaagggagttgcatggtacggaggtcagccaggagccaacatgcaatgtggccattggggaagggtagcgaggtgggaccacatcgcatcttagaactctcgcttgacgccagggaaggacctggtcacattgacgaaagggttccatagctgcaggtggaggtgcttgccgctacagcgcttgatatcgagctcttcgggtgcgacgcgagaccagatcccatctcagaactccggcttgacgccacggaagggcactctgacgaaggggttcattaattgtgggtcgaggtgctcgccgcagcggcgcttgatgtcgagccccgcgtggtaccaatctgtcgaggcaaagaactccaggagaccctgcagcagccggcaaggtagagcgcggagatagacctgtagaggtccccgtggaggtcttcgatggcgaggagattggaggaaggtggtcagattgtagggggaggagggcgatggggaaggatggggggcagggaagggaaggagatgcttgacatggcaaagtctaggaaagcgtccccgg

SEQ ID NO: 174316 - DNA, 304 bp, Zea mays
  unsure (1)..(304): unsure at all n locations
  Clone ID: MRT4577_90555C.1
cacaacccagcaagacatcgacctgtaccacaccatgtacatggaggccctggtgaagctcttcgacaagcacaagaccaagttcggcctcccggagactgaggtcctggaggtgaactgagccagccttcggggccaattccctggaggaaccagctgcaaatcacttttttgctctgtaaatttggaagtgtcatgggtgtctgtgggttatttaaaagaaattataacaattttgctaatctactcccatgntagggccttctttaagaaggaaaaagttcagtatttcaagttctttcac

SEQ ID NO: 174317 - DNA, 336 bp, Zea mays
  Clone ID: MRT4577_90556C.1
ttttggctaggaattagcaaagacagtaaacgaagcttgatcaagcaaaactgtgacattgactactacagaaaggtctagcactactactctggcagcaatgcgcctggatttcctggttcgaactggcgtaattgacagactgtaaaaagactttcgaaagctttacatgctcaaaaatatccaagtttatcagcctacaatctattccacctttaaatatgtagtagatctaattagagtaccacatgaaagaagtgtagagccttgacctgacctagaacatgctcatgatggagatgaaatccaccatctttacttttttcaagaagataa

SEQ ID NO: 174318 - DNA, 294 bp, Zea mays
  Clone ID: MRT4577_90557C.1
cccacgcgtccgctgatgcttgtgaccacgcgtgcgacgacgcgtacgctgatgatcgtgaccgtcaccgtgatgagggagacacgtcaccgcgatgatcgtgattgtgagaggagatgagattgcgacagtgatggtcatgatcggcatcgctcacgctcatcttctaagagctgtgaccgagacagcagatgtagatctggttcacgctatcgatctaagagcaagcgcgtgagtggtgttgaccatgcagctatacatgatgcacttcctattgttgccgctggtgctatc

SEQ ID NO: 174319 - DNA, 305 bp, Zea mays
  Clone ID: MRT4577_90558C.1
ttttaaccggcaaatggcccatgccgcaggaattaattaatatacaacaccagcaagtacggttaaatgataagtgaaaaagaacggtctaatgaagccaagcatgaaagatcgatcgagcacctcgctacgagttacttactgcaactaacctactccggccgacacggcacgaaggcgccggagccgaatgctaacaaagaggatgctaggtgtcctacccgtacccggaggagaggctggtcacgggcaccgtcgatcgatctgcgactgcgatcaaccgctgtaggtgtgagggtgatgca

SEQ ID NO: 174320 - DNA, 182 bp, Zea mays
  Clone ID: MRT4577_90559C.1
tgccacttcacttcactccacccgtgcttgtattgaatcctcgtcttttccgttctctccgactatttccaagctttctccagatcaaatcagacaggggaaggtacgaacggcccaacagtgccgctctgcagcttctacgcctccaccgtccgtcccggcgtcaagccccagcagtccgt

SEQ ID NO: 174321 - DNA, 386 bp, Zea mays
  Clone ID: MRT4577_9055C.1
gagctcatgagttggcggccgtccttttgttttttttggggctgaggaaaaagacctatgtttattcaaaccacagttaggtgcccatctaccaaaagggagatcttacacatcctacacaacttttgtggtaacagacacttcccctcgaggaagaacagggtcccacggatttgccggttttatctaaactctagcatgccctcttatttgctaggagaaaaattcgctgtaaaaacattacctccttcacctggatgatgagaagtgcccgctgaaccatccgaagaagcattagctgcaccagggccggcgcctggggtaccgctgttggctgcacagggcctgcccgatctgcatgacttcctggtcaacccactgatggc

SEQ ID NO: 174322 - DNA, 312 bp, Zea mays
  Clone ID: MRT4577_90560C.1
gggggggaatttttgccattagcaggcctaccaggagcgaaaacaaagcttccagggctcgaaaaaaacgggtcaacctggcgcaaacacaatgccataatgctggcaggttaaaactgccaactcccaatcccaaacccttaagctgtaccaggagcggggactttgggggaatcggagtccgactgaccctcccactccggccaggacccattggaaactggcacataacgctttccgatcctgtacagccccaaagcgagtttgcaggcagtcaccccggatccccaggtcacgacaaagggtcggccc

SEQ ID NO: 174323 - DNA, 530 bp, Zea mays
  Clone ID: MRT4577_90561C.1
agacagccatagacacatctcaacgagcgccgaccggcagagctggccgacgcgcttcgtggacaatcaccatggctatggtgctgaggatggtgctggcgaagatctctggggagacgctcaagcacgaggtcctccacaccggcgccggttaccagatccgtatgctccggcccatcatgggcgggcagcctacctaccatcctaatgagatgagaggagacgctgatgaagctgtcaccgcacctggccaactacattggagagctagaagagccggagatcatcaagcctgatatgatcgtcatgacggctctcggcatcaccatcggcagaggtagaggcggggacgacgagaagatctgcatgacggtcccagttatcaccaccggtgtcagcgatcccgagcccattgtgatgaccgcgccggtgatttcggacgaccatcaagacgccggcaaggagaccatgcatctactgctgccggacaattacaccaggagtgcaggaggcgccgcgaccgacggacg

SEQ ID NO: 174324 - DNA, 370 bp, Zea mays
  Clone ID: MRT4577_90562C.1
gccatacccacctgatgcagaacctgcagcacaagggatcactgcacattctggggattctagccagtttgctggtgatccctacctgcctccaaatgtaacaacgtctccagcagatggaataatcatcatgctggatccgagagtgacaaatgaacccaacctaccaacgtgcaccttgaaacaccgacatgtcaaaatgaaccaggcgcatatactacatctgaatcatcaagaggaccatcaatctcaacactacacaccattgtaaaagaaccagagaaaagcggcccggcccaacatttaaagcagtatgctataaaccttgctgagggcagcagcagcagtggacgagacaggaatccgtaat

SEQ ID NO: 174325 - DNA, 161 bp, Zea mays
  Clone ID: MRT4577_90563C.1
gcaagtctgtgctttctgtatttgcaatgctgggtgcccggagattttcttgtttaccagtgtccgaaacctagtattgtgcagttcatgatctatgcatgttgaataaaaaaaaaaaaaaaaaaaaaaattagttaattttaaaagctttatttgaccaa

SEQ ID NO: 174326 - DNA, 300 bp, Zea mays
  Clone ID: MRT4577_90564C.1
atggcttccacatgccgacggcctccatggggaaaaagcgcagagatgtgtgataggctacaggagatgcgaaggaaaatccctgatcacgtcgtgcttgctgatcgtctccgtgtccacgtccgcctctcctctcagcatggccaccaccgcagacatgcccggccggcttttcgtgccgtcttgggtgcagaggagcccgatcttcagaaacctgcaggcttcgtcaacgtccaggtcgtcgccaaggaaatgtatgcaaagtgtgtagagatgcctttgttcagaaatgcagtttga

SEQ ID NO: 174327 - DNA, 197 bp, Zea mays
  Clone ID: MRT4577_90565C.1
cttcaaataatgttgtttggtttagggtcaaaggttgagataggattatctcagtgttgttccagttatccctcaaaattggaggaacgagagatgacgccacagaacgtcctgtctcgcaaccaaacgcaccattagcttctcaatccccttctaaacagctcaatgtatggtttgccccatttatgtgaagagaa

SEQ ID NO: 174328 - DNA, 384 bp, Zea mays
  Clone ID: MRT4577_90566C.1
gttaaaaaatgttttttatggttttattacatagccttgtttttaccaaggaaattaacccaatttccacaagatccctgtaaagactgtaaaagggtggcactggcatttgcgtgacatatgtgggcgtaataaccaaaaccatggagacctccggatgaccagatgggcagcaaaataccttcctgacaaggtcaacgagcatggccaggagagcctcccacatctggatcgcatagacctcagcgctgcccatcttcagcggggagtaaacacatgcaggggtggtccagcctactatcgggtctaactaccaaagacccaagcacgtgaccgaaaacccgtttcaccagtctgtgggtactctccccataacggagaccc

SEQ ID NO: 174329 - DNA, 503 bp, Zea mays
  unsure (1)..(503): unsure at all n locations
  Clone ID: MRT4577_90567C.1
gggggggggggtttttttttttttttttttttttttttttatggggacactgggaccacctgcctattactattacggggcagcatactgagacatcaaatacaggggggatattaccaatcaaaagtaaacttaantactggggggggggggggggggattttttccaaaagggggaacaactcttctcatcatccatgggggaaaattgtggacacggggtggtatgagttaaaaataaaaaaaggcgatgcgtttaacaaccaaagggggtcgggcaaaatgagtgcgaaaggggaagcgaccaaaaatatgaggagcatgaggggcaccatcaggacaaaaaatatttttatcatcaaccacctgttnaacaaaatgcgtggaaggtacttaaaggaggtgggcctgcgctccctccacggtagccacgggttcctccatggggtctcgggattctgagggggagctctccctggggagaaaccatgggggccaactgg

SEQ ID NO: 174330 - DNA, 908 bp, Zea mays
  Clone ID: MRT4577_90568C.1
tcgcgatctataactagccagaccgctggtaggagtatgtcggagacattgaacaacggctgcatggcgagcgcctgcgccacctccatccccctcgtgtcggcgaaaatgatggcctcctttggctgccccggcgggacgtgatgctcaacggcctgtccagtgtcgccgccgggctcgcctggtacccgggcgtcgcgtcgggcgcggatgcggtgtgcaccagggctgacaaggtgaacgagaagaccgtgcagtgcacggacccggccgggcagctcccgtgccctgtggtgtcgccgccggatcccgtggacttcaagccggaaagcaaggtgactcgcatccggcagccggtgcatctcttgagccgggagtcccaggagaagtacaaggaggccgtcgcgaatatgaaggcgctaccggaaaagaacccgttgagcttcgcggcccagggggccatccaccaggcttattgcgacgcctactacaagtacgacccgacggccaaggacgcgccgttcaacgtgcacttctcgtggatcttcgcgccgtggcaccgcatgtacatctacttctacgagggcgccctcgggcagctcatcggcgacgacaccttcgcgctgccgttttggaactgggacacgccggccggcatggtggtgccgccactcttcaaggactccatgggcaacccgctgtacgaccccaacaggaacccgtcgaacgtcgacgcgctggtggacttagactacccccccgccaggaatgcggagcccatccctttcaagggcccacgggacgaaaagtacaaggaacttgtgaacaagaacctgtgccccgtatacacccagtgttgcattaaaaaaaaaaaaaaaaaaaaaaaaaaaaaaaaaaaaaaaaacccc

SEQ ID NO: 174331 - DNA, 408 bp, Zea mays
  Clone ID: MRT4577_90569C.1
cccacgcgtccgccggaaagcaaggtgacgcgcatccggcagccggtgcatctcctgagccgggagtaccaggagaagtacaaggaggccgtcgcgaagatgaaggcgctaccggaagagaacccgctgagcttcgcggcccaggcggccatccaccaggcctactgcgacgcctactacaagtacgacccgacggccaaggacgcgccttcgtcggaggcgtgcagtgccgctaccggcggcttcccgaaccacaccaaaggcgggtacagctgcaacaacgacatggggttcctggggtcggcgggacacgacccgctcttctactcgcaccactccaacgtcgaccgcatgtggcacatctggtcgaccaggctcggcggcgggcagggcatcacggaggcggac

SEQ ID NO: 174332 - DNA, 300 bp, Zea mays
  unsure (1)..(300): unsure at all n locations
  Clone ID: MRT4577_9056C.1
gtgggggggggggggggtccaaagaacatgcacggggttgttggggtatgaaccttgggcagtttcatcattgcccatccaacatatattttgtgccgccggtagaagacctcttttttttttgttctgcnaaaccnacctgtttttggggttgtacgggggncanctcctagggcgttcncnctttacataaaaaaaaaaaaataaagccttgctcacaatgttcctgggcgggccgtccatgccttcattccgacccttgccagttgcggcgcacgtgctctggctgggcccgtgcct

SEQ ID NO: 174333 - DNA, 2468 bp, Zea mays
  Clone ID: MRT4577_90570C.1
acctcccgggcagctaaaatggctttatatactactggcttggcttgggcgtcgatggatgtgcgtctcatcgccaatataatacccaagccacaaactcgggcaacgtccaaaatccagaccgctggtaggagtatctcgtagacattgaacaacggctgcatggcgagcgcctgcgccacctccatccccctcgtctcggcgccctctgcatgcccgtccaagaagaccaccgtcgccaggttccggcgccgcacggcgacgtgcagggccagcagcggcggtggcggtggccggggcggcgaaaatgatggcctcctttggctgccccggcgggacgtgatgctcaacggcctgtccagtgtcgccgccgggctcgcctggtacccgggcgtcgcgtccggcgcggatgcggtgtgcaccagggccgacaaggtgaacgagaagaccgtgcagtgcacggacccggccgggcagcttccgtgccctctggtgtcgccgacggaccccgtggacttcaagccggaaagcaaggtgacgcgcatccggcagccggtgcatctcctgagccgggagtaccaggagaagtacaaggaggccgtcgcgaagatgaaggcgctaccggaagagaacccgctgagcttcgcggcccaggcggccatccaccaggcctactgcgacgcctactacaagtatgacccgacggccaaggacgcgccgttcgacgtgcacttctcgtggatcttcgcgccgtggcaccgcatgtacatctacttctacgagcgcgccctcgggcagctcatcggcgacgacaccttcgcgctgccgttctggaactgggatacgccggccggcatggtggtgccgccactcttcaaggactccatgggcaacccgctgtacgaccccaacaggaacccgtcgaacgtcgacgcgctggtggacttagactacctcaacgacaggaatgcggagcccatccctttcaagggcccacgggacgaaaagtacaaggaacttgtgaacaagaacctgtgcaccgtatacacccagcaaatacgtagcggcaagggcgccgagtcgttcctgggcgagaagtactgcaccgacatcgggtcaagcacgagcagcatgggttcgctggagcggatggcgcacactgccgtgcacgtctgggtcggcaaggcgggcccgacgccttcgtcggaggcgtgcagtgccgctaccggcggcttcccgaaccacaccaaaggcgggtacagctgcaacaacgacatggggttcctggggtcggcgggacacgacccgctcttctactcgcaccactccaacgtcgaccgcatgtggcacatctggtcgaccaggctcggcggcgggcagggcatcacggaggcggactggctcgacaccagcttcgtcttctacgacgacgtcaagagcccgcggaaggtgcgcatcaggttccgcgacgtcctggacacgcgcgacctcggctacacgtacgacgccgagtccgacaaggacctgccatggctgcgctgcaagatctcgtcgctggtgccccacggcaaggacagcccgccgaggtcatcgtcggcgaggaaggcggcggcgccggtgttcccgctcgccctgaccaagggccaggtggtggaggtgccggccgtgcctgtgccggccaaggacccggggaaggagcagctgctggtgatcgagggcatcgagtacgacccccaggcgaacaataagttcgacgtcgccatcaacctgcccgcggacaaagcgttgcaggtaggcccacagtacaaggagtacgccggaagcttcgccgtcgtgccgggctccggcgccgggaagacgcggaaagtgaagctctccctgtgcatcaccgaagtgctgttcgatatcgacgctgacggcgataaaaccgtcgacgtcgttatcgtgccgcgcacaaatgctaagatcacgctcaacgctcgccccaccatcaagaatcggaactaggagctagctgctactagtgctcatcaagcacactgtacgtacgtacgtatgtactcgatcgcgtggtcattcatcgaccatcatcgtttatatgctgtcacgcacagtgcgggacggccagtgttgcattattgtgtgttttatttcgcatggattaggatcgagccgcgccaatggtagattctacggaataaatataataacattgttatgattgatatcacaatgttatgaatgaaaaaaaaaaaaataaaagaaaaaaaaaaaaaaaaaaaaccgcgtgagaactgagatgagatgagacccgccacgcactgctggctggctgtttcgtctgttcaccgtccccatgagccagcagtggcgatttttaagttctaattgaagtagtatatgccgtcctgataatcctaccgctttgtatatatgttgcctggaattataatctcctcatattatat

SEQ ID NO: 174334 - DNA, 316 bp, Zea mays
  unsure (1)..(316): unsure at all n locations
  Clone ID: MRT4577_90571C.1
ttccccgaccacaccgacagctgcaggcggcagcggcgggnacgaggctcccccggcaccgnccagcgacacctccccgacgacgcctggggggggctactacggncccccctcgccatcatctgacacctccccggtgacgcctcctggcggtggcggcggcgggtacagtactgctgcttcgccgtccagtgataccttcccatcgacgcccggcggtggcggtggctgtggtgtccccccttcgccggccagtgctgcttctccaccgacacctggaggtggcggcgggttctacgggcctgcctgggcgccc

SEQ ID NO: 174335 - DNA, 781 bp, Zea mays
  Clone ID: MRT4577_90572C.1
gtttcgtttccgtttctttcctcccccccttccttccttccttcctccacccacctcccccctctcctctccggcgcgcctccccccaccggcgaatccgcaaccgaatcgaatcccaggatccgcgtcggcgggcggcggcggaggcacatggcgcaccgggtggacaacgagtacgactacctcttcaagatcgtgctcatcggcgactccggcgtcggcaagtccaacatcctctcccgcttcacccgcaacgagttctgcctcgagtccaagtccaccatcggcgtcgagttcgccacccgcaccctccaggtagaaggcaagacaattaaggctcagatatgggatactgctggccaagagaggtaccgtgcaatcacaagtgcttactacaggggagctgtgggagctcttttggtgtatgacataacaaagaagctatcattcgaaaacatcaataggtggctcagtgagctccgtaaccatgctgactccaacatcgtcattatgatggttggaaacaaatccgaccttaaccacctgaggtcagttcaggaggaagaaggacaggcattagcagagaaggaagggctatccttccttgagacctcggcactggaagccttgaacgtcgagaaggcgtttcagactatcctttccgacatccatcagatcataagcaagaaggcgctcgctgcccaggaggctgcaggaagtggacctccgactcagggaccaccatcaatgttgccgattcatccggcaacatgaagaaagg

SEQ ID NO: 174336 - DNA, 443 bp, Zea mays
  unsure (1)..(443): unsure at all n locations
  Clone ID: MRT4577_90573C.1
tttgctcgtggagacaggcagcgtgggcggcactcgttgctgcttggtagcaacccaaaaaggaaaaaggaattgaagagaacttaacagaggggatagaggcatatgaaaaaagacaaaggcctaagttcatgacgctttcatgcacgttctaagctagtgctttatatgaataaactatgaaactantaaaatatgattacatatttaaataaataactaaaaattcaagcgttgctgacgcattagcattctgcattccccatgaaacattactgagaaaagcgctaaggatggagcgttggatgcgctcattgaacatggtttctgtgtaaaaataggacaattggtgcctcgcaaaattcacttgacccaactctcaagttgtaattggcattcgaacgtgttcggtacatgtatgcgatgcccaaacatcttgaaga

SEQ ID NO: 174337 - DNA, 202 bp, Zea mays
  unsure (1)..(202): unsure at all n locations
  Clone ID: MRT4577_90574C.1
ccttagatagtcctaaagtctctacatggcgttaaccagctcagttagagtatgngttctttcttctcaacaaccccattggattgtggtgagtatggcggtgtcctttcatgaataataccatgttccacataaaaaacagaaaaatcattctgaaaaatatttctccaccacgattcagattcttaccccgtttattttt

SEQ ID NO: 174338 - DNA, 521 bp, Zea mays
  Clone ID: MRT4577_90575C.1
aacgccgggaacctaaaacgccaagtttttttgggggtttttcccggcccaaaagcagggttcctttgcaaaagaaaaatccttccgtaaacagggccggatggggccacgggggggggtcccctggcagtaaaaagggggccccaccccgaaggggaaccccgaccttatggggggccatttgccctagggaccaaagggtttaaaaaaaaaacagccctcccctaaaatgtaatgggcctgaacctcctcctgggcctggaactcctcctggggggaaggcgggtcctggaactgggggtcctccaaaacgagggggttaatgttgttttgggcctggggaaactcaatttgggcaatgccctggcccgggtaccagggaaaaaaagccttcctcctaaaaatgggaggaaactgttcgttaaccctcggaaaaatttcctggatggagggcaatttcccaataaagggggaccccttggacaggcccctgggggggttgtccaacaccctggatttga

SEQ ID NO: 174339 - DNA, 443 bp, Zea mays
  Clone ID: MRT4577_90576C.1
cccacgcgtccgaaaaaaaaaactaactttaaaaaaaaccaacaaatcaagggcctatgcgtgaacaatcaacaactgcaccaacatatgccaaaaacgagaacttacccagcagcgagtgtaaagccgaaggcgccacgcgcaagtgcttctgcaagaagatatgctagtaataaccttggctttgctggcacaagcaggtccgttgcacacaacgcaattcacgcatcatatctgaactccttacgcgttgctgtctactcgaccccgttttctctttcgatcgatttcgtagcttcctgctgctctcttcttttcccgcgaataatatgctacatgggatctcacttgtgtactttctgcatccgttggtagtcaagaccaaccttcttcccgctgtcacgtttgattcaaaatggatgtactaatgcaactgttcgttc

SEQ ID NO: 174340 - DNA, 211 bp, Zea mays
  Clone ID: MRT4577_90577C.1
cctgcgacaggagccgtggtcgcggacgccgtccacggctggtgtggatgctggaggccaagcccgccgacgagcgcgacgccgcggcgcgcgcgctggcggtggtcctgggcacatcgggcgggtgccacaaggcgttccggaaggacgagcgcggcgtggtgaacgcggtgcagctgctggacccgtccgcgccccgcgtggagacgcg

SEQ ID NO: 174341 - DNA, 230 bp, Zea mays
  Clone ID: MRT4577_90578C.1
cacacgtatacgatatttaaatgggaagcgacttatgtatgctagggtctcaattggaaaatgccgcagctgccattgactattgctactagccatcatcgcccttaccttagacattggttaaacgcagcagcatgataggcgcatgctcattctggtaggctggaactcgaaccctgactagagctactatcacattcatgaactatgtaagagctcccacaatcatt

SEQ ID NO: 174342 - DNA, 237 bp, Zea mays
  Clone ID: MRT4577_90579C.1
cgcgtacgagaaaaatagggtttcagtgtcggcagcctcttctcacgctggcgtcacctccgagccccacgtgccgagccagacaaccaccgggcccagatccatatccacctgttctggatctcacagccttcgcttatgctgttctttatgttcgccaccgcgatgtcttgggacgggtactgcggacagatctaccctggaagcgttgttccatcgacctgaaacgacccccct

SEQ ID NO: 174343 - DNA, 326 bp, Zea mays
  Clone ID: MRT4577_9057C.1
aaaaccccatatggggccttatttttaggttcatatgggaaaacttaacccactttccaattccattggcccctcccattacaaaatggtccccccaccccaatgaacaaaattaagacttacattacttacccccccctttaatttttttttaagggaaggggggaataaatttaaaaaacaaaaatagcccttttttttttggtcaccaacaaggggggggccccatttggacaaaaaaaaaaaagatgggggggcccattagttttaaaaaaaacattgcccatgggcgcccaccttaaccccgcagggccaaggggaagggg

SEQ ID NO: 174344 - DNA, 1741 bp, Zea mays
  Clone ID: MRT4577_90580C.1
aacgcctgcgcgccagctcccgcacgcgccgccagcccgcacgcgcgcgccgcggattcggtacgaccgccgcgaatttcgctcccacgcagccagccatggcgcggctcggccgcctccctacgcccgcggaacaaccgcgccaacaaccgcaacgctcgcgctccagcacgaccgccgcggattccgcagatccacctccatccgcgtcactcaccagtctcctcacctaatcccactccgccgccgccagcttgcccaccatggcggcgacaacccacgccgcctccatgtcgttcctcctctcccacccccagtcgcgctctgccaccccaagccgccacctcccgctccgtccggcagcccgccgcgtccggtgtgccaccgccgccgccgcctttccccggcggtcaccaccaagcaccggcgcacggcggatgagaacatccgcgaggaggcggcgcggcacccggccccgaagcagggcctgtcggcgtggtacgagcccttcccgccggccccgaacggcgaccccaacgagcgctactccctggacgagatcgtgtaccgctccagctcggggggcctcctcgacgtgcggcacgacatggaggcgctggcccgcttctcgggcgcctactggcgcgacctcttcgactcccgcatcgggcgcacctcgaggccgtacgggcttccttccgccaccgcatctcgctggagcagctcatccagcccatcgccaacggcgccaccgtgctctcgctcgacaccgacttcgacgggtgcatgcggctcatcagggaggtgaccgccgagctgcctatctacctcgccaactcgctcaactccctccgcctcgaggggcagaagacggcggccatcgagatactgcagcagttcgactgggaggtgcccgactgggtgatcgtgccgggaggcaacctggggaacatatacgccttctacaaggggttcgagatgtgccgtgccctcgggctcgtggaccgcgtgccgcgcctcgtctgcgcgcaggcggccaacgcgaacccgctctacggctactacaagacaggctggaccgagttccagccgcaggtggccaggccgacgttcgcgtcagcgatccagatcggcgacccggtgtccgtcgaccgggccgtggtcgcgctcaaggcgacggacggcattgtcgaggaggcgacggaggaagagctcatgaacgcgatgtcgctcgccgaccgcacggggatgttcgcttgcccgcacaccggggtcgcgctcgcccctgttcaagctcagggaccagcgcgtcatcgggacgaacgaccgcaccgtggtcgtcagcacggctcacggcctcaagttctcgcagtcgaagatcgactaccatgacagcaagatcgaggacatggcttgcaagtactccaacccgcctgtgagcgtgaaggctgactttggcgccgtcatggatgtgctgaagaagaggctcaagggcaagctctgattgcaatcaactgattggaatggtatcggggggtcttttaggcttcagaaattctgtctgggttaggctatctgtttgtggagtttagcaggagaatggatgtctctcctgcaagactggcgctctctcttgtgctgctacgatgtgttaccatggataataagtgacctagtcgctgttggattgaataaaaaaaaaaaaaaaaaaaaaaaagaaaaaaaaaaaaaaaaaagcggc

SEQ ID NO: 174345 - DNA, 152 bp, Zea mays
  Clone ID: MRT4577_90581C.1
gcagcatagaaagcacactagcgtaccatcaatggcagtcaaagaatgttgcctccctagcggcttgatcgatctgcaagggctgctacggcgaccattgatccggaatgtctccaagctcatatatccttgctcgatccgatgtacctgtc

SEQ ID NO: 174346 - DNA, 2538 bp, Zea mays
  Clone ID: MRT4577_90582C.1
ttgggtacctcgaggccggccgggatgaatttcaaaaaaaggaaaaaaaaaaaaaaaaaaattaaaaaaaaaaaaaaaaaaaaccggaaaaaaaaaaaaaaaaaagaaaaacacgattccgctgatcctccatccgcgtcactcaccagtctcctcccctaatcccactccgccgccgccagcttgcccaccatggcggcgacaacccacgccgcctccatgtcgttcctcctctctcacccccagtcgcgctctgccaccccaagccgccacctcccgctccgtccggcagcccgccgcgtccagtgcgccaccgacgccgccgccctttccccggcggtcaccaccaagcaccggcgcgctgcggatgagaacatccgcgaggaggcggcgcggcacccggccccgaagcagggcctgtcggcgtggtacgagcccttcccgccggccccgaacggcgaccccaacgagcgctactccctggacgagatcgtgtaccggtccagctcggggggcctcctcgacgtgcggcacgacatggaggcgctgtcccgcttctcgggcgcctactggcgcgacctcttcgactcccgcatcgggcgcaccacctggccgtacgggtccggcgtgtggtcgaagaaggagttcgtgctccccgagatcgagcccgaccacatcgtctccctgttcgagggcaactcgaacctgttctgggccgagcggctcgggcgcgaccacctcggcgggatgaacgacctgtgggtgaagcactgcggcatctcccacacggggtcgttcaaggacctcggcatgaccgtgctggtgagccaggtgaaccggctccgccgcgcgcggccttgtcgcgccccatcgccggcgtcgggtgcgcgtccacgggggacacctcggccgcgctctccgcctactgcgccgccgcggggatcccggccatcgtcttcctccccgccaaccgcatctcgctggagcagctcatccagcccatcgccaacggcgccaccgtgctctcgctcgacaccgacttcgacgggtgcatgcggctcatcagggaggtgaccgccgagctgcctatctacctcgccaactcgctcaactccctccgcctcgaggggcagaagacggcggccatcgagatactgcagcagttcgactgggaggtgcccgactgggtgatcgtgccgggaggcaacctggggaacatatacgccttctacaaggggttcgagatgtgccgtgtcctcgggctcgtcgaccgcgtgccgcgcctcgtctgcgcgcaggcggccaacgcgaacccgctctacggctactacaagacaggctggaccgagttccagccgcaggtggccaggccgacgttcgcgtcagcgatccagatcggcgacccggtgtccgtcgaccgggccgtggtcgcgctcaaggcgacggacggcattgtcgaggaggcgacggaggaagagctcatgaacgcgatgtcgctcgccgaccgcaccgggatgttcgcctgcccgcacaccggggtcgcgctcgccgccctgttcaagctcagggagcagcgcgtcatcgggacgaacgaccgcaccgtggtcgtcagcacggctcacggcctcaagttctcgcagtcgaagatcgactaccatgacagcaagatcgaggacatggcttgcaagtactccaacccgcctgtgagcgtgaaggccgactttggcgccgtcatggatgtgctgaagaagaggctcaagggcaagctctgagcgcctgtgcctggctaatgcaatcaactgattggaatgcagtggtttcgtcggtatcggggggtcttttaggcttcagaaattctgtctgggttaggctatctgtttgtggagtttagcaggagaatggatctctctcctgcaagactggcgctctctcttgtgctgctacgatgtgttaccatggataataagtgacctagttgctgttggattgaataatcatcactcgctcctttgtccctctgtgctggcaacgcttgtcgagtactttggatgtaactgcatgtattgttgttttgatcattttggtgttgcaatgctggctgttgttgttttgatccagtggatgtcaaccttgctggtctggctgtgagttccggttgcagagatttgatgcctgaatttctgttggtgctccatgaccatgactcgcaccagcctgtccagccatcgtggcccaaagtagatattcgtgtgcatcgcagcctagatgcagtttgcaaatagtaagcggcaggccgacaattagcatcatcaccaataaggcgcaatcaagtagtatgaacgtggtccaaagtggatgacctggcttttcttttttttaggcaaagtagatggtcttgtatcctctttttatgcaaagtcgtaggtaatctgggtcggtgattttgggtctgtttggtttcggcccatttgttttgttttggcggcagatcggtgcttgtttgtcatttggacccgattaaatgcatccgatcaagtt

SEQ ID NO: 174347 - DNA, 475 bp, Zea mays
  Clone ID: MRT4577_90584C.1
gggtcgatcccacgcgtccgcggacgcgtgggagctagattcggactgtgatgagaagcacgtttgggtgtttgattcaccttatactccgacgatcatctttatggcggacacaagagaggagcaaaatggggtgtgggtcaggctgagcgtctctgctgctgatgcatgatctttacatgtgtggcacttgagagtcaattcagatcgttggtaccccattggccgttagatcattgctatactggctggtgcacagcatttccagtgcgagagttagatgtcttggttaaccccccatgcgtattggatggctgggccagtggacttggctttggcttttttgttgttcctactggcaaacacgtcttgggcaccagcgtcttgctcgccctataccggcaacattgagaaaacagacggtgcgaaccgagatatggtctctcttttcttgggtgcttattattatcagggg

SEQ ID NO: 174348 - DNA, 159 bp, Zea mays
  Clone ID: MRT4577_90585C.1
tcggtgtacgctgtagtacacttgcaattcggctagtccctcggaggcgttcagctgcttcaagatgaagcgcaacatctgtcaccgagtccactggctgccatgcagatgacaccttcgtactttctatgagaagcgtatgtcgaacagaagttgctg

SEQ ID NO: 174349 - DNA, 473 bp, Zea mays
  Clone ID: MRT4577_90586C.1
aaaaaaagaaaaatggggagcctgaatgataaacggggggccctggggaaaaaaaaacggccgaggggccaaaaatccccccccgcaaaaaaaaaaacccttcccaaaaaaaaaagattgtccccccccccaaaaaaaaactttgaccccgccctgcctttatcctgggcccgggccggggcatgcttcccttttcaaatcagatcaaatcaaaaaaggggcacaagcacggggggggccaaggaaagccctgggccccccctaagggccaccgacccccttgcccgaatgtcgggggggggggcccccgggggggttggggtgggtttccctggcaaaccccccccgggggggggggacccggagccggaaccggagcccacgggaaaaaaaagctttaacccgggccttaaagggccgggaaaaccccaaatataaaaatggggccccgaagggaggttaaccgggccccc

SEQ ID NO: 174350 - DNA, 424 bp, Zea mays
  unsure (1)..(424): unsure at all n locations
  Clone ID: MRT4577_90587C.1
ggtgaaacaataatggtgtccctcaattccggcatgtgtttcctagaaataatcaatatattgattgagatttatctcantaaaaaaaaaaaaaaaaaaaaaaaaaaaaaaaaaaaaaaaaaaaaaaaaaaaaaaaaaaaaaaaaaaaaaaaaaaaaaaaaaaaaaaaaaaaaggggcggcccgttttaaaagaacccaacctaacgtccccggccatccaacgcaataccttttttttggggcccccaaaattaaattcacgggccgtcgttaaacaacgtcgggacgggaaaaaacccgggcgtacccaaattaaatcgcctggaaaaaaatccccctttccccagcgggcgtaaaagcaaaaaggcccgaaccgaccgcccttccaaacagttgcccaccctgaatggcaaagggaacccc

SEQ ID NO: 174351 - DNA, 355 bp, Zea mays
  unsure (1)..(355): unsure at all n locations
  Clone ID: MRT4577_90588C.1
cggtttcggaattacccggctgcgacgccacgtcgnntccgcccgactcgtcccgtcccgagttgtcagtcatatatgataaaaatttaaacncataacgttcagaagggggacagtcgtcaacgttgagaacgcanaatgtctttttgagggtgatacccatctagaggcatcaaagaagaaaatcgtctgctatatcaacacatncctcaatgcagntgaaatcacttaagagaattgcggaccaccaaatagagatggaaaggtacctcaaagcttggttgatagaagtttnttcccctttgtgctgaaaaagataggcatgccacccgttttgacttgtcccagaagagca

SEQ ID NO: 174352 - DNA, 379 bp, Zea mays
  Clone ID: MRT4577_90589C.1
ttccaccaaggcttccgccaagccttcccttgctttttcttccccttttaacaaattcttcttcggttgggggttccttaaggtttgggggagggccaatggcggcggttgatgtggagtaccgttgcttcgtcggcgggcttgcctgggccaccagcaacgagtcgctggagaatgccttcgcctcctacggcgagatcctcgactccaaggtcatcaccgaccgggagacggggaggtctcgcggcttcggcttcgttaccttctcctccgagaactccatgctcgacgctatcgagaacatgaacggcaaggagctcgaccgcccgtacattacccgtaaccaagcccaatccccttgccgttgccgttgccgccg

SEQ ID NO: 174353 - DNA, 673 bp, Zea mays
  Clone ID: MRT4577_9058C.1
cctcgaggccggccgggccggacagcggacacatctcctcgcatttcttcccatccgatccccccttcgcaaccaaaaccccaactcgcccgccgggaagaagccgaaggcggagaagcgggtccccgctggcaagtccgctgccaaggaaggcggcgagggcaagaggggcaagaagaagggcaagaagagcgtggagacctacaagatctacatcttcaaggtgctgaagcaggtgcacccggacattggcatctcctccaaggccatgtccatcatgaactccttcattaacgatatcttcgagaagctcgctgctgaggccaagctcgcgcgctataacaagaagcctaccatcacctcccgtgagatccagacctccgtgcgcctcgtccttcccggggagctcgccaagcacgccgtctccgagggcaccaaggccgtcaccaagttcacctcggcctaggctgcgcggccgccgcttgcaggattctctcctgtgttcacgtctcttgctgtagttaggtgctgctgcctgctggcttctatgtatgttatctatctgtctgtagcaactgtgttatctgataggaccgtaatggtgcttattcaacccagctatatgtttctatgtgaatcagcaaaaaaaaaaaaaaaaaaggcccctagggcc

SEQ ID NO: 174354 - DNA, 737 bp, Zea mays
  Clone ID: MRT4577_90590C.1
ccggccgggctcccccaactccccaaggccccaaccgcacccgtcgccccaacaaaacctccgagcagatcactacctccgctagcttcgtcatcccgcttaaccacaccacaccatcctacctttcctcacctctcactctttcagcactctgcttgcctaacgcttgctccccccacctcccactcccagatcgcgccgcggatcctcctcgcgatcgcgtcctgatggctaccaggtcggtttcctgatccctcgatcctcaatcagtctcacggcttctcgcttatcgatggatgtcgtggagctcgatgcggcgaggcatggatgcaaggtctgcggaaaaagcttcctgtccggccggtcgctcggaggacatatgagatcgcacatctcgctcggcgaggcagcgctggaggttcacgccgccgacgagctgacgcctgtttcgtcgaatggtggccggggctgtgacggactggtcgcgtacgggctgagggagaatcccaggaagactcggcgcctatccgactttgctgacgagaaggatgtcggccatggcgttgagtgcgggaagtcgtggaggtctttgttcggccacatacgcaatcatgcgtccggcgacaggtatcacgacgtcgacgacgacgaggacgaggaagaggatgaattctctgtagaggagggggaagcagaggaagcagaaatggtgaggccgacggaggcgcctgtggcgg

SEQ ID NO: 174355 - DNA, 461 bp, Zea mays
  Clone ID: MRT4577_90591C.1
aaaaaggctcaaaccttcccatgattattaaaaatgatggggaatagtacaaagttacaaacagcaaaactgggagtttggagtcaaaatgcaagcagcaaacaagctttatacaacactgttagcgggggtaaaaaaaaagggcttaaaaagggcttaaacttgtactggacaaatatccgcagcccattgctaaaacaatggcatgggaagactctgataaaagctatttttcacttctggaatccagggataacccttaaaacaaaaaaaatgttatggataaaacctcggggcaaaaggagcttggcaacaaatttcctgcccacccccccccccccaaaaaaaacccaaccctaactccaaaaaaaaaaaaccaccagttggttgcttcattttcaaacccccaaataacttacttagttcaaaagacttaaaaaaaactaccccaaaccatgccc

SEQ ID NO: 174356 - DNA, 245 bp, Zea mays
  Clone ID: MRT4577_90592C.1
atcacattaaaatccggaaagggaacctcttatttcgggggggccacatacatcatccaaaaaactttattatggaattacaacggggggggggtctaaaagagggccccaccacagacgggtcgccggtaggaggcccctgggtctggcaaaccaagttggacaaagggcaacaattgttgtaattgcaaaaggggcgcggggctacccgcaaactgctggtaaaaggggaataaccccgcgtg

SEQ ID NO: 174357 - DNA, 457 bp, Zea mays
  unsure (1)..(457): unsure at all n locations
  Clone ID: MRT4577_90593C.1
taccgtccgnattcccgggctggaaatcagcatgctctactgttgttctgttctgaacatgtgactagtaggacacataatcgtcgaaccatggtgtgaggaatacggacgacacgggtacggaaggaccggcgccgtcgactactaccacagcgcgctctacagcaagtccactactgaagactacggtcgaagggaatgtgtctacagcacgttaggcgggcatgactaacactgccggaacgggcgcgatgggtactggatgctcatactggacaactacggccgtgtcaccggtggaagcagatacaacaagtacagcgcattgtgatgactactgccgtagcgtgctcgacgactaccgtcgctgacacggatgtggctgttactacaagatcaggaaactacggttacaacagctggtacaacacattgggctccagcaacgacgactata

SEQ ID NO: 174358 - DNA, 617 bp, Zea mays
  Clone ID: MRT4577_90594C.1
cctcttcttccactgcctctctcaccgagctagacgtgttcctcgatcccgcccctgtgtcccccactgtcgcccccttcccctgcaggttcgttcaccgcgcctccccgtgcggccccgcctgtgacgctctcccctgcacaacctcgtgcagccttagtgtcccctgcgtcgcctggcacgaccccaccggtgccaccctccccacacagccacgtgcggcctcggtgtcccctgcgtcgcctcgcgcgaccccactggcgccaccctcccccgcacagccacgtgcggcctcgacgtctcccgcatcgtcatgaccgaccctgtcgtctcgctacaccaaccccatccagacgtatcagcgtcgtggtcatcgcggtgcaccgcctcgccctcgcgccgaccccccccccggcctatcaccccgtcatcgtccaccgggatccttgccacatccacccgatggtcaccccgcgcacggcgggtgttctccaggcccctgatcgtttgattctcgccgcggcctcttctccgatcctaccgccggttcccacgactattcatggtgcgcttgtcgatccgcaatggcggtgtgccatgcaagaagagtacgacgc

SEQ ID NO: 174359 - DNA, 781 bp, Zea mays
  Clone ID: MRT4577_90595C.1
acctcacaaccccacacactgggaacccgactcagccccgcaagccccaagaaaaggagagaaccagaaccccgcgtggcgctccggcgcaagtctctcggctcccgtctcctcgtctccgcggcggtgccggaagggaactcgtcaaaaacaagaaatcaaagtctcaaggaatgctgaaagatgtgcttgcatagaagagatctcttctgtgagaccaagaacatcaccactctgcgtgggcccatttggtcacctcttgatgtgagcagccaccttgcctgcatcaactccacgccattcagactccgctatgacgaatccaccagagtgctggatcatgacttcggggaggctggctgaagtgtcgtagcatatttaagtggtagccacaagaatactgatttatactcttgaaggcatggagaacagtgggaagatcgtaatgggtaggtatgaggtggggagattgttagggaaaggagcatttggcaaggtgcactacgccaagaaccttgagtcaaaccgaggtgtcgccataaagattttggacaaggagaaggtgctcaaggtcgggctcgcggagcaggtcaggcgtgagatcacaaccatgcggttggtagcgcacaaaagcattgttcagctccatgaggtcatggcgacacgaagcaagatctacttcgtcatggagtacatgaaaggcggtgagctctttgacaaggtttccaaggctggcaagctcaccgagggtgctgcacacaagtatttccagcagctcatc

SEQ ID NO: 174360 - DNA, 615 bp, Zea mays
  Clone ID: MRT4577_90596C.1
gaggtcaactgtccccacctttaaatcttacggaattgtccaagctcatatatcagactgcgtgtcagaaacattttcagccatccgtactgttaggtcatttggtggcgagaaacgacaaatttctatgtttgacaacttggcactttcttttcaaaatagcggcacaaagctaggagtgctgaaagctgccaatgagtcattgactcgagtggtagtttatatttccctaatggcactttacattcttggtggaagcaaagtcagtgcgggcaagttgtctattggaacaatggcatcttttattgggtacacattcacactgacctttgctgttcaaggagctgttaatacccttggtgatctgcgtgggacatttgcttcaatagagagaataaattctgttctgtcagcaaaggacattgatgattcacttgcatatggtttagcgaaagaacttgacaataaagaacctgaagattctaatgctagagtgcatgaaaacggcactgttaacacacattacatgtcagcactgaaatcttcaagcagctgtagtgatctagcctggtctggagacattcacctggaagatgttcatttctcctatccact

SEQ ID NO: 174361 - DNA, 485 bp, Zea mays
  unsure (1)..(485): unsure at all n locations
  Clone ID: MRT4577_90597C.1
tccacgccgtccgcttntcaaccggtgcggggcgccgatcgtcacagtacagtagtaggccacagcatttatttctttctccgnagtggatnnttgcgcctgtagcgatcacgttcattccagnaagcgagccggagcctgtagctgagctcgtagcgagcgttgccngttgctttgagaaaaccnnctgctgccatggcttctccaccgggggcgagggcgtatgctaccaggccggcgagaaccaaggcgccgcnnaccgaggagaagaccgggcaggcgtgntgggggcgaccaaggtacacggncgcagcacgcccaaggaaacctgggcggcggacgccggcgggcaccgccggcgggcaaggggcccaggaacgccaaggagggcgcaccaagcagaagggcgtcccgacaccggcagctacccctgggcaagaaagaaccgacgaggcgccaagcacaataggccggcgagtacgacg

SEQ ID NO: 174362 - DNA, 731 bp, Zea mays
  Clone ID: MRT4577_90598C.1
tctttattatcgatttgatctttagatgtgctctggcttttgtcagtgtaaacaataacaaaaaagccttttatcccaagcaagatgggggtgcataaactagcaacaaagggaagtagaaataaaagacattaataattgtatgatagtccaaagggattgaaaatccatttctttggagtttaatgtagttcaagagtttgatattttttctatttggattgattatagctttgcattatctaattagtttccatatttgtccatgttaaatacttctaactcaccaaatcttgatttcttatcttctgaaatcttgttggtaatcctgctcttgtagtgtgaaattttctaccatccagttaccctgattctaatttagctagtatgtgaattgcaggttaggaattgatgaggaacttgtggaactattggggcactattcaccaatcccagtcacttatgctgggggtgtgtcaacaatggacgacctagagaggataaagaaagcaggcaaaagtcgggtagatgtaacaattgggagtgctctagatatatttggaggagatttgccttacaaagatgttgtcctttggcacaggaagcaaagtatggttggtcaagtgtgaagaaacacaaggtattgatcagtattaccagttcatttgattcaagcttctgcacaaagtatattttctgaacatttttgttcaaataattcagttaggcta

SEQ ID NO: 174363 - DNA, 517 bp, Zea mays
  Clone ID: MRT4577_90599C.1
aaaaaagtactctcttacttatgggagaccccgagcttcacaacgaaaaactttattatgcaactataacgtatgacaaactgaaacgagggcaccaccactgaagggttgttggaaaaaagctgccggttgtgacaaagccagatggttgaatggcagtaatagttgcacttggaacagggagccctcgttgggcgcatcgagctgttacaaccgcaacaactgtggttgtggcataaaaggagcaaggttcacaccacctaggtggctgaagggcagaacttgaaggtgcgtggacataagcgagaaagtgcctgctgtaagactggctgactgggagaaattgcccgggagctgcacccatacatctggttcaatggcatttgttgtgagctgcccatgagaagccccacctcaagggaactggttctttaaacgcaaaaaactgctgatggtcgcattactcctcaaggcacgctagctcaaggtgctgaagctgctgcgccctgatgttacg

SEQ ID NO: 174364 - DNA, 822 bp, Zea mays
  Clone ID: MRT4577_9059C.1
gccggcctggctgggaacacagcgaacacatctcctcgcatttcttcccatccgatccccccttcgcaacccaaaccccaactcgccccgcatcgatggcgcccaaggccgagaagaagcccgcggcgaagaagccggcggaggaggagcccgcggccgagaaggcgcccgccgggaagaagccgaaggcggagaagcgggtccccgctggcaagtccgctgccaaggagggcggcgagggcaagaggggcaagaagaagggcaagaagagcgtggagacctacaagatctacatcttcaaggtgctgaagcaggtgcacccggacattggcatctcctccaaggccatgtcgatcatgaactccttcattaacgatatcttcgagaagctcgctgctgaggccgccaagctcgcgcgctataacaagaagcccaccatcacctcccgtgagatccagacctccgtgcgcctcgtccttcccggggagctcgccaagcacgccgtctccgagggcaccaaggccgtcaccaagttcacctcggcctaggctgcgcggccgccgcttgcaggattctctcctgtgttcacgtctcttgctgtagttaggtgctgctgcctgctggcttctatgtatgttatctatctgtctgtagcaactgtgttatctgataggaccgtaatggtgcttatttaacccagctatatgtttctatgtgaatcatctctctatcggttgttgagtacctttatattgtgatgttgatgtgaatgtgatttataaaatgcgtcagtttctacggtaaggttagctgctggccatc

SEQ ID NO: 174365 - DNA, 293 bp, Zea mays
  Clone ID: MRT4577_905C.1
acccactcgtacgcccaggctttcgtccactcattcaaactccttatcgtcgactgcgtcacctaccctaagacgtgctgtgctaacagccactgcggagggatcctctctatatgcaactactcttccatacacagtgtgctgtactgcaagacccacttctagcagctcttcaacgagacctttagcttcttcaagaacttcacgccatgtggcaagtcttcagacaatggtgaactgacaatggcccccagcaagctatcatctgcgtttcctagtactcatgataagtg

SEQ ID NO: 174366 - DNA, 663 bp, Zea mays
  Clone ID: MRT4577_90600C.1
cagggcacgccgcgcgaccgccgctcgccggctcccgcagcggtttccgccgcctcggtctccgcggcatgaagcagcgcctcctcgtcgtggccaaccgcctgcctgtgtccgccaaccgccgcggcgaggaccactggtcgcttgagatcagcgccggcggcctcgtgagcgccctacttggcgtgaaggacgtcgacgcgaaatggattggctgggcgggtgtcaacgtaccagatgagattggccagcgagccctcaccaaagctcttgcggagaagaggtgcataccggtgttcctggacgaggagattgtgcaccagtactacaatgggtactgcaacaacatcctgtggccgctgttccactatctaggactgccacaggaggacaggctggcaacaacgaggaactttgagtcgcagttcgacgcgtacaagcgtgctaaccagatgttcgctgatgtcgtgtacgagcactaccaggacggggatgtgatctggtgtcatgactaccacctcatgttcctgcccaagtgcctcaaggaccctgacatcaatatgaaggtcgggtggttcctgcacacaccattcccgtcatcagagatttaccggacactgccgtcccgcttggagctgcttcggtcggtgctatgtgctgatt

SEQ ID NO: 174367 - DNA, 560 bp, Zea mays
  Clone ID: MRT4577_90601C.1
cccctccccccccccctccccccccctccccccttttttttttttttttttttttttttttttttttttttttttttttttttttttttaaaacaagaccccattttcaaccattttcctgggcttcctcaaagacaagctaaaaaaattttggttccctcctccaaaaacaaaaacccttggctttttgggcgattcattttttaaggaaccccccccccttttttttcacaaaactgggaaaagaaaataaatgggcaaaaggcccatttgaccacccttgggcggggccttttttcaaaccacccatttggggacccaaatcggacccttttttttctccaacccctttttaaattactattttttccgaggccgaaggttttgaaggggggacttcagttggttttccttggcccggcccaacttttgcccttgaaaccttaggtttgaagtttgcaattttcggttttgaaactatgggtctttggtccaccctttgggggggcaaacccttcacaggagagttttcgggaccgcccttagaaaaaattttttaa

SEQ ID NO: 174368 - DNA, 393 bp, Zea mays
  Clone ID: MRT4577_90602C.1
ccgtgcaatggccaagtgcccccgacttctccctaccccgcgagagaacccaaattggcgtctccaccatcactaccggtgtcgctcgagacgacgaacgggggaggaagcgaccagtggccacgagcgaacgttcctgtccaggcccaagtccactctttgtcggcggaagaagcactggatcacctcgacagggagcggcggctccacgacttctacattgaaatcttcaaggatatcaccatctcaggagccaggatatcacaagcctgccacacatttgaaatctgttctactgaaaattttggagctcgtggattggcttgacaaggtttcaatcctttgctccgaagtggtcggcgtgaatggtcggcggcgccccggcgtcggcgt

SEQ ID NO: 174369 - DNA, 381 bp, Zea mays
  Clone ID: MRT4577_90603C.1
acccactcgtcctaaaaaaaaatacaatcactaactaattaaattaaaaaaaaaaaaaataataaatatattaaggtattacgtactatatccgtaaataaaaaataaaaactaaacaaatataaaataaaccaaaaataaccttacttaacaaaacactataaaaaaaatccctccttttaaaacttccatacttaattcctattctttccaaactttccctctttattttattcccccaatttaaaattatttacccctattttaaaaatgctactcctttaaaaccttttccttccccaaattaatacccttttaaacaaacccctttttaccactttcctttattataaaaattccccctcctaaccccttttaaaa

SEQ ID NO: 174370 - DNA, 1171 bp, Zea mays
  Clone ID: MRT4577_90604C.1
cattgggacctcgagccggcaggcgccggcgccgccgtccgcctcctcgacgaggccaagaagatcaccttcaacctcaccgtctggcagctcgtcagcatcgagcctgggccctggaccgagagcctccgccgcgagtacgtcaagctcgtcgacggcttcttctccatccccttccccttcgcctacctcctccctttcaccgcctacggccaggccctcaaggcgaggaagaaggtggctggagctcttcgggaggtgataaggaagaggatgggcgaggaggccggaactggccctggcgccggtagaaatggggagaagaaggacatggtggaggagcttctggaagcagagggtgggagcttctcggtagaggagatggtggatttctgcctgtctctgctggtggctggctacgagaccacctccgtgctcatgacgctcgccgtcaagttcctcaccgagacgcccactgcactggcgcagctcaaggaagagcacgacagcatcagacacaggaaaggcaaggacgagcagcctctgcaatggagcgattacaagtcgatgccgtttacacaatgcgtgatcagtgagacgctgcgcgtggctaacttgatcagcggggtgttcaggcgggcgaacaccgacatccatttcaaagattacgttatcccaaagggctgcagaatcttcgcgtcgttccgagccgtgcacctgagccccgagcactacgagaacgctcgcgccttcgacccctggagatggcagcagagcaagaaggagggagtacgagtagtagggcaggacgcgcagcagggggccaggccgtgttcactcccttcggcggggggcctcgcctgtgcccgggccacgagcttgcccgcgtggtggtctccgttttcctccaccgtctggtgacgcgcttcagctgggaagaggctgaggaggacagggtcgtcttcttccccaccacccgcaccctcaaagggtaccccatcatcctgcggcggcgaccgggttgggatgtctgacctcatcatgttacaatagagtcgatccatctatagttgttaccctcatctctctctctctctgtctgtctgtaataacactactatctaatataaacaagcatctccgctggaaaaaaaaaaaaaaaaaagcggcc

SEQ ID NO: 174371 - DNA, 2364 bp, Zea mays
  Clone ID: MRT4577_90605C.1
agaactaaacttccgcttccaatttacacaacagcatactccggctcgatggttcgtgttggtcagatgggtggctggtggtgcccaagtaatctcttatctctgtaacagcgcatcactcacacgaccgggaatctgtcactccccgacacgcgcacgagctccactccccactccgcacccaacccaaaggcgccactgccatggacgcgggcggtccgccgccgctgttcctcctgggcgccgtgctggccgcggcgctggggtggctgctcgtggtctggcgggcggcggcggggcggcggcggtccgcgtcggcgcggctgccgccggggagcacggggctgccgctcatcggggagacgctgcggctcatcgcggcgtacaagtcgccgaacccggagccgttcatcgacgagcgcgtggcgcggcacggcagcggggtgttcacgacgcacgtgttcggcgagcgcaccgtgttctccgccgacccggccttcaaccgcctgctgctggccgcggagggccgcgccgtgagctgcagctacccgtcgtccatcgccacgctgctgggcccgcggtcgctgctgctcacctcgggccccgcgcacaagcgcctccactcgctcacgctgacccgcctcggccgcccggcctcgccgccgctgctggcgcacatcgaccgcctcgtcctcgccaccatgaggggctgggaccgccccggcgccggcgccatgcgcctcctcgacgaggccaagaagatcaccttcaacctcaccgtgtggcagctcgtcagcatcgagcctgggccgtggaccgagagcgtccggcgcgagtacgtgaagctcgtcgacggcttcttctccatccccttccccttcgcctccctcctcccgttcaccgtctacggccaggccctcaaggcgaggaagaaggtggccggagctcttcgggaggtggtaaggaagaggatggacgacaaggcggaggacgactgtggcgccagtaagaagaacggggagaagaaggacatggtggaggagctcctcgaagcggagggcgggagcttctccgtggaggagatggtggacttctgcctgtccctgctggtggctgggtacgagaccacctccgtgctcatgacgctcgccgtcaagttcctcaccgagacacccaccgcactggcgcagctcaaggaagagcacgacagcatcagaggggtaaaaggcaaaggccaagctctggaatggagcgattacaagtcgatgccgtttacacaatgcgtaagcagtctggatggagtccgatccatccccggttttcttcagatcgccttccatctagctagcatctccattcttttgcagtagtagacatctctctcctcctcctgaaaaaaaaaagaacagcttgagcagagagccggatgtgctcccgtcccgtctgtgcaggtgataagcgaaacgctgcgcgtggccaacctgatcagcggggtgttcaggcgtgcgaacaccgacatccacttcaaaggctacgtgatcccaaagggctgcaagatcttcgcgtcgttccgagccgtgcaccttagcctggaccactacgagaacgcccggaccttcgacccttggagatggcagcagggcaagagcaagctgcagagcgcggaaggggccagtctgttcacgccgttcggcggcgggccgcggctgtgcccgggctacgagctcgcccgggtggtggtttccgtcttcctccaccacctcgtcacgcgctttaggtgagccgtccttctctttattctctcccgccggctgtctcttgaggcggctctgtgtgtgtgtgtgctcggaagtcggaacgatgctatgccgctcgctctgattggattggattcttgaccaacaaacagctgggaggaagccgaggaggacaggattgtcttcttccccaccacgcggaccctcaagggataccccatcatcctacggcggcgaccggattgcgatgatctctgacctcatggctatgttctccccccttatcttcttcggatcaaggccgaaggctaagcattagatagagtaaggtggatgtcgtggctagtaggtgcatggtggtttctgccactcactcactcactcactctgttgtctgtttgttcctgttcctctctgttttctcttgctctgtaacctggacctggtacgagtcagcagccagcagcaaactcgcgttttgcctgtaaaatcatggggacgtcctgcggtgccggtgccgccgctcccttcatgctcgtgcatgcaacgttgttagctaggctgtcgcggtcgtcgccgaccccgcacatgtcgtcgttcctatgag

SEQ ID NO: 174372 - DNA, 807 bp, Zea mays
  Clone ID: MRT4577_90606C.1
gccggccggtccggaggcccaagcgaagcatccagcggatccacaccacaccacccttggtccggcactagcactagctatccagtggagacgaagatggcgacggcgcggtggctgcaggttgccgccatggcggtggcgctgctggcggagtgggcgacggcggcggcgcctcggaagcccgtggacgtgccgttccagaagaactacgtgccgacgtgggcgcaggaccacatccactacatcgacggcgggcgggaggtgcagctgtacctggacaagtccaccggcacgggcttccagacgcggggctcctacctcttcggccacttcagcatgcacatgaagctcgtcggcggcgactccgcgggcaccgtcacggccttctacctgtcgtcgcagaactcggagcacgacgagatcgacttcgagttcctgggcaaccggacggggcagccctacatcctgcagaccaacgtgttcaccggcggcaagggcgtgccgcccgagtgcgcccgcgaccgcgacgtctgatgatgatgcgttgggccggcaagctgcttgatcgagagcagcctgtaatgtatgtatggtatggtattgttgtgtgtcaggttcgtcgtcgtgggtctgcagagacagagagagtccgatccggcgcgtacgtgtgcccgcgtgggcacatgcatacgtacatgcttgtgttgtactgtacgctcgtatctcctccccccgaaatgaattgcgattaagtatcgaaaaaaaaaaaaaaaaaaaaaaaaaaaaaaaaaaaaaaaaactcgaggg

SEQ ID NO: 174373 - DNA, 189 bp, Zea mays
  unsure (1)..(189): unsure at all n locations
  Clone ID: MRT4577_90607C.1
gcgcgcgcggtcgcgactggtttcaggtgtcancntntctgcaggcataatcacaggagccgactaggtggngggagcagagcagcacttgcaattgcaaccagcaggcgcangagaggagggggctcaagagtcttgacgcgtttagccttagaagaaaagggttcaagcgagaagagggggggagag

SEQ ID NO: 174374 - DNA, 330 bp, Zea mays
  Clone ID: MRT4577_90608C.1
attcggctcgagccaaaatatctatatatctttttcaatccagaagatcaaaagaataatctaaagccttaaaccaaaacctagggggcggccgcctgcccgggaccttgctcacctagaaataaattcagacccggatcccggagatgtgccacatttccctatccatagttgcatttgaccttggcgtactcatgatcatgggcgttctatgtgggaaatggtcatccgttcacatttacacacaccattctacccggaaagatagattgaaagacctccggtcccaacagagcaaactaactcacattatctgggtcgcgctcactg

SEQ ID NO: 174375 - DNA, 1407 bp, Zea mays
  Clone ID: MRT4577_90609C.1
atcacgctctagcctgccagctctccttcgtccttccgtataacattgggtacctcgaggccggccggggggaggcccaagcaaagcatccagcggagccacaccacaccacccttggtccggcactagcactagctatccagtggagacgaagatggcgacggcgcggtggctgcaggttgccgccatggcggtggcgctgctggcggagtgggcgacggcggcggcgcctcggaagcccgtggacgtgccgttccagaagaactacgtgccgacgtgggcgcaggaccacatccactacatcgacggcgggcgggaggtgcagctgtacctggacaagtccaccggcacgggcttccagacgcggggctcctacctcttcggccacttcagcatgcacatgaagctcgtcggcggcgactccgcgggcaccgtcacggccttctacctgtcgtcgcagaactcggagcacgacgagatcgacttcgagttcctgggcaaccggacggggcagccctacatcctgcagaccaacgtgttcaccggcggcaagggcgaccgcgagcagcggatctacctctggttcgaccccaccaaggagtaccactcctactccgtcctctggaacctctacatgatcgcgttcttcgtggacgacgtgccgatccgggtgttcaagaacacgagcgccgacctgggcgtgcggtacccgttcagccagccgatgaagctctactccagcctgtggaacgccgacgactgggcgacccgcggcgggcgcgagaagacggactggtccaacgcgcccttcgtcgcctcctaccgcggcttccacgtcgacggctgcgaggcctccgcggaggcgcgcttctgcgccacccagggcgcgcgctggtgggaccagccggagttcagggacctcgacgccgcgcagtaccgccgcctggccgacgtcaggcgccgctacaccatctacaactactgcaccgatcgcgaccgctacggcgccgccgtgccgcccgagtgcgcccgcgaccgcgacgtctgatgatgatgcgttgggccggcaagctgcttgatcgagagcagcctgtaatgtatgtatggtatggtattgttgtgtgtcaggttcgtcgtcgtgggtctgcagagacacagagagagtccgatccggcgcgtacgtgtgcccgcgtgggcacatgcatacgtacatgcttgtgttgtactgtacgctcgtatctcctcacaccgaaatgaattgcgattaagtatcgaaatttcggcagcttatccatcatgtaatgagttcctctgcagtacttaaaactctcatcgtctcttgtctgtataaaaaaacaactcttgcaaaaaaaaaaaaaaaaaaaaaaaactcgaaaaaaaaaaaaa

SEQ ID NO: 174376 - DNA, 1803 bp, Zea mays
  Clone ID: MRT4577_9060C.1
gaggctggccggaacacagcgaacacatctcctcgcatttcttcccatcccccttcgcaacccaaaccccaactcgccccgcatcgatggcgcccaaggccgagaagaagcccgcggcgaagaagccggcggaggaggagcccgcggccgagaaggcgcccgccgggaagaagccgaaggcggagaagcgggtccccgctggcaagtccgctgccaaggagggcggtgagggcaagaggggcaagaagaagggcaagaagagcgtggagacctacaagatctacatcttcaaggtgctgaagcaggtgcacccggacattggcatctcctccaaggccatgtcgatcatgaactccttcattaacgatatcttcgagaagctcgctgctgaggccgccaagctcgcgcgctataacaagaagcccaccatcacatcccgtgagatccagacctccgtacgcctcgtccttcccggggagctcgccaagcacgccgtctccgagggcaccaaggccgtcaccaagttcacctcggcctaggctgcgcggccgccgcttgcaggattctctcctgtgttcacgtctcttgctgtagttaggtgctgctgcctgctggcttctatgtatgttgtctatctgtctgtagcaactgtgttatctgataggaccgtaatggtgcttattcaacccagctatatgtttctatgtgaaaaaaaaaaaaaaaaaaaaaaaaaaaaaaaaaaaaaaaaaaaaaaaaaaaaaaaaaaaaaaaaaaaaaccaccggcgaccacatctcctcgcatttcttcccatccgatccccccttcgcaaccaaaaccccaactcgccccgcatcgatggcgcccaaggccgagaagaaacccgcggcgaagaagccggcggaggaggagcccgcggccgagaaggcgcccgccgggaagaagccgaaggcggagaagcgggtccccgctggcaagtccgctgccaaggaaggcggcgagggcaagaggggcaagaagaagggcaagaagagcgtggagacctacaagatctacatcttcaaggtgctgaagcaggtgcacccggacattggcatctcctccaaggccatgtccatcatgaactccttcattaacgatatcttcgagaagctcgctgctgaggccgccaagctcgcgcgctataacaagaagcctaccatcacctcccgtgagatccagacctccgtgcgcctcgtccttcccggggagctcgccaagcacgccgtctccgagggcaccaaggccgtcaccaagttcacctcggcctaggctgcgcggccgccgcttgcaggattctctcctgtgttcacgtctcttgctgtagttaggtgctgctgcctgctggcttctatgtatgttatctatctgtctgtagcaactgtgttatctgataggaccgtaatggtgcttattcaacccagctatatgtttctatgtgaatcatctctctatcggttgttgagtacctttatattgtgatgaagatgtgaatgtgatttataaaatgcgtcagtttctacggtaaggttagctgctggccatcaaggtccttgctaggtgtcaggtgcatacatcgttggattggaatgtagtcttgttctgattcagtttgattgtaatatgatgttttgtttgcacattgatctgtgaacaactgaactttgaaggtcactaacgtgttgctgatagaacccatggctgaaacaaatgtttttccagcagtaaaaaaaaaaacaaaaaaaaaaaaaaaaaagcccctagg

SEQ ID NO: 174377 - DNA, 469 bp, Zea mays
  unsure (1)..(469): unsure at all n locations
  Clone ID: MRT4577_90610C.1
gacccacgcgtcggagcagtcancaacacaacatacaaagctctttatgtactaacaatcgccaacaaaaacggatactttcgtgtgctcttgggcctctctccatgtgttgctacccaacccatgctttcacaatgctcacaagctcatatagcttctattctcattatatcacagttactaccagcgttttctatgttggaatacccacacgttcatccctacacgatcctacaacaactcgcagcatgcatctataccattatcaccactccatcctccaacaaccgacaaccctattacacaaatttcccaatgcacattatcacagcccaacaataacggcacatcctatacgacatcttgcgcttaaccatcgtgaagcctactgtctacttcctagagcatcttcattcaaccaacccacttgatctaactatcgtagttatttagccacaacattaccatt

SEQ ID NO: 174378 - DNA, 361 bp, Zea mays
  Clone ID: MRT4577_90611C.1
cccggcccaccctttcatttaatttttagggttaatcccaaacccgccagttttagcagggctcgctcagtcgaaggtttcataacaccactgtgaaaatttgggggccttacaaaaccaacaccagtaatgccacacgcatattaaatttacacattaaaacgcgggccaaaacccgggaagaaaccgaaacctggccgccgccaagaaaacacattctcccacacacacactattgcccacggccggaatttacacaacggaacctaccccggcggtttcaaccgaaacacaggacccattaccgcactttgaaagccttggccgggacggcaggggagcacttggggttcgggatggc

SEQ ID NO: 174379 - DNA, 397 bp, Zea mays
  Clone ID: MRT4577_90612C.1
tgttctcgcgctcgaacgagcgcagcagcatccagccacctacccgaagccgcggcaagcgacaacctgcaggggagacatgaggcaggggctggggcaggacgggactaggctagggcacctcgaagcgacactggaaggcgccacgcaacaacatccaaggtacctcgaagccatcgagacgaatgctgtccacgaggggtgggcataagcacagcaccgggctgacctactaggagacccctgggaggctgaaaaactgtctcgagaaagtcagacaggaaactatgacctacacctagcacccgcggagccaaaccgtgaccggtatcgacatgacgtactgccccaaatgaaagggccgaactctttacggctttagatgctagggaaggca

SEQ ID NO: 174380 - DNA, 540 bp, Zea mays
  Clone ID: MRT4577_90613C.1
cctcgaggccggccgggccgggctctctcgtatctgtcgtaactcgtaacagatcgtcggcgcagtagccatctcgtcgaatccgatggccctcggcgacagcgccaccacaccgccggtggccaagctctccatctccggcgcggccctcgcggcgctcctgcaccgctgcgcggccgcagccggcgactgcgacggcctcctcttcggccgcgcctcgcacctgcccgcgccgccggccgctctctccgactacgacgacgacgccaccgccgcggcccctcccgcccccgcgctctccatctccgtctccggccactgctccctctcccacccctcatccctctccgactccctcggccgcttccaaccccactcctcccccgcccccgcctccgccccagcccccatcggcttcttctcctcccgacgacgcaccgcgctccgcccctccatgcgagaggccgtcctcgcccactccctctccgcaaacctagcctgcgcgcacccgcatcgtctcatcatcgtctcccgctccgc

SEQ ID NO: 174381 - DNA, 513 bp, Zea mays
  Clone ID: MRT4577_90614C.1
aagcaaaaacaagccaccacaatacaggggcattttcagattacatgacaatcacaaacataagaggcagtccaattaaggttggaccgactaaacagggtcaaaatatagttggaaaggcgcaaagtaaacaagacaccatccccagcccaagcctttaaaaaagggtcgaggaggcccatcacactgaaggggcttcggcaaatcaaatgaaaagcttttaaagggagtccttgaaaccctgtatctgaagtttaagggggctaccctaattacggggcactgagcaagcaaaaaccggttttgtaacaccaaaagcacggccaaaagcttgtttcaagggaacaaacacatatggcacgtttttatcctcaactaacaaggggagggggagcaggatctcaaaaggctttgggtcccccgccataactacaaactccgatatgcccctattaaggggcttcggcgcttaattccctcccttctaaacctgtttgaagttggcggcctgct

SEQ ID NO: 174382 - DNA, 541 bp, Zea mays
  Clone ID: MRT4577_90615C.1
acaagggcacgccctacttgattgtccccgagaacgacatgcacaacattaacattataattgatgagcgggggtctcttgcagtattcagtccgattcgtggccgagttccgagcttattaaagccatcgaagacacctcctcgtgttggtatgactggtgatgttctgcgcttgaaaaactcaaaggtaaacttgttctgcagtcaccctgcatgcataaacatgctccattgcttactattggtagtaaggtgatgccgactaatctttatgtactgtgcttaaggttccaattattgtcgatagcctcaagcaaactattctgaaggaacatgaagctgctagtaaagctagttatggagtgttagcaatactgtcttcagcaggtgctacctgcaggtcccggagtgttagcaatactgtcattatcattactatgcttatctgcctaggtctagtacatgccatatttctaattgaattaactatgttagcgcctccaaccatattggttaattttaatgaattcatatgtgagc

SEQ ID NO: 174383 - DNA, 303 bp, Zea mays
  unsure (1)..(303): unsure at all n locations
  Clone ID: MRT4577_90616C.1
tttctagatcgctagccgccgccctttttttttttttttttttttttttttttttttttttttttttcctcttttgtntntttttttttttttgttttttttttttttttttttttttttttttttttttttttaaagccggcaatttcaattggggatcccttccatacccttccgccaaccatattcgggcccccgatttaggggaaattttcaagggaattggtttttgtaaaaaaggggattttttttccccaacaacttactttccccgggattttaaatgggcgccggaaaaacaaa

SEQ ID NO: 174384 - DNA, 1691 bp, Zea mays
  Clone ID: MRT4577_90617C.1
gaagagagtcaaacagcacgtgaaattgttgaaagggaagcgcttgcagccagacttgcttgcagttgctcatccgggcgactgcgagtgcgcatccttcgtccttccccttcccagccgccctcttccccccctctcccggtcgcctctaacgtcgctggtgactcacgaagacctccatcgacggcggtgaaactggggccgacttctggagggtttgacttgttggatacagcgccggctcttccaatcgccgggtgctctctgccactctgtcttgcgggagcccccaccgcggaaaccggttggtgcgcgtggccatggggggtggcgaaaggcaaatcgggtcgccctctccgtcagtcacaagtgccggaacatcttgggccccgggttgggaaagccacctcaacactgtcaaggctgacaacaagggaaagcaagaaatgagattttacacgtcgaggggtgcactacatgatccataaagggcacgcccctactttgatttgtcccccgagaaacgaccatgcacgagatcttgtgtttgatagaacattataatcgacgagcgggggtctcttgcagtattcagtccgatccgtggccgagttgcgagcttattgaagccatcgaagacacctcctcgtgttgctatgactggtgatgttctgcgcctgaaagactcaaaggttccaattattgccgatagcctgaagcaaactattctgaaggaacatgaagctgctagtaaagctagttatggagtgtcagcaatactgtcttcggcaggtgctacctgcaggtcccggagtgagggcctccttagtctgctcagtgaggagagctcttacaacatcttaaaatttgacataggttcctgtgtctacatagacttcaatgggagcagccataatattgaattggacagctttgaagcaccaaaagcagatctgctaatgccattctctgcgaagcttgtggatggtatcaaccaaaatgactctaggaggagggcactggtgatgttctgttttgcgtattttaatgtgatagcaagaagcgctgtcatgctttccattgaccaccatggttttgatgtcctcgccaaagtgcctcaaggagacatccttactaatccacaataccactggaaggagttcaggttcacattcaaggaacctgccaaggatgctgaggacttctgccgcatgctggttgggttagaggaagagggtttgcagaccgtgaagagctgtagcggttacggttgacaacccacttgcaaggttcacattcaaggaaccagccaaggatgctgagggactctgccgcatgctggttcgattagagggattttgcagcgcgtgaagagctatagcggtctaggtgacagctcacttgccacaaaaccagtgagaaactatatatccgttattttggaactttgaaatatggttttagattgctatgttttattcgaagatctatggcttctcgaatttagtagagtagatgatgtttgaacatggagccgcaaactatcaatatctgtttgaatggtatttatataaataataaaactggtaacggtgaaaaccaaaatttatctaaaaaaactcgagggggcccgtacccaatggtaacggtgaaaaaatatataaaaaaactcgagggggcccgtacccaat

SEQ ID NO: 174385 - DNA, 296 bp, Zea mays
  Clone ID: MRT4577_90618C.1
aaaacgcatgcacctttaaccaaatgcaagattatagtcctgaataggcgaactaacatgcgagatccattaagcagcgatcgatccagacaactgataccacactaatcaaactctacatgctcgcaaattacccaattcttacacatctaggtctacataacaaatatcaataccatgcacattagaccctgacaatcataataaccccaatctaaatgacttaaataggatccattgtaccgcaaatctattgccatcattcggaatcattccagatccaatcccgtatattt

SEQ ID NO: 174386 - DNA, 335 bp, Zea mays
  unsure (1)..(335): unsure at all n locations
  Clone ID: MRT4577_90619C.1
antcaaaaacacaccaagctaagctttttagcaacaacctaacaacaatggctgggaatatatttttctttcttgctcttcttgcgctttttgcgagctcaacaaattctttcattatttcacaatgctcacttgcttcaagtttcattattacacagttcttcctaccagttactttaatgggcttttaacacccagctgtgcaagcctatatgctacaacaagcaattgctgctagcgtcttacaacaaccaatttttcatttgcaacaacaatcctttgcacatttaacattacataccatagtatctcatcttttactacaatttctacca

SEQ ID NO: 174387 - DNA, 259 bp, Zea mays
  Clone ID: MRT4577_9061C.1
aaaaaacatacaaaaacacaaatttattaaaaaactaaaatacaaaaaaaaaaggaggcataacttaaacaaacaggaaaaaaaaaatcgaccaccactctaacctcttcctgttctaactctccttccatgccacgcaatactttttatttaggcctacttactttcaatctcatttcccgccgttctacaacttccatcactggaaaatcccttcttttacccactttattcgcttttctataatttcccatctacc

SEQ ID NO: 174388 - DNA, 285 bp, Zea mays
  unsure (1)..(285): unsure at all n locations
  Clone ID: MRT4577_90620C.1
caacatacatagtgaatatcactttttacancnnagcaccaatgggagccaagatttttgccctccttgccctccttgctctttcagcaagcgctgctacctttacttttattccacaatgctcacaacaatacctttctccggctactgccgtttgatttcaatacccaactatacaatccttcatggatcaagacgccatccattcactcattttacggttcattagaattaacccttcaacatccatatgctctattgtaactgtcatccttagtgcatttt

SEQ ID NO: 174389 - DNA, 227 bp, Zea mays
  Clone ID: MRT4577_90621C.1
agtggctctgaggcagcctacgggggggtcatagaggtgactgggggggtcatgccgaggagggccatggacagagggatggtccaggaggtggccgatcgcaaaaaagtgtcattactgaccaaggacggatgggctggcggcggccagaaatgcaacaagatagccttcattatgctgagcttccagaatagtggggttgatgcgaatgggctaactagagccac

SEQ ID NO: 174390 - DNA, 164 bp, Zea mays
  unsure (1)..(164): unsure at all n locations
  Clone ID: MRT4577_90622C.1
ccctgtgtgttatcattcggaggagctattccaccttatcgatcaaggagaagttcatggcggtgggcgattggtacttcaatcgcgggtctttactttaggatttagatagcccctctcttattctggttnaaaaaataacaatctccttttcttaccatacc

SEQ ID NO: 174391 - DNA, 381 bp, Zea mays
  Clone ID: MRT4577_90623C.1
ccacacggtcccaaaccgtgagcactcttgttgctatacgggactgaggccacacacgctgccgtccccaataacatcgcagtcccgggccaacagcggagggccgggtaccataaccgaacgccacatgaccgccgttggcataacgacgcaccaaagcacgcaagccaaataaaagacacccgcctctacaaacgcgggaaccagaccccagcgcgaagctcggaccccaggcacagcaaccccccctggcgcgtcccctctaacacgaactggaaaccgaggcggcacagcccgacaacccaaaagtgcacacccggcggccaaggcccaccaagaaccgacacccctgcgctacaccaccagccccaccatggaagc

SEQ ID NO: 174392 - DNA, 290 bp, Zea mays
  Clone ID: MRT4577_90624C.1
gcagcacatcgcagagtgcatggccaagatgccacagatgattgtgaactggcagcagcagcagcgggagaactgggagaaggcccaggctgacaaggagaggacggcccgactgcaggctgatgcccaggagctcctgggctaccaggtggacccaaggagtgcccgcttccaggagctgctccaggacctagagaagaaggagcgcaagcgcctcaaggatgaaaaacagaaacggaagaaggaggcgcgactgctgcattagctgcagctgtggctcaagacccagc

SEQ ID NO: 174393 - DNA, 270 bp, Zea mays
  Clone ID: MRT4577_90625C.1
gctcggggcgtcctccctacttcaccgctaaaactttcggaacgaaggaaaagataaaacacgcccctccccacttcgagctcctattcgtaagatcaaaggtcctggacctcaattcccacgatggatccagaagcgttacatgtcactttttttttcgacaaggggaccctttatcaccaaacggaaccctctttttttttcctaaaagccacccggggagggtaagcctataacaggggggaaataggaagagaacgtgaaaatgaa

SEQ ID NO: 174394 - DNA, 460 bp, Zea mays
  Clone ID: MRT4577_90626C.1
aataacaaaaaaccggccccagttctttttggcactggaaacattccaatttttattcctaatagtttttatcattttggaaacaaacccccgagatttttgggagcccacgtaagagctccgttattttggatttgcccccccacagaacaaatgctggcccttgcacgtggcgccaactaatttttttttttttaaccctggtagctagtactggtcccccccggaaaaaatgctccactccgggggctccgacagccggcacattatgggaaaccccggggggtactcccgggcctttgaaagcctaacgcggccaatccttggcccgggggtgccgggacaacacgggggatacatctgcgttgggtatccctttcctgcccggttgaaggggtagtaataccccccttgttctttttttttttcttggggggggggtttttgtttccccccccat

SEQ ID NO: 174395 - DNA, 576 bp, Zea mays
  Clone ID: MRT4577_90627C.1
cgccgagcggtggaccgccgcgcagctccttgagcacccgttcgtggcggctccctgccacggccacggcgaccacgaggtcccgcgggtgtcgcccaagagcacgctggacgccgcattctgggaggccgaagacgacgacgacgacgcggacgaggcagtgttggcgagtgcgtcggagaggatcaagtcgctggcgtgctccgcctgcgccttgcccgactgggacggggaggacgggtggatcgacgcgctgggtgatcagcagcgggtcgaggtctgcggcgcggtccaggtggcgcgcagcgcgccaggcaaagtgtccagcgtcctggcggtgccagctggggagatggatgtcggcggcggcggcgggctcccctgtgatgaactggaagcagaggacgtgtcgttcggtggggaggttccaggagcagcggatgcttcggctgagcgtcagaagaaacgctatttgattttgcgttcgcactactgtcatgtactctcgtgtcagttagtgccctgtaatctaccactagtagttgttaataatgcaataaagttatgggttcccac

SEQ ID NO: 174396 - DNA, 161 bp, Zea mays
  Clone ID: MRT4577_90628C.1
cattgggtacctcgaggccggccgggatttttctttttcataccttgtacctaccagacgtgatgttagatcatggcatgagatttcacatcgttgtctcttgcttccaatctgctatctgcctaccacttcgtggcagacgtcgaccatgcagatgagct

SEQ ID NO: 174397 - DNA, 101 bp, Zea mays
  Clone ID: MRT4577_90629C.1
gtcacggggtgcccaagcagttccagggtcgcctccatgtggtgcccaagcactcagattggttctccccaaggacaattcataagcttgaaaagcaagta

SEQ ID NO: 174398 - DNA, 1250 bp, Zea mays
  unsure (1)..(1250): unsure at all n locations
  Clone ID: MRT4577_9062C.1
aattcggcacgcctcctctctcagccttatccccaaatcgcttcttctctgttgattccatggtgcatcagccgagctcctctccctggccgatccatggtgctcgtctctagctcatgtcttgccgccggccgagcccctccccagcgcccttggagccggcgtcctctgccctcatctcattccccgacgccgccctctcccctcggtgctctgctggtcggcgtcttctccctgcccgacgtttctggcgccatggccgccgcgccttgggtcgcctgctccactgcgccgatccgcccatctccctgctgccgctctcccatggcgcgtccctgcatcttgcttcagctcgctctgccatctcccttggcgccctagccccaacgccgagctccctacccggtcgcgcccccggtggttgaactcgccgagcttccttttctatcgctcgtcctcgcccattcggcgccctcatctcaagccagtccagcctctctactcgccactctcctctatccccttgctgttagaacatggcgagctaaccccatgtgccagtagagttcgtcattccctgagcagcacctccctccatggatgccacgttgccgacttgtgcagttcatatttatcggggaaatcccaggatttggtggagaagaagcacagttcaatttgacgcccgccaggtgttcgacgaaatgttcaaattgggtttcgtcattgatattgtggatttgagtcgcgttttgtattgaaaaacaagaatcgtgagtgcaatggcaaatggaaggaaggcccttttgattgacaacttaggaaaagatggaatggaactcaaattttggtggtcggtcaagtgtgtagagttgaaatcatatatacttagttaggctcaaatttagcgcaaactgttggtgaccatgtttttcggttagtattttagtttttaaattggatttaaagtacacttatgtatgagttatttagcaatgcttatttatgagatattgaatgatacttatctacattatattaactatagtgttattaaaaaaaaaaaaaaagggcggccgccaccgcggtggatttagagtacacttatgtatgagttatttagcaatgcattatttgtgagatattgaatgatacttatctacattatattaactatagtgttgttaaatatatgtgtgatgtatattataatgtggtatctcaaannnnnnnnnnnnaaaaaaaaaaaa

SEQ ID NO: 174399 - DNA, 490 bp, Zea mays
  Clone ID: MRT4577_90630C.1
cgtcaagataaatgaaggatcacaaacagattggactgcagattattatgaggcatctagttctcctgttcaaggtcaaggccaagaagcgatgcctctggttagtaacagtacaggcaaagggaagatgcatggcagcagcaacagtacagttgtacagttgcaccctgaggatgccattacttatactctgactgatggtagcattttgtatgctcatccagattcaagaatcgaggaactaggaatactcaatacaagaggatggcctcatgttgtctttgatgtcagttcacaagaaacatctttccatatccctttgcaccgtatgctttcattactactgcggaaggctatgaagaaatgttttggagaggatggacattcagatgtgcaatccaatgagttctttcctcagatacttagaagttgtgagccctatggatttgcttcaattgttatggagcatccactgagagtgagagtattt

SEQ ID NO: 174400 - DNA, 292 bp, Zea mays
  Clone ID: MRT4577_90631C.1
attcctgttcgagatgcactctaaggtccaccgctacctctcctgtcgtttgcgtctaggtgcctctctttcgtaacaacagagacagttcaaacaaaactgtgattttggtattttattctttatatacatttattaatcaaacttcatattaaatttattttaatttatattttttttttatctattttttatttatttattttttatttttttatttattttttttttatttattaattttaattttttccttcttttaactttttctttttttatttttttatttttt

SEQ ID NO: 174401 - DNA, 345 bp, Zea mays
  unsure (1)..(345): unsure at all n locations
  Clone ID: MRT4577_90632C.1
gcctactgccaccgcgccgaacgccatggccgagccggcagagcaccgtccagcggaggaggaggangccgnngcgggcggcnatgatgaggaacaccggcgcccaggtcgcgcccatcgtgaagctggaggaggtcgccgttaccaccggagaagatgacgatgacggcgctcctggacatgaangcgaanttctacnggttcgacaaggagnggnancagttnnnagagcgcggcacaggcatgtgaagctgctcaancacaaagacancgccaagtccgctcgtcatgcgtcaagcgaagagcttaagatctgngccaancatctcgtggtngcgacnanta

SEQ ID NO: 174402 - DNA, 186 bp, Zea mays
  Clone ID: MRT4577_90633C.1
ggccgaatttcggggcaccgatgcgtccgtgctttgacagaccgagcggcctgctaccaacaacacatcattaggtggtgccctcttttagatagctgattaagggagaatgcaataataaagattttaggatgatggatgtggccaaccagaaataagaagttactctcttcagagggggttggg

SEQ ID NO: 174403 - DNA, 136 bp, Zea mays
  Clone ID: MRT4577_90634C.1
actgacatagcctgcctgacaagctgcacaaaatgctgcaatcatccgttcgtttgtgaagatacacgtcctctttatgtatcataaatcaacatgtgctgctgccttttctcattattggaattcataaaaacgc

SEQ ID NO: 174404 - DNA, 226 bp, Zea mays
  Clone ID: MRT4577_90635C.1
caagaattggtgttaggtaatgcattttgatagtcgagacacctcacacctgccgtccaaatctcagcaaaggatggcatactttttatgacagatatacgccttctcatattgcagtgtttgattatgagatcacgctgaagtagtgaagtatgttaaactgtacttgtgggtgttgatttttgtcaattgttgaaaccttagagagaaatctatacgtctagag

SEQ ID NO: 174405 - DNA, 273 bp, Zea mays
  Clone ID: MRT4577_90636C.1
gctcctatgctggatcttgctgttaacaagcccaagggtacattacactcatgtgtataagactcaaaatctgttgcctccttatttaatgactatttataacggctggaacaagattcaaccagggttgccaaaaccacgcttgtttactgtgtgtcgttttgtatgttaccacagctaggtgtgatgatagtcacaacagtaggggagtttgttcaaacgcttgcacattctttccaaatgttacataatacatgtggtgactattgatgg

SEQ ID NO: 174406 - DNA, 937 bp, Zea mays
  unsure (1)..(937): unsure at all n locations
  Clone ID: MRT4577_90637C.1
cggtccaaacttcccggtcgacccagcgtttttggnaaaatttacaaggcaatgttgcgaggtggcaaggaagtagctgtcaaaagctcagtaaaggctctacacagggggtcgaggaatttagaaatgaagtagttctgattgctaaactgcagcacagaaacttagttagacttcttgattgctgcattcataaagatgagaagttactgatccttgaatacttaccaaacaaaagcttggacgccttcctttttgatgctacaaggaaatctttgcttgattggccatcccgtttcaaaataattaaaggtgtagcacgaggacttctttatctccaccaggattcaagattaacgataattcatagagatctcaaagcaagcaacatcttgttagacacagaaatgagtcccaagatatcggatttcggtatggcgaggatttttggtggaaatgagcaacatgcaaacactactcgagttgttggaacatatggttacatgtctcctgaatatgctatggaaggctcattctctgtcaagtctgacacctatagctttggtgttctactactggagattgtaagcggcttaaagattggctcaccccatctgataatggactatccaaacctcattgcttatgcatggagcttatgggaaggtggaaatgcaagggaattggtggactcgtcggttctggtgagttgtccacttcaggaagctgtacgatgcatccacttgngtcttttatgtgtccaagacagtccaaatgcgaggccgctcgtgtcatccattgtgttcatgctagaaaatgaaacagccccggttcctaccccaaaaaaacctgtatattttactagtaggaatttatgaactaatcagtcagatcaatacatgcgaagatcgctgaataacatgagtatcacaactct

SEQ ID NO: 174407 - DNA, 262 bp, Zea mays
  unsure (1)..(262): unsure at all n locations
  Clone ID: MRT4577_90638C.1
nnctcncttaaaaaaaaaaaaaaannnacaggagggaccaatggggggnaccggcggcaacaacggaagggagacaaanccanncggaaacaaaacgnagaaccaaaagggacccggcaacgagcccaaggcaagggccaagccccgaaagagggggccaaggcccaggcgggaacaacaaaannaggagagaccaaaaaacaaccggggcgagcaagggccccaggggccgaaccacggcggaggacaacaaangggacac

SEQ ID NO: 174408 - DNA, 388 bp, Zea mays
  Clone ID: MRT4577_90639C.1
gagcgctaccttgacgcatacaagcgggggttgcgggtgacatccaccgccggcggttcatataccgccgtcggtagcatgtgccaccattcggttgacctgccacctccggtgcatgtcccaccgccggtacacctgcacgcggcggtccacctgccaccgacggtccatgtgccggctgcgggtcatatgccgccgccaccatgccactaccctactcaaccgacccggacttaggcttattcccagacacacccatgcccgtgccaacagacgaatccaagcccgtgccagctgcacggaacctgcggcgttggcagcaccccgatcctgggccagtgcgttgagtttctgaggcatcagtgcaatccgacggcgacgccctact

SEQ ID NO: 174409 - DNA, 485 bp, Zea mays
  Clone ID: MRT4577_9063C.1
ttctgtatataggacagcctggatggcctcgtgatgcgttagagttcatcagatagatcgacttgtgctgacagctgacatgcgacatttaccaactgttacagtggtgctgcactgctactcccctcatactccagccatttgtatccattaatggccgctattcctgtttatgagctctaatctaaatctggctagtccttatctgaaatacactcacacttataactgtgtcttcatcattgtaccaacatctttcataatcgggcaaaaactacatagatctttgatgatgaaataaagatctaatctaattttatcccccagtactggcattgattataatactctgaataacgcaccagacatctatgtgaagtacaatgcgctctgcagcgagagatgaagccctccatccaaaccatagagctaccatatacttttgatctacactcctaagcatggatgcacctttaagggaccct

SEQ ID NO: 174410 - DNA, 733 bp, Zea mays
  unsure (1)..(733): unsure at all n locations
  Clone ID: MRT4577_90640C.1
cgggacatttggtgagatcctatatcttcgacgtcccagctcacctgttagtaagaataagaagagtaccacattgaagattgtactcccagttatggctggtttgattcttctaataacatgcacatggcttgtattcaagccaaaagacaaacacaaaagcaagaaaagtcagtacacactgcaacactcggatgcttccaacaggtttgagaacgaaaatttggaatttccatcaattgccttagaagacatcattgttgcgacaaacgacttctctgattttaacatgcttggaaaaggtggattcggaaaagtttacaaggtaaataaaagttttagcttgatagtttcagtagaagaaatattgtagcacttatctggataaatcgacaaacggtttcctcatctaggcaatgttggaaggtggcaaggaagtagctgtcaaaaggctcagtaaaggctctacacagggggtcgaggaatttagaaatgaagtagttctgattgctaaactgcagcacagaaacttagttagacttcttgattgctgcattcataaagatgagaagttactgatatatgaatacttaccaaacaaaagcttggacgccttcctttntggtacgttctgacttcatttcacatattacgaaacaantttagactaactgaaattgtgactcacaatacattcatgaagatgctacaaggaaaatcttgcttgattggc

SEQ ID NO: 174411 - DNA, 2847 bp, Zea mays
  Clone ID: MRT4577_90641C.1
ccggccgggactattgtgctatctcctttgtttgtcttctccacaaccatatatacaccaacttgccaaggaaggcttcatggccatggcttacctccccgttttcgtcttcctgttcatggttgtcttatgccaatccgatgacaggctaacacctgcaaagccactcttgcccaacgaggtgctcatctcaggcggtggtgtctttgctcttggcttcttctccctgaagaactcttcaaggttctatgtcggcatatggtacaacaacattcccgagcgcacatacgtgtggattgccaaccgcgacaacccaattaccaccaatgtgcctgggaagctagtttttaccaacagttctgaccttgtcttgttagactccacaggccgcaccatctggacgacgacaaacaactataccgcaggaggaggcggtgaaactgcttccatcctgctcgattcggggaacttggttatccggttgccaaatggcactgacatatgggagagcttcagttacccgactgacacaattgtccccaatgtaaatttttcactgaacgtagcttccagcgctacgctccttgttgcctggaagggacctgatgacccatccagtagtgatttctccatgggtggcgaccctagctcaggtctccagattatcgtttggaatgggacacagccatactggagaagagccgcatggggtggtgaactggtgcacggcatattccaaaacaacacaagcttcatgatgtaccagacagttgtcgatacaggagacgggtattacatgcaattgactgtgcctgatggctcacctagcatacgcttaactttggattacacaggcatgtccactttccgaagatggaacaacaacacgtcttcgtggaaaatctttagccaattcccctatccatcatgtgacaggtatgcctcttgtggcccatttggctactgcgatgacacagtacctgttccagcatgcaagtgccttgatggttttgagcccaatggtcttgattcttccaaaggatgtcggagaaaggatgagctgaaatgtggtgacggagatagtttcttcaccttgcccagcatgaagactcctgacaagttcttatacatcaagaacagaagtcttgaccaatgcgctgcagagtgcagggacaactgctcatgcacagcgtatgcttatgctaacctgcaaaatgttgacaccacgattgacacgacaaggtgcttggtctggatgggggagcttatcgatgctgagaagttcggtaacacatttggtgagatcctatatcttcgacgtcccagctcacctgttagtaagaataagaagagtaccacattgaagattgtactcccagttatggctggtttgattcttctaataacatgcacatggcttgttttcaagccaaaagacaaacacaaaagcaagaaaagtcagtacacactgcaacactcggatgcttccaacaggtttgagaacgaaaatttggaatttccatcaattgccttagaagacatcattgttgcgacaaacgacttctctgattttaacatgcttggaaaaggtggattcggaaaagtttacaaggcaatgttggaaggtggcaaggaagtagctgtcaaaaggctcagtaaaggctctacacagggggtcgaggaatttagaaatgaagtagttctgattgctaaactgcagcacagaaacttagttagacttcttgattgctgcattcataaagatgagaagttactgatatatgaatacttaccaaacaaaagcttggacgccttcctttttggtacgttctgacttcatttcacatattacgaaacaattttagactaactgaaattgtgactcacaatacattcatgaagatgctacaaggaaatctttgcttgattggccatcccgtttcaaaataattaaaggtgtagcacgaggacttctttatctccaccaggattcaagattaacgataattcatagagatctcaaagcaagcaacatcttgttagacacagaaatgagtcccaagatatcggatttcggtatggcgaggatttttggtggaaatgagcaacatgcaaacactactcgagttgttggaacatatggttacatgtctcctgaatatgctatggaaggctcattctctgtcaagtctgacacctatagctttggtgttctactactggagattgtaagcggcttaaagattggctcaccccatctgataatggactatccaaatctcattgcttatgcatggagcttatgggaaggtggaaatgcaagggaattggtggactcgtcggttctggtgagttgtccacttcaggaagctgtacgatgcatccacttgggtcttttatgtgtccaagacagtccaaatgcgaggccgctcatgtcatccattgtgttcatgctagaaaatgaaacagccccggttcctaccccaaaaagacctgtatattttactactaggaattatgaaactaatcagtcagatcaatacatgcgaagatcgctgaataacatgagtatcacaactctagaggggcgttaaatgtttagtttcattgttcgctattttggtaaacttttgtttaatgtgtgccattaaacaattacattaggtttgtattaatacaattacgctagccgttcaggtttgtacatagaaaatgttccattaaatctgttgtacaccatcggttcggtgggttgtattgatatattctcgagactgtaaagttcactagtttttacaactggttccgcatgtcaaatgtcggttatttatctgatcatgtgtgcat

SEQ ID NO: 174412 - DNA, 941 bp, Zea mays
  unsure (1)..(941): unsure at all n locations
  Clone ID: MRT4577_90642C.1
aaggctgaccagaagctggtctcccccgcgatttatccacctcgctttccttcactggggttctaatacgcaattcacggggaacccaaaaccctaatcctctctctccacgccgccggagagccgtgtgggagctcggtcctcggacttctgcatcgatctctgctatgagtgctatctaggtttctcatatgggtgacctcaaggaggttttccgctccctccaagaactcttccctgaggttgatcatcgtatactaaaggctatcgcaattgagcatcgtaaagatgttgattccgcggttgttactgttcttgatgaagtcatgccgttcatgacgggttcagctggagtggatggttctgttgggaatttgtcatctatggatggttctgttgggaatttgtttggtaatcacagcacacatgaagtgggaagttcatcatctgtttggcgtgatatatgtatcaatgagattgatgcaagtgtttactctgtgcaatacacttcttatggggatgtcaaaactggcaagcaagaaaacataaacaacacatatgtgggaagacttgcatcaatcgaaggggtcaatgagcaactaaatctacattcttatcctatcccaaatggtggtcaacatgatttgcttcccaaccttgatgtgctatcttcaaataccgatccagagaaaacgttggccaacacagataatgaagttggatacagtggattatttagtgaatgtttttcccaaccaccgacagngggaagatggtggtaatatcatagccccacaaccctgtgatcaagatcctaatggcatgattccagttggggattacttttcacagaacagttncatggnagttcttcagtggctatgaggactacnattttgatgacggccttttgcctattggttctaatgatcaatatcttt

SEQ ID NO: 174413 - DNA, 216 bp, Zea mays
  Clone ID: MRT4577_90643C.1
aaaaaaaaaaaaaataaataaaaaaaaaaaaaaaaaaaaaaaaaaaaaaaaaaaaaaaaaggggaaaaaaaggactgtatttcataaaaaatccctatgcttatttaactttgcatatctaatatctatggttttatattggtttactctattttaaatggggtgcggttttataaaaagggacagactgttaaaacctttgttagtgggtaaatt

SEQ ID NO: 174414 - DNA, 1008 bp, Zea mays
  unsure (1)..(1008): unsure at all n locations
  Clone ID: MRT4577_90644C.1
gacacctcgtctgtggcgctcgcgtggttcttctggctgctcggcaagaaccccggcgtggaggccaagatcctggaggaggtggaggggatcgtcgcggcgcggaagggggctggggaggtcgtcgaggaggaggaggagctcgtgttcaggcccgaggaggtgaagcggatggagtacctccacgccgcgctctccgaggcgctccgcctctacccgtccgtccccgtcgaccacaaggaggtcgtggaggacgaggtgttcccggacgggacggtgctgaagaagggcaccaaggtgatctacgccatgtactccatggggcggatggagagcatctggggcgacgactgccgcgagtacaagccggagcggtggctccgggacggacgcttcgtgggcgagtccgcctacaagttcacggccttcaacggcggcccgcgcctgtgcctcggcaaggacttcgcctactaccagatgaagttcaccgccgcctccatcctccgccgctaccgcgtccgcgtcgtcgagggccaccccgtcgcgcccaagatggcgctcaccatgtacatgaagcacgggctcaaggtgacgctcaccaagagaggcaaggccaattaattaagctctgaaccgtgtggtgtgccgagatcgagcttgccaattgtaaggcgcagagacgactcgagaaacacatgaaacaagcactactttcgtcgtgccactttgtgactgggatggaagtgttgatgctgctgcggaacaagatctctgtgttttcatgcgttttatttctcactttctttgtactagtctatatatatatatatatatatatatattttctgttgttttgtacttcgtttgtttcatttacatgtagtgtagaacttttgcatatgtataaacttatatgtatatgcgtgttggcaaaacacttggccttcaggtggtgtaaccggtaatgttcttgtagaagtattaattatttcaggnaaaaaaaaggaa

SEQ ID NO: 174415 - DNA, 350 bp, Zea mays
  unsure (1)..(350): unsure at all n locations
  Clone ID: MRT4577_90645C.1
aaatgtcacttttttgtatttttanncanaattgtncatagggcagggttttttttnggagaccaccaaaattacctggcccaaaaaaaacaggttagggaaaccacatttcaaccgggggcgcccaccacttgtgtaaatttatggggattgaaaaaaaaaaaccaggttttttttgttttggggctcccacaaaaaaaacacctgggtagcttttgagccaaaaccacccttaatttattggggcccggccaacattggaacaaaaaggcggccggggttttttttttttcccaaaaaaaaaatcccactctttttttttttttaaaggggttctcttgggcccctaa

SEQ ID NO: 174416 - DNA, 397 bp, Zea mays
  Clone ID: MRT4577_90646C.1
acctcgaagttggggcgcggacgtaacttccaaatccagttcccaaggcctttgcgtgcacccatactctgagcaccggggacctactgtgggccatgagagacctgacagcatcttatgctgagcaatcggtatgatctgaagcggaagcacaacatcagcaacaaggtagaaactccttccaaggcgagccctcacgcccctgatatcgaccaaaggaggcataaacaacccattgcatcataccttcttccttgttagttatgattatcacgcttgccttctatgaacaatgatcctatatgtatattgatattaaccacaattagaaagttaaacaccaattgagcatgtctaaatctgatctgcagactgctcatgctaacagaatattata

SEQ ID NO: 174417 - DNA, 374 bp, Zea mays
  Clone ID: MRT4577_90647C.1
gtcctttttttttttttttttttacccttaaaagggtgggtggtcggggcacaaacattttgcaagaccaaaaaaccccattttttccttagggttaacttaaaacaaatcctgacaggggtaacaggattcattggtccacaggccattctggttgaagccttggttttctggaaccccgggttaaaacaagacttacaactggcacaaaacggccttggaattaaaaacacaggtggggcaccaccaacgggaccgacggagattaaccctttgggcttggggaaacaatacgggggcgaacaaggtaacttgggccggcgggccccaccggttaagttcttcaattcccgggggaattgcccgaacccccc

SEQ ID NO: 174418 - DNA, 1324 bp, Zea mays
  Clone ID: MRT4577_90648C.1
tcgagggccggccggggaaaaaaaaaaaaaaaacaaaaaaaaaagaacgcaaaaaaaaacaacttccaccagacccctaaccttttcgcagctccaggctccagcgcacagccgccgccgtttcttcatcttcttcgcagagccggcgctccatcttcggctccctcccttacttgcgctcggcacgcaggcggcggcggcggcgctgtggctcgggatctcagtgacggcatcagcggcttcccctcccgcctctcgccagtcgcctccggtcctccgcacaccggccggtgatctctctcctcccgcctccggtggatcgtcaacggcgcccggccccggcggctgcgtcgcgcgcgtcctgagggcagctgcaggcgctgctcgaccaaggcggtcgcgccgctttgggagcggtttatgccccaaagtgaagcgtgctcttagtgccgctctttggaaccctggctactgctgttaaatggctcaaccttcagtcattctagcaactgcaagttatgatcacacaatcagattttgggaagccaagagcggtcgctgttaccgcactattcagtatccagactctgactggcacttgccaacgagaatatgaaagtcgtgctgcagttaacactgtagttctgcacccaaatcagaaagagctaatatctggtgatcagaatggaaacatacgtgtatgggatttggctgctaactcatgcagctgtgagttggtgccagaagttgatactgctgtaagatctctgacagtcatgtgggatgggagtatggtggttgctgcaaataaccgtgggacatgttacgtttggcgcctgcttaagggtactcagacaattacctgcttcgaacctctgcacaaactgcaagcccatgatggctacattctgaagtgcctgctttcacccgaattttgcgatccaaacaggtatcttgccacagcatcatctgaccgcactgtaaagatttggaatgtcgatggcttcaagttggaaagaactttagtcggccatcagcgttgggtttgggactgtgtcttctccgtcgatggtgcttatctgataacagcatcttctgacaccacagctaggctatggacgatgtcgactggagaggccatcagggtgtaccagggtcatcacaaggccactgtgtgctgtgctctccatgatggagcagaatcagcgccctcataagcatgttgtgactgcttttctgtacatacgttagattgcagaactctttcactcttgtaaacttgagacctagcaagtggttaacgcaagcctctggggttgcgtac

SEQ ID NO: 174419 - DNA, 1728 bp, Zea mays
  Clone ID: MRT4577_90649C.1
cctcgaggccggccgggaaaaaaattacaaaaaaaaaaaaaaaaaaccaaaaaaaaaaaacttccaccagacccctaaccttttcgcagctccaggctccagcgcacagccgccgccgtttcttcatcttcttcgcagagccggcgctccatcttcggctccctcccttacttgcgctcggcacgcaggcggcggcggcggcgctgtggctcgggatctcagtgacggcatcagcggcttcccctcccgcctctcgccagtcgcctccggtcctccgcacaccggccggtgatctctctcctcccgcctccggtggatcgtcaacgacgcccggccccggcggctgcgccgcgcgcgtcctgagggcagctgcaggcgctgctccaccaaggcggtcgcgccgctttgggagcggtttatgcccccaaagtgaagcgtgctcttagtgccgctctttggaaccctggctactgctgttaaatggctcaaccttcagtcattctagcaactgcaagttatgatcacacaatcagattttgggaagccaagagcggtcgctgttaccgcactattcagtatccagactctcaagttaatcgccttgagataacccctgacaagcggttcttagctgctgctggcaatcctcatatccgcctttttgacgtcaactcaaatagccctcagccggtaattagctatgattcacatactagcaatgtgatggctgtgggatttcattgtgatggtaactggatgtactcaggctctgaagatggtactgttagaatttgggatttacggactggcacttgccaacgagaatatgaaagtcgtgctgcagttaacactgtagttctgcacccaaatcagaaagagctaatatctggtgatcagaatggaaacatacgtgtatgggatttggctgctaactcatgcagctgtgagttggtgccagaagttgatactgctgtaagatctctgacagtcatgtgggatgggagtatggtggttgctgcaaataaccgtgggacatgttacgtttggcgcctgcttaagggtactcagacaattacctgcttcgaacctctgcacaaactgcaagcccatgatggctacattctgaagtgcctgctttcacccgaattttgcgatccaaacaggtatcttgccacagcatcatctgaccgcactgtaaagatttggaatgtcgatggcttcaagttggaaagaactttagtcggccatcagcgttgggtttgggactgtgtcttctccgtcgatggtgcttatctgataacagcatcttctgacactacagcgaggctatggacgatgtcgactggagaggccatcagggtgtaccagggtcatcacaaggccaccgtgtgctgtgctctccatgatggagcagaatcagcgccctcataagcatgttgtgactgcttttctgtacatacgttagattgcagaactctttcactcttgtaaacttgagacctagcaagttgttaacgcaagcctctggggttgcgtacaaataatttgcgtgctgttggtggatgtttaaacctgctatgttttatggtgtgaatgctataaaaagacaacatgttcgttcaatagttaaagggtggtttgagcaaaaaaaaaaaaaaaaaaaaaaaaaaaaaaaaaaaaaaaaaaaaaaaaaaaaaaaaaaaaaaaaaaaaaaaaaaaaaaacccgg

SEQ ID NO: 174420 - DNA, 427 bp, Zea mays
  Clone ID: MRT4577_9064C.1
aaaaaaagatctattaaaattcattaccggtataaatgggcactgggggggaaaccattaccggtaccatttacgttacaattgggaaaccaaacaaaaccttagttttagaccaaaataccagagggaaggaggggggggtggttcaaaactttcatgggggggggaaaacattttttacataacaaagagaataataaatttgccacaacccggggggtttataaacaaaaacccgaagtttacaaaggggggaccagggttaaaggggactttttggtaaaggatccaacaactatggggggttcaatttcagagaggccctatggatacaggttcttttccctgggggggggggcccgtcatcaaaaaatgccccaaaggagcataaaagggggcacagagcacctcgggccggggcataaaa

SEQ ID NO: 174421 - DNA, 781 bp, Zea mays
  Clone ID: MRT4577_90650C.1
attgggaccctcgaggccggccggccggacagcgctcgccgctcggcgtcctcatcctcccagtcagtcccagactcccaggcagcacccagccgtccggtcccgaccccgagcatggagcgacacggcatgagcgcacgacggctaccagccatgctgctggcaatgcttctgctgctggcgacggagctggcctccttcggctgctgcggccacaggattcccagagcggacgtggcggcgtggaggcacgggcgggaggcgacgacgacgacgatggcaggcgcgcgcgctacgcccccctcccccacgaaggcagacctggacacggaggcggcgctcggcgagtccaagaggatggtgccgcagggctccaacccgctgcacaactaactaggagccagagcgagagagcgagaggaggcaagcgccggcaggttcttcgttcggctagcttccgtatttttttttctgccccctctccctccctgctcaaccatcacacacagcgatgatagatgtgcgcctgtaactaactaactgtaattagctagcgcgccgcagcagcagtagggctctggagtggagtccggatccaatccaccaccaccaacacggagcaagagtggacactgtacagcagtacacacatgcttctttctcttgccatgcttttttttcccgacttgcgaccaaaaaaaaaaaaaaagggcgtagagatagggagcaaacgttgcgagctgcattggttggttctcggatggagcattctgtttttttt

SEQ ID NO: 174422 - DNA, 339 bp, Zea mays
  Clone ID: MRT4577_90651C.1
taaaaaaaaaaaaaaaaaaaaaaaaaaaaaaaaaaaaaaaaaaaagggcggactatttgggaggagggaagcatacgaaaacgggggtgagtccttataatttttttataataggacgtaaatggattttacgggccgtttgtttacaatgggtggactgggaaaacgttggtggtacccatctaaatgatttttgaagtcattcgcttttatcaagttggtgtaatagtaaataggccaggtccgatctgtgattggaaatagtttagaatcctgaaaattaaatgggacgtactgttgaatgggtcattaaaatatgggtggattgaaaggatattg

SEQ ID NO: 174423 - DNA, 354 bp, Zea mays
  Clone ID: MRT4577_90652C.1
ccgggggccaatgtgggtgatcgacctcccatgcagcatcaccacatgctgcttatgtaatgtcaggtgattggattgtggttcttcactgcatttgtgggagtgaaggtgataaaatcatttggattggtgggcagagaagactattcagataggtgcggttgtactgagtgagattggatggaatggagtgcgatgatgtattgaatgactaccaagtcgcgtgttgtacctaaatcgcgcacaatcagctaatttataaagtttccatggcatatatgtgaatatatgatgttccaagagagatgcattcatgcatcatgctcttcgtgctgttgtgccatggcatttttc

SEQ ID NO: 174424 - DNA, 1630 bp, Zea mays
  Clone ID: MRT4577_90653C.1
gccatcgcggcggtcgccgaccagggcggggcctggctcaccgtgcctgccgggcgggggctcaccgcgcccttcaacgagcacccagacgaaggcttcgacccaaaggccgtccctgcgatcctagggattcaggatgaaagatattggcccttgatgtctccattaccatcatacggctatggaagagagcacaagggacctcgatatgggagccttatacacggccaagacctgaagcatgtgactataacaggtcataatggtaccataaatggacaaggtcaaagttggtgggtaaaatttcggagaaagctccttaatcacacaaggggtcctctggtgcagctcatgcggtcaagtaacattatcatttctaatatcactcttcgtgattctcccttctggactcttcacacgtacgactgcaagaatgttactatctcagaaaccaccatcttggctccaattgctggagctccaaatactgatgggatagatccagattcttgtgaaaatgtggtgataaaaaattgctacatttctgttggtgatgatgggatagccataaagagtggttgggaccaatatggaattgcttatggccgtccatcagctaatattactatccagaatgtcgtaatccgctctatggtcagtgctggagtatcgattggaagcgagatgtctggtggtgtctcggatgttttggtagagaatgttcatgtctgggattcacggcgaggcgtgaggataaagactgcgcctggaagaggggcctatgtaaccaatgtcatgtaccagaacataacctttgaaaacgtacgtgtcggtatagtgataaagacagactacaacgagcacccagacgaaggcttcgacccaaaggccgtccccaccatcgggaatatctcttacacctcaatccatgggcatcgtgtgcgagtaccggtcaggatacagggaagcgcacagatccctgtgaagaatgttaccttccatgacatgtcaatcggtatagtagacaagaagcaccatgttttccagtgctccttcgtccaggggcaggtcattggctacgttttccctgtgccttgcaagaacctggacctgtacgacgagcggcgtgggctggttaaacaatcaacgttacagaatatctctgatatcgactacagtttctgacaatggcatttgataccactgtactattgctgtaggtgtattcagtattcacagccgtcacagtcctttccacacatttagaagcaaaattttgggtagcttttacactcttcacctcacagtcaggcatgtatctaaggaagatcgacttgaccatactgtctcgtagagggacgccaggaatgttgccttttcacttttttgatcactgtatgattacacttacttggttacacagtcgacagtacacttttgatagtgcttactgttcatggcagactacatttaccttgccctttttaaaacagatgtggatgtatatgtatttggtagtttgaacctggaatggttggttcttcttcccagttgtctttatataaagctgggttcgtctagacaactttaaaagaagtgttcttttatgatgtgaagcgatttttctgaa

SEQ ID NO: 174425 - DNA, 476 bp, Zea mays
  unsure (1)..(476): unsure at all n locations
  Clone ID: MRT4577_90654C.1
acacacaaggggaaggggccgcgggggaggggaggcgcactcnatcccgatctggtatcgtggtcccccggcagtgtaatgagtagnaaggaaggcacagctaggagtagggaggcaggaggggnagnnaatgcgtgtacggcgaaaggaacgttttctatgcctcgcttttntgncnccnnnaanncncaagtggtgtgggggggggggcanncaaaaanaacnncnnncnnnnnatttttttttgggggggggggaggggacgtcccacaggagaaaaggaaaataccgttcatcatcggntaaccaaacgtttctagaagctgggggacgctgggcacgtttggcgaacctgctggtgtacctgactcagggggtccacatgcggagcgnggacgcggcgactctgcttatcttgctcatcggttcctccaggcgaggccccaaaaaaaaatccttattttttttttttttac

SEQ ID NO: 174426 - DNA, 297 bp, Zea mays
  Clone ID: MRT4577_90655C.1
caggaaggcactcacttctccatgagctttgagtcggcaacatgagctaatggtcgcgaacgcctcagtcgttgtcacccattcattctggccttgcccagacgagagggctagttcagccagcttcactgctgtggatcagtttctcatgaatttgttccaagatagtgtacctctaaacactgcactaactggactacatctttagggatcagtgttacctgcaacatccaatgttgcaatctcaattccaacatctgggtagagcagctatacccatctgaacacaagggatgt

SEQ ID NO: 174427 - DNA, 312 bp, Zea mays
  Clone ID: MRT4577_90656C.1
cgccgccgcttctcctctgtatgcacgaaggtaaggaagagggtgaaatggtgaagcacaacaacgttatccccaacggacacttcaagaaggactggcagaactatggcacgacatggctcaaccagaccgcgcgcaagcagaggcgccgcatcgctcgtcaaaagaagggtgtgaagatattcccacggacgactgatgcccctcttcgtcccattgtgcaatgccagactctcaaggacaacatcaagacgaggactgagacaggatctacccctgaggacctgaaggctggcgggattccaaagcagc

SEQ ID NO: 174428 - DNA, 277 bp, Zea mays
  unsure (1)..(277): unsure at all n locations
  Clone ID: MRT4577_90657C.1
cgggccgacccacgcatccttttacacctaattccccacacttcttcctttctcccaaataaacccaccatttgcattcgttcttatcaaataccactctctcttcataaatatatatactcccacacatatatagcttataaaactataaccttctcatccacacacaacacatatctccanncatacacacaacacaccacccatctttcttaaattctaaccttctctatctctcaagaacattattcctacaatacaactaccatatacatcc

SEQ ID NO: 174429 - DNA, 279 bp, Zea mays
  Clone ID: MRT4577_90658C.1
gtaagctccgatattcggctatattactgtgttacttatccctctagcgtcactccgctcccatgcaccgtcaccgccaattccataccgtcctccgccacctctgctgagagcgagaagagatggcaggcatgggtagatcgggccggctatacggcatgcgatctcaggcacgacgtactcttgcgttagcgtctggcatcacgacctgagtcgagatcatcgccaacgaccagggtaaccgcaccacaccctcgtacattagcttaaccgactccg

SEQ ID NO: 174430 - DNA, 531 bp, Zea mays
  Clone ID: MRT4577_90659C.1
cgttctattgattattggtggcgagggcccagagataaacccaattattcaactctctcgggctctaactggtaatagatgttggcgaggcaccttcatagcacgtggtgcctggcaacaacacatgatccgtatgacagcgcatgcctttggagcgttatattggcgcagacaacatgagggagcatcccctacaacagctcgtgctactgaaccttcgtgcctactgtggttagcggcaagaaggttgcattgatcccactagctggctggaactatggttgttatttgcgacaacaacaactaccattaaggcagcttcctgttgcctacccccatggattactttgcttcagccaggtggcagaatgctactctcctggttattgacaggtggcgccaatctactaccattgcaacctgctagttggtgtgtgcactgatgactctgctgacacatcaacaaggtgcagcacggtttgctagcacactgtgccgaacgctgggacccttttagaactgtgacaattg

SEQ ID NO: 174431 - DNA, 266 bp, Zea mays
  unsure (1)..(266): unsure at all n locations
  Clone ID: MRT4577_9065C.1
cttttgtttttttttttttttttttaaaaaaagnggaggggggcntttatctntgtctgtggaacgggctcctgcctgtggatcattggtccccattggccctggtttctccttggttccgggctggctctgattaagggttgtgagctgtctcactcttgggggggggggggantncttttacnctccttcttgccataggtctcccgggttggcttgtgtcgggctgaggctcttttgcgctctcgctgtgtgttcgcatttgt

SEQ ID NO: 174432 - DNA, 357 bp, Zea mays
  unsure (1)..(357): unsure at all n locations
  Clone ID: MRT4577_90660C.1
ctgttgaaagtggngatngnaaactagntttgctgataccatcattgaaaccggtgcngggtttattaaatatgttgggggagatgtgaagactcctcgtggcctccgcacactcaactctgtttgggcccaacatcttagcgaagaagcgaggagaaggctctacaagaactggtgcgagagcaagaagaaggctctcacaaagtatgctctcaaatatgaaaatgatgctggcaagaaaggaaattcatctgcagcttgagaagatgaataaatatgctgacgatatccgtgacatngctcatacccaaattaggaagatgaatggtttgtagcanaanaaggctcacctgatgg

SEQ ID NO: 174433 - DNA, 274 bp, Zea mays
  unsure (1)..(274): unsure at all n locations
  Clone ID: MRT4577_90661C.1
gaagaaacacatatccatctctattctcatttccctgtgttctagtgttcctcttctctgtctagaaatatatatttctcttttcccttcatcttacatgtacccagattctcttatattctagtactttgctgctgatggttgaattgaggtattagtgttggtaacatgtggtatcagatgaggtcatgctggaatcgntctctgctgtggcgtccacgatggactccgtggaggcggcgatgaagtgtattctctacgcgctggcgcaaac

SEQ ID NO: 174434 - DNA, 392 bp, Zea mays
  Clone ID: MRT4577_90662C.1
tttatgacagggaacaacttggggcgtggactggggagagacgggggagtaataacaaacacgaagtcaccgacgaacacgaacagggcgcgggggcaggctacgtacaccggacacgtaccaacagggtgggcgaggacgaggaggctacaagaacacaggctggagaagaatgttttaccaccacaccacgcacgcaccagctactgggtgacaaatcgggaagggctttatttatctaccatggggggaggcctctcgggatgccttgatccggggatcgacaccgacgggcggtgcgcgggcagtggggcggaccaaatgcacacacacgcgcgcgcgcgccatagttggacgggcggggaagaaccgggcgctactggatggagcac

SEQ ID NO: 174435 - DNA, 416 bp, Zea mays
  unsure (1)..(416): unsure at all n locations
  Clone ID: MRT4577_90663C.1
gaccagtccaggctccagagagcgcccccctgcacagagagcgagacgtagagagggagagagagcggaccantcgccgccggcggttaacagcggagcggagatgaacgagagaggcgggtcgagggcggcggtggacgagcggtacgcgcaatggaagtcgctcatccccgtcctctacgactgggtcgcgaaccacaacctcgtctggccatccctctgctgccggaggggtcctcaatttgagcaggctacctataagaatcgtcagcgcctttacctatcagagcagacagatggaagtgtggcagataccctgttcattgcaaactgtgaagttgtgaaaccacgtgtttgcagctgtagaacacatatcacagttcattgaggaagcacgatcgccttttgtaaagaag

SEQ ID NO: 174436 - DNA, 244 bp, Zea mays
  Clone ID: MRT4577_90664C.1
agcagtggtaacaacgcagagtactttttttttttttttttttttttttttttctgggtcataacgggacacatagacaagtccactagaacagcccgccagaatccattgcttgggcattataaatttagccgaagtaacttctttccccttgatagcaataggtttctttatctgcaggatatgagcacacattaattgattagtcctcgaatcccgcgtactctgcgttgttaccactgct

SEQ ID NO: 174437 - DNA, 318 bp, Zea mays
  unsure (1)..(318): unsure at all n locations
  Clone ID: MRT4577_90665C.1
cgtctcggggaggggttttcaatgagggtcannactcatgcctgtgtatgatattctcttcaaaanntctctcatgtgaacagagcgaaannattagataccctcatatcttctnnggtgattcttttagtagggctgtgtcgatgtcttttgcttaactgacatctgacatttgcctcatatcccaatacttctgttattatgtgtcagaacttgaatgaaatncgacatatgtcacacctaatatttattttgtgcgcgaagatgatgcaaactacccgcaatcatgcaatcgttcntgccgacgagcatngggca

SEQ ID NO: 174438 - DNA, 294 bp, Zea mays
  Clone ID: MRT4577_90666C.1
gcgtaggctgtactggttctcccgcgtcggcgtcaacggccgtttccttctgggaaaaatgggattgggggccccttcctccgcacccttcttgttgcgcttgccgttcttgcttcggcggtgattgcgcaaagcttctacaacaagctgtccgctctaattgccggcaacttctctgggctcgcctgcgcccccgtcttgaacaacttcttgctccggtacgcgcacgacaaggacaacgtgctgcgggtggtgctgtcgaccatgtacagcacggggtgggtggggatgggg

SEQ ID NO: 174439 - DNA, 590 bp, Zea mays
  Clone ID: MRT4577_90668C.1
agtcttctgccggcaatttcgattccccctctctcacgagttctcctatcccggatccatccagaaaaccaggttggtccgcagccgggtcggtcaaaggcgctccgtccctgcccggagttgatgcgcgccgccgtctgaatctctgcgtgaggcaggccgatcaaccgatccatccggccatggcgtgcaggggcttcttcgagtgcgtcctcaagctcttcaacctcgtgctcatggctgtcgggctggccatggcgggctacggcgcctacctgctcgtgctctggctccagctgctgcctccgtcgccgccggcgccgcctccaagcggcgacctagtgcggcttgggcggccgatgcttcttcttattgacgtgtctatctcagatgggacctcggagaagctcatcagcgcatggtttatttttgcatttataggtgtcggtgttatactcttcattacttccatcttcggttgtgctggagcatcaacaaggagtggatgctgcttatccacttattcattcctcatcattttgttcatactagtagagcttgctgcaggatgcttcattttcttcgaccat

SEQ ID NO: 174440 - DNA, 607 bp, Zea mays
  Clone ID: MRT4577_90669C.1
agatctgcagcagtgcatacgctggatcaatcaaccttcgttaaatttagtagatgggattgtgatcccgtacaagtctacaaggtaatttgattccacccaaaaaaaagtcgcactgtttctgacaacacgagtctagctagggttagggtagttttcattaagtcatggctagtcctcctggcctggatgtttgagtccaagtacaaggtcaccttcttcacttctacgtaggaagtctgtagcctccatgctttctgcttcctgaatcccgttcagcagctttcctttcccagcttctgctcggtgacatctgacagcttccagaatccagacacaatagctcagcctgagtgttaacggactcgagcaagaagatgccatccttcagcagggtcatgcatttttggtctggtatacttttgtcctcgctgccaatttcgccatgtccgcatgtcccatgactcgagcaagaagatgccatccttcagcagggtcatgcattttttgtctgttatacttttgtcctcgctgccaatttcgccatgtccaaatgtcccatgagcctgacttacaactgattacatctttcaaatgtcaattgaaa

SEQ ID NO: 174441 - DNA, 164 bp, Zea mays
  unsure (1)..(164): unsure at all n locations
  Clone ID: MRT4577_9066C.1
gcgtccgaaggatcagcacgcgcccgtgggaagggagctcaggcggcccgccgcggcgcgtccggcgggcgggctgagccaatggcactgncccttggggcgcgaacgccctaacgtgggtctgggcgggcggttagcagaggcccccgttgcttgcttggatt

SEQ ID NO: 174442 - DNA, 771 bp, Zea mays
  Clone ID: MRT4577_90670C.1
cgaggccggccgggctggccggttcaacttgaccgaacggcagccattacctggtggcgcctcctccttgccggtcggagccggctcgccggcgggtggcgacgctcccgccgctgtcacagggctgctcgcaccacgtgcactcctctccagtacacccaccgagacgcgagacctctaaggctctaacccaagattccatgaagatttgtcaactccaattaacagctacacgattttcaaaacagaataattctggcgaggatgacgagctcctttctgaactaaaagataagtgggatgcaatggagaacaagtcctctcttgccttgtatggtgctggagcaatcctcgctgtctggatatccttggtcgtagtgagatctctcgactctgtcccattgctcccaggcatattggagctagtcgggctcagctactctggatggtttgtgtaccgatacctgctttttcaggaaaaccggaaagaattggcgggtgttatcgatgatataaagagaaggattgttggcgatgatgaatagctgtttcctggtttgtaattctatttatctcgccctgtttggttctgaggaattgaaaaataatccaatggtgaagtgagaaagcactttctagctattggttttaattcatggggtccaaacaggctcttgatagaatcttgtaggtttctgttcttaattaatgccagtcagagctacgaggtattggcctttccgaaaaaaaaaaaaaaaaagaaaagcggcc

SEQ ID NO: 174443 - DNA, 490 bp, Zea mays
  Clone ID: MRT4577_90671C.1
agcctctatccggctcgttcattcttgaccgaacggcagtcattagctggtggcgcctcctccttgccggagccgcctcgccggcgggtggcgacgctgccgccgctgtcacagggctgctcgcaccacgtgctgcacggttagcaagcttgatcccgtgcgcctgcttgggtgtctgaccgcaccggcgccgagatggtagccgctgcggcggtggtgcggccggtgtccttccgccacctcggcgttctcctccgcgctcctttgccctgcggcctgacaacctcccgcgtcgccgcacctttcccccgccgcacagattccatgaagatttctcaactcccattaacagctacacgattttcaaaacagaataattctggcgaggatgacgagctcctttctgaactaaaagagtgggatgcaatggagaacaggtcctctcttgccttgtatggtgctggcgcaatcctcgctgtgtggtgttctt

SEQ ID NO: 174444 - DNA, 152 bp, Zea mays
  Clone ID: MRT4577_90672C.1
cgacgtctcgtctagtctagtctcgcctagcccgcagccccttggcttcgttccatccggcttctcggcggcagcagagaggagggggatggctcaccggctgctgcgggacacgcaagctgactggtgggagcggtcgcacttcccaatta

SEQ ID NO: 174445 - DNA, 1040 bp, Zea mays
  Clone ID: MRT4577_90673C.1
accacttgccacttgggatacgctgacctctgagcagcctcgatccggctcgttcaaacttgaccgaacggcagccattagctggtggcgcctcctccttgccggagccgcctcgccggcgggtggcgacgctgccgccgctgtcacagggctgctcgcaccacgtgctgcacgtacgctacccagtacccacactccgctcaatggctcccacggagacagccgggctctatctaacccaaggttgatctcatctcgtgcactcctctcccttcccctcctctcctagggttagcaagcttgatcccgtgcgcctgcttgggtgtctgaccgcaccggcgccgagatggtagccgctgcggcggcggtgcggccggtgtccttccgccgcctcggtgttctcctccgcgctcctttgccctgcggcctgacaacctcccgcgtcgccgcacctttcccccgccgcacagattccatgaagatttgtcaactccaattaacagctacacgattttcaaaacagaataattctggcgaggatgacgagctcctttctgaactaaaagataagtgggatgcaatggagaacaagtcctctcttgccttgtatggtgctggagcaatcctcgctgtctggatatccttggtcgtagtgagatctctcgactctgtcccattgctcccaggcatattggagctagtcgggctcagctactctggatggtttgtgtaccgatacctgctttttcaggaaaaccggaaagaattggcgggtgttatcgatgatataaagagaaggattgttggcgatgatgaatagctgtttcctggtttgtaattctatttatctcgccctgtttggttctgaggaattgaaaaataatccaatggtgaagtgagaaagcactttctagctattggttttaattcatggggtccaaacaggctcttgatagaatcttgtaggtttctgttcttaattaatgccagtcagagctacgaggtattggcctttacgaaaaaaaaaaaaaaaagcggcc

SEQ ID NO: 174446 - DNA, 389 bp, Zea mays
  unsure (1)..(389): unsure at all n locations
  Clone ID: MRT4577_90674C.1
tttccccatctacagatttccttcaagacaaaaaaaccccaanaggaaaggcccctacacagatttcacgactcgcaccnccgnncacaaggcggaaacatgagtcgccacccgatcactaattgggcacaaaggtcccacagggtggtctttactatagaacttccctacacccagcatgcgaatcttaacctgaagccagaaagccatttcaacttctcagctacaggctcaaattacttgcactaaaattcagacattgagctgaacaatgctacaaatgtggaggaaagcaaaacaactattgccccaaggacccatacctacccagaaaagaaagcgaacacccagtagtggccaatgccgcagaatcacgataacaaaccacc

SEQ ID NO: 174447 - DNA, 1004 bp, Zea mays
  Clone ID: MRT4577_90675C.1
gcacgagattagctggtggcgcctcctccttgccggagccgcctcgccggcgggtggcgacgctgccgccgctgtcacagggctgctcgcaccacgtgctgcacgtacgctacccagtacccacactccgctccagtacacccaccgagacatctaacccaagcttgatctcatctcgtgcactcctctcccttcccctcctctcctagggttagcaagcttgatcccgtgcgcctgcttgggtgtctgaccgcaccggcgccgagatggtagccgctgcggcggcggtgcggccggtgtccttccgccgcctcggtgttctcctccgcgctcctttgccctgcggcctgacaacctcccgcgtcgccgcacctttcccccgccgcacagcagattccatgaagatttgtcaactccaattaacagctacacgattttcaaaacagaataattctggcgaggatgacgagctcctttctgaactaaaagataagtgggatgcaatggagaacaagtcctctcttgccttgtatggtgctggagcaatcctcgctgtctggatatccttggtcgtagtgagatctctcgactctgtcccattgctcccaggcatattggagctagtcggggctcagctactctggatggtttgtgtaaccgatacctgctttttcaggaaaaccggaaagaattggccggtgttaaccgatgatataaagagaaggattgttggcgatgatgaatagctgtttcctggtttgtaatccaatttatctcgccctgttgggttctgaggaattgaaaaataatccaatggtgaagtgagaaagcactttctagttattggtttaaattcatggggtccaaacaggctcctgatagaatcttataggcttctattcttactaggtgagtacccgtgcgttgcaacggaaacatataataccatgataacttatatataaaatgtgtcttatattgtcataagaaaatgtttcataatc

SEQ ID NO: 174448 - DNA, 3047 bp, Zea mays
  Clone ID: MRT4577_90676C.1
agcagcctcgatctggctcgttcaaacttgaccgaacggcagccattacctggtggcgcctcctccttgccggtcggagccggctcgccggcgggtggcgacgctcccgccgctgtcacagggctgctcgcaccacgtgcactcctctccagtacacccaccgagacgcgagacctctaaggctctaacccaaggttgatctcatctcgtgcactcctctcccttcccctcctctcctagggttagcaagcttgatcccgtgcgcctgcttgggtgtctgaccgcaccggcgccgagatggtagccgctgcggcggcggtgcggccggtgtccttccgccgcctcggtgttctcctccgcgctcctttgccctgcggcctgacaacctcccgcgtcgcctctcctttcccccgtcgcactgctgcactggacactgactcctctcccgtcttcgaaggtgctgcacccgtcattgcattattgatatccaacgctatagagaaatctcacgactctgactctgtgctaactggcatattgtagctagtcgggctcaactactctggatagttagggtacctatacctgctttttcaggaaaacccggaaacaatcagccagtgttatcgatgatattgataatgaggttctgtctccatcgtcattagtgcgaaactgatgggttataccaccccttgtgacccagttcagatgacttggcatgcttcccgccaaaaatataatgtttgatgatggaaatccaacaagatagggcccaatgtgcccagccactgaacacccaaaatcatgtcgtagcctcccaggtccagagcaaaacagtccactgtaaatgcttcacctccaatgtctatatgcagattgcagaagacactgttgctggaatgcaacgcacagtctagagcattgctgcaatggcagttgcaactcctggcccactttgtgattgatgaaactgtgggttgatcctgagtccagcaatgctgtgaggcggcaacccataatgtgaacatgcaccttcattgtttgaatgccatgcacagctatgccctataagagcatgcaatgatattgctggcatgtcatccactgtcaaggccaacacttcacccactggagggatatcttgatcaggcaccacttccagaacaaacaatttttgcaatgatgtccaggtgcatacttctcatcacagttgaagtagagtccttggggtctttgatgttgcatcttagagggcatgagtcattggcgacccaccgatggtgagtgaggacagcaacggagcttgtgccagtgatgttgctgccagcggagcccatatctgtggtcttcccgcgcctcctgccaccgcttgccggcgttcatagacgcctgctagagtcactgtcctccaggtttgtcggatgttgaaccgccacatctgtcttcaggggctcgccaagaccagtgatgaaaagttggattcgctgtgattacgtgagctctatatcgcggcaagtgagtgttaagaatttaccctggtattcatccatgcttccagtacggtgcagcagctccttcttagacccttttctccttaatataatgagacgcagttctcctgcgtttttcgaaaaaagtacagtacagcagcttcagttcgcttagtggtgtcttggtcagggtaggaccaaaacgatgcaagacaagctggacgaagtgttgcaaagatggttcacctgctatcatcttgaggcgataataccacaattgagctgtgccggtcatgtggtaagatgcgagccaaactttcttctcctccggtctgccctgtccatgaaagaattgatctcagcgattcaaccatggaagaggatcctctgagccatcgaatttcgggtaatccagtttgaggtagcgtggtggagcatgttcctcctgatcttgatgatcatgcccctagccgccacctctgccaccgccaccatcaccatcattgcggcctcctctgccacctccgccgccaccacctctatgcccattacaattgttatggctggtgttgtcgggcagaccagaggatggagaggtcttttccaatcgcgtgactgctagattcaaggcttgaagctggttatcgctgtcccgctggcggcctatgacattggtcagcgatgtgttcatggtgtccactgatttggaaacaacttccagagattttgacatggtctgtaccatgtcctgcagcgaagagattcgggagtccatgctgatcaaatcagagctgactgataccagattgtcaccggttgggggaaccggatgattggaactaggaacatgacacaatgagtagtggtggtgtgtggtaggatgtggccttggacctcgctggtgcggttgagtcgccgtggtcggcaaccatactgtcaaggcagggatataaacacaaggagctgattccatgaagatttgtcaactccaattaacagctacacgattcgccgcacagaataattctggcgaggatgacgagctcctttctgaactaaaagataagtgggatgcaatggagaacaagtcctctcttgccttgtatggtgctggagcaatcctcgctgtctggatatccttggttgtagtgagatctctcgactctgtcccgttgctcccaggcatattggagctagtcgggctcagctactctggatggtttgtgtaccgatacctgctttttcaggaaaaccggaaagaattggccggtgttatcgatgatataaagagaaggattgttggcgatgatgaatagctgtttcctggtttgtaattctatttatctcgccctgtttggttctgaggaattgaaaaataatccaatggtgaagtgagaaagcactttctagctattggttttaattcatggggtccaaacaggctcttgatagaatcttgtaggtttctgttcttaattaatgccagtcagagctacgaggtattggcctttccacatataatatcaatatactacgataatttatatactgatt

SEQ ID NO: 174449 - DNA, 831 bp, Zea mays
  unsure (1)..(831): unsure at all n locations
  Clone ID: MRT4577_90677C.1
atttcctggacatcatctcaatcccgtctggatcagcagtagaggagcagttccgttcatatttccttgcggctaaaaaaatggaggagtctcctagcccgttccaagatggttcaactagccagacaccacctattgaaactcccactgtcgatacagctgcgacagggcggcaggtagctactccgccaaggcctgctcaagttaaagtgatggaggagaaagcagtttcttctttgcccaagccaagtactgaacaacgcagatcaagaagggtgctcgttcggcctagtcttgaacgaattgaagagccccaggctgatgcggctacaccagttgtcgatggttctgcagtacaagagaaaggtggcacgtcgacagaacgaggttccacagtagttcaggaaaaaggtggcccatcactggagcgtgaaacttctggcagtgtgtctgtattgccttctggtcgcaaacgtctcatgccatcatcgcagatgagagatgatgcatcacatggagaggctaatgatgccaatcctccatcaaagaaacctaaagaggattctgttcagagttccagtgagttaaaaactgatcaatcggcccctgaagatgtaacgactgaggctcctgtggttatttcgatagacaaccaagatgtgcaacaacagcctggagaagagatgaacacggatcaggcttccatgccagttgaagaggttgaggacatcaaggatgacgaagcgggtaaaatgatgacatggaaagatatacaggtgcatcantggacatcgaaaggcaggatgctgaagttaatatggacagtgatgc

SEQ ID NO: 174450 - DNA, 504 bp, Zea mays
  unsure (1)..(504): unsure at all n locations
  Clone ID: MRT4577_90678C.1
aaaaaaaaaaaaaaaaaaaaaaaaaaaaaaaaaaaaaaaaaaaaaaaaaaaaaaaatctaaaaaaaaaaaaaaaaaaaaaagcttgggcctttgtccggcggcccgccctggccttggtgtgtgcgtttttgccttccccttggcggtcgcctggcccctctatcttgcgtggccctggttccccctttggccgttcgtttttccatttccctgggccgctgcctcctcctgctttcgcccctgttaatggccctggcccctcccccctcctttctcttgtgcctctttcccctttccccctttgccgttttccctttaggccgttgcccctcccccttgccccttgttcccccatctnaaatggtctttggcctccccccggccccggcgctttcccccttngggcgctgggggttggggggtatcgttaccggggcccttngtcagttccctggccccccggttcctttgcccttttttctctctttttcttggctttcttt

SEQ ID NO: 174451 - DNA, 263 bp, Zea mays
  Clone ID: MRT4577_90679C.1
tcgagcggccgatggcgatctagaacggtcggcgctgttggcggaggcgaggcggaggacccgcgcccctgctgcttcgagacctcccctgctggccacagtgccgacgactgcgacgccgcgttccggggctcctcggcgtcgtcgtgcaagtcctgcggaggcgggtactcctccgtgctgttgttcccgtgcacgccacctttgtctgtgcctgtgcgtgacaggccttgtccgaggctgtgccacgttttgcggtgcta

SEQ ID NO: 174452 - DNA, 297 bp, Zea mays
  Clone ID: MRT4577_9067C.1
tctacacgtacggcggcgtgctcaagcggccgggcctgatacaggccgacgccggactgatcatcgacgctgactacaaggtcgacatcctcagcgcgatcaacgcgccgaccgaggtggcgctacatgtcttcgcgagctctgatggtcaagatgggcgccctcgaggtcaaaaccggatacgaggcgagatcaggaaacgctgcgccctcgacaacaggcactaagccgccgaatgcatgcgcgagatggctgcattgctcggaggaaatccttgtgagacacacaacatgctct

SEQ ID NO: 174453 - DNA, 740 bp, Zea mays
  Clone ID: MRT4577_90680C.1
ggccgggatattctcatttactaataaaaatcgtggggcaaggctcacctttcgtgctcctcgccgctcgaggagctgatgtccgccggcctcctcccgcatgcgctggtactggatatgatgaggctggggacacggtggcgtcgtcaacccgcaggtcgtacggcatctgctctcatgccacaatccctaaggagtgcaacaaaaccgccgggcgacacattttcaagtatccggacatctacaacttgacctagctgaacatgcatttgcacgtgatcttcattcgcaccgtgcaggttcgcaaggacgtcgctaagtcgtcccgcaccatcccgcctcagcagatgcaatccttcacgttctgcgacaccatgtgcatgaactcataggataccatcggcgcggtgcagaggcacttcaccatcacagacaccgtgaccgtcaatatcaagctgcatgtcgccgtccaggacttcgactcgtgcgaccgtctcttcacccaagacggcgtccccaaccccatgcataaagtttgtccaggagctcacccacatcttcaacaactgcatgggtcttgcaaacctgttatgaaccacgcttgcacctccagcaataagtgacatctgcatgcagggaatgcttggattcctttttcttttaattgagaaatcgttgaaatcatgagttatatatatggagtaactctatggatttgctcctgacctgccactatttat

SEQ ID NO: 174454 - DNA, 864 bp, Zea mays
  Clone ID: MRT4577_90681C.1
attgggccctcgagcccggcgggggctccacgtctctacctctacggctctaccgcacattttgctacgctccatcgactatcgagtgcttgctggacgccggggccgggcaatggatccgggcagcgcggagatcgttttcgactgcgatttcttccggatatacagcgacggtcgcgtcgagcgtttcgccggcatggaaaccgtgcccgcgggcttcgacgccgacaccggcgtcacctcaaaagacgtggtcgtcgacgccgccaccggcatcgcgacgcggctctacctgccagccatccctacggccccgtcatctccccagtcggacggcaacggcaacggcagcgccacggcgaagcttcccatcctcgtcatcttccacggcggcggcttcgtcatcggctcaccggctgatcctggtttccaccgctacatgaactcgctggtcgctagcgcccgcgtcgtcgctgtctccgtcggctaccgcctcgcgcccgagaacccgctccctgcagcctacgaggactcctggaccgcgctcaactgggcggtttccggcgcggacccgtggctctccgcccacggtgacctcggccgcgtcttcgtggccggttacagcgccgggtcgaacatcgcccacaacatggccgtcgccgcgggcgtcagaggcttgcgcgccgcggaaccaccacgagtagaaggcgtgatcctgctccacccttcgtttgccggtgaacagaggatggaagaagaggatgacagattctggcagttaataataagaggtgggagggcatcttccccggtgcgagagacgggctggacgatcggagaaatcacccggtcgtcgctggcgcg

SEQ ID NO: 174455 - DNA, 352 bp, Zea mays
  Clone ID: MRT4577_90682C.1
agtggacccacagcgttctgacacataataggtcatagtcaagcccgatggatacgtgttagttttaaagagtgggtctgccttcggagtgtcatgcacatgcgatggctggtacctgatgaacagagggctacccgctctgctctaccttgttccttcaacactacgaattatcgtcctgcttggatcgaggagcttgtagctcaggcaggtttggaacgccaatgtgtatgccgactgctaggtgcagatatatagctgttatcaagaatctgtttgcaagcttcaaatggcctttaattggggttagctcgccatgcttcctgtggtttttgtttaaattgcgccatgc

SEQ ID NO: 174456 - DNA, 242 bp, Zea mays
  Clone ID: MRT4577_90683C.1
ctgacccatggtctcctccccttttttctatgttctactagcgttatggggccgtactgttctcttgtggggggagcacagctgcttatgtggattacctgcgctcatcctgctggcttgtacatcccaccagcaacgagtcactgaacaatgcctgtctcctctacgctgagatcctgaactccaaggtgattaccgcccacgagacaaggaggcatctcaaataccaattaattaccttc

SEQ ID NO: 174457 - DNA, 557 bp, Zea mays
  Clone ID: MRT4577_90684C.1
agaccggcccaccaaccacgagcaagccgccgccgacagccttcggcgtcctcggcgaggaagccatccgcgccatcttccgcctgctctctcccgccgacctgctccgcgccgccctcgtctgccaccggtggcgccgcgtggccgcccgctgcctccccagcacccctcccccagggcctgccctcccctcctcggctacttcttccaccccaccagcgcccctccccggccgcccataccggatcccaagatcatcttcccggtcgtctttgctcccctcgacgcctcctctccgcgcctctccctcgacttcgcccgggatgtctcccgcctcaagctcgtcgactcccaccaaggcctcctggtctttcaacagatcaggccggtccccgccggggttcttccccgcctcctcgtcctcgacccggactcccgccgccgccgcgcgacatgctacccgagaatcgccggtccgtacactacgtccggcccgcgctgctctcccgcgcgcacccgagcaggctgtgcttcgaggtcgtctgcctcgccatcga

SEQ ID NO: 174458 - DNA, 1106 bp, Zea mays
  unsure (1)..(1106): unsure at all n locations
  Clone ID: MRT4577_90685C.1
cattgggtacctcgnagccggccgggaggccggagctttaatttatgagttcatgcctaatgggagcctggacacatggctacatcacaaaggagacaatgaggcagtaaaacgtcttggcttgactcaaagaataagcatagccgttaatatagctgatgcattggattatttgcaccatgattgtggacgaccaactgtccattgcgacttgaaacccagcaatatccttctagatgatgacatgaatgctcttttgggagattttggaattgcacgcttctatcatgatcctgagtcaaaatgggccggttcaattagttcaattggtgttaagggaacaattggatacattcctccagagtacggaggaggtggccttgtgtcaacgtctggggatgtttatagttttgggatattgttgctcgagattttaacgtgcaaaaggccaacagatcctttgttcaaggatgaccaggacatcatcagctttgtggagaataactttccggatcatgtatttcaagttattgactctcacctcctggaagaatgcaggagttcaattcaaggaaataattcaatacatgaaaatgagatcaaccagtgcttggttgatctactgcaattagcactttcatgccttcgttcattaccatctgaacgatcaaacatgaagcaagtagccagcagaatgcatgcaatccaaacatcatatcttcggtggaagaagaagtaataagaggaagggtgttccctgaattgtaaaataacatatatacttagacatccactcgcatgtattattgattatcatctagaaaatacaagaataaaacccttgcaatagaaatatgctaaacatcgtgataatatcaaaatatggaagaaatgtaggattcccaatttgttatggagacatagaaatcataaatttgcagtggagcgagtattcttaaaaaaaaaaaaagattcggtagatgatgtggtagtttaaagttcccaagcaagctacaatactacatgttattgatgttgtaagttattagtagtcataataaaaatgacaaagataatggccaaattagtgggatagtattgcatcg

SEQ ID NO: 174459 - DNA, 926 bp, Zea mays
  Clone ID: MRT4577_90686C.1
aaaaggaacatttggatatattcctccaggcacatatagttactttagctattctgttttgttcatttatgtcaataatttttctaggtagaaaataagttacaacacaattgttaatttgtgtatgcctttccaatttagagtaatttgggtcatggtctggttgttcctggggtcttctgggcccattggggcgctcgccgccgggctttgggggaggtggtcatgcatcaacgtctggggatgtttatagttttggaatagtgttgttggagattttgacgagcagaagcccaatagatccaacgttcaaggatggctagggcatcatcaactttgtggagaataactttccgaatcaagtatttcaagtcattgactctcacctcctagaagaatgcaggaactcaactcaaggaaataatttggtaccagaaaatgagatctaccaatgcttggttgacctactgcaattagcactttcgtgtcttcgttcattaccatctgaacgatcaaacatgaagcaagtagccagcagaatgcatgcaatccaaacatcatatcttcggtggaagaagaagtaataagaggaagggtgttccctgaattgtaaaataacatatatacttagacatccactcgcatgtattattgattatcatctagaaaatacaagaataaaacccttgcaatagaaatatgctaaacatcgtgataatatcaaaatatggaagaaatgtaggattcccaatttgttatggagacatagaaatcataaatttgcagtggagcgagtattctttgtaactgtggccgattttctagatgatgtggtagtttaaagttcccaagcaagctacaatactacatgttattgatgttgtaagttattagtagtcataataaaaatgacaaagataatggcc

SEQ ID NO: 174460 - DNA, 1953 bp, Zea mays
  unsure (1)..(1953): unsure at all n locations
  Clone ID: MRT4577_90687C.1
ttgggtacctcgaggccggccgggatcgttcccgccaggcgccagcctccccccgtatttgatgttaggacaacttgaacaaatacagaccattcaaatggaccaaaacattcttactggaaacattccgcccatatttagtcgactatatagcttgaacttgctcaatctttcccataacaatttatctggccccatgccaacttttctaagtggtctaaatcttagtaaactagatctatcctacaacaattttcaaggacaaataccaagaactggtgtattcaataatcccacaattgtttcactagatggcaatccagaattgtgtggaggagccatggatttgcatatgcctccgtgccatgatacttcaaaaagagtaggtagatcaaacttattgatcaaaatattgatcccaatttttgggttcatgtcactcgtattgctggcctactttttactcctagagaagaggacgtcaagaagagaatctagattagagctatcatattgtgagcattttgagacagttacttataacgacttagctcaagcaacacgggacttctcagaatccaacctaattgggagaggaagctatggttcggtgtaccgagggaagctaaaggaaagcaaaatcgaagtggcagtaaaggtttttgaccttaagatgagaggagcagaaagaagcttcttgtcagaatgtgaagcattgagaagcattcaacaccgaaatcttcttcccatcataactgcttgctcaacagtagataatgtaggaaatgttttcaaagctttaatttatgagttcatgcctaatgggagcctggacgcatggctacatcacaaaggagatgaggagaccgcaaaatgtcttggcttgactcagagaataagcatagctatcaatatagctgacgcattggattatttgcaccatgattgtggacgaccaactgtccattgcgacttgaaacccagcaatatccttctagatgatgacatgaatgctcttttgggagattttggaatttcgcgcttctatcatgattctcagtcaaaatgggcaggttcaattagttcaattggtgtaaagggaacaattggatatattcctccagagtacggaggaggtggccatgcatcaacgtctggggatgtttatagttttgggatagtgttgctggagattttgacgagcaaaaggccaacagatcctctgttcaaggatggccaggacatcatcagctgtgtggagaataactttccggatcatgtatttcaagttattgactctcacctcctggaagaatgcaggagttcaattcaaggaaataattcaatacatgaaaatgagatcaaccagtgcttggttgatctactacaagtggggctttcatgccttcgttcattaccatctgaacgatcgaacatgaagcaagtggctagcagaatgcatgcaatccaaacatcacatattgggtggaagcacaagtaataagagcaagggtgttccctgaattgtacaataacatatatacttggacatccactcgcgcttattgttgattatcatctagaatatacaagaataaaaatcttgcaatagaaattcgttaaacatcgtgatagtctcaaaatatggaggaaatgtgaggacttgaaggtagtgatgtcataaggttcacggctcttggtgcgggcggacacaacactttttttcttagttagtctagtctctaaattgaattttactaatttgtgtctgtcttaaactttgcttattgtaacacccgaggtgtttatcgtctggtcgaccacgaccacgagtggggactttaatacatgatagcgatgaataaaatagacactaaattttaatcaaaaaaaaaaaaaaaaaaaaaaaaaaaaaaaaaaaaaaaaaaaaaaaaaaaaaaggggnggcccaca

SEQ ID NO: 174461 - DNA, 328 bp, Zea mays
  unsure (1)..(328): unsure at all n locations
  Clone ID: MRT4577_90688C.1
tncantcgagtctnacatgtgtgcgagtcgacnnggttcagaaacctgagatgcgnaggaancngatgagcnggaggcnctcacgggtgnancgcnggctgancctgancttctgtgaaggggtcgagttngagcacgctgtcgggaccccaaagatggtgaactatgctgancgnggcgagcagacgaaactctggtggacgctcgaagcgatatgagtgtnatcgntctctnnttggtataggncgcaagctatcgaaccatctagtagtggtnctccgaagttcctcangatgctngagccaacgatttacggtaancctgatac

SEQ ID NO: 174462 - DNA, 1127 bp, Zea mays
  Clone ID: MRT4577_90689C.1
cccagcgtccgcccagcgtccgattttggggaacgaaatatttgccctccctcaccaagtcgaggaccccctccgaatccgagggttcaagcgaccgacggcgaacatggcggcggacggcggcccagcgacgtcggcgctggaagaggccctcaagcccttccaggaaagagcctccgaggctgagatacgcatagcgaagctggaagccttgctgtacaacaaagatggtccgagcggtggatccgaggcaacttcctctgccgtgaaggatctccagtcgaagctagatgtggttactgcagaatgcttgactgaaaaggagaagaacaagaagctgaccatggagaacgagaagctccagtaccgcatgacccatctgattcgtgagataaaagaggcggaatcgagatagggatccaaataagcaaatttgtcatccctacgcacccactgaaatcccttcaccaagtcgaggaccccctccgaatccgagggttcaagcgaccgacggcgaacatggcggcggacggcggcccagcgacgtcggcgctggaagaggccctcaagcccttccaggaaagagcctccgaggctgagatacgcatagcgaagctggaagccttgctgtacaacaaagatggtccgagcggtggatccgaggcaacttcctctgccgtgaaggatctccagtcgaagctagatgtggttactgcagaatgcttgactgaaaaggagaagaacaagaagctgaccatggagaacgagaagctccagtaccgcatgacccatctgatccgtgcgataaaagaggcggaatcgagataggagcagcccggcgaggccgattcaaagcctgatgtcgaagtgttccccacccgccttgctgatccttcacgttgttcctgcatctacctcaagctatcattgtgatcttgagatagagcttggtcacaagtcaagactgtattatcaaactgtcgattgaagtgatgatgtgtgcacagctttctgtcttcacctgaccccatctcgaagggcacattggaacacaaaatgttatctgaaatgacagttcatattttgaaaaaaaaaaaaaaaaaacccgaaaagcggcccctagggcc

SEQ ID NO: 174463 - DNA, 235 bp, Zea mays
  Clone ID: MRT4577_9068C.1
ggattgtcgcatccggggatcagaacaagaggcagaaaacaaagctaaaacaagaaaaccacccccacaagaaaacggacaacaaaaggccgacaagcgcttggccaagatcaataccaataatgaggaaaagacggaccaggagaagaggaagatctatgaccaggataacaaggacggggagaaccaggtccaaagcagcagagacaccgaccgggactggaacatccactac

SEQ ID NO: 174464 - DNA, 556 bp, Zea mays
  Clone ID: MRT4577_90690C.1
gggccgggtccacgaccacccagctcagctcgagctccgccggcgagggcaccgcggcggcggaggccggcctcttccgctccacggcctccacgcggaacggcgagccgaggaaccacggcgaggacgcgggcgtctccaccacgcgggacagcaggggcgcgcccctgtagtagacgtccaccgcggagaccagctccccggcggggacggggtcggggtcgggacctccggctcccccggtgtccgcggacgggaacgggtgcgcgtcggcgaagagccgctgcggcgggaccgccgcgagcagccggcgctgcgccgccagcgccagcgccagcgacggccactcggcgacgcagagcgcgcgccacgtctccgggtccgtggccagcgcccggagcgcggccgtggcgcagctggccgccgcaagcgaccgcccgtccagccgccgcagcgcgcagcccagcacgtcgccgtggaggtcctcgatcgtagtagtcaccatctcccactagtgagcctgtctgcctctcttctcttctgcttgatgtgaatt

SEQ ID NO: 174465 - DNA, 266 bp, Zea mays
  Clone ID: MRT4577_90692C.1
gttcaattttaaatatcacatgtgttttaagtttcttaaataaaaacactgaacacagagaagatcctcagtggccatcaacggccagtgatttcactgtctggctggccgtgaagactgtactctggctcactcgccaagatcataaaagcatggggccttacagcgtcgcctgatgtcacaaacactctctgagcataaacgccctgtaacatgggaactccgtggggataacaagctattatcctgcgcccttgacacgacta

SEQ ID NO: 174466 - DNA, 322 bp, Zea mays
  unsure (1)..(322): unsure at all n locations
  Clone ID: MRT4577_90693C.1
cccacgcgtccgacaatatgtgaggagtaaaatacaattaacatagttctttgtgagcgatgtagtataatttataacacgagggataagcttagaatttaattaattagctgataagctatgtttaggctaattgtattaaatgtgtataatttgttgtctcgtgatgtttgccttaggttcggttaatctagagaagcgtaattattgcgcttagtcgtatgtcgataactagtattttcgtataacattgtacagcgcctcgccgctaggtatttaattcgctatcgcgtaganctatttaggctcgtggtattcctat

SEQ ID NO: 174467 - DNA, 423 bp, Zea mays
  Clone ID: MRT4577_90694C.1
ggaggaacagctaccccattttaattaaccaaaaaaaaaaaaaaagagggcaagactttactagggggaagaagaacaaaaataaaacgccccaacgggacaaccaaaagttttccagggattttgcccccggcggcgaacctcaaggaaacccccccttgcccggggggggggccttcctgggcaccggggccctggggccccgggaaaaaaagcgggccgggaacaaacccggccaccgccagggccggacaggtcggttggggcagccggaacccccaccgggaaagccccatgcggggggggggggggtcgtctaaaggggcccgttcgggggttccggcctgccccaaaaccttggggaccccgggggggacccggagggggcgccccccgggggggggggggggcccccccccgggg

SEQ ID NO: 174468 - DNA, 485 bp, Zea mays
  Clone ID: MRT4577_90695C.1
aattcggcacgaggcgaagggcatggtagctctatgatgatggtgacgatgagtccgtcacccaccacgcgtacgctgtcatccatgcatatatactcttcctccttcctcccctctcttcaagcagcaaatgaagatgggcgtcagtcggcactatataagcatctcttggtcctcccctgcgccttcctctctctgtttcctttgcctcccggcccatatctctctgtctctcccttctgcatgacgctgccaatgctgtagcggaagccggcagggtatagagctagccatgctggaccacctcgtgtgcggctacacgcaccgcagtggcgggtgccagcccgcggggccctcgccctgcgacctcgcgaccgtggacgacgttgcgggcaacggcggccacaagcctggcaagggcgtgaccgtgtacgtgtaccgagccatgatcgcggagcactcgcgggtggtgacggagtagtgga

SEQ ID NO: 174469 - DNA, 487 bp, Zea mays
  unsure (1)..(487): unsure at all n locations
  Clone ID: MRT4577_90696C.1
ccggccgggcttcccttctgaggctggtcccgctcaactaccgacccagaaaccaccaacgctgcagcggccgtagacacgctcacgggaatgagaatgtaagcatatatccggacactcccaaacaatgcaaacttttgaactgtctgctgaatccatgagaaaggaagagagacctgacagaactgaaacatccttataaggctgaggtaaccgaaagcaaaagcgattcccgacacaccgatacagagaaatgtgagcaatctacaccgagaaaaccacagtgcgaaacatcactactagcatagcgctggtatatggaactggctatactgcctacatcctagatgggtaacgactcaggtagcctgaaagcatcactaacttactatctgacccgataatgatgtggcacgcggaatcccctgcgaatcatcnaggaccaccttgcaaagataaatatctcctgggtgaccgatagccaatg

SEQ ID NO: 174470 - DNA, 134 bp, Zea mays
  Clone ID: MRT4577_90697C.1
gccggccgggctggggtctcaatcctacgtcattgcgtcaatatctggtcgtcgccaatttctttcagaggtgacgactcggtggctgctaccatgacacgtctccggaacgcccgggccggcgtataggcatc

SEQ ID NO: 174471 - DNA, 508 bp, Zea mays
  Clone ID: MRT4577_90698C.1
gccggggcccaggtgggaactcaccccgaggcttttattcgtccccacctgctcaccagagcctggacatgacgcctaccaagacgtgaactcagactaagctcgcgctcctgctacccacccagcagattactactaccaagaagtacactaagacgagaaagatcacttaagagacctaggacacaaccacgaagagggtgctgataacgtccaagaacgtctaggaaacctcgatccaggtttttaaggtctgcgaggacaaggtattcgtcctcatggggtcctgtttcctcgtagttcttgctcaggagaccgagaaggcaaccgccaggagttccgtccaggatcccacctggagggacttgacacgtgctcctaagttggtcgacgccgagaccaacgaggcattattcgagtcattcgagtttcgtaagtctacgctacttggagaggtcaagttgggtttataagaggatgtcctaatcgtactccacccataccacgt

SEQ ID NO: 174472 - DNA, 286 bp, Zea mays
  Clone ID: MRT4577_90699C.1
gatggctcgatgaccttagaccgagatttgcgggggctctggacggaatctggacaggacaactacatctgatatccttcctgacctgcctcccaagcccgtagatgcttctttttgccggtcgatcctcaaatcaaccctcacctactacaaagggatcggatctccacaggctctgctatagtgccccgggtactcggcataccgttgccttatttataacccccgcttccacttgtacgacaaactccccggcttcattctaagactacaagctcacctttaa

SEQ ID NO: 174473 - DNA, 259 bp, Zea mays
  Clone ID: MRT4577_9069C.1
ttttgtgggtctgtctacatgcacttacaggcagacaggaaccaaaacaagagagaggcatctacccaggaagaggaaagagggagcgccgcatcgctgagaagctcccggcgagctcctactgaagcgcgggcatgaaggccctagtatcgggagggcctgcagtggactgcgttccatacctgacgccgggggttacatcatatccactgacgtccacggctgcaaaggaggcgagctgatcctagtcgtacacctt

SEQ ID NO: 174474 - DNA, 909 bp, Zea mays
  Clone ID: MRT4577_906C.1
cccacggccccgcacaagggacgaggcgcaccgtggagtccctctctgatttttggcgagcagaacatacctgagacgacaggtagaagacgactgactgcctcgagcagcagagatcagggaggccgagggcgggatgacgatccggttcgtgctgttcgtcaacaagcagggccagacgcggctggcgcagtactacgagcacctctccctcgacgagcgacgggccctcgagggcgagatcgtccgcaagtgcctcgcccgcactgaccagcagtgttcgtttgtggagcaccggaactacaaggtcgtttacaggcgctacgcctcccttttcttcctcgtcggcgtcgacagcgatgagaatgagttagctatccttgaattcatacatcttctggtggaaactatggatcgccacttcggcaatgtgtgcgagctcgatatcatgttccatctggagaaagtgcacttcatgttggaagagatggtgatgaatggttgcattgtggagacaagtaaacagaacatcttggcaccaatacaacttatggagaaaacttcctaaaatagtgatatccatttgtgtagttttacatccacttcttagcacatttgcctgtctgcccctttccataaaatttccctctgtatgtgagagtgcaaaacaatctctgtaaccatggagtattgaattgacctgattgtgtgctttcagatattcctgtgatcctcttttcatgtatgcattcgatttgctcacatatgtataaaaggtgtattatcttaagaaaagctgatttatctaaaatgtaatttatcgacaaaaaaaaaaaaaataaaataaaataaaaaaaaaatcgacatatttatatgtattttgttgcagacaatttgaatagtatgatc

SEQ ID NO: 174475 - DNA, 472 bp, Zea mays
  Clone ID: MRT4577_90700C.1
cctcgaggccggccggggagcatccagattccgatctcgagactcctttcatccacccgaaagaagctatactcgttaccaccgcctagaacacctaacactacgcctgagaacaacagcactatctcgaatcacatcttgcatgcgaactaatgacagcccgcatgcggacggcggctcattgataccgctgaattcagtgccatccagacagcgagagatctactcggagactcagatgctggaacccaagatccgcctactaacagtacgacatagaggactacgacatgaacatccacacatccctctacggcaccaaccacgagccccacgacattggagaatcgcagcggcgaagtcgtcttcacgctcagggcgatcaaggagaccccaggccctatcgcactcttcctccagaaccctcaagtcgtgcattaattcaggacctagaaacggagaacatccacct

SEQ ID NO: 174476 - DNA, 3695 bp, Zea mays
  Clone ID: MRT4577_90701C.1
atggcagcgtcaggatcgggaggcaacgagcccggcgggcggccttggacggcgaccagcacgtgggtcctcggtcccgccggcgggaccgcggaggacgctgtctcgttcgagacctccgactacgacgccgaggcgtcaccggctggcgtcgtgctctgccgcccgccggccgacgcggagggcgacgtgcattcctgcccctgcgagctcactgtccacgatcatagcaacagcatttggttgttaaggcccatattacccatattacatgtgcctatatattctaccaagtccctaaggactaaggactctttttcaaatccaagggggaagtatgagattcacagggtatatgtgcgaagcacagctcggatatatgaactataccactctcctgatgcaaagggcaccggcaaggattatctatgcaccgtgcgttgtggacttgctgttaaagaaccgcagccctatggcgaagaaagtatgtcccagcggactggcagtgctttaaacagtgccaagcgtgaacatgaggcaaaaagtgtaagcagtggtagtgatgaagatagttgggttgatgtcaatattccagaatctcctgcgggaaataaaacactaacatctcaagaaaggaatgtgattcgtacctgccaagtaaatactatggcacactatgaagctactgccgagatgactgatgttaacccatgtgcatcccttactatacgtcttctatcacttcagtcaaatacgtcagtgcacattgaggaaatctacatatttgctgatcctgttgaatccaccaatgatgtttcagtaagaggtcctggaaacatgggaggcagttctttgctggcaatgcttgctcctggccttatgcaaatgtctaagtcaagaaatttgaaaatcgatggtagttatttttctgacaaatcaagggatcaagatagcgtcacatgtgaaagggttacacaggaagcagggctgtgtagcacaaatgattcaaaatatacgtctgcagggatagaaagtggaatgggccctacaattggtgttacagtatctgatgaaaaaagtagccaaagcgagttccagttcaaggagcccaattctcttccactgcctgtacaaacattagatagcacacaagcgccttcagtgaaggatcggcgagaattaaacacaggtcatcccctcatgaatgaaaactttactccttataatcatattgagagaaagctggatactctgctgtcaaaggtagagaaggtggaattatattgctctaggtttgaggacagcatgataaagccccttggtagcattgaggcaaggcttcagcgactggaggaacagtttagttcgttctctctggatattcagtctttgagaggttcttctgcatttatgtcagcaccagatggtatgcctaatacaaagagctcgcaggaggaagcacctaatgatgctaatgatagaagtacttctacaactgacaggaagccaggtttagttgttagggcgccagattttatgtcagatgattcctgtggttgtaatgtaataactaatggaaaccaggttagttgccatgggcctaatgtggtgccaaggctacttgtgaaggtccctgattttatttctcaagctgagttaactgatggaaacctccatgatggacatgctctatcttctgaaaaggggtgtaagccttccccgggtttaattgtcaaggttcctgaattcctagatgatgatgatgatgatgacgataatgacagcgacgacgaagtggaagggaagaaacaggcagaagtttgtggtgatggtgatgctcacgcatggtctgatgatactctgaagaaaaacacatccagcaacaccaagagcaaaaaaactgtatctatcaatggggcattggcgtccgcattggaggcattactcacttccaccataggaccaccatcttcaaaacctgctgtttgcgctaccagtaatttaagtgctgaaaatattaatgattccttcagttgctcccgttatcctggaaaaagtggcgagatgcccactaaatatggttcagttgaccaatttctgggtacatctggtgatccaaatttggtcggtgccttcatatcttttcaggatattgatacgactcataattctctgtcaaaggaaatgttggatagcgaggttgagataaatgaacataactgtgatctcaatacagaaaaggtggcatttgttgcaatcacagaaccattggatgtttcctcacagactgataaaattgacgaatctatttgtgatggaagttggatgaacagacaaaacaatggttctaattttgatacaatgccatatatcatgaacattgaacctttggatccttctaagcctcctacagtttttggacctgttgatagtggagttcaggtgaatgaagatagaccttccatatccttgctggagtttcttgcagcaaggaatgcaaactcttgcaagaatgatacttcggaggtatgccttggtaacgaagctgctgaaaaactgtcttttgagagaacatcggctggagctggtaaaaactcgaaaaataccagtcaacttctagtgaagaaagctcttgaggttgatgcggacgagagattttttttgtctagtgtacccatcggggcaaaatttgaaggatcaagcagtcccgcccccagaactagtgggcacgatattaataatacaaaagaagctgtctcagataaggaatgtggcctggaggatacagagaatggatttaggctctcttcgaggacggactctatattttctcggtgtcatgctacagactccttgtcaagtttgagtagtatggagtcatttagtgcagcacctgccacagaccctgttgttccagggaatgacacatcgggaaattacgtggaagatcttgcaggcattggagatcatcctgttgcaacactaatatttggggaagatctccaaaaggttcgtgatttgctttatgagctgaaggatgacatgttgggcatggcctccacagcagagtgtacaaacaagagcagcccgtcccttgaagtcttgcttgctgaatcatctgattctgaagtgcaaatttctgatcttgaggagggtattgacagtggcgctggcattggctcagctggactgtttggtacattctcatcttcagatgacgatgcttctgctgcaggcgagcctttaggtgatgttgccgagctggctacaccatcagagccatatacttctgccttcaatgagcctctggttgacgtggctgacctgacaaacccttcagggacagatgctacttcagtgaatgagcagccttcggctgatgtggttgatccgctacatacttcaaacgagcctttggacagtttggatgatctgccaaaccctccggagatgtcttttggtgggagcagtggagaacatcctgacagtcttatataggataaggctatgcgacactgatagttcagagatgagcgattgagcggaacatgttcctgctgctgcactagttggtgtgtgctgtacagtgatgactgttttcttcgtgcagaagtttctgtacataaataagtctttgtgtcctcaatagtttatgctaaatactacgaaagcaaaagtaactttggtttcgggtt

SEQ ID NO: 174477 - DNA, 684 bp, Zea mays
  unsure (1)..(684): unsure at all n locations
  Clone ID: MRT4577_90702C.1
tatactttgctgcgtttwtwcwwwtgcktctwtyggtcgtwcgtttcgacggtggcgtagtwtgcttctcgctcctttcacttgtgcctcgtctgcytccsgcgtcgcgagghcaggtccaccctgctgtctcatcggggtctgatcctggmaatccggcggcttctkctggtcccgttccaccatgctgtccttsccgcsgcgcmcggcgacggtgccgcaccckgccacggtggcgtcgcggctccggtcgtygcgcacggcgccgctgcggctgaygtcggcggtwccgcacctkccgakggcgagcbcgccgcaccagtcggcgcgcgcggcgsacarcggaccacggcracgtcggcscacgcvccgagtsgacnctcccggcaccggcccacgcgcastccccggcgccgcggamgssgcggsgccttgcagcggcggatggccacggcgtccgcgcgctccacgtcggccgagcggcaccggcgcacggccacggcgcgggcgcgtccacgcgcaccgstcgcaccggtggaacgacgccgcgccgcagtcctcggcggccgcgtacaggcaccgggagaagcgcacgtcgccccgcccccgccccgcaccaccacgtgctggagamggstcacctcgaggacgcccggaccgaccacggcaacgtgccgccgttgc

SEQ ID NO: 174478 - DNA, 986 bp, Zea mays
  unsure (1)..(986): unsure at all n locations
  Clone ID: MRT4577_90703C.1
attgcaataaataaaattccttgcctcgctcccccgtgtctctgtgctttcgctttataacataaagtggtggtttgttgatctagtgtgttcttttcatttttgttttcacccctatcgtattggtatacttgtcaatatgcataacctctatcatttaaaataaatctcctgtctataaatcctctgttcttttgtttgttaattgtccttttatggtatttgttctttctctcttaactttttgatcattaatatattttttctctttgtttctcttgcctttctcttctctttttctgttctttgtttgtttttttgttgttttctttttttcttttttcttttctcttttgcttttgttttcttttcttttttctttttttttttttctcctcttccntccttcttttttttttctgttttttctttcttcttcttttgtttttctttgtcgtggtcttttttcttttcttttctttcttcggctttttctccttttttctttttttttttttgttccttttttgtttccttttttgcttttcctttcttttttctttttcttcttttcttttttttttttttctttctttttttttttttttttttttttttcctttttttctttctttctttctctttttttttttttttcttctttttttttgttttttttttttttttttttttttttttttttttttttnttttttttttttttttttttttttttttttctttttttttttcttttttttttttttttttttttttttttttttttttttttttttttttttttttttttttttttttttttttttcttttttttttttctttcttctttttttttttcttgtttgtttttntttttttttntgtctttttgtgtttttcttttntttgttttttgtgtttttttttttcctttttnntttttcttnttttttcttttttttctcctttttttttctttttcttt

SEQ ID NO: 174479 - DNA, 655 bp, Zea mays
  Clone ID: MRT4577_90704C.1
gacacaggtccggcacacaaatccaaagaacacaaaccggcggcaattcagcttcctgatccaagacctcatcagggacagagaggcctctcgcgttcgttaccgaggtgaggtgaggagagaaatggcggcgggagcaggagcaggagcgtcggcgcccgtggcgtggctcctggcggctgccgtggcggcggcggcgctggcggcctcggcgtcggcgcagtccgggtgcacgaccacgctcatcagcctgtacccgtgcctcaactacatcagcggcaacgtgtcgacgccgccgccgtcgtgctgctcgcagctcgccagcgtcgtgcagaccagcccgcagtgcctgtgcgccgcgctcagcagcgactcgtcgtccctcggtggcgtcaccatcgacaggacgcgcgcgctgcaggctgcagctgccccaggcgtgcagcgtcaagaccccgccggcgagcaagtgcaactctgttggtggcggcagcgctccgggcgccgcgacgccgggcgcgccgtcgtccggcgtgccagcgaccgcagccgcaggaactggcagtggatcgaaggcgacgccgacggcgccgttcctaacgtccggcggcgcgtcagcccggggcgcggtgagcctggcgctagcattcgcggc

SEQ ID NO: 174480 - DNA, 871 bp, Zea mays
  Clone ID: MRT4577_90706C.1
cccacgcgctctcgcttgcgtagctgcgtcgccattgcgctgcttgcctgctctgtgcctgtcgcgagaggcggaggacgggcgccgcttgtggtcgtcatcccggccgagagaggagggagagtcggagagatggaggtggagcacggcggagagatgatgatgttggtcgaggcggctgcggcggatgaggaggggtggcagacgccgaggcgcgaggactgccgcatccctgtggtgccgccgtgcccggcggcgccgtcgaggaagaaggccgtcgcgatggcggaggcggccggagggagcaggcggcgggacccgcccaagggcgggtacttccagccaccggacctcgagtccctgttcgtgctcgcgcctccgagggcgcaggcggcggcctcaagccgcgcgtggtaattaaggcggggcacgtacgcgtgctgctcatgtacgcttcggccggccatggtcctccggccggtgagccgacaatagctagcggaatggtggtagagtagctgtatatgtctgtctacgtgtagttccctactaggtgtagggattcagctagcagcagcacatcttacctttcctttttggggggagtccttttttgtgtgaagattgctgctctggtgcctctgtgttagctagagattgacaaaagcagtaggagatccatggaggtccaaaagattcctcaaaagcttggaatctgcgtacgtgtgtccgtgtgaagtaccagccagcatatgttctgaatctactttgtgaatctcccgctttctgcctcttctctcttgcattggctggaagttgtttcgcctcgccgatggatctatatacatctgccgatctgcgattgtgcatc

SEQ ID NO: 174481 - DNA, 657 bp, Zea mays
  Clone ID: MRT4577_90707C.1
ctctcgcatcccaccaccaagctccagacgcctcctcctcctcccccgccgccgccgcactctccagagaccgcaggcatgggcgtcttcaccttcgtgtgccgcgactccggcgccgagtggtcggccaagcagcacaagggcgagctcgaggcctccgccgccaccccctacgacctgcagcgccagctcgtgtccgccgcctgcgccgaggacaagtccggtggcgtccagtcctccttcaccatggtctcccccaagtccgccatcttccaggtggtcattggtggcgcctctgctggtccgatcggtggtggtgctgctgcaggtggtgccgctgcatcaggtggagctgccgccgaggcccccaaggctgaggagaagaaggaagaggagaaggaggagagcgaggatgaccttggcttctccctcttcgattagatcttctttaccctgttgcttgccagaaatgacatggtcctattgccgcagtaattttgatgccatgcccacagggtttgtgaacctgcctagtttgattgtcaagggatgtatgtggtactttctgttcatgtgaggatttggttatgttattatgcaggaatatcctaatatggctttagtcttgtcagtacaaaatttttgcacggcccctag

SEQ ID NO: 174482 - DNA, 478 bp, Zea mays
  Clone ID: MRT4577_90708C.1
tgctacgtgaagtgtgcgtgccttatgggccgctcggcgaccctgatgggacgtgcctgatagacttccgacggactttagctgcgcacgagccggacgaccccggacgcctcctgcgggacgatggactagctgatctacttgaacggcagcggctacgtgctgtgcaccttcgctgctggccagcttccacgcctgctgcctcctgctggccggcgagctacctgccgacgtgctttccgacgactaccgcctcgcgccggagcaccgcctccccgcaggcctcgacgacacggtggccgtcatgcgctgggtgcgcgcccaggccgtctcggcggggggaggggacccctggctcgacgactcggatgacccgggccgggtgttcgtcgacggcgactcagcgggcgggaacatcgtgcaccacgtcgccgtccgccgcctgggctcggcgggctcgggcgagctctacccggta

SEQ ID NO: 174483 - DNA, 342 bp, Zea mays
  unsure (1)..(342): unsure at all n locations
  Clone ID: MRT4577_90709C.1
cgcagagtactttttttttttttttttttttttttttttttgattttttttttttttttttttttttttttttttttttttttttttttaaaaaaaaacacaaaatttaaatttgccaaaaaaaattccaacaacccctaattaacaccccacttggcccatggggaaaaacaaatcatttaaaacgcccatccaaacataacctgcttctaccaaaacccgtgacccgctggtttaaccctaaaccccgcgtaccctgcgatgtaccccccgttaaaaggccaattcatgaaaaatacataacactgggggccgntcaagcatccatataaagggcccaat

SEQ ID NO: 174484 - DNA, 1080 bp, Zea mays
  unsure (1)..(1080): unsure at all n locations
  Clone ID: MRT4577_9070C.1
aagaaagtatcattagtgattacattatcggagtttcagaaataataatcataaattttaatgcagcggaaataactaacggagaaaaccgagtaacatggcgaagcctggccacgctactcctcctggtcctctcctgcggaagcaataacccacctgaccgtctatcccggtggcagggatggaggccaagcacaccatcaaccaagtcaaggagtacctgcaaaaattgtgccacaagcaaggctgagtatactaatactcagctagacttacccggtgtgaggagtctactcctctacctctagacatgcagctgtttggctgaggggtttggtttgccaaaagcactagctgagtctaaaaacaagttttagcttttcaagttctagaataataatttagactaggtgagaacctatctattcatacatggtatcaaacattatgtcaatcaacatctttttctangtcatctcatttccacttattactcgattcgaatcgtctgcttctcgcagctaatgagactgcttgatccattgtactgcattgagtaataagtggaaatgagatgactagaaaaagatgtggattgataaaatgtttgataccatgtatgattagctaggtacacatctagtttaaaaggatcatactaaaacttgaaaagctaaaacttgtttttagactcagctagtgcttttggcaaaccaaacccctcagccaaacagctgcatgtctagaggtagaggagtagactcctcacaccgggtaagtctagctgagtattagtatactcagccttgcttgtggcataatttttgcaggtactccttaggatgattggttgatggtgtgacttggcctccattcctgccaccgggatagatggtcgagagggttactgcttccgtcggagaggaccaggaggagtagcgtggccaggcttcgccatgttactcggttttctccgttagttatttccgctgcattaaaatttatggttattatttctaaaactctaataatgtaatcactaatgatatttattaaatttgtggtattatgttttattgt

SEQ ID NO: 174485 - DNA, 367 bp, Zea mays
  Clone ID: MRT4577_90710C.1
caaccatcccaaagcttaaaaccaggggaaaccagtaccactaaaaacaatactatgcgaaaccagtaccactaaaaacaatcaggacactttaagagcaatgaaagacaataagtcttgtgggtacgggcagagcaaccgcacttcaaggatggacttgctcggcatgaagctcgatgtcccactgctatgtacccccatatgattgatcaacttagacgaagcctagtgctcaacttgaatagaggttgccgctgcttttgaccatgaatgcttctgaagagacaccaggaattatttcaaaactgcatcatactttgtattatctctgatcacaatgagcaaagtatttagaactgaagtatat

SEQ ID NO: 174486 - DNA, 685 bp, Zea mays
  Clone ID: MRT4577_90711C.1
tcctggacggagcgaaacggatgcagcagcagcagcagcagagcatcagatgatgatcagtatcagatctatgctcacgtgacgcctcgaagctataatgctaggccagagacacggaataataatggcggcatgcgaccgtggctatgctctctgtcccggagcacgacgacgaccttcacgacgaaggcgtcgcagctggtggggcgacttcctgatcgcctcccacgacgacgcgtccgcgtggctcggtgagcacccccacctcggctactcccacaccaaccaggggctcctccgccccacgtcgttcgaggggaacgaccacgtggtctgcctgctccagggaggggtggacaacctgcgtcatctgaaccagcagcacgcgctgtcaagcaagggcgccaacgaggtgctcctcgtcatcgacgcctacaagaggctgcgcgaccgcgcgcacctacccgggcagcttcatgctcgaccagatcaccggctcctacgtcttcaacctcttcgacgagtccaccaactccctgctcgtcgcatccgaccacgaggacagggcgccgctcttctgagggatcaccgccgacggctgcgtcggcttctccgacgacatcgacatgctcataggctcatgcgtcaagtcgctcgcgccgttaccgcaaggctgcttctactc

SEQ ID NO: 174487 - DNA, 263 bp, Zea mays
  Clone ID: MRT4577_90712C.1
aatttttaggtagtagccgacacaacatataccaagggggcggtgataacataaggtccaacaccttaacatcaacatactggaggcaaaagcctagtgcctaaaaaggataaactaaaaatatcgccagaaacaaactcggaaaataccaagccctgccataaactccacaacctttcgtagccttcaaaacaaaaaaaaaggtaatatttacgagaaccataatacgtcacattcggccaaactccaaatcggacgcgtgt

SEQ ID NO: 174488 - DNA, 484 bp, Zea mays
  Clone ID: MRT4577_90713C.1
ggggttgttttttttttttttttttttttttttttttttttttttttttttttttttttttttttttttttttttttttgggggggggatcccggcccaggcctttggtttgggaaaatcccgaaaccggaacaggagggagacctacggacaagggggggggggtggtcacaggcccccttctagaccggcgagggaacgctttaacacacgggggggggacaattggggattaaaaaccgggcacacccttgtttttcatgcctggggccccggaccgggcgcgacccgatcgacggggaccccagcccgcccgtgggggggggggcgaaacaaggggaggggggggggcaaaaaccggggggggggaagccccggcacccgccgccggggaaccccccgggcccgcaaaccttgggcccgttgggccggcgggggggggggccccggaacccgggggtttggcacggggccccggaccccg

SEQ ID NO: 174489 - DNA, 129 bp, Zea mays
  Clone ID: MRT4577_90714C.1
ggtgccggaaaccccgggtcgcacccagcgtccgctcatcttcggctcgctggtgtcccctgcctctcaccgaggcttcagcgggggctgaaacagaggtggagacggacttcctgcggaaactactac

SEQ ID NO: 174490 - DNA, 1406 bp, Zea mays
  Clone ID: MRT4577_90715C.1
aattcggcacgaggcccggttgcccctcgctgtgacgactgacgagcaaccaatccacccaaatcccagaccgagctccaatcctcagcgccgccagtcgcgccgcctccgatggccgcgcggcgcgggccccacgtcatcaagctccacgatcccaacccgcccctcctcggccgggcgccggggaccgcaccggccgccatccccgcgccgtcgcgcgatgagggcatcctcgcgcagcaccctcgcgccgccccctcgagcgcatccgcctcgcacccggccttcgcccttatcgaggagcgcctcgtagcccgggaccaggacatccaggagctcctcgtcgacaaccagcggttcgccgccacgcacgtcgcgcttcagcagcagcttatcgcggcgcagcacgagctccgggcggtctccgtcgctgccaccagggcgcgcgccgagcgggaggtcgaggtgcgagcgctggccgaccaggcggcccacatagaggccgaggcgcgggccgtcgccgctgcgcgcgcggaggtcgaccaggttcacgccgacgtccaggtgctcgtcgcggcgcgcactgaccttgtcaaccggctcgggggcctcctctccctccctcactcactcagccaaagctgacagcagcatacaagcaccagcagagctcttgccgatggcggtggccaagcccccgcttcagacggccgcggtcctcctcctcctcctcctggtcgtcgcggccgcgtcgtggctccagaccgtcgacgccgcttcagggttctgctcgagcaagtgcagcgtccggtgcgggcgggcggcgagcgcgcgggcgcggggcgcgtgcatgaggtcctgcggcctctgctgcgaggagtgcaactgcgtgcccacgcggccgccgcgcgacgtcaacgagtgcccctgctaccgcgacatgctcaccgccggccccaggaagaggcccaagtgcccctgaggccggctcacacacggcgcaacccaagacacgtgctccatgggactgccactgctttgcctgcaactgcgatccgatccatgctgatgggccaggcaacctgttatgctatccctaccctactactacgtatttgtgtacgtacgtatctttgtatgcatcgcgcgtccgtgtgatctataatatataatctgctaccaggtcccgtcagatgtactgttagtgataagctgagcgactagagaggtactgaatcctcagtagttggtagaacgggctgttcctcgggacagtgtgtgtcatggttaggctgcctgtactaattaatgtacatgaactattgtgctatatatatatattgtcataaaaaaaaaaaaaaaagaggacgcgtgggaaaagggcggcgtcccgcgtctagaacagt

SEQ ID NO: 174491 - DNA, 735 bp, Zea mays
  Clone ID: MRT4577_90716C.1
actcgcgagcggcactcctctccctccctcactcactcagccaaagctgacagcagcctacaagcaccagcagagctcttgccgatggcggtggccaagcccccgcttcagacggccgcggtcctcctcctcctcctcctggtcgtcgcggccgcgtcgtggctccagaccgtcgacgcagcttcagggttctgctcgggcaagtgcagcgtccggtgcgggcgggcggcgagcgcgcgggcgcggggcgcgtgcatgaggtcctgcggcctctgctgcgaggagtgcaactgcgtgcccacgcggccgccgcgcgacgtcaacgagtgcccctgctaccgcgacatgctcaccgccggccccaggaagaggcccaagtgcccctgaggcccaagacacgtgctccatgggactgtgcgactgcctgtgactgcgatagtgcgatccgatccatgctgatggaaaaggcaacctgttatgttatcctccctaccctactactacgtatttgtgtacgtacgtatctttgtatgcatcgcgcgtccgtgtgatctatacatgtataatctgctaccagctcccgtgagatgtactgttagtgataagctgagcgactagaggtactgaatcctcagtagttggtagaacgggctgttcctcgggacagtgtgtgtcatggttaggctgcctgtactaccaaacgttgaggaactattgtgccatatatattgtcat

SEQ ID NO: 174492 - DNA, 910 bp, Zea mays
  Clone ID: MRT4577_90717C.1
accgagctcgtgaagcacagcattcatcgtatgatgtcgaggaagaggaagacgagggggcaaagaagaaggtgctgtgagcgaagcacttgctggtcgtcacaccgccatcatcggcggtgtgagggcatgcagcccggccgggagtgttcccggcccactcacaccgaactcgtgaagcacagtttccatcgtatgatgtcgaggaagaggaaaaagaggggcaaagaagaagaaggtgctgtgagcgaagcactggtcgtcgcaccgccatcatcggcggtgtgagtgcatgcagcgaggaagcatgcttgccatgccgtccgcccggagcttcggcgccgcgggctggtggcgtgtgagcagggatgcttcggcggtgcacaagaaagaaggcaagtcttatcggcaagggaaggctaagcctttcttccaggtctccctctctccatctaaatcattctatgtgtttggaggagggggcaatcgatcgttacttactggtctcctgatccttagcggtcatgtctctgtgtgtgtgtgtgactgtgtgctccatctccgtgttgatttacagctagaataatgaccagttcagagtgaatgtgtgagcgtgtgtgttcaagtgtcagtgagtgaacctggcgttgtattttgaccgtgtgagtccgtgtcgtattttcagttgtctggtgtgttgtgtgtgtgagtatctctgaataagaatgtaatgctatatgtgtgccgtgttaattaacttgatcgagctgatctttaatttgttctcgatataaacgcgtttgtgcatatttcatgtcgtatccgataatgtaatttggatacaagtatacctcgatcgagtaaggattttattaaaaaaaaaaaaaaaaaaaaaaaaaaaaaagcggcc

SEQ ID NO: 174493 - DNA, 475 bp, Zea mays
  Clone ID: MRT4577_90718C.1
ttttcctgtcagtattagagtgagagtgaggcatctagtgggagacaagttgagatttttaaggtatctcaaggtagctattcgtcggctgcggtcgtgtagttgtagtataacattgcggcgtgtttgtttgctattatcacctttaagatcatgctcttcatgctcccttctctttttctttattattttctttttcgctttaatgcagtttttattttttgcatttttttgtactatctattgtttattctcttttctttttttcttgtttattttttctttgttttttttttttttttttttcgtttttttttttttcttgtttactatcttttttattttttcttttattttttttttttttttattatcttatttttttaactttattttatatttttttatttattctatttttatatatttctatttttattttctttatttatatttattatttttttattttttt

SEQ ID NO: 174494 - DNA, 275 bp, Zea mays
  Clone ID: MRT4577_90719C.1
aactatggaaaatagattagaacctccacgtgttacagtgattaccatgacaccgcaactaggtggtcacgaccgtttgccaacagggccacgtaacccgttcatccattgctgcacatggctcagtatataacacggttatgacgctgggatgtctactgctttggccaaggtacattaaggaggagttttgcttgatcccacaatgatgctgcttgtgggtcactgaccactttatacgcacgcgtttgttagtttgaacatctcacgaaccg

SEQ ID NO: 174495 - DNA, 386 bp, Zea mays
  Clone ID: MRT4577_9071C.1
cctataatgagtcatcatagacttgtttgttgccggtggcgagacgtcggcgacggccatgcagtgggcaatgacggagctgatacggaacctcgggcgatgctgaaggcgcaggccgaggtccggtcggcgctcgcggggcatagcacggtgacggaggccggcctcaccgacctacactacctgcggctagtcatcaaggaggcgctccggctgcacccgccggtgccggtgctgctccgggagtgccttatggcactctgcgtgctcggctaccatggcccgcggggcgccatggtgctggtgaagaggtgggcgatcggcagcgacccggcgcactgggacgcgccggaggatttcgcgccggagaggttccaggagcttga

SEQ ID NO: 174496 - DNA, 139 bp, Zea mays
  Clone ID: MRT4577_90720C.1
aaatgactaacaactataccaatactctatcgcacatcaccgagctgaccggaggactagatgcaacggacacgtaacaggtaactcatacacagacctaggacacaattatgtatgccacgccgcgagttctgtctat

SEQ ID NO: 174497 - DNA, 469 bp, Zea mays
  Clone ID: MRT4577_90721C.1
aaggattagaggggagacgaggggaacaaaccccaggaaaacccccgggcccccacttacagggacaattaagcggggacaaaccttaaaaaggaaaagggaattaatcccggccccccttaaaagtttgtaagaccccccaaaaggctttggtgggccccccaattatacaaaaagggggccgcgaggaaatcccctcaaatggccgggacggccatccgggcccccccatgaaaaacttgtcctgggggggaaaacccctgcaggggacaccggccacaccttatttatcccaaaccgggggttcacccttttaagaggccctgggccgttgccggggaggccccccagggctccacccttttcaaagccccccgggaaaaaccccacctttatttggggccccccacacccctttgccccttggaaggccgggaaggaaaagaacgcagggctttagttgaaaaac

SEQ ID NO: 174498 - DNA, 240 bp, Zea mays
  Clone ID: MRT4577_90722C.1
gggagttcggggggcatcggaaactaaacgctggtggggcgccttcacggtcgagactatgccacaagaacagatccacaatggtcgcgttcaccggccagcggcatccgtggaccctgggcttgtcggccacggatacactatttacagactactagcagacggccgctatcttggtagctcctaccagagcaacgaggctttacattcccaccacacaaacgggtgcgtgctgatgct

SEQ ID NO: 174499 - DNA, 3381 bp, Zea mays
  Clone ID: MRT4577_90723C.1
tttatatttaccgagaagtggaagaccccaccacacatcagcttctctaccactctgccacaacctcggctggtcctttgcatggtgttgcattgaatgaaccatacaagcctttggatgctattgacctcaaacgttatgctgctaggaaaaatgaaaccacatactgctatgattttcccctggcatttgaaacagcgctgaagagatcatggaaatcaagtagctatggtgttagcgaagctaatgagcacaatcgattctatgctgaagtgaaagagcttatatttgctgattcggttggagcatggggcactccattggtttcagttgaacgtcctccaggcatcaatgatattggcatcgttgcttggaacatgaagctgtccacgccagaattcccacgtggccgggagattatagttgttgccaatgatgtgacatttaaagctgggtcctttggtccaagagaagatgcattttttgatgctgttaccaatcttgcctgtgagaggaaacttcctcttatctatctggcagcaactgctggtgccaggcttggtgtagcagaggaaataaagtcatgcttccatgtcggctggtctgattatgagagccctgaacgtgggtttcagtacatttacctcactacacaagattactcacgtctaagctcttcagtaatagctcacgagctgcaactaaaaaatggagaaaccagatgggtggttgataccattgttggtaaagaggatggacttggttgtgagaatctccacggcagtggggcgattgccagcgcatatcggccgcgtcgacaagagacctttactctgacatttgtgactggaagagctgttggcattggggcttatctggctcgtttaggcatgaggtgtatacaacgtcttgatcaaccaattattttgactgggttttcggcactaaacaagctcctggggcgggaggtgtacagttctcatatgcaattgggtggccccaaaatcatggctacaaatggcgttgtccaccaaactgtgtcagatgaccttgaaggtgtttctgctatcctgaaatggctcagttatgttcctccatatgttggtggtcctcttcccattatgaaacccctgggacccacccgaaagaccagtaacatacctccctgagaatgcttgtgatgctcttgcagccatctgtggcattcaggatggtgaagggaggtggttgggtggtatgtttgatagggaaagctttgtggaaacattggaaggttgggcaaaaacagttatcaccggaagagcaaagcttggtggaataccagttggtgtcatagctgtagaaacccagactgtgatgcaagtcatcccagctgatccaggtcagcttgattccgctgagcgcgtagtccctcaagcaggtcaggtttggttcccagattctgcaaccaaaacagctcatgcattactggatttcaaccgtgaggagcttccgctgttcatcctatcaaactggagaggtttctctggtgggcaaagggatttatttgaaggaatccttcaggctggttcaacaattgttgagaatctgaggacatacaagcagcctgcttttgtatatatcccaatgggtggagagctacggggaggggcctgggttgtggtggacagcaagatcaatccagacctcatttagatgtatgccgcgagggctgcgaaaggggatgtccttgtgcccgaaggattggtggagatcaaattcaggccaaaggaactggaagattgcatgctaaggcttgacccagaattgattggtctgaatactaggctgaaagagatgaagaaacaaaatgccagcatctcggaaatggagaccatacggaggagtatgactattcggatgaagcagttgatgcctatttatactcaggttgccacacgatttgccgaattgcatgacacctctgctagaatggccgccaaaggtgtgatcggtaaggttgttgattggaaagagtctcgggccttcttctacaggagattgcgaaggagagttgctgaggatgccctggccaaggaagttaaagaagctgctggcgagcagctttcccacagatcagcattagactgtatcaagaaatggtatctagcgtccaaaggaactgaaggtgatggtgaaatgtggaatgatgatgaatctttctttgcttggaaggatgatcccaaaaactatgagaattatcttgaggagttgaaggctgaaagagtatcgaactggttctcgcatcttgctgaaagttcagacgtgaaagctctaccaaacggtctttcgctgctccttaacaagatgaatcctttgaagagggagcaggtcattgatggcctcaggcagcttcttggttgatcgatggtggcaaagtggagcatgaagccctgtttagttgggaacggattgttctggttgtagtcatgtatttagctgtttaacatgtatttaattgggtggcgttactccacgtcatacggtacaacagcaatcctgatcaagtgattatttattcttcaatcgaagtagtacatgattttcatcagtaagctttgtgcttgcaattagggataaaatcggatggaaatgaactgaaaaacactcattttcgtttctatattttttttgataaaaatggattccaattctctacaggagattgcgaaggagagttgctgaggatgccctggccaaggaagttaaagaagctgctggcgagcagctttcccacagatcagcattagactgtatcaagaaatggtatctagcatccaaaggaactgaaggtgatggtgaaatgtggaatgatgatgaatctttctttgcttggaaggatgatcccaaaaactatgagaattatcttgaggagttgaaggctgaaagagtatcgaactggttctcgcatcttgctgaaagttcagacgtgaaagctctaccaaacggtctttcgctgctccttaacaagatgaatcctttgaagagggagcaggtcattgatggcctcaggcagcttcttggttgatcgatggtggcaaagtggacatgaagccctgtttagttgggaacggattgttctggttgtagtcatgtatttagctgtttaacatgtatttagttgggtcgcgttactccacgtcatacggtacaacagcaatcctgatcaagtgattatttattcttcaatcgaagtagtacatgattttcatcagtaagcattgtgcttgcaattagggataaaatcggatggaaatgaactgaaaaaacacttattttcgtttctatatattttttttatgaaaatggattctaattcgagggcggccgtcgcgatctaga

SEQ ID NO: 174500 - DNA, 195 bp, Zea mays
  Clone ID: MRT4577_90724C.1
cttattttccatctcttttatttcactatctaaaaaatatgactgcttagtgttgatggtactttttgctcaataaacttagtttttattaaagaaacactcaattttaggtaagaaagcaaaatttgaagtaaagaaattcctttgcttgggaatttctatattaatgctagtgagaaatatattaactattat

SEQ ID NO: 174501 - DNA, 288 bp, Zea mays
  Clone ID: MRT4577_90725C.1
gactatttgtttacatccattagtgtgtaagggtttcaatgcggactttgatggggatcaaatggctgttcacctacctttatccttggaagctcaggcggaagcccgtttacttatgttttctcatatgaatctcctgtctcccgctattggagatcctatttgcgtgccaacccaagacatgcttatcggactttatgtattaacgattggaaaccgtccaggtatttgtgcaaatagatataatagttgcggaaactctccaaaaaaaaaaaaaaaaaaaaaaga

SEQ ID NO: 174502 - DNA, 546 bp, Zea mays
  Clone ID: MRT4577_90726C.1
tcacgagtttttttttttttttttttttttttttttttttttttttttttttttttttaaaaactacgggtttttttaacacaaattgccgagacaggaaagccctatcagttcaaatatagatttcaaaaccaggaggcgaacaaggactgaaacctagggggggagcacaacggccccccctgctgccttgatctttttttcggggaccttggaaatgagctgggccttgacaacaataggctttgggggaagcacccccttcccgagcaccttgaagtacccaaactgggtgacgtcaatctggggggccttgtcgccgccggcctccgccgccttgggggggggcaccatcaaccaaaggcgctcgatgttgaccgcggggcaaaaaaacttgttgcggagcttatggaagtaacgcatgccaaccttgccgaagtaccccggatggtacttgtcaaaaaggatacgggggtggggcatgccaccggcgttaccgggacctcccgggggcttcctgggcttgccgatgcgggccgccccggg

SEQ ID NO: 174503 - DNA, 338 bp, Zea mays
  unsure (1)..(338): unsure at all n locations
  Clone ID: MRT4577_90727C.1
gggtgntgnccttatgaaaggggaacttttacttgttttaagaagtactttactaggagtacaacatccgccgcccccccatttgggtgaatttgagcaagggnnaaataacaggggcgggggggcggggccggaggatcggngtgtnaacttttttcacggggggggttgcgtttcttnacaaattaagggtcctttttaatttnnggggggggaaattaaattaaattggtgattgtggncaanctaaaagttttgagcaatggccttgngagcgttttnaaaataggggtatttggnggggaagtnnagntggtttgggttgggggggagaacct

SEQ ID NO: 174504 - DNA, 1006 bp, Zea mays
  Clone ID: MRT4577_90728C.1
cattgggtacctcgaggccggccgggtagtaatcttatagtgatgtattttcaagtgttgatgaatgctgaaaaaaaaaaaaaaaaaaaaaaaaaaaaaaaaaaaaaaaaaaaaaaaaaaagaaagccttggaagagccgaggcggaagcagaactgggaaggggagaagattccgatggggactaagaaacagggaggaggcggaggagaccagaaggtcctcctctggaggctgccggaggtcacctctaaggagctcggcaagataggccccgccctcggaatcggcatcggctgcggcgccggcgcaggcatcggattcttcggtggtgcagggttaggctatggatttcctggactcacattaggctttggagttggagctggatgtggtgtgggaattggctttggttatgggttgggcaaaggaattgcatatgatgaaaagaaaaaatactccaatgttggcaagatgttccaggaagctccacattttcctatggacactgtcggtgctttatttgacgagctggttataaacaccaagaagcttgtgacatcaacatcaaaaggaatcgaaaaatggcgttgagcggcagcactggcattgttgtctctataatcgccttgaattgtatcaacggagattgcgagcagcagttatcttgaacaggcaggacctggccctagaatgcagcctgttgcatgtcgtgactttctttctattgttcgtcagctagtagctttgtatttaggtaggatcctgagataatacatattatttctggtcgatatttattagttgcattgaactgtattctgggttgctcatcacttatatgttaaattggaggaaaattgatgctatgagcttcaggtgaatctgtttcgtgcctgttttctttcacccttctgatatcagtgtgtggcctgcaattgttgtcttgactgactgtctctctcaggctatcctcgccaccgtctattttaaactagtatgtctgg

SEQ ID NO: 174505 - DNA, 137 bp, Zea mays
  Clone ID: MRT4577_90729C.1
gtgatatcatgataaactgtgtggtgacgctcacgacgtggattcacggagtctgccaaaacgaggcggtggcgaactacgtgtagcattgtgagtgagctcggcctgacaatatgctttataagatgcataagtcc

SEQ ID NO: 174506 - DNA, 627 bp, Zea mays
  Clone ID: MRT4577_9072C.1
ctgctccttcctccgtaattctgtcttcctcttccttctgctcgtagacagtagagtagctataacaccttctctccgcaaggctcttcgagggcccgtttgatctgcggtccagttgttctcgtgtctcgcagtctgtgtcttaccaatctcttctgcttcttcgctagtctcggctgggttctcatatatttgcaggtttttcgttctgaatttctccgctcgcgttctgggctggttccgctgcacagatctcggaaccgttcgttccgcgtggagtccggtttgcgagcgttctgatttctggggttccgaattcacgcacgaagacgtggttttgccattcctttcacccattgttccaggtgttggacctcactcttgctcgatccagccgctgactcgagctccgtttgattgattccgctgcagatgcccgaggcctagctcagatggcctccagctgcccaatggcatccggagcggcggcggcggcgcgagcaagaagcctgctgcggcggcggcgcccagatcgagcaaggatgacgtggcgccggccgtcgccaccgacagctcccgactcgcggcgttcttggcctcgacgtcgctcgagtccaaggcgcgtgc

SEQ ID NO: 174507 - DNA, 343 bp, Zea mays
  unsure (1)..(343): unsure at all n locations
  Clone ID: MRT4577_90730C.1
agccggaagcctgtagagcggacggccttcgatctttttttttttnntttttttttttttttggtttggggggtttagaaaaaagaattttattttttaatttatattttttttatttttttttttttttttttngggggccccaaaaggaagtttgtatacaaaaaaaaaaaacagaggggactccccctttggggttgtaaacaccccttagttgggaccaacaaaatgggggccccacacttaaaatgggggtaataaaaaaaaaggacattccaaaccgaagagccctaaaccctaaccccaaaatttggcccaggggattatgcctttaaatgccccc

SEQ ID NO: 174508 - DNA, 465 bp, Zea mays
  Clone ID: MRT4577_90731C.1
atgacgtcctgccgcgtacgtaagctggatcttaacggcgccttgttttttttttaattctaatctgttttcgcaccatggactacccggtattacacaccaacccggggagaccccgaaattcccgtacggaacctgcaagaatacctggttttaatattgggaatagctataacttttgggaaatggggggacataaatatttcctgaggaaaatggagacgggggcataattcgaaacacctgggggctctaacgattaaagttaaaaacctgaggggcctaaagggtactgacctttataaagggggggcgcgtcactccacctttttaaagaaaaaaaccatccccccccagagaggtaaattagtcttccccccccggggagaggctttttttgattggggcaccggggggggtttattttcctccccagggagggccacaaagggtttggccttgccc

SEQ ID NO: 174509 - DNA, 480 bp, Zea mays
  unsure (1)..(480): unsure at all n locations
  Clone ID: MRT4577_90732C.1
cgaaaaaaaaaaaaaaaaaaaaaaaaaaaaaaaaaaaaatataaataataaaaaaaaaaaaaaaaaaaaaaaagncagaaattttttaaaaaaaaaaattaaatacccccccctttaaaaaaaaaaattttttaattacgcaacctaaaataaatttactggccttttatttaaaaccatattaattgaaaaacccttgctttaacaaaattaaatctcttaaaacaaaaccccctttcaccaaattgcctaataacaaaaaagcccttacccaacttcttttaaaaaaatagggccccccaaattgcaaatttgaaaacccctttaaacgctaattaaaaaaggggacttttcttgttacccccaataaaaacctttcaatttgcaaaaccctaaaacccggacctttacattttttcccttcctttttcgccaacttttccggttttccccttaaaactttaaaacgggggcctcctt

SEQ ID NO: 174510 - DNA, 216 bp, Zea mays
  Clone ID: MRT4577_90733C.1
ttgaattcttggcataaagaaaactttttatgtgcgaatgggggagggctttcggaggttgacaatatggaggtggacattatgagcggacgcacacagctaagggtcttaggggggatgccgaccccaccgcggtgagcaaaggttttgatataaggaaaggatttctagcttctaaagacaaacgtttactatgtcaaaggaaggggtggggag

SEQ ID NO: 174511 - DNA, 281 bp, Zea mays
  Clone ID: MRT4577_90734C.1
cagattgatgatatcgacgtgaggttccagaaagcagccagtggcaccactgggacctaccaagagtggaaggacaaggcccagagtctgtaccaggaactgttgactcaggaaggccaagccagtttccagggactcaaggataacgtgtttgatggcttggtacgagttactcaagaattccatatgatagtcaagcatctgattgactcactcattgattttctgaacttccccagattccagtttccggggaaacctgggatatacactagggagga

SEQ ID NO: 174512 - DNA, 148 bp, Zea mays
  Clone ID: MRT4577_90735C.1
gcttgcactgaagtttttgagaactttgcttgtacttgaaatgtcggttggacaacattctatagatatattctagttacttgttttttttggattttttttttcttactcttagagcttgatccggagctacaaaaccatgaataag

SEQ ID NO: 174513 - DNA, 221 bp, Zea mays
  Clone ID: MRT4577_90736C.1
ccagtactcccacaagcactcccaccacacctacgagtacacgcacgccgccatctccccccacgtcgccaagctcctccccaagaaccgtctcctgtccgagaaccactgccgcgccatcgcactgcagcacgaccgcgggtcggcgcactacgcgatgcaccgcccggagccgcacatcatgctgctccgccgcccgatcaactaccagcagcagcagg

SEQ ID NO: 174514 - DNA, 2661 bp, Zea mays
  Clone ID: MRT4577_90737C.1
ggtacccaaacggaaaccagccgaccgcccccgaaaaaacagcaggcggggcactcgtcaccagagtaccatacccccgccccgataccgcgacgaccggacgcctcgtccgcccctcctcccgagttccgactcatactggctatccaccgcctgtctcccccgcgatcaagtcgaccagagccggcaaccgatggtggtggtggcggtgggagggggcggcggcggcggtggctgggggacgtgggaggagctggtgctgggcggcgcagtgctccggcacgggggcgccgcgtgggccaccgtcgccgacgagcttcggacccgctctccgtgcaccttctcgcccgaggaatgtgaagcaaaatttgcagagatacagttgcggtactctgcgtgcaatgcttggtatgaagagcttcgtaagcagagagttgctgaactgaaaagggaattggagaagtcagaaaattctattggatccctccaatctgtgattcaaagcctcagcaatagcaaacacgttgatgggagttctgaatgccgcaccagtcatactgaatcatgtccacattctgaaaatacagcagatactaattcctcaggtaaagaaacgtccagggatagatcatcagctgctagtttcacagaggaagcaaggaacagtcagaaatctcagaaagtgcagcagtgtgatactgattcaattcaagctatcaatccatcaccagatgagtcatatccccaggcccaagttgaaaaggtcggtcccaaagatggcttgctttggggttctagaaaacaaagagtagggagagctagaaggacacttctgaaaggtggtgatagtagcggggatggtgagcctacatctacagcatgcatacagagggagggtttgtctaaaggctgcatgaagaacttcataactcaaaacttagaatcagttgttgtgaagaagggtgtgaaaactccaaaggtagaatctgatgtgatgaataaggatttgaaaacccccacgcgtccgcccacgcgtccggaacttctaaagcagagtctgatggtatgaagaaggggatgaaaataccgaaagtagaacctgatgttatggactggaaaactcccaaagcaggatctgatgttacgaagaagggcttgagatctccaaaggcagaatgttgccagcctgtgattgagagcgttaaactaaagctggcagagattttgaatactatatcaactcaagatgactgcaaaatgttgcaacaccaacttgatacccagaggaaaagagctagatataagaagatgattcgccggcatatggacttccgaatgcttcactctaagatcaagagtggcgcaatctctggcaccaaggagcttttgagagatatacttattttcatcaataatgtaataaccttctatccgaagactacattagagcacatggctgcggttgagcttcgtgactttgcatgcaaaactgtgaagcagagtgcaagcttgttcttgaaaagccatcgagagaccagaacagctggtgcccctgtaataaagaagaatgctcgagccctgcatttttcaagaacaagcttgcactctggggatgcaagggcaagcaaggtttcttcaagggatgctgctgccaaggaaggggatggcaagagaccttgcagtgatgagctggctaatcaaaagactacaaagagaaatgagccagccaagaagaggggtgtgggtcggcctccaaagagtgggcagaggattgctggggcacaggaaaatagccccatcaaaggcaggaaaagtagcgctggggcacaggtagatagccccagcaaaggcaggaagaggagtgtggaagcacatgatgatagctccagcaaagggggcaagaggagccggcggtgaagctaccatcagctcaatgccggtgaaactgtgtacagcttaaccatatatcataggctgttcccttccggtttgtttacctgacaaaaaaaagttattgtcccagtattcaaactgatgtaacaggaagggttagttgtttctgatgttgttttgtaaggagtaaggacaattagaagggaaccctcatttttatattgagattatccgagttaggctatacatatctgaccatgtaatgcttatagtagtttaagttgttataccatgtgaactgatgcttgaacaccgaaaaaaaaaaaaaaaaaaaggcggccgccctttttttttttttttatcatataatagttttttatatataatataatataaagtaaagctgagaataataaactactactacatggtagttacatgctagcagtggccaataagcctagtcactggcattgggccccacgcacgccttagcctctgggctccacagccactgcaccaagaatttcctccccttcctcccattcacattccagctcctcccctgcgcgtccaccgacaccttcccggcgtacccgccgccgccgcccgtaccgtacaccccctcgcacaggtcggcgatctcggtgggcgccgtggggtcctccccggcgtaccacgcgttgacgagcgggttcgtggcgagctcggccagctcgtgcgcgatgacgctgaccatgccgtcgacgcccgcgtcgccgttgctgt

SEQ ID NO: 174515 - DNA, 486 bp, Zea mays
  Clone ID: MRT4577_90738C.1
acgggcacgacttttttactttgtttattttgttttgggaacaaactctgataaagatgaaacttctacaactatcttaaaaacgaccgatgtttagattggcataactgattagtatatatagtaaactagctgtcggtacaaaaaaatatattaagcctttactacatacccaatttcttcagaggtcagatagtttatttgttcggaaactagggaatccttatgatttagaattaataatctagagttctgtgaaggaaatggaaacccaataatgatacttaagaggaactaaggaaactgtttcattacgctttttcgaacgaggtctcattcatatgaaagaacatgggttcaaataaacagtattctttgaagactgatccccgctgaatactaatatagttttatacaattttctccatgatatagctaaccttgagattcgtatacagaaagcacttgactatgtcatgtactcca

SEQ ID NO: 174516 - DNA, 176 bp, Zea mays
  Clone ID: MRT4577_90739C.1
tttcctacgggggggggcagcatgaataatgcgcacctgtacacattatcctcaattgcaggctgggactcctccaagattttactttaggacaactccaaaaacatccctgtaggaagaatggaaaacagggctagaaatttgggatcgaaagctaatagaccccatacgagggt

SEQ ID NO: 174517 - DNA, 237 bp, Zea mays
  Clone ID: MRT4577_9073C.1
cggacgcgtggcgagacgcgtgggaatggatagagacttgacacaaatttatgaaagaaaattgggagtaggaatgtgaccgaaaacaagtagctctaatgtcagcttagacttttcagtaaaactaaagtaactgtatctgttcaactaaaaactctatattagtttctttgggaaacctctcatcggcaaaactttatgttcactttgctgttgtagatagccaggtcaaccagc

SEQ ID NO: 174518 - DNA, 670 bp, Zea mays
  unsure (1)..(670): unsure at all n locations
  Clone ID: MRT4577_90740C.1
tgagatggccgatgcgagcaagggtgctttgttgcctgctggtgtgctctgctctgcgtctctcgctccaagcctctgcaagtctcggtccaaatccattgggtaaacaaagaagagtcatatgaattgtagagctagttgatatgaattcatcgaaatccattgcctagttcggacagttatactgctgcagtacccactctttgtgtgattcttggcgaggtgcacatgtctgtcgcatctatagccaacagatttcccatttggaggcacgaacagactatagagcaatccaatagggctcgggattcttgatctgcagaaactaaaataaaatgaagtatctgccgccagcacccgacaatgggattggggtaaatgtaagaattggtgaagttaacttgttggagggctcatccttggcagcacctgacaattaagaactggctgcagggtaaggaaagggattctgtgcagctgaagattttttggctcttgctgttcctcacactgtcatggaaggcgtcgcccttgctgttgcggaggactagtgctgngaccagccgcagacaatgcagcttccagccctagggcagcgacaagctggggatgaggacgtgacgttgagcctcatgcggtgcctcagaggaaggcagagtgcctggatttt

SEQ ID NO: 174519 - DNA, 580 bp, Zea mays
  Clone ID: MRT4577_90741C.1
ccgaaaaacaggatttttcttggcctttaggggaaaaggaaaccaaccaacttttttttccctttgttaagggaaacccgataaatttaacagtattagcacccttgggggcgggccccaaaaagaagaaacaaatactaaaacttgccaaagttgcggggaaaaaaattgatttttggtggacacttttttcacacaacactggtcccaggggtttaacacgggaaataaggagaaaattaacagtcccccgaaggccgatgggggaaccccccaggccggaaagggggaatttgattgattataaatggggcgggggggggggattaaacccgaggggattgggcccccatgcgggggggggagccaaccaagccagaaggtttattttttggggttgccgggaaccccggttttgggtttggaggggggggcctcggaaggggcggggggggggggaaaaaaaagggggggcggaggagtccaggttgaggaccttccccggctcaaagggaacctggggggggcccccctcgggggggatctgcagggacttaatgccggcccccggggggcggaa

SEQ ID NO: 174520 - DNA, 745 bp, Zea mays
  Clone ID: MRT4577_90742C.1
cctcgaggccggccggggtctcaccttcccacgccgccccttcctcttcctctcctctgcctcgctttagcttagccgccgccgccgccactacgcgctctcgcggtccgtgttgtcgcctcgatctgcccacgatggcgtcccgcgccgcagcgctgctcgtggccgtggccgtggcggcagtgctgttcgccgcggcgtcggcgcaggagacggacctgggagtgccgcccgcgccggcgcccgtcacgggcgcggcagcgggggccgcggcgtcggccctggatgtggcttgctctgtcgtcttatccgtcctcgtcgccggtggcctcatgcagtaggcgctgccgtggacgtgccggttcgctgctgaaccggggttgggttggaccctgttcgttttcgtcttagctagcactagaagtagcggtgatggggtgtgtgtggttgtgtccctgtccctggtggccgttgcgatctgtgggcgtgttcggctggctgcaagccgacactgttgcagctgtttggattgctgcagctgcaatccatagagagaaaaatactgtagaagccgcagccgcagccggattgcagccgcagcaagccgcagcgaacaagctgtgtgtgtgctattatcgcttattcttttgtaccatatacgtacccacatactgcattgttcgtatgtataccttgtgtggagaggcgcctgttctatgaataaacacgatggatctcgttcgtc

SEQ ID NO: 174521 - DNA, 223 bp, Zea mays
  Clone ID: MRT4577_90743C.1
taaaccacaccatacacagacgccgccgtcttcttttaaagggcagcgcgactacaaaacactcctcattctccccacccaggttcatcttccaaacaaaaccgatcagatcaacattctgcaacaaacgatgttgattcagattatctctactatgatgatacccgacgtgccgccaccacgatctactactaaagtagtagcctcacatctccttttcaag

SEQ ID NO: 174522 - DNA, 292 bp, Zea mays
  Clone ID: MRT4577_90744C.1
ggaagggaaaggtttttttttaaaaaaattattctttggattttttaccagccccaggggggtttggccccaaatttacttttaaaaaccggaaattgggcccggggggcctttttcctcaagaaactaaatccgaagcaaaaacatggttttttggaccttcccaaaaaattaggggacaaccgaaaaatcaaaaccctttttggttttttttaagggaaccatgccagctaaatggaaacattcaactttgtttcagtttcaacgacaaagaacccgggcccggggggcc

SEQ ID NO: 174523 - DNA, 672 bp, Zea mays
  Clone ID: MRT4577_90745C.1
cgttatcgtgggcgtcggagtgcccggggtgcggattggttgccggcttgccgctgttgcttgtcgctaaatcccgtattgcctggttatgaaactctccgtgctctgaatttggtcatttgatgtttattaggggaatgctttccatgaaaaaatgctatgctgtgcgtgtagtttaagttacgactagtgaaaggcagggagaattccttcttgaaaagtaggggcaagtggagctaacgagatatgaacttgttggtgaaagtgagctatgaaaaatctttaccagatcatgaaacttttgaattgtaatatcaggtttgaatgataatcagtaatgtttgtatgtttttctagtgttcaatggctgagtagaatataagtaggtaagaagactggaaattaggtgaacttttggttgtacccgagtagtcttttgatgtttctactcgataatggaataactgaataccacatcgtgattgaatcctatgagtaggatgggtaggcaaagaacttatcaatcgccagagagtctcaatgttgagccagtagcaagctttggtgggttttcaaaagcaaatatcaagctcctaggaacaagttatagctggtaacgaataacaagggggaatctcagctgggtcaagaaaaacaaaaccctgatggttg

SEQ ID NO: 174524 - DNA, 674 bp, Zea mays
  Clone ID: MRT4577_90746C.1
aagatctcaaagctcctcgacagatgctgagagatgcagaaaatgcaaagcttggattgaacgtacatgggaaagctagcagctcaaaagaaaatgaggagtcaagtagcgctggggaatcgtctagtatggacattgacaaagctgagtcttctctaccaaagaaacaattaactggcgtctatgatttggttgctgtcttgacacacaagggaagaagtgcagactctggccactatgttggctgggttaagcaagatgatggaaaatggatcgagtttgatgatgacaatccaaacattcgcaaggatgaagacattttgaaactttctggtggaggtgattggcacatggcttatatctgcttgtacaaagcccgcatggcagaatcaaagagttaggtcgaattggttctacatttctgtattgcgaatgcaacactagtttttgtgcccatgagcgagcgtggtaattatttttccagttcgcaaagtggttactggtgaatttgcttcaattatgttcgccattattcacccggatatgtatctttaggatttctagtacattttgtgttgtcaaaatataggacaaaaaattaaggggaaagcttttgccttcagtggatctgatttatttggtttcatccgtgtcttcctaataagaatgttttc

SEQ ID NO: 174525 - DNA, 468 bp, Zea mays
  Clone ID: MRT4577_90747C.1
ctctgcctatagtaccgatagagggtcgaagctgcagccacagacacgagtactctgctcaccacctcacgggctgtgctaaacaagtgcgcgcctccattcctccgtctgcagaccatgcgcaccgaatcccaaagctaggagcgtgctccgcacactagacaccccccagaaagaagtcaaatatgtctgtgctcgccccataagtcccttgagaacacccataacaacgggggtgggaacaacgataccacttcagaggctgctgacctagtatcctagcttcatctaactgcttaccacagataacgggtgccagatcctctccccaacaaggcaagcccatgcgcatttgcgcaccttccttggataacataatatcatcactgacatgctacattacgccgacagaatgtgatggattaaatacttcatgcattaccattcttgaaagatagactatcatac

SEQ ID NO: 174526 - DNA, 580 bp, Zea mays
  Clone ID: MRT4577_90748C.1
aaatcagatccgctgaaggcaaaagctttcccctgaattttttgtcctatattttgacaacacaaaatgtactagaaatcctaaagatacatatccgggtgaataatggcgaacataattgaagcaaattcaccagtaaccactttacgaactggaaaaataattaccacgctcgctcatgggcacaaaaactagtgttgcattcgcaatacagaaatgtagaaccaattcgacctaactctttgattctgccatgcgggctttgtacaagcagatataagccatgtgccaatcacctccaccagaaagtttcaaaatgtcttcatccttgcgaatgttcggattgtcatcatcaaactcgatccattttcctgatggttaatatggaatttcagtaactaacctgtataaaatgaaacagttgttatagtaaatgagctgtaatactagttgactgaccatcatcttgcttaacccagccaacatagtggccagagtctgcacttcttcccttgtgtgtcaagacagcaaccaaatcatagacgccagttaattgtttctttggtagagaagactcagc

SEQ ID NO: 174527 - DNA, 183 bp, Zea mays
  Clone ID: MRT4577_90749C.1
tttgagtagtgtccaacctgggagccttttttagttgatgttacgagttatgactatctgtatggcaaaattgctgcaagggtcctcttaaaagataggttgatattgagactgtttaaaaaaaaaaaaaaaaaaaaaaaaaaaaaaaaaaaaaagcttgtacctgcccgggcggccgctcga

SEQ ID NO: 174528 - DNA, 165 bp, Zea mays
  Clone ID: MRT4577_9074C.1
aggctacgacgctcacgcagtacagacaaggacgtggagcttattctaagtatagacctaaagaaagagagttgaagatgagtgtaccttgacatgctgttcacttgttatcggaagacatgtcatctattattaatactgctgattctgaatcttcctcacctg

SEQ ID NO: 174529 - DNA, 890 bp, Zea mays
  Clone ID: MRT4577_90750C.1
gattgccaccatctatgtccatatctcaaggggcgacaaggaatctgtcttctcagctgcaatctcgaaagatggcagagcatacaatgatcagattgggggtgatcccaaaatcatacaggagtttgtgcaacttgctggtagggcaaaagctgctgcttctgaagctatggatgctgaggcaatccttggggacataccagatgaattcctcgatccaattcagtatactctaatgaaagatcctgtgacactgccatcgtcaaaggtcacagtagaccggcccgtaattatcaggcatctgctgagtgattctacagatccatttaaccgctcccacctcactcaagacatgctgataccaaacacggagctcaagttgcagatcgaggagtttgtccggtcccagcagtcgagaaagcgaactgctgcggcgttgttggagattggcgaagcggagggtactgatgatatggccgaatgaattgtgccaggagcaggggatggacacattttttttgtggggaaagagtgatggttaattcacatgaaatgtatcggtccatctgtccgtataaagttggtttcccggcttgtgtccctgttgcctcgattctttgtaaatattgtaggtgcacacctgatacaaatgtagttatagaggaagcctgtcagcccgtctcatcaacaatgtgttttacgatatccccactacaacttttttttaacacgatattatcactataacttgatatgtgtgttgggctgagaagcgtttgccttcgccttgttggttctccgcgataagtgtgaacaagccctggtcttctcatttctgcgaaccaacaatcacaagtgaattatttatgccagttgccaggttttcatcc

SEQ ID NO: 174530 - DNA, 170 bp, Zea mays
  unsure (1)..(170): unsure at all n locations
  Clone ID: MRT4577_90751C.1
agggggaccaccaagggggagtgcgattctatgttttcctgtgcaacaaatatgagaaaactagacatagcatgcaaaaagctccaagcagcacgtgcgtgaccttgnnnntgcgggggggctgaggccagntcttgaccactcctacacgcccgggggtcctcccgccg

SEQ ID NO: 174531 - DNA, 194 bp, Zea mays
  Clone ID: MRT4577_90752C.1
gctctaaaagcggacttatggaccctttataaggaaagacgaaacatactgtgtacttagggtgaggaactcttgggactccccagagttacacttcctatgattaataggacgcgcaagtactgccctgcgaggaatcccgaaggtaccttggctgcttgttactgctaactacgatctggttctgatggaac

SEQ ID NO: 174532 - DNA, 1973 bp, Zea mays
  Clone ID: MRT4577_90753C.1
gaacttccttatcaatgatagcatcgatggtcttgattagagtttgaacaaaatcctcgaactgaaagaaatagaggctgaaatggctaatgttgtagagtgggaaagcaggccacctcaagaaagagaggagcggctccgtgtatttcatcaatgggaaaatattgttcgatttgacatgaggctagccaatgaggatgttgggatgcttgcattcacctcggaacaaattccagcacctttccttctccctgaaatggtggaaagggtcgcgaggatgctttattacttcctctttcaacttgctggtcctcagaggaaatcattgatttgtaaaagatccagagatttacgagttcaaacctaaagagttctagaaacatattggcgccatgtatggccatatcttaaggggcgaaaaggaatgtgtcttcgcagctcatatcacgaaaaaaatcattacctacgagtcaagatggttgaagttttgaattgctggatgccacaaagaagtggcttgaattctacagcctcattgtttgaggggcaccaactgtgtcttgactaccttgttggaaatcttctaaagctttatgtggatattgaattcactggctcccatacacaattttttgacaagtttaacattcgacataatattgctgagcttctggagtatttatgggatgttcctagtcaccgaaacgcatggagacaaatagctaaagaggaggagaagggtgtatacttaaattttcttaactttctcataaatgatagcatctatcttcttgacgagagtttgaacaaaattcttgaactgaaagaaatagaggctgaaatggctaacatagttgagtgggagcgcagacctgctcaagaaagagaggagcggctgcgtgtatttcatcagtgggaaaatattgttcgttttgacatgaggctagccaatgaggatgttgggatgcttgcattcacctctgaacaaattccagcacctttcgttctccctgaaatggtggaaagggttgcgagcatgcttaattacttcctcttgcaacttgctggtccccagaggaaatctttgactgtaaaggatccggagaagtacgagttcaagccgaagcagcttttgaaacagattgccaccatctatgtccatatctcaaggggcgacaaggaatctgtcttctcagctgcaatctcgaaagatggcagagcatacaatgatcagttgttttctagtgcagctaatattctgtggaagattgggggtgatcccaaaatcatacaggagtttatgcagcttgctggtagggcaaaagctgctgcttctgaagctatggatgctgaggcaatccttggggacataccagacgaattcctcgatccaattcagtatactctaatgaaagatcctgtgacactgccatcatcaaaggtcacagtggatcggcccgtaattatcaggcatctgctgagtgattctacagatccatttaaccgctcccacctcactcaagacatgctgataccaaacacggagctcaagttgcagatcgaggagtttgtccggtcccagcagtcgagaaagcgaactgctgcggcgttgttggagattggcgaagcggatggtgctgatgatatggccgaatgaattgtgccaggagcaggggatggacacattcttttggtggggaaagacggatgcttaattcacatgaaatttatcggtccatctgtccgtataaagtcggtttcccggcttgtgtcaccatttgtctccattctttgtaaatgttgtaagtgcacggttgtaattttaagtccctgtttgtttacctttgagattatgtccccactacaactttttaacacgatattatgtttgtccttctaggattatatagtccagcttattataagcatctattgacctgcttatgaattatcataatttaggtgtttagatt

SEQ ID NO: 174533 - DNA, 917 bp, Zea mays
  Clone ID: MRT4577_90754C.1
tttactcttcatcacttttcttctacatctgttatggcctgggatagttctctcgttttgtttacttgtctttctgttgtagattgccaccatctatgtccatatctcaaggggcgacaaggaatctgtcttcccagctgcaatctcgaaagatggcagagcatacaacgatcagttgtttgctagtgcagctaatattctgtggaagattgggggtgatcccaaaatcatacaggagtttatgcagcttgctggtagggcaaaagctgctgcttctgaagctatggatgctgaggcaatccttggggacattccagacgaattcctggatccaattcagtacactctgatgaaagatcctgtgacactgccatcatcgaaggtcacagtggatcggcccgtaattatcaggcatctgctgagtgattctacggatccatttaaccgctcccacctcactcaagacatgctgataccaaacacggagctcaagttgcagatcgaggaatttgtccagtcccagcagttgagaaagcgaactgctgcggtgtcagagattggccaagcggatggtgctgatgatatggccgaatgaattgtgcgagcagcagggatggacattttcttttgtggtggggaaagacggatgctaatttacgcgaaatttaccagttcatcggtccgtataaaatcggtttgccagcttgtgtcaccatttgtctccattctttgtaaatgttgtaagtgcacggttgtaattttaagtccctgtttgtttacctttgagattatggccctgtttgtccttctaggattatatagtccagcttattataagcatctattgacctgcttatgaattatcataatttaggtgtttagattacataatttatataataaaaaaaaccccccac

SEQ ID NO: 174534 - DNA, 335 bp, Zea mays
  Clone ID: MRT4577_90755C.1
gttcacaaaccgagcgggtgccggctgttagttggtcggacgccttggtctcccaaacaaataaacaatggactcacagggacatggttacctcagatgtgcggccaccaactctttatggtcagtcagcagcatgcagcgttgctgactgaatgatggtcaactgacgcccctcgtcgccggtggtcaacgagtgcttggggtgacggacactggtgttaatgccgtagcgctgggcgttcgcgtccctggagggctcaggtttgtcgacaatgcgtgataatgggcatagatctttgctgtgtgaaataactatccggtctcagtgcacacaa

SEQ ID NO: 174535 - DNA, 908 bp, Zea mays
  Clone ID: MRT4577_90756C.1
aaaaaaattgtagtggggatatcgtaaaacacattgttgatgagacgggctgacaggcttcctctataactacatttgtatcaggtgtgcacctacaatatttacaaagaatcgaggcaacagggacacaagccgggaaaccaactttatacggacagatggaccgatacacttcatgtgaattaaccatcactctttccccacaaaaaaaatgtgtccatcccctgctcctggcacaattcattcggccatatcatcagtaccctccgcttcgccaatctccaacaacgccgcagcagttcgctttctcgactgctgggaccagatgaattcctcgatccaattcagtatactctaatgaaagatcctgtgacactgccatcgtcaaaggtcacagtagaccggcccgtaattatcaggcatctgctgagtgattctacagatccatttaaccgctcccacctcactcaagacatgctgataccaaacacggagctcaagttgcagatcgaggagtttgtccggtcccaccagtcgagaaaacgaactgcttcggcgttgttggagattggcgaaacggagggtactgattatatggccgaatgaattgtgccaggagcaggggatggaccccttttttttgtggggaaaaagtgatggttaattcccatgaagtgtatcggtccatctgtccgtataaagttggtttcccggcttgtgtccctgttgccccgattctttgtaaatattgtaggtgcccccccgatacaaatgtagttataaaggaagcctgtcagcccgtttcatcaacaatgtgtttttcgatatcccccctacaacttttttttaaaaaaaaaaaaaaaaaaaaaaaaaaaaaaaaaaaaaaaaaaaaaaaaactcgagggggg

SEQ ID NO: 174536 - DNA, 1114 bp, Zea mays
  Clone ID: MRT4577_90757C.1
gactcctatgggcgattgggttcatcgaggccggccgggcttcctcactcctcacacagtcacactgtcgaccgcaccacgagtggccatgctccaactcgcccccacgccgcggccgtcgccggcggccgggcgtaggcctcgaccctcctccgcatgcatctgctgctcgagcgtgcgcgcgctggaggagaggtccccgcgcccgggcgcgtcgctgcgggaggcgaagcgggtggtgctggtgcggcacgggcagagcacgtggaacgccgagggccgcatccaggggagctccgacgcctccgtgctcacgcccaagggggaggcccaggccgagacctgccgccagatgctcgcctccgactccttcgacgcctgcttcaccagcccgctggcgcgctcccgccgcaccgccgagatcatctggcgtggcgacggcctcatcccggaccccgacctccgcgagatcgatctctactctttccagggactcctgaagcacgaagggaaggagaggtacggtcctctgtaccggcagtggcagaagaacgcggccgagttcagcatcgacggccactacccggtgcaggagctgtgggaccgcgcgcggagctgctgggagaggattttggcgcaccggggcaagtcagtgctcgtggtcgcgcacaatgcagtgaaccaggcacttgttgccacctgtttggggcttggcgcggagtactttcggattctgctccagagcaactgtggcgctagtgtgctggacttcaccccacgggctgggggaggtcctcctaccgtctgccttaaccgcttaaatcaggtctgttagcatttccgcttggtaacaacttggagatcaaagaaatttcaccagacaatacagggaaaatggaagggtcaaacaattaaaacatggattaatctgcccccaaactgtatcttgtagtacagaccccaaactctcctgtcgctgggggaaattctgcgggaagaaagacgagcaagaggatcattctggcctgtcaaggggctacacaaagcagttctgagattagcttgggtggaacgggatatgcgccgctgaacatgctcgggactatacagtctc

SEQ ID NO: 174537 - DNA, 2380 bp, Zea mays
  Clone ID: MRT4577_90758C.1
ccggaccttactttttggaagtttggctctgttttctctcaccgcctgttctcccccgcgcgcgatggcggcggctccggcgagcgtcggctgcggcggcgcgtactcttgcgagacggcggagcgtacccgcgagtggatgcaggccctggccactttcctcggccgccaccgtccgctcctcgaggcccacgtcgtcaactttttcaaggacaggctgtgggagctagtggacgccgagtggatggagtgcctccggcgggagcccgtcgagagcttgctcaagctgccatctggatgcgtccaggagcactggcctgctacactgcgagagtttgtgcttactgctaggtcgcttgtgattccacgggagcagaaggctccgcaatcgcttgtatctgacattcatgtagccccagttggcactgttctcgctcagggcatgaactcaaagaagaagcacgaaattgaaaatctagctgctgtggttcatgcaattgcaaagaggtgtggagccaagacagtggttgatgtaggttctggccagggttatctcgcacaggccttatcttttgagtaccaactccgtgttgtagcaatagatgcttcatcacaccatgcatcagttacaattgctcgtgcagaaagaataaagaagcactatgctgctaaatgtgtggagaagcaactgctcatggtacctagggcagtcacctgtcatgttctttctagtgacacattggcagcagtcacattagatgcatgtaaggatgacaatggagaacatgtgagagatactaaaacatctactaagaaaatcactcaaatccaggaatcaactcagggcacccctccattaatcctggctggtcttcatgcatgtggtgatctttcagttaacatgctaagagtttttgtgtcctgtgaacaagtaaaagcattggtaagcattggctgctgttacaacttgctttctgaggatacttatgaggacacagatacctgccctggttttcctatgagcaaggctgccaaacattctgaattggtacttgggaaaagcatccgtgaccttgcatgtcagagcgcagagagatggagaaatctcaccatggacattgcattgcaaaattttgatgtacatgccttccgagctgcatttcaaatggtacttgagaaatattttccagaagtgtcaaggttgagtccatcaattggaaggcaaggaaaagctcttcgacgtcagaggcttcgaaaagttgtggaatcacaaatgactacaaagaaaaatgatgatttctcctgttcaactttaaaggaacaaaacaagaacacaaacgatgttcatccagtcatacatgaagttgacacagggccagatgacatccatcagaacgcacatcaaaagttcatcctgttcaaagatttcacattatctggattaggtcgccttggctgtggctcagtggaagacacgagtcttcttgaaatatggaaggacgtgcaacccttctctgaatatataggtcccttttggtgccttcgagctgctttaggtccactggtggaaacatatattttacttgatcggttattgtatcttcaagagcgaagcaacctagttgaagcattgctgtttcctctgtttgatcctaccatttctccaaggaacatggccgtaattgcttggaagttatgtgcaaattcttcagaagcatgacatggtaaatcttctgatgataggatatgcagttgatgggatggtgtgttggtaccaaactataagccagactattgtcttatggcagaacttcttcgatttagatacagttattgtattgctgtctcttttagaagggcaggcctgatacagaggtgagagctgtctcactgaatcaccaggtcacggtttcgaagcagcctctccgcatttgcgtgggaggcttgcctcggtttatcccttatccaagcctctagcactgggtgtgctttattttaattgtattgctgtcctcccatataaaaaaaacctgaagatagtattgtctttgaaattgtgagggcaatgcatttccctttcaaatcacctggtacatgtcttgtcccccccccccacttcccccagagcctgtctatatgtacttgatccgctttttttgcatcctagcttctcccggagtgtattttgttgcttgtgtgatgttcagatctttgaagaatgtgacaggctatctagcctacttgagacgttcagtatttctacaggtaagaaaggaaaactcaagtagacaagatcttccaaatctagttgcaagatattgcccttgaatagtgtgcctttatccactaaatgctaggtcaacaatctatccatggtgct

SEQ ID NO: 174538 - DNA, 182 bp, Zea mays
  unsure (1)..(182): unsure at all n locations
  Clone ID: MRT4577_90759C.1
aaattgtgtattgcttctctagcatctccagcttcctcttcttttcagcagcttcgttagaagctgttcgatctagacaattcactggtagcagcaatgatggatcgaacagcttctaacgaagctgnctgaaaagaagaggaagctggagatgctagtagaagcaatacatcaatttcccg

SEQ ID NO: 174539 - DNA, 661 bp, Zea mays
  Clone ID: MRT4577_9075C.1
agttcttcctttcttcctacacaacaagatgttcgccgacgccggcttcagcttctccgcctactcttcttcgccgccggggccggcctactcctactcctactcatactcttcttcccccacagtcttgtcccacccacaccccgaccactcctccttctcctctccaccatcctccgctgctccggcgcaaccgccgccgccacctctgcctctccctctccctctcctgcaccaacaacatcaacatcagcatcagcatcaagccgccgccgctgttgctactgcatccaacgacgacgacgacgacgccatgtaccaccacctcggagacatggggcagccatccctgatatcagagtatgacctgggagcagaaggcgacctgttcaaggctccggagcccataatcgaggagccgctgctggccctcgacccggtcgccgccgccatctcgatgatgtccggcggagacaacgccatggacgacagcatcaaggtctccgacatgaggctgagcgaggtgctgtacgagtgcgagaaggagctcatggagaagtcggccatcgaggagaccatttccgagctgctggacgtcaagatccccatgctgcaggtcgaggaacgtcccggggagctcagggcctcctcatcatcgaca

SEQ ID NO: 174540 - DNA, 732 bp, Zea mays
  unsure (1)..(732): unsure at all n locations
  Clone ID: MRT4577_90760C.1
gccgggnactcctcaattcggcacgagggtcgaccgcaccacgagtggccatgctccaactcgcccccacgccgctgccgtcgccggcggccgggcgtaggcctcgaccctcctccgcatgcatctgctgctcgagcgtacgcgcgctggaggaggcgaagcgggtggtgctggtgcggcacgggcagagcacgtggaacgccgagggccgcatccaggggagctccgacgcctccgtgctcacgcccaagggggaggcccaggccgagacctgccgccagatgctcgcctccgactccttcgacgcctgcttcaccagcccgctggcgcgctcccgccgcaccgccgagatcatctggcaggggcgtgggcgtgggcgtggcgacggcctcatcccggaccccgacctccgcgagatcgatctctactctttccagggactcctgaagcgcgaagggagggagaggtacggtcctctgtaccggcagtggcagaagaacgcggccgagttcagcatcgacggccactacccggtgcaggagctgtgggaccgcgcacggagctgctgggagaggattttggcgcaccggggcaagtcagtgctcgtggtcgcgcacaatgcagtgaaccaggcacttgttgccacctctttgggtggggtgcatcctgcatccgagcgtgggatcggagttcattgcgtgtctaagtgtgatcgaagctgatttcgtgctt

SEQ ID NO: 174541 - DNA, 221 bp, Zea mays
  unsure (1)..(221): unsure at all n locations
  Clone ID: MRT4577_90761C.1
ccggccgggattttaagtttttgcttggttttaccacttcgcgtcctgtctcctgtatgtgatttgctagcgccgccaaggaggccaggccaccaccgctcctgaactgcactgcactctcctctccgctccaccagcggctgccgggcatccaagtccagtccacacacagaggacaagccaagagcggccggtgggtgtggggtgaaccgtctngcctg

SEQ ID NO: 174542 - DNA, 342 bp, Zea mays
  unsure (1)..(342): unsure at all n locations
  Clone ID: MRT4577_90762C.1
aggccaattgggtaccgggccccccctcgtaggcggccactatatcttttaattcttctctatctttctcacttccctaaagaatacccagcggacacgcgcatttttaaagatttttgacccccaaccccatctactattatcccccacaaccctcctancaacaataacataatatccaatactgccacacattatctttatccctaccaccaaacaaataacctcctcattcaaaatatcacacaccccaacttcaaaaattcaccaatccaccaaattacccaaaaatgaaaaatatttaacacttaccggctaacttaaccaaactttgaaaaacct

SEQ ID NO: 174543 - DNA, 964 bp, Zea mays
  Clone ID: MRT4577_90763C.1
agtgagtttttctgtgctttcgcttagttacaatacaaaatcatgcgcttctttgcatatatacacacacatcaatccactgtcaaaattgaaccaaatgcttgataattacaaagcaacgttaacttttcttctccaaatcccagtgacttgatactacgctgaagctacagaatcaacaaggagagctaagaaagtacgtacaattcctaagaatcagaagaaacccttaacactaggtactatatatacctacgatgaggctgaacgaagttcaactagagaggcatagaacccatccttgatattcatcagcgcctcgtgccttcctttctccactatgacgccatccttgagaacggcgatgatatcagcgctcttgatagtggagaggcggtgcgccacgatgaccgtcgtcctgccgaccatcacattgtccagggcatcctgcactatgcgctcagattcggcgtccagggcgctcgttgcctcgtcaaggagtagaatcctagggtccttcagtatggctctcgctatggccacccgctgcttctggccaccggatagctggacccctctctctccgacagtggtgtcgtacccctggggaaggctcgatatgaactcgtgcgcgttggccgcccttgcgaccttgacaagctcctcctcggttacctccccatgcttcccgtaggctatgttggcacggatcgtgtcgttgaagaggattggctcttgccccaccagacccatctggtccctcaaccaattgactttcaggctcttgatctcgaccccatccagtgagatggtgccagagtcagggttgtagaaccgttccagcaaagagatcaccgttgacttgccactgccactctctcccacgagtgcaacagtcttgccggaggggatgtgcaaggtgaaatcgctgaatatctggatatctgggcgactcggatacttg

SEQ ID NO: 174544 - DNA, 315 bp, Zea mays
  unsure (1)..(315): unsure at all n locations
  Clone ID: MRT4577_90764C.1
acggacggcggcggaaggggaccccacaccgcgcgcccttctggtcctgacccaccaccggcaatggcgatcggtcgagttactccactagcgagcatcgaggcaatcaagagatcgataggggaataatggagggaggggacgatcgccgtntnttctccgcgccgtcccgccccgccgcgcgcttnttcggttcggttgtccttatatatacgtaattagaaacagaatagcaaaggagagagaaaaagatactgtccgcccaactagagaaaggagggaagatatagattaacaggttgaaaagcgagctga

SEQ ID NO: 174545 - DNA, 237 bp, Zea mays
  Clone ID: MRT4577_90765C.1
ctaacccaaccagtggttactagtaacgtgtgtttacatacttactcttaaaaactgtgggagccataacgttccacctcaacggtgtgcctcatagtaaaaaaactacaatgccaatggtaatgctgcgtaaaacaaggccttctaaaccctaccccgcagtattcactaccatcctgaggaaggcatggccagagtagtctcagtccgtgcctaacccaggtaaggatcccataa

SEQ ID NO: 174546 - DNA, 868 bp, Zea mays
  Clone ID: MRT4577_90766C.1
ccattccctactcgctccgtggttcccccagctccctcttccatgggcggggtctgctgctcctggcgcatggcatgggcacctgcgcctcttccccagaagtcgccatgacctcaccaagaccccagccgagctcgcccccggtcccttgcttcccatggcactcgccctcttctccctgacacgcgccctcccagccgagcagctcgccctcgctccctcaaactcgccgcgcgcgccctgctccctgcgcgccgcggcttcctagctcctctccagcgtctatcacagtccgagcctcctccacgccggccggacctccacctcgcccatggcggcttcccccgctcagcgtactccctcgctggtggtcgggcagcagtcgcagctgcaaccgagtggagaaacccagggtgccgttgaaccccatccttccctgttcgacttcggctgatctattctgttgctgttgcacttccttgttctcgcagatctccgtcgggtgttccattttcgtgtgacgcggggagcgagtctttgtcgatggcgaggttgttcggtgtgccgtttatgtttcctgcacttggacagggccgtgtccctctctgtacatgcctagacctcctcggcgccctctccttgtttggatgctcgtcgccggaactactagggatgagctatgtctccctcgtcgagcgccgttaggccgactccctgcgccctcgctctcccctagctgaaggccacaaccgccgtcccctgcctctggctgccacaaccgccgcccctgcctctggctgcaagcgcgacgaactcgtcctaagctcatcacaatgtctctatcccgcgtgccgcgccagcacgcgtc

SEQ ID NO: 174547 - DNA, 588 bp, Zea mays
  Clone ID: MRT4577_90767C.1
ggcagagcaagtggatgacaaatgtatctcttctgatcttggagaccagaggagaacgcctgtggcgaggattttgcatttctggtggtgctgtttgtctggcctactctggatgggtttcgaggttccttatatattatgatatttgtctcgctgggttctttgactagaaatggatgacaaatgcatctcttctgatttcgcatcgatgaagtgaccatgtatagcgattggaatggccggaatctgtatcgtcaattaaagagcacatgaaccagaagagcgattggccttgcatcagcgtcagctttattgtccgatggggtctacataacagtgcacttgttctgagtgcacggtgactgttattcttttggcaagatggattctagctgagcgaagctctgccagttgaaagcgtacataaatattctagttctacgaagcagtgctgtgacgttataatctgaacagttttttgagatttgagcagcaaattcagcaacagcttgtaccaggcgtcaatgggattgggaaaggcttttttaatcggccaccgaatcacggttagcaggctattgaactgtt

SEQ ID NO: 174548 - DNA, 465 bp, Zea mays
  Clone ID: MRT4577_90768C.1
agtacaaataacattagttattcaatcagaacacaaatacagcattcaacttgaaggcagtataagagaaaagaaaagaataccaccaaagaaaattgagccctaaacttagaagcaatggtttctcttgttcccaaattacaacccaaccagttctaattcaaactgtgtggagttaaaaagaaagtcacatgcattccccgccacaatattgaatatgttttcccagcctcccaccaagaccataagaggaggtttacaaaagagagcacatggacgacttgagaaatcgatggtttacaaaagcgagaacacatggactagagaaattggaatatctatcattactgcaatgcatagtgtggtagagggggaggcacgcctacaccgtgaaatcagataacacatatttacaggcatctcagataatgaaccagactagataggaattcctggaaccatacc

SEQ ID NO: 174549 - DNA, 634 bp, Zea mays
  Clone ID: MRT4577_90769C.1
gccggccggtccgggatcatccgcgtgcgttctctacctctgcactcccatcaaatcatcctacagatcactgcacccacagctgattaccgcgcattgcccctctgatgatgcaacctctaagattacaacgagaaacgcggattacacagctgctgcctgactgaacatatggtcgtggattgtcaccattccacctacaacgggagtacaccgtccaccaccacgcgcttgagaacgaccgctgaacacgagaagatctttgacctgagttgcgccgactagtggctactcacatcgccttttatccttaagatcttcgctgatatattaggcacctacttactgatgatctcgtggaggcgacactggattatctactgcctctccatcttataaatatggttccgcagtgctgaggcgatacgtgcgtgacctagcagtgatggtgatgctgtacgccctgggccacatctccagagcttacatcaacccggtggtggtaacctcgtccatggctggtgtctactacctcatccggttcacgaatcctgacctcccagatatcaccaacatgactttctgcctcaagagttcgagaaagatgcactcctgcgacatcttctgctggatc

SEQ ID NO: 174550 - DNA, 294 bp, Zea mays
  Clone ID: MRT4577_9076C.1
acaggatttcgttcagcacttctcccagatcgatagggtgctgactgaggatgagatggggcacccagagataggagatgctattgcccggcacaaggaggtcctggagtacaatgccattggaggcaagtataaccggggtttgacggtggtagtagcattccgggagctggtggagccaaggaaacaggatgctgatagtctccagcgggcctggactgtgggctggtgtgtggaactgctgcaagcgttcttcctggtggcagatgacatcatggattcatcccttacccg

SEQ ID NO: 174551 - DNA, 446 bp, Zea mays
  Clone ID: MRT4577_90770C.1
gcgggggtgtgtgtgttttttttttttttttttttttttgtgtgttttttttttttttttttttttttttttttttttgacaatgaacacaattattccttggcgattgaacaatagtttacattatggttttaaccgaaaaccaacgtgccctcacaggggggggggcacctaaagggcaccgggggggcctcccttacttgccggggacgaagttggtggcgtaggcccaagcgttgttgttgacggggtcggcaatgtggtcagggaggtttttgagcgggcccttcccggtgaccatggcctggacgaaaaatcccaacatggaaaacatggggagggggccgttcttgagctccttgaccttgagctcggcaaaggccttggggtcctcggggaggcccagcgggtcaaaacttccgccggggtagagcgggttgacaacc

SEQ ID NO: 174552 - DNA, 190 bp, Zea mays
  Clone ID: MRT4577_90771C.1
cataacacaccttgctgcactgcccagacattatattctacaggaacacgaccgagagggagggagaggcatgcatgctcctaatcacgcaactctccatcatgaccgagctcctacccgcaaccgacgtggctgccccagccgccatgcacacggagatgtcgtactacaacatgaacagcaccgctca

SEQ ID NO: 174553 - DNA, 401 bp, Zea mays
  Clone ID: MRT4577_90772C.1
ccggccgggatctggctatccttacgccttgactcacacggcgccacgcgcatcagctcgggctgtccgctgccgccagctctcgcctccgccgcagcgcgaggggatcatagctgacccttgtaccgcctgtcacaggatgacgatgccgccaggacccaagtacgctaacggccttttatgacgggaggatctgcgaaatggggagcgtggaacccttacgtgcggagccatagggcggtggctgcatacaggatgtgggaggagggacaaggcagggcatcacgaatgatcgatgagatgggtgacttcagtgcaacaccatcgtctgatgagatattaacatagctgattgcgtgaaggtgggatgacttcagggggactgacgatgatattgggac

SEQ ID NO: 174554 - DNA, 1641 bp, Zea mays
  Clone ID: MRT4577_90773C.1
cttacgcttaggcttcgtcttcaaatgctacattgtgttttcaacatcgtactactataatatgagcatgtattactacataatcatatcactattgcaggaagtgctctatttttcaatcgacaaacttctctggctctggactgacagctattttgagcatccgatctcgaacactctgcttcattgacttgggtacctcgaggccggccgggtacgacatttgatggccacatcacccctgagctgcttcttcgcgcgtcccagacccagatctacgggcaccgccgtctggttgcttccggccgccgttctcctcctcctcctcaaccggtggtcgcacatggcctcttacccttctgtctcccctcgtggctccggctcggtgcaggtcgggcgcgccgagctttactcgaagatggcgcgtgacctcgacgagcgcggcgcggcgttcctgaagggcggcgagacgtcgcagtcgctcacgctctcggacctcttcgacaccgcagatgacggcggcgtcgtacccaggctcaaggccgccgacccgccagtgcgcgcgaatgtgctctatatggaccccaagttcgccgctgtgatctcgaaagctgtaaaggacgtgtttcttccttattttgaccaagctatctggttccaaaatacgagcatgtatcacttcagcatgtttcatgcctcccatcacttggagcccattgtagcaactgaggatgagattgaagccgaagtggaggcagtaaaaggtgtcaccaagaatttgtgtccgcttaaaattgtattggacagagtggttttgacctcaaccggtgtgcttcttggcctgtggcaggttgaatctggtactgatcctgcagaaatccgctcaagattgagagaagctcttcctcgtgcacctcaaaagcaactgtatgaccctgttctgcttcacacctcgtttgcacgaattctgcgacatcccaggctccctaaagagcaaagtgcatcatcgtttgataatgtcaagttcttccatgagctagttgctcaaattaatgagaagatctgtggctttcaggcgacgatatcagagctatggtatgtcgaagagtacgatgttcttgcattggcactgaatggaaagatgaaggtgcggaggctccaccttggctgcaatcgtcagggcaactgaagctagagaggtcatggaaacgggaaagaggattaggagctgcacagccaccaaacagacttttttcgcttgcatgtctcgccgaaagggccaccttggttctgccgagctgaacgagatgtgctctacagtctgcctggacatagcgagaactgacaagttatactgactaagattatctccattagtttacctattctcatactcatattcaaacttcactgtgttttagataaactatggataaactgttagacctggtctaatgtttatgtgggaatagtatgcatgttttaatcgtatgtaatacaattatgtgagcacaagaactattataagaactattatagtgttgtttggttcaattgcaccatctagccgattgccgaaaggcgctcgttgaagcgaggatggtcgcgagtctatatcgcaccggcgtccgatatcctgca

SEQ ID NO: 174555 - DNA, 337 bp, Zea mays
  Clone ID: MRT4577_90774C.1
agctcgccgttgctgcgagcgtgtgtgcgagagaggatgggtggtggcggcggggctgctgctgctgctggcccgtggcggtggcgcccgcgagcctggccgcgtgatcaggccgcgccggccacggctcggcggcgggtcaccccgtggccggcgccggccctcggggccggggcgcccgtgaagtcgccgaccagggcttcgccgccggccgtgccgcccatggggcgcatgccgccgcaaggggtacgggctcccgccgggcaagcggtccaggtgctcacgccgtcctccgccgcgtgctccttttgctccttgctctcgccttcgcccggcc

SEQ ID NO: 174556 - DNA, 334 bp, Zea mays
  Clone ID: MRT4577_90775C.1
ggccggccccacacccacatgcctttgtttatttcttcttttcctttagatttacacctcttgtgtaggccaaggaaatggttgttgtcggcttaatggtggatttgttaattctttacttgactcagtgatgcgcttatcattatgtcatgctgacctggtgcgttgtaaccgaactcaccttcacatggggatgtaaacagttgggggcaaaatctgttccgcaccgcctcactcgtattcttatttcgagacaaatgtgaaaaccaaatgaaaaaaaaatgaaaacgggacgatccgtattgataccaaaaaaaaaaaaaaaaaagcggcc

SEQ ID NO: 174557 - DNA, 136 bp, Zea mays
  Clone ID: MRT4577_90776C.1
tgatatccagatcagcaaaccggcagtgcttgaagagtttcgtagaacagaagagcctccctatggtcatcgctctcgtcagtgtgcctggctctgtcagctgccaacacctctgcattgcagcattccctgcccc

SEQ ID NO: 174558 - DNA, 425 bp, Zea mays
  Clone ID: MRT4577_90777C.1
caaaacgggttcctgcaggcgtcccaacttaccctataacgagggcgtataaaatttaggcctggggggggccaatgggggggtcctgtaaaaaaaatttatttggtcacaattcccccttcctacgagcgaaaaacataaagcgcaaagccttgtgtaattaataaaccacccccctaaggggaattgcgttttgctcactgcccggtttttattttttaaacctgaaaggccaacagcattaatgaattttccccccccccccgagaggaggttagcaaatgggccccccgggttgttttttttttcaccaaaaaaactttaaaggggtgaatggcctggaccaaaaaaaactaaaatagttgtattaagcggttccactctggtttgtcccagccggcaaaaaacccgttcaatggtgttta

SEQ ID NO: 174559 - DNA, 624 bp, Zea mays
  Clone ID: MRT4577_90778C.1
agcagtggtaacaacgcagagtacttttttttttttttttttttttttttttttgggtttttttttttttttttttttttttttttttttttttttttttttttttttcggccacggtggtagcgcagttcgctctaaaaaaccggaaaaatggggaaggaaagccctgcccaaacgggagggggcaagggatgaaaaaaccaccgggtctgaacacaagggggggaaacaagaaagccctggtaggtcagggggggaaccaaaaaccagggggggaaaaaggacggaaaactaggcggggagcacaacggggccgccgggggccttgatctttcttcgggcgacctgggagatgagcttggccttgacgacaatggggtggggcggtagcacccccttcccgagcacctgggaggaccccaaccgcgtgacggccatctggggggcctcgcccccgcccgcttccgcaggctggccggggggccccatttaccaagggcccttggggggggcccccgggcaaaaaaaacctgttggggggccccgggggaggcgcggcgccccccgcccctgcccggtggggcgcgggaggggccccggccccaaaagggagcgggggggggg

SEQ ID NO: 174560 - DNA, 298 bp, Zea mays
  Clone ID: MRT4577_90779C.1
aatcctacccgcagatccaccactgatttgcagcttccccttctcgccgcctcctggccaccgccgccttctctccaccactgccaccactcccgccgcctcatccagcaacccccctaccccagaggtcgtgctctacgccatccacagcctctccaaggatccctcccaagcgctctccgtcttccgccgctccgccgccgccggaaagaccgtaggttccgcgtcatacaacctcatgatccgtaccctcgtctctcacacctcctcccccccccccccttcctgttcctccccc

SEQ ID NO: 174561 - DNA, 171 bp, Zea mays
  Clone ID: MRT4577_9077C.1
gcgcgcgcaccaccaccaccatccaccacccacacccccacggccccaccctgaccccgacccgatcccgatctgagcgtctccacccggtcccgctcccacctgtctccaacagaacaacagaatatgatcaatcaagacagccccgtgctagctcacccgccggggctg

SEQ ID NO: 174562 - DNA, 2622 bp, Zea mays
  Clone ID: MRT4577_90780C.1
atggcgagaatacgatctactgccaaagttgtacgtgagggagacgaagccgaaggttcagacactgtgcccatctccgaagcaatgcagcgttccggtctactgactacagaagaaatgcctgctgctgaagcaggcccaacaactgtcgaaggagaagaaaacattgtagggactgactccgaagatgactatcaccttgctacgcccagcaagcccagtcacctggattttgggaaatcaactgtttcaaaagctgacctttcgaagatggtgaaagcaggttatttcaatgaggaccagaagaagctactccgcttcggggaagaagaaaccaccccgaagccaaggaaggatgagattgttattttcaagagttttttaaaagccgggcttagattccctctccacggtattgttgcggagatactaaggaggtttggtatctactttcatcaattgactcctaacgccatcgttaggctcaatgtttatatctgggccctccgaagccaagctgtggaaccatttgctgacagcttctgccgagctcacgaattacattaccaaacaaaggccagaaaagatgggctacatgataatttcggttgctataattttgcctaccggaagacaacaaagtgtcctgtcatcagctaccgaagcaaatggccagcaggttggaaatctgagtggttttatgtaaaagtcgatgaagacaaagaaaaattggttcaaagccctctggagttaaccttcggagagacaaggccacaatgccacattggcgacctaaaaggtcccacctgggctgctctgggtgaatttgaaattatctcagaacatattggcaccagggatctagttcaagagttcttggcattcagagttttccctactctaaaagagtgggagatgccgaagctggagggagagaagaaaaagggggagcttgtccggcttccctattacttcaagttcaagaagttcttcaaaaaaccctgcaaagaatggttagacactgttgaggtgatgtgcaacgaaatcctggggaattactccaaaaaagaggatcaactaatgacagcagccttcggtgcccgaccgaaacgaaggctgaaccgagtgcttgacgccctaggcttcgaatacccagactacgaacaattgaacaagggcgccgagggcctcaaaagaaaaagagtagccgaagctctgatcagagacgaagaaataccagcaaaggagaagaaagttctcaagaaaagaaaaatatctgctccgaagcgcaaatcacccgaagaagaggagacccccacaccgccttctaccagcgacgtggaggaaattttaaaggtaatgactgaacccatgcctacgaagctaagtccattagggctccaactgacgaagctttttgaaaaggtggacgagccggatcaaccgaagataaacaaacccaaacggcaaagaattattgcggtaactgaggttatcgacaaaactccacctaggatgtcaattcagaaaacggcagctgctgaaggtaaagcttcggaagtcgcggctaccgaagctgccacacccgaagatgtaaatttagaaacttctcttgaaaatattgacaaaattttgacggaaaacattgaagaagctgccaccgttactgaagaaatcctggccacagtgccagggaaagggaaagaaatagtcgaagaaactccggatgacgaagcctattctttccagaatctaattgggcagaaactgacgaaggacgaaatagaagaactcaaagactatgccaaatcttgcggctacaagccaggagcccttctatttgggggtgtagatgatgaaaaactaggctgtattcgagaccagactggagctaagagcatgctactgagcaaagctctgaagatgcaacaagacttggaggacaaaaagcacgaagctataattgaaaacttggaaagcaaaataaaagaacaatctgccatcattgaaaggaaagacttcgagctccaatcgaccgaaggcttgctggctgaaactgaggctaaaatattagagttaaattcgaagcttatcaatcaatcaaaacaatttgatcaggagaagctagaactgaattcgaagcttaaagccgaagtccagaccagctcagaattgaagaaagcattaacaagccttcaagacaaatgcttgaactttggcaataattgtattggacgattaaagaagatattttactctgttggagccagcagtgggaaatttaacccttcggcggaaaatttaccccaggccctcgatcatattgaagctgaaatcgaagagcttgacgaagttatagccgggcacggcgacttctgtgcctgggtagcttctcggggtaccgctgctgcatttctgaaggccggttgcgaacatggaaaggttgtcaacaggcccaacttcaccttatcttcatcaatcctggatgatatgcccgacctcgcccgaagtatctccaatagatttataaaaatggtatggacaaagggcgggcgagagaaagctggagacgaagcccgaagtcatcttaaaccagatgacgaaggtgaagatgatgcctag

SEQ ID NO: 174563 - DNA, 2751 bp, Zea mays
  Clone ID: MRT4577_90781C.1
atggcgagaatacgatctactgccaaagttgtacgtgagggagacgaagccgaaggttcagacaccgtgcccatctccgaagcaatgcagcgttccggtctactgactacagaagaaatgcctgctgctgaagcaggcccaacaactgccgaaggaaaagaaaacattgaagggactgactccgaagatgactatcaccttgctacgcccagcaagcccagtcacctagattttgggaaatcaactgtttcaaaggctgacctttcgaagatggtgaaagcaggttatttcaaagaggaccagaagaagctactccgcttcggggaagaagaaaccaccccgaagccaaggaaggatgagattgttattttcaagagttttttaaaggctgggcttagattccctctccacggtattgttgcggagatactaaggaggtttggtatctactttcatcaattgactcctaacgccatcgttaggctcaatgtttatatctgggccctccgaagccaagctgtggaaccatttgctgacagcttctgccgagctcacgaattacattaccaaacaaaggccagaaaagatgggcttcatgataatttcggttgctataattttgcctaccggaagacaacaaagtgtcctgtcatcagctaccgaagcaaatggccagcaggttggaaatctgagtggttttatgtaaaagtcgatgaagacaaagaaaaattggttcaaagccctctggagttaaccttcggagagacaaggccgcaatgccacattggcgacctaaaaggtcccacctgggctgctctgggtgaatttgaaattatctcagaacatattggcaccagggatctagttcaagagttcttggcattcagagttttccctactctaaaagagtgggagatgccgaagctggagggagagaagaagaagggggagcttgtccggcttccctattacttcaagttcaagaagttcttcaaaaaaccctgcaaagaatggttagacactgttgaggtgatgtgcaacgaaatcctggggaattactccaaaaaagaggatcaactaatgacagcagccttcggtgcccgaccgaaacgaaggttgaaccgagtgcttgacgccctaggcctcgaatacccagactatgaacaattgaacaagggtgccgagggccttaaaagaaaaagaatagccgaaactccgatcacggatgaagaaaggccagcaaaggagaagaaaattctcaaaaaaggaaaaatatctgctccgaagcgcaaatcacccgaacaagaggggacccccacaccgccttctaccagcgacgtggaggaaattttaaaggtaatgactgaacccatgcctacgaagctaagtccattagggctccaactgacgaagctttttgcaaaggtggacgagccggatcaatcgaagataaacaaacccaaacggcaaagaattattgcggtaactgaggttatcgacaagacgccgccaagggcatcaatccaaaaaacggcagctgccgaaggtacagcaatcgtcgaaggcgtagcttcggaggtcgcggctgccgaagccgctacagccgaagatacaaacttagaaaccacgattaagaatatcaacaagattttggaagacatggctgcggaagaagctggtgctactactgaaaaaaccatggccacagtgcctgagaaaggaaaagaaatagccgaagacccttcggacgacgaagcctactctttccagaacttagttgggcaaaaactgacgaaggacgaaatagaagaacttaaagactacgccaagtcttgcggctacaagtcaggtgccctcctatttgggggtgtagatgatgaaaaactaggctgtattcgagaccagactggagctaaggtaatcggtactctatcgaagagtatcggttttccgaagctagagacagacatcagccgctaccgacgacaacatatcgtcggcagcttgttttattctaacttcaagagcatgctactgagcaaagctctgaagatgcaacaagacttggaggacaaaaagcacgaagctataattgaaaacttggaaagcaaaataaaagagcaatctgccatcattgaaaagaaagacttcgagctccaatcgaccgaaggcttgctggctgaagctgaggctaaaatattagagttaaattcgaagcttatcaatcaatcaaaacaatttgatcaggagaagctagaactgaattcgaagcttaaagccgaagtccagaccagctcagaattgaagaaagcattaacaagccttcaagacaaatgcttgaactttggcaataattgtattggacgattaaagaagatattttactctgttggagccagcagtgggaaatttaacccttcggcggaaaatttaccccaggccttcgatcatattgaagctgaaatcgaagagcttgacgaagttatagccgggcacggcgacttctgtgcctgggtagcttctcagggtaccgctgctgcatttctgaaagccggctgcgaacatggaaaggttgtcaacaggcccaatttcaccttatcttcatcaatcctggatgatatgcccgacctcgcccgaagtatctccaatagatttataaaaatggtatggacaaagggcggtcgagagaaagctggagacgaagcccgaagtcatcttgaaccagatgtcgaaggtgaaaatgatgcctaa

SEQ ID NO: 174564 - DNA, 326 bp, Zea mays
  Clone ID: MRT4577_90782C.1
acgcttacgtccagctagcccttgccgtcgctcgtctcctttagaggcgccggcaccgacgatctggcccgggtctatttgcagaagcgcggtcacttgtctcagcccggggtctgctgcgtctggtggtggtgaatgggagaacctcgtgacgatctgttccggatcaagcgtgcgagctcgggaatcaggggtttcacacatagctgttgcgatctgaattcgatgtactaatggagtctaatgccggctaaaagtctagccttacttactctatgatgtctgaagctccccttggctacagcattgacgacgttcgatctgtc

SEQ ID NO: 174565 - DNA, 172 bp, Zea mays
  Clone ID: MRT4577_90783C.1
ttccaaaacccctgccaaacagaccaggttggccgcccccaatacgaacccggaccaatgaggacgaaaggctcgcccgtcctcaagcaacagacacgtgcgcacgcgatagacaagtgaacggtggaggacctcatacagttgttgctggacgggaagaagcacaaggcga

SEQ ID NO: 174566 - DNA, 648 bp, Zea mays
  Clone ID: MRT4577_90784C.1
ggtccaagggtatcaccatcggcggcagctctttcctctactcgggcatcgccgcggtcgggtgggttttcttcttcacgtgccttccggagacccgcggtcgtacgctggaggagatgggcaagctgttcggcatgccagagccagacacggacatggctgaagcatacaacggccgctccaaggagaaggcggtggaaatgccggcagtgctcggcaatgattgatgcagcgtcttaccagagcagcgtggcaagattggcctctgtcccttgactctgcaggacagtgacctcgtggtccaaccagagactcttctgcaggacagctgtgcattatcgctgtcggcgtggcgtgtgccccacaagttgggaagctgtttggcttgttctacataccagatagtgaacccaaaatgcaaagaagtatccagtagcaactggcaagggacacgtggttccgtactattttaaacaaataggaaaaatatattacactcttgattcatttttagatcccccaaatttacctcgaaagaaaatcgacacgtcttgtaccgtgatctcgtgggaggttctatgtcccaattgatatcataagattatactatgttacaaacaagcaatatacaatcttctttgttaactt

SEQ ID NO: 174567 - DNA, 2289 bp, Zea mays
  Clone ID: MRT4577_90785C.1
gccttccggagacccgcggccggacgcttggaggagatgggcaagctgatcggcatgccggacacggacgatatggctgatgcagaggacgctacaggaggcatgtacccggggccgggagtgtaacgcgttagcccattgctctttgtctactctatatatatgcgtctccttgagcaaatacaacaccccacgccttgtctctgaactctgatcagagatcaaagaggtagccgttaagttaacgatggcttccgccgacctcgcagaggccatggagcccgggaagaagagcaacgtcaagtatgcttccgtctgtgccatcatggcctccatggcctgcgtcatccttggctacgacattggtgtgatgagtggagcggcgatttacatcaagaaggacctgaagatcacggacgtgcagctggagatcctgataggcatcatcagtctctactcgctcttcggatccttcgctggcgcgcggacgtccgacaggatcggccgccgcttgaccgtcgtcttcgccgcggtcatctttttcatgggcgcgttgctcatgggcttctccgtcaactacggcatgctcatggtgggccgcttcgtggccggagttggcgtgggctacgggggcatgatcgcgcccgtgtacaccgccgagatctcgccggcggcgtcccgcggcttcctcacgtccttccctgaagtcttcatcaacctcggcatcctgctcggctacctgtcgaactacgcatttgcgggccttccgctccacctcggctggcgtgtcatgctcggcatcggcgcggcgccgtctgccctgctcgcgctcctggtgttctgcatgcccgagtcgcctcggtggctggtcctgaagggccgcctcgcggacgccagggtcgtgctggagaggacctcggccacgccagaggaggccgcggcgcggctggccgacatcaaggccgcggcggggattcccagggacctggacggggacgtggtcgccgtacccaacaaggggcgagacggcggcagtagtgagacgcaggtgtggaagcagctcatcctgtccccgaccccggcggtgcggcgcatactgctgtcggccgtcgggctccacttcttccagcaggcctccggcagcgactccgtggtccagtacagcgcccgcctgttcaagagcgcggggatcaccgacgacaacaagctgctgggcgtgacctgcgcggtgggcgtgaccaagacgttcttcatcctggtggccacgttcctgctggaccgcgcggggcgtcggcctctgctgctgaccagcacgggtggaatgattgtctcgctcgtcggtctcgggacgggcctcaccgtcgtggggcaccacccggacgccaagatcccgtcggccgtcgcgctgtgcatcgcgtccaccctggcctacgtcgccttcttctccatcggcctcggccccgtcacgggtgtgtacaactcggagatattcccgctgcaggtgcgcgcgctgggcttcgcggtcggcgtggcgtgcaaccgcgttaccagcgccgttatctccatgaccttcctgtccctgtccaagggtatcaccatcggcggcagcttcttcctctactcgggcatcgccgcggtcgggtgggttttcttcttcacgtgccttccggagacccgcggtcgtacgctggaggagatgggcaagctgttcggcatgccagagccagacacggacatggctgaagcatacaacgccgctgccaaggagaaggcggtggaaatgccggcagtgctcggcaatgattgatgcagcgtcttaccagagcagcgtggcaagattggcctctgtcccttgactctgaggtgtcgcggtattgcaggacagtgaccgcgtggtccaaccagagactcttctgcaggacagctgtgcattatcgctgtcggcgtggcgtgtgcttcgcaagttgtgaagctatttggcttgttctacatgccagatagtgaacccaaaatgcaaagcagtatccagtagcaactggcaagggacacgtggttccgtactattttaaacaaataggcaaatatatcacactcttgattcattttgagatccccaaatttacatcgaaagaaaatcgacacgttttgtacaaaaaaaaaaaaaaaaaaggcccctatcaattcataagattatactttgcaccgtgacctcgtgggaggttctatgtcccaattgatatcataagattatactatgttacaaacaagcaatatacatcttctcttgtt

SEQ ID NO: 174568 - DNA, 258 bp, Zea mays
  unsure (1)..(258): unsure at all n locations
  Clone ID: MRT4577_90786C.1
gnacaagtaaacaaattatgcatgtgtaacttatggatgtctcttggtgtataagtattgtgtgaattccttctttgccatcaaaatatatgtttattccttctcatgtcatgaaataaaagttgccttcagtgcaaaaaaaaaaaaaaaaaaaaaaaaaaaaaaaaaaaaaaaaaaaaaaaaaaaaaaaaaaaaaaaaaaaaaaaaaaaaaaaaaaaaaaaaaaaaaaaaaaaaggggcgggccgttttaaaagaac

SEQ ID NO: 174569 - DNA, 736 bp, Zea mays
  Clone ID: MRT4577_90787C.1
gcgccgttatctccatgacccttcctgtccctgtccaagggtatcaccatcggcggcagcttcttcctctactcgggcatcgccgcggtcgggtgggttttcttcttcacgtgccttccggagacccgcggtcgtacgctggaggagatgggcaagctgttcggcatgccagagccagacacggacatggctgaagcatacaacgccgctgccaaggagaaggcggtggaaatgccggcagtgctcggcaatgattgatgcagcgtcttaccagagcagcgtggcaagattggcctctgtcccttgactctgaggtgtcgcggtattgcaggacagtgaccgcgtggtccaaccagagactcttctgcaggacagctgtgcattatcgctgtcggcgtggcgtgtgcttcgcaagttgtgaagctatttggcttgttctacatgccagatagtgaacccaaaatgcaaagcagtatccagtagcaactggcaagggacacgtggttccgtactattttaaacaaataggcaaatatatcacactcttgattcattttgagatccccaaatttacatcgaaagaaaatcgacacgttttgtaccgtgatctcgtgggaggttctatgtctcaattcataagattatactagctggatgcccgtgcgttgcaacggaaatatataataccagtatactacgataacttatgcaaaaaaaaaaaaaaaaaaggccccta

SEQ ID NO: 174570 - DNA, 243 bp, Zea mays
  Clone ID: MRT4577_90788C.1
tttttacaaagctgctaacccaattgggattgtggagggccttcaaaacctgcctgggggttttgtgccacaaagggttcttattatagatgatggttggtaagaaacagttgaccaaatcaaggcagtggatgaagccctccgtgagcatactgtattttcgcagatgctggctgatcttaatgagaatcataagttcatgggggaaacttgcatgaatcttgaggacctttttaaaactat

SEQ ID NO: 174571 - DNA, 323 bp, Zea mays
  unsure (1)..(323): unsure at all n locations
  Clone ID: MRT4577_90789C.1
ccttccccatcccttccattcgctcccgtgatttaaattattaaggattctaatttatttgtccccttcctcgtctacccagtagcttccacggctcgcttttctactttgtttgcaccaattaggcaataaaattccggcgcgagctccgtcggattcgcctcccggtcgccgcgcgcagctagcttccggcgtctccccaggcccaccggtccgtccggtgatcgcgcggcgnncggggtttcnggtggtggatcgtcggcagattcnggttccggccctccggggatggcgcgccgcgggttgctcaaggcggctctact

SEQ ID NO: 174572 - DNA, 306 bp, Zea mays
  Clone ID: MRT4577_9078C.1
agactctcaagctaccagacgactccatggacggctacgacctcagctttggcaaccctgatatgaacgcagggatccctggtttggattttccccacaatgctgaaatgaacttcggttttcgtggagatatactctgggattcatggtagttcagctgatttttgtgttggaacttggaataatgcttgaggtaggtgacaatctgtgctttcatatatatgacaattgacaagttgaaaagttgcctggctgtgttttactatcaatgttgtacttgtacatagcatgaatattattagaaaa

SEQ ID NO: 174573 - DNA, 340 bp, Zea mays
  Clone ID: MRT4577_90790C.1
aaaaataagaggtgacaggtcaatacatataactgatatatccttatcctcttttgtattatgtgcacttaaaaggacagtaaaatttacatgaaattcaaaagcaaacaattcaaatatataggatgtatgctagtgagaaaaatgctaaaaagaagaatccatttgaataacttcatatcatccaagagatctcctttaagtatagctagacacaagcaaaataccaacacaaaactatacattggtatctgaaataaaaataatatcccacaaatcaaaactataacggaacaacttgcacacctgttgtttcatattcatttgtgtttggctttct

SEQ ID NO: 174574 - DNA, 341 bp, Zea mays
  Clone ID: MRT4577_90791C.1
ggaaaaaccattcgacccacgcgtacgcgactagactaaatgtaaaatctgtacaatcaatctacacgatctactcgctaacatacacgagggggtgataaaaatagaaaccagcttcttacaaacacataaagaatacatgcctaccatatcctatacctaattctaataacctacccgaaatattaacttcacgaatatttattgacacctgaaccattttcacccaacatgggaatacaactctcagatgaaaactgtaagacttaaatcttataccaacatacatattaaacaacttagaaatcttttttatatgcagatattatttatttataaat

SEQ ID NO: 174575 - DNA, 1041 bp, Zea mays
  Clone ID: MRT4577_90792C.1
atttcttattgcaggtgaaggctgcagataatagagtgatacaagatcagctgaatgagaagataactgaatgcatggaattgcatgctgaagttactcatctcaaagaacagctgtcccaagctcttgaagctaaggatttggtgtcaaatagcatgatacataataatagagttaaccatgaagttgaacaccttgttgatcaagatgttccaagagagatctcttctgaaccacagcaaaaacagcagtccgttgaaatcaatgagctgaagcaaaaggtgtctgaactcatggaaatcaaagctcaacttgaggatcgcaatcaaaagctactggaggaaagtacatatgcaaaaggattggcttcagctgctggtgtcgaattgaaggcattgtcagaagaagtgaccaaactgatgaaccaaaatgagaagcttgcgaccgagttgtcatcgctgagaagtccaactccagctccacgcagattcaacaatggaccaagaggtactaggagggaaagcatgagtaggcgagaaccagctagcagacgagacacgaatgcaagccatgaaagggaaaaggctctagaggcattgcttatggagaaggagcaaaaggaagcagagctccaaaggaaagtcgaggagtcaaagcagaaggaagccttcctggaaagtgagcttgccaacatgtgggttctagtagcaaaactgaagaagtcccagggttatgaccatgaggatctggaggccaaacatgatggctcgtgacctcttcagtttagatatctatcggcttggcttgcgtgtgggttttctgtatgtaaggttttggtattcgttttttctcttagcatgaattagtgtctcattctgtatattctccgcgtgttaaatatgccagtagtgccttgcctgactgtgcctagagctttcgatggatgctagagcggcattttgggttcttcaggcacataatctggatttgaagaaacagtgagcaagtgtttggaaatctgacggggttctgatgcccact

SEQ ID NO: 174576 - DNA, 512 bp, Zea mays
  Clone ID: MRT4577_90793C.1
aatcattgacatgatatttgagcgagattctatcaattgatgctgatgttagtgaagatgagtttgggaagaaggtaagtgttggcaccgatccggacaccaaacacgggaatggaccgcctggcgtggctctctatggaggcgcggacggtccgcgacacagggccggatggtccgtgacctggcgcaggaacgactcctcctctgcacacttcaggacggtccgtgtaacaccttgaattctgagatcaaggggtagtgatccggaaggtggctatggtttttgtaagtacgaggctcaagatcttgttcaaggaaggtggctatggtaattttgatcctctgtttctcaacttgattgcatctatgcaagctctacaaccagattgaagcccagtctgctgctagcatggcacctatgtggaccctctgcaatatgtgtatgataggatgtgtcatgcgtgagttgatatatgttaactgaattggcaaaacacttgatatatgttaaa

SEQ ID NO: 174577 - DNA, 1873 bp, Zea mays
  Clone ID: MRT4577_90794C.1
cccacgcgtccgatgatagacaatgaaagcaatgaattacttcttcctgtcgaagggtttggtgtatcacttgaagattcttcaaaggaagaaaaaaagaataggaagggacttcttaactggttcaaacttcggaaacgtgatggagcttctattctgacaagttcagaaggtgataagtccagtttgactaaatcaaccgctccttcaacacctattggggaaagcgtcaactttcctgctgaaccaagaatatcaaattcattagctggtgagaatgtatcatctgatctgtttagcattggtcatggggaatttccttctggcagcattcacggcgaagaaactctttcggccagtggaaaaacgatggaccatgttgatttgttgagagaacagttgaaaattttgtcaggggaggttgcgtttaatacaagtgctcttaagcgcctcacagaggaagctggaagaagcccaaagaacgagaagattcagatggaaatgaagaagaagaccgatgaaattaaggggaagcagcaacagatagcatctttggagagagagatagctcatgcaacattaggaactcaaggaaaggtcgatacgttagagcattcaccgtcttatcatgaactacttgagcagctcaatgagaaatctttagaacttgaggtgaaggctgcagataatagagtgatacaagatcagctgaatgagaagataactgaatgcatggaattgcatgctgaagttactcatctcaaagaacagctgtcccaagctcttgaagctaaggatttggtgtcaaatagcatgatacagaataatagagttaaccgtgaagttgaacaccttgttgatcaagatgttccaagagagatctcttctgaaccacagcaaaaacagcagctaactttcccatcttattagcactatggtcttcagtccgttgaaatcaatgagctgaagcaaaaggtgtctgaactcatggaaatcaaagctcaacttgaggatcgcaatcaaaagctactggaggaaagtacatatgcaaaaggattggcttcagctgctggtgtcgaattgaaggcattgtcagaagaagtgaccaaactgatgaaccaaaatgagaagcttgcgaccgagttgtcatcgctgagaagtccaactccagctccacgcagattcaacaatggaccaagaggtactaggagggaaagcatgagtaggcgagaaccagctagcagacgagacacgaatgcaagccatgaaagggaaaaggctctagaggcattgcttatggagaaggagcaaaaggaagcagagctccaaaggaaagtcgaggagtcaaagcagaaggaagccttcctggaaagtgagcttgccaacatgtgggttctagtagcaaaactgaagaagtcccagggttatgaccatgaggatctggaggccaaacatgatggctcgtgacctcttcagtttagatatctatcggcttggcttgcgtgtgggttttctgtatgtaaggttttggtattcgttttttctcttagcatgaattagtgtctcattctgtatattctccgcgtgttaaatatgccagtagtgccttgcctgactgtgcctagagctttcgatggatgctagagcggcattttgggttcttcaggcacataatctggatttgaagaaacagtgagcaagtgtttggaaatctgacgggtttctgatgcccactcaaatatctaacatgtattagcctgcccatcctgctcaggataacaaatgtgaatatgccctgaagtgtgagctacattgtattagaacactttcgttttcaacatcttcaatactgcttattgtaaaaaaaaaaaaa

SEQ ID NO: 174578 - DNA, 613 bp, Zea mays
  unsure (1)..(613): unsure at all n locations
  Clone ID: MRT4577_90795C.1
gcaaggctgggtagcgccgtgcagggtacccggggccgggaattcccggggtcgacccacgcggccgggggtgtctccgtgccatcccctacgagatctgccccctcgccctcgccctgcgccaatccccatctccttgcgggccgatccaccctgcgccaatcccccggggatgggcgtgtgcaaatgccgaaaggggacgagggggtactgggtcgggcatcaaggccccgggtgtggggtgtgcatatgcgtcccggaacatcagcgatgggtggggaataactatgcggaatggggtgtgaattctgaggatgactgggcacaacactgtgtcggttgcgattctgtgctcgaaggggggactgaanaaacaacacgattggggtgcgtgcgtgggggacacaccaaatgcgtgagatcacatatccaaagtgttcctacccaaacagcgccagatggatacggctgcccctcctgtgctgcacccatatgggcaccttctancattaaagatacaggggcgcgccttcacactgaactgaaagaagcgataggccagactgggatggggaaaaatgtgtgtggaaatcattatgtgacaatagcgaaa

SEQ ID NO: 174579 - DNA, 352 bp, Zea mays
  Clone ID: MRT4577_90796C.1
ttcaacatcccatccccacctccacggctgggggctacctccttcttcacctacttgctctttcacttcctatcctacttacaccttttttccatatttctcacaccacttcctttctcctctgactgcctcaacattctattccccaactataccctccttcttgctacaataacccatcacaccatgcatcttactgtcctagcattcactgtccatcaaccatatgccctatcgctacagccatccttagtgcatctatatcttcaaacattcgtatcacatcaacttcaacatcaattgcttacaactattaatcacgtccttgcagcgaaccttgatgcttaccttc

SEQ ID NO: 174580 - DNA, 301 bp, Zea mays
  Clone ID: MRT4577_90797C.1
acgaagcaacataccataacccccgtccttttcgtgagcaaaccgggccacgtcgcgggggagcttatgccacaccctttatttgatccgaagttattgtagcggatcgaaactttcttctatcacattgggaggcactacttgatacactggttcatgcaacggtcaatgaatttcatattttgcaaaaagctttccctctataaacactgactcttgcttgccagcaccaacaaatatggatgcatgaccgccccaaaaatggagagcatgcttgcagaaacaagcatcttcttcctta

SEQ ID NO: 174581 - DNA, 2642 bp, Zea mays
  unsure (1)..(2642): unsure at all n locations
  Clone ID: MRT4577_90798C.1
ggccgctttttttttttttttttaaacaaaagaaactgtgcatggtatgcactactgagcaacacacaggtttcagcaacataattgaaggttgacactggctccactacaagtgtactagataataatacagacactgcctctggcgacagtcctacactacatagatcctcctctccgggagctccaacgtatatatataaaggctaaaggcgaagaggtccatactgagggcaactgctggcgcttcagcatataaattcatgcacaacccaactggtgacggtttctgcaattggatcccaagccacccggaacaacagccatgagcatgccagaccgcgtgcgcacgtccggcgcttactcgcacttgatggagcggtagatgtggcgcacgaagaagagcgacgcgcggaagccgaccgttcccagcatgaggaagaagccgtagcacacgcaggtcatgtagccgaagaagaaggacgtctgcatgaaccccgacatgtccgaccgcgcgtggtagtagtagatgcagtagaagaatatgaatatgcctgtcgagcctccgcacaggacagatctccaccaccactggtggtcttcgacggcgagctggaagtaggtgagcgccaccgtgacgaaggccgtgacgatgatgaggatgatgaacacgatgaagaggatgctgtagatggtgtaaatcttgtgcccccagatgctcgcgaagatgtagtacagctcgatgtagatcgcgctgaacgggaggaaccccgccatggccatctgagggacggtgctgcggtaccacgggagctgggggatctccctcgggtacttggtcgtgcggcagggggcttggaactcagtgtcgctgttcttcccggctatgccgcccagcacgaggagaggagaggtcacgagcgcccagatgaggatgatgacgatgatggtgccgaaaggcagggctgccgtggcgctgtacgctattgcgactgtgttcaggaagcagaacgtcaggaagagaggtccgccagaataggcagccagtcaataccagattcctgacccagtttgtgccctccagttgcagatagaaagaagtggctgtgtatccagcgataccggacgtgagagcgtagatgacaacgagggcagtgaagagagctccccggttgtatgggtagaagacgccgacaagagcgaggaggaagatgaaaatcgcaagggcgagaagctgagttccagaaccaataattgctgcaaaaacggacttctgtttggggaaacggaatacatcaccgtgaatgtacttccacccagtctcctcttggtcttcaagggactcgtcttcatgagaatacttgatgaagtcgttcttgagaacacgcatcaagatggtggccaggaaaccggtcaggaggagcactgtgacgcacgagttgattatagaaaaccagtggatctctaggtgttgtggcatagaggaagacttggagtacttatccattcttttctcgaaaggaatgtctgtctttttccatgtcgccgaataagagaactctatcggcacttccttgtcctccgtgatatccacggccacatttggatcggtctgtacattgatttctatgacgcggttgtcgttgtacatgatgtcgaagtggatgtgcttgaacagtaggtatttcacgtctccttgctccttgtccttgtccagtttaccgaggaatccccatagtggcaaatcatcgtagtacatctggaagtagtaatccttggcgactgcatcccggagcttggcaacttgctccttcgacaacactttcttgcagagaaccttggagttcctgtcttccttgaagttcaactcgtatggggcatcaaccaaccggtcgccatttagaacctcgccaagagcttcctttttgtcctttggatgttctggtgcacaaaagggtagatcatagtaccgatacgtctcacttggattgtggaaaggcccgaccttgttggcgtagagaggaacatgatccccttccttgtacttatgatcagagccatcagctctggctcccagtgcacaagccaaaactaccacagcaagaacagcacccgcccccgtactcgccatctccgcaagcaccaagatccaaactttccacccggataaagctcaggcgtcaaaatgacgagacactgtcgggagatttcagcgggaaagcgtccaaacggcgccgctcccgcaccgctgcgggggcggctgatttggtgcgaacccgtcgatggggcggcggaattgggtgagaaccgtcgactggggaggggcgcttggggatgcaactgccggggatctgctgggcaaagaagctcgggcagattttgggaggaagaaccggacacgggaggagatgtattgaaagttcaatagtttttatggtttgtctggtcaagcagcttgggaatggagaaatctcttggatctatggaaggagccggccgtgtttctccttttgacttcaggcaactcgccccctccaggccgccaatttttttttttttttttttttttttttttttggttttttttttttttttttttttttttnaaanntnntcnncggccggcctcgagggtcccaatg

SEQ ID NO: 174582 - DNA, 269 bp, Zea mays
  Clone ID: MRT4577_90799C.1
cactcacatcgaattaccccaggtaagccaagatcgtcacgaaacgccctatctaattagatctacgaaatttaccacgaccagggggaggacaaaggactcgaatcagacgcatcaagacctctgctctggctgatgttctagcaggacgggccgaaatccgtcatgaaatcttggctgtcgaaagccatccgctggaacagcctgatctcgaccgtgctcgctacgttgaagatctcgctctttcctggctgcactccgttagttag

SEQ ID NO: 174583 - DNA, 292 bp, Zea mays
  Clone ID: MRT4577_9079C.1
gcattggagaccaccagcaaacgctgggatagatgccatgatacactacagagccgtgctgctggtggctatgcctgataacaatatcaccattaccactggcgtaagtcatgggcctctggaggccattcttcttctgaaggggaggtcatgggatggatcttgtgattgatcgcgctcctctcgctgtggaacatgtgcaaccgctatgtctcactgacgtggacctactaagaagtagctctctccgtgtacgaggacctagacgagcttgttgacaacaagcctaatt

SEQ ID NO: 174584 - DNA, 506 bp, Zea mays
  Clone ID: MRT4577_907C.1
taaaaaaaaaaaaaaaaaaaaaaaaaaaaaaaaaaaaaaaaaaaaaaaaaaaaaaaaaaaaaaaaaaaaaaaaaaaaaaaaaaaaaaaaaaaaaaaaaaaaaaaaaaaaggaaaaaacaattttaaaaggggggcgggccttttttagggggttcccttgctttcctttttgcttgctttttggctgcccccttttttttttggggtggccctgaatttttttcccctgggccggcgggttaaaaccttgggggttcgcggaaattccttggccttgccccactttactcccttttgggggcctgtcccatttgcccccggggggccgccctgtctggcggggcccagcccgtgggggcctttcgaagggggaccgggcccctgcctggcaatgggggccttccccctggcggggggtttttggttcccggccgttgtgcgcggttcccttctcctggggcccgtttcccttgcccggttgcctttgcctcccgtttctttttggt

SEQ ID NO: 174585 - DNA, 1827 bp, Zea mays
  Clone ID: MRT4577_90800C.1
cattgggtacctcgaggccggcctgaccggccgggacaccgaaatatccgcgtggcgtggactcgggcaccactctccattcctgcatcccattcccatctcttcttcgcctcctccgcctcgccggcgtcaccgtccggtcccgcctctcccccccgctcgaagctcgatctcttctcccgttctccgcccacgcaatccctgccaccgccgaatgcggaacactcgcctttggtgaccgactgacctaccctgcttctgccgggttagttgagtgtccgcgcctaccggaccccgcgccgcgtccggatctcgaatgcgccgccgccgccgtcgcgcgatctagcggctgcgcgctgccccgcaggagggtagagctccaggggcccggtgtggtcaggcggcagatatggcaacggaggcgtccacctctgcggcgggcgggatctgggtggaggggatgtccgcggacaacataaaggggctggtgctcgcgctctcctccagcttcttcatcggggccagcttcatcgtcaagaagaaggggcttaagaaggccggtgcgtccggcgtccgcgcaggtgttggtggttactcttacttgtatgaaccattatggtgggcaggaatgattacaatgattgttggagaagtggctaactttgcagcatatgcttttgctcctgctatcttggtcacaccacttggtgcccttagcatcataattagtgctgctcttgcagacattatgttgaaggaaaagctgcatatatttggtatacttgggtgtgttctttgtgttgtgggttcaacaactattgtacttcatgcccctcaggagcgcacaattgaatctgtagcagaagtgtgggatcttgctactgaaccagcctttctatcttatgctgccattgttcttgctgcaacatttgtcctcatatactactttattccacgatatggtcagacacacatcatggtctatattggtgtttgttcccttgtaggatctctgtcggtcatgagtgtgaaagctcttggaatagccttgaaactgaccttttctggcatgaatcagctaatttatccacaaacatggttgttcaccattgttgttgttgcatgtatagtaacacagatgaactacctgaacaaggctcttgatactttcaacacagcagttgtatcaccgatatactatacaatgttcacgtcactaaccattttggctagcgtgataatgttcaaggactgggatcgtcaaaatccaactcaaattgtaacagagatgtgtggttttgttaccattctttcggggacgtttcttctccacaagacaaaagacatggttgatggcctcccgccaactctacctgtccggattcctaaacatgaggacgatgcagctgaaggaatccctctcaggtctgctgaaggcatcccgctcagatcaccgagggcaacggaatcgtttcgatcaacgctataatggttggtgatccttcttcaaaggccatgctcagccattctttcatttgatacacacctttgtagattgtattttaggattccaaaaggtaaaggcaccgctccccatgtaatttttttgagacaccggtgtagagtattgggggaacttatgttatacatctcgaaatgcccagaatgggcttagatccagatttttatagacaccagacaccacggtggcatacaagacccgttatcagcgacacagttactgttgtattcttttggatagaaaattagaagataggggaagaatctgaagaaggctcctcgaaaaaaaaaaaaaaaaaagcggcc

SEQ ID NO: 174586 - DNA, 276 bp, Zea mays
  Clone ID: MRT4577_90801C.1
ccttttctcaaatctcctgcccggtccccgccgtttctctttcctgttttcgcggcccatgtgttccatgtctcgcgggttagcttgtgggggttgttgtcgtttttcttttttttgcccccgccgcccgtgcgttggggggggggggggctttttttttttttttctgcggcccggttcttttgcctttgttgcgggggccctcctccccttcgtcggcgttgttttcggtttcgcctgggcgtcttgttgttgtctttgttctggtcctgtgtt

SEQ ID NO: 174587 - DNA, 729 bp, Zea mays
  Clone ID: MRT4577_90802C.1
ttgggcttaatcactctgtatttggtaaggtaaaaggagttcagctgtcatcgtatctgcaacactcaatctcatatttatctcctagtccagctccttcaccatctccatatccatccccctctccatcaccttctacaagtgtaccaccatctttgtcaccatctgggagtgtcccgtaccttgcacccccaacctctagtccctcccctcgggcttctccccctttaccaaaccaccccccttgttttccatgttctgactgtaacccctttcctccagctggtaggccaatgttaaaaccaccctgctttggtagtggccctaagctgcctccatttgtgcattcaccacagccatctgctgttccatccccccccagttcataaaccataccttcctccagcatttccaccaatccctggccgtgtagatcctccccatcccttaccatcccccaatcatgtaccaaacgcagtccctggaccaacttatcaaatgatgccgataccttcacccccagtgcctcattttcgacattccattcctccacggaagaaacgaagtggcacaacaaccaagtctcctccaattgctccatctccgtattctctcctccattcctgaagtgatggtcagattgcttccaatgtatctgctccattgttcacaaatctatcctgaatatgaggtcgatgtggttgcaattttgctgcttggaacttcctg

SEQ ID NO: 174588 - DNA, 383 bp, Zea mays
  Clone ID: MRT4577_90803C.1
ctgtggacggcctttccttttttttttttttccaaacatactcaattatactctatgggggatcaatgctaacgggaaaaggaacatttaaacctactaagaccagcaacacaaaacaaaaccgcatagttatgcatagcaaaggacgcacgcctctcatacaatctttgtacatctgtagccatagcccctgcctgccttgcaagaccagccagccacgttcaagcttgaaccacatgtaatattgttcaaagtacaaatgcaacacacatggccgttgcatagcctttacgaactatcaatgccaccaacacccttgagccagtagatctgctcctatcccatattgtactggtacagcaacaacaaagaacttcatccct

SEQ ID NO: 174589 - DNA, 266 bp, Zea mays
  unsure (1)..(266): unsure at all n locations
  Clone ID: MRT4577_90804C.1
cacgaaccaaagccgccgtgggggggaagccactgcgaccgaactgtgcgtggccgccgccgtggcaaaacgctaatgccgtcgcgtcagagacgataggtggttgggacgactcncctggtaccgggggtcacgactgtgaggaattgtgaccggacgtgcagggtgggtcggttaattgctcaccggagcatcacatccgccgtggcgccgcaccttgccatggtcggaccgctcgggcctctttgccgcgaggttacgagtca

SEQ ID NO: 174590 - DNA, 380 bp, Zea mays
  Clone ID: MRT4577_90805C.1
attcggctcgaggcagatctaggtgaagcgttttgtagtgccagtagatgaccaagagcagctaccttaactgcctcccacggcgtggcgacctagttatcatttaaaggcgactcctcgaagcagacaaaaaacggctaggtcgccaaaacccatggatcatccacctcggtccctatggcaataaaacctacacgcacttggacagactttgagaaaacatggggaacaaaatactactcttcattagcttgaacttttcgcggagatcaaacttagcgtgccacacactgccaaatacgtgattgtgaaaaatagactcttacggatgacgtagcacaggaagccttccacggaggcatcatccttgacccggcagc

SEQ ID NO: 174591 - DNA, 418 bp, Zea mays
  Clone ID: MRT4577_90806C.1
attcggctcgagtgcacgccatttggtcgctcaaccttatcaccggcgccactgccgtctccagtggagggggcagcatcatcagtaagaaaactactcatggtatcctgaatgcgtcgagctgggggcttacgctgcccatgggagccatctttccacgatacctcaagacgttcaggcaggctggcccggcagtggcctacctgcagcgagctcgacaaatgctcgcgtacgggaacagggtgtccggctgcccgaccgagattcatctgcgaaacctgtccatggggatcacgtactcactacacaggatcattggaatcacagactccgatctaggcactctgcagatctttacgctcttcctgaggccgaaaacggaccacaggttccggagtgcctgagacgcctaccacca

SEQ ID NO: 174592 - DNA, 579 bp, Zea mays
  unsure (1)..(579): unsure at all n locations
  Clone ID: MRT4577_90807C.1
ccccgggnncgacccacgcgncctttttggacgcgggcggccaccaccccggggggggggggggggggcanagcaaaacaaagaaaccgcngggcgcggagggagccagcgnngaacaggggaacggggaccanaacggnagaannnaaaagggaaancccaacaaanncnncngggaccacagggacaaaggggcaacnggccaaaaccccnnaagaggacgggccgacggggcattttttttttttcnaaanaaaccnaagggccaanccagccgaaccgagcnagcnagacgcancaacacnnagcaaccggcagggangaaccggggcnggaggaagggggagacacaagcancgcggcancagcacccgaaaggccgncaacggcagggacgagcacaccngcgacangaacagcagcaaagggggcaccaaccgngcgagnncaaggcannngccncnaaaagcaccccnngngcacaanggacggccccggcncancanacccgcccnngggcacangcgggggnngagggaaaacgaccnnagccaanancgcaccacccaaccaggccga

SEQ ID NO: 174593 - DNA, 541 bp, Zea mays
  Clone ID: MRT4577_90808C.1
cgtaagctcggaattcggctggaggacagttcgattcaaaatgttctttgatcgccgcatagctcatgctgtgagggaaatgtaccagaggatgggtgatgcacttgctcatcaatatggaagatctgcggcacataacacggccagaaaatatgctgcagcacatcttaaaaaaagagtacctgccagtcctttggaatgcccataggagccatattccagacgtcaaccactgtcagggtttgcggcttagaacttgacacaagatgggcaggatagctatgtgctatcggctgttggggtgccagctggtgtcagacatgcagtactggccaatgaacacaacttgaggttttccctgagaggcaagggaaatggaacgttactactaagtctcgggagtgcctgaaatcaagaaaacggtattacagtcatgcttacactgctcgtgagaagcaagaagctatagatctatttctggggtcttttcatccacaaccaggtaaaccagctcttaggtggtaggcactgattactgtct

SEQ ID NO: 174594 - DNA, 444 bp, Zea mays
  Clone ID: MRT4577_90809C.1
atgcaggtagctgatgtcggcggcgggctgctgctcctaccacctgcaccaccagttttatgagtgcaaatttcggttcgagatctgaaacccgggggggggccacgaaaacatccagtcacactcttgaaaaattttttgtgggtgtgagctcttacgctcttaaacacctcccaaaacatctcaacacgctcatgatcctgaaaaaagaccccatctcttctctagataagatcaacaaatgtgctctccccttagcgcgcgggggcgtgtattagatatttgacaccttgtgtcatacccccagtggcccatcacctgctcaaagtggcacaggagcaccaactacacgtgtgggctcttgcgcggatagctctcactccatgtatatagagggatattgggtggttaaaaaccccacacatgtaactcttatcgcacgcg

SEQ ID NO: 174595 - DNA, 141 bp, Zea mays
  Clone ID: MRT4577_9080C.1
gtccagaagcgacgccgacgcagtctaggattacctgatctcatccgcagcgacagagcagggaggcagacccacccgagccagcaacccatggccgacgagacgccgcgaatactgctcgcgatcgcgggcctaacccta

SEQ ID NO: 174596 - DNA, 522 bp, Zea mays
  unsure (1)..(522): unsure at all n locations
  Clone ID: MRT4577_90810C.1
ccggccgggctcggcagcctactccactgagctcatcaagtcacgcaccgcactcactcagctcggctcagctctctgagtcactctgaccacgtacgtacgagcgaacaaggcaatggcatcgtcgctcccggcgttcacggtgcggcgcggggacccggtgctggtggcgccggcggggccgacgccgcgggagacgaagccgctgtcggacatcgacgacgccgagggcatgcgcttctacagctccgggatccacctgtaccgcgccaacccggccaaggccgggcaggacccggccagggtcatccgcgacgcgctggcccgggcgctcgtcccctactaccctctcgccggccgcctccgcgaggtggaaggaaggaagctcgtggtggactgcgccgcgcagggcgtcatgttcgcggaagccgacgccgacggcctcaccggcggcgacttcggggacgtgcagagcccgccgttccccggcttcgagngttcatcctggagagcacccaccgg

SEQ ID NO: 174597 - DNA, 270 bp, Zea mays
  Clone ID: MRT4577_90811C.1
aggaccggaggtacatgggccaggctctgcgcctcgcctcggggcgcgtgaagccccctgccgcgcccttcgctgcctgagaggcaacctgactctcccccgcctccgccccaggcgtcgcctgcgcctgctggcggcgcgacgcaagaccggctctactggctatctggtgacgatatcacggctccacagatcaccgtcatggtgtactagaggaacgtgatccatgttcgacgagatgctcacgcacatgtgcgggagaatcactac

SEQ ID NO: 174598 - DNA, 747 bp, Zea mays
  unsure (1)..(747): unsure at all n locations
  Clone ID: MRT4577_90812C.1
accttctttccttcccctcccaacttcgacccttcccctgtccatctctctccttttttttttggtttcctcgcgtttaaagcttcgaggccgaatcgacctccagttctcgagacgactcgtctccctctttcaataagttcggcagggtaggacggcttcttcctctgcgccttcaccttcgcctgcgctgccggggctcgtcggtgagttcgatttctctctccgcctttctgaatctgttcgtctcgtggtagggggtagagctgaagggtcgagctttacacgcgtcgaacaatacggtaagtcgaaacgtaagagagctagggtttcggactttgggagagcagcttggttggattgctgttgctgcattcttaaagggggtttgatggacgactgattggcagcgttgcgttgccctgtgcggattctctgtgttttggtcaagcaaagttataaaccttactgtttaagttttgtgagaccatggattgtttgggcatgacgtttctgggctgctttcggtgttcttatgcaaccacaggacctttgagactcccaacagaaataggttacaaactcaaacaagtagattctccaaattttcatgacatgtactttccgtagaatcaatcctttgntggggttggtctttcaatacaacagtgccacctcgcagactctaatgaagcttatggttggatgggtgcacatgaatgcatgatgcgctgtatgctactccct

SEQ ID NO: 174599 - DNA, 249 bp, Zea mays
  Clone ID: MRT4577_90813C.1
ccgtcctaggccttgacgctgtttcctgtgcagtgctcactgccaagagctcccacgcatgccactatctacaccagcttttgaaccgctaaccgctgaatctctgcctttgagcgagctcaggattctgcgcaggagcgaccttcggtcagccgacgatggctacctcatcgatgtcctccaccactgggcgctcactcgctgccgagctgttacaccgcaccttgcgcactgctctgaccatgctcg

SEQ ID NO: 174600 - DNA, 220 bp, Zea mays
  Clone ID: MRT4577_90814C.1
ttgttttgttttacaaacaaaacgcaggttattccattcgtagaatcgtacggaatatccactaagcacaacaatcatatgttacgaatggattgtagccacaactacaatagaaaaataccgatgggtctaccggtagtggcaaaattattcaccaggcttcagctctacacataaagaaacgcatacctacataccagatataccacataacacccta

SEQ ID NO: 174601 - DNA, 758 bp, Zea mays
  unsure (1)..(758): unsure at all n locations
  Clone ID: MRT4577_90815C.1
gtaccctcgggtctcggccgggnacccgagaatacaatacgaaacgaattaatccccaatcaacacagcaagtcaccaacaagcaaagcagcgatccgagagatggacgcgaggatgttcgggctggagaaccccctggtggcggcgctgcatcacctgctggacgcgcgcgccatggcggccaccccggccgacgtcaaggagctcgcgggagcgtacgcgttcgtggtggacatgccggggctgagcacgggcgacatcagggtgcaggtggaggacgagcgggttcttgtgatcagcggcgagcggcgccgggaggagcggaggacgccaagtacctgcgcatggagcggcggatgggcaagttcatgcgcaagttcgtgctgccggacaacgccgacgtggacaaggtcgccgccgtgtgcagggacggcgtgctcacggtgaccgtcgagaagctgcccccgccggagcccaagaagcccaagaccatcgagattaaggtcgcctgagtgtagaccgttgtcggagcagtgccagtgagctgggtggcaacctgcgggactctggtgaggaagagcaaatggtagaaagcagtagctgtgcttctgaacattgtgtgtgtttgtttcccttgttaccgccaatcatcctacctgatgtgtcgtctggggtttcgtttgaaccatgctgggtttggagctttgtatgccaaaaaaaaaaaaaaaaaaaaaaaaaaaaaaaaactcgagggaggg

SEQ ID NO: 174602 - DNA, 349 bp, Zea mays
  Clone ID: MRT4577_90816C.1
gcggccgggaccgtgatctagtccgcctgactctcctcctacaaagctcggcgccaccggggaccgccaccctcgagcactaccaacacttgaggccaggttaggctgcttggaggtttagagggctccacgatatgctcaagtccttgcacagcgtcacttagatctgcaagagtcatgccatgatcagttccaccatccactttaatgatcttcgggcgggcggtcatgcaagggtccaggctacatttaacagttgcagcgcgcgccttgcacccccatcgggcaagatcgagcaccaactcttcgcgagtcttaccctacaaaccattgctacagcccttcctct

SEQ ID NO: 174603 - DNA, 417 bp, Zea mays
  Clone ID: MRT4577_90819C.1
cccacgcgtccgaaaaaaaaaaaaaaaaaaaaaaaaaaaaaaaaaaaaaaaaaaaaaaaggaaaaaaaaaaaaaaaaaaaaaaaaaaaaaaaaaaaaaaaaaaaaaaaaaaaaaaaaaaaaaaaaaaaaaaaaaaaaaaaaggggggggccgttttaagggatccaagtttacttccgggggcttgcgacgtaatagtttttttttgggggccccaaaattaaattcatgggccggggttttaaaacgtggggatgggaaaaaccttggggttcccaaattaaatggctttggaaaaaatcccctttttgccagttggggtaatagcaaaaaggcccgccccgatcgcctttccaaaaatttgcccaccctaaatggaaaaggggaccccccctttaacgggcctttaaacgcgggg

SEQ ID NO: 174604 - DNA, 208 bp, Zea mays
  unsure (1)..(208): unsure at all n locations
  Clone ID: MRT4577_9081C.1
cgtccgcggnacgcgtgggncggcccgcccgcgnatcgttanaacgtaggctcgtctctctctcctccctgttcttctcccgcgcggcgacgggtgggacgacgnnnaccgcgcgnagcngnnccgccgnnactnccctnactnnngcatcagggggtgcctncnnggcctnntcgtcgtgggctctnnccgccggcnannacgagta

SEQ ID NO: 174605 - DNA, 386 bp, Zea mays
  Clone ID: MRT4577_90820C.1
ggcttgcatgcctgtgtagtaattgtatatgatataaataaaacacctttttttgaatttcaaactttggaaatggggagggggggaattagccatttgtttttttaagacttatttccaagttattaatttattaaaataatttggggaaattagaatgggagcgctatagctgcctaaattatccgatatttgaaaatgccatgttgagctcctagaccttgggaccaaaaaccctgcgctggtcctcgccccccttgatcaagaggaacgtggggagagccttaactttgaagttttttacaacatgtttaaacttattaaagatcacttgggaaaatacggcctcactctttttagaggtggccaaaacccaaaacagggac

SEQ ID NO: 174606 - DNA, 295 bp, Zea mays
  Clone ID: MRT4577_90821C.1
atgacacatgtgaggagccaaaatatcactagtgtcttctagaatatcgacgtcaacattactctggtcttcaacaaaaccaacatttagttcgagcttgttacactttgttgtataattaacaagtctatttcacattccttgtaatctgtacaactcaagagtcagtatctagctatcaagttattgtgtcaaaaaaaaaaaaaaaaaaaaaaaaaaaaaaaaaggcagacaacaaaaaaaagaaaacaaaagggggggcgaccactgactagcgggttctcccgccctaaaa

SEQ ID NO: 174607 - DNA, 477 bp, Zea mays
  Clone ID: MRT4577_90822C.1
cattgtacaaagtcgcctacctgaattacgtgtcaatgtatgtgttcactgtgaaatattctgacgtgaaaacggcccgccaggaaggcttcgtaaggttataacgaatgactgctacgcatgcatattagcacgctgccaatcaactaatctgatatactcgatcgctagttagccaagttgcacactcagcacttataacctgtagccgccgtcttggtcccttcctacaaacttggtgatcgacgacgcgaatttcgtgaagaggctccctgttggcgccaggagttaccgcgctgctgactctgagcctgtcagacctggcgggcccacatcccctgactccttgcctgttccggctagaaggcgtaagtctgaacctcaccggctatgtgaccaataacccgcaacctccgctggagtttgagccgcttgtgcctcgcagctgcgacgcgaggctagaatgcatgctcggtt

SEQ ID NO: 174608 - DNA, 310 bp, Zea mays
  Clone ID: MRT4577_90823C.1
gccacacgtccgtcaactcctacggcctaggtgggaggaggtcgcggacatcatactcaggcggaacgacctccatgcgctgaagaaccggacggctcagggccaggtggcatatacagctgctgaagacctgcagcacagccaggactagtgctccgtggcatacccagcagcctcaccgtctgagcatcaaaccgcagatggcacatgcgcacctgcgtacaccacacaataataaggtggcgggggagggggctacctcaccacatagacgtgacaatgttttttactgaattatatggacatgcaa

SEQ ID NO: 174609 - DNA, 452 bp, Zea mays
  Clone ID: MRT4577_90824C.1
aaaacccgccgcgggggggggggggggaaaatccccaaacatggaacaggggggggcgttcgtccaaaagccccccgttgtttacaggccccctttttgaccggcgatcgaacgctttaacccacggggggggttcaatttgggtttacaaaccccgcccccccttgttttttatgcctggggccctgggctgggcgggacccgatcgacggggacccccgccggcccttgggggaacgagcaaataaatggcagggcgtggggcaaaaacaggggggggggaagccccggcacctgcccccggggaaccccttggtccttcaaactttggcccaattggaccgggggggggaggggccccggaacctgggggttttggaatgggaagttcgggccttcggcaccggcaccgggccgacctttggggacaggagcagcagcttgaccagggg

SEQ ID NO: 174610 - DNA, 372 bp, Zea mays
  Clone ID: MRT4577_90825C.1
ttttcttttattttttgaatattacatgtgggttttagttgcattttgtgttgttaatcttacagtctttcacttttaaaagatgtttaaaagacatgagattggatatacttcatatacgcacactaggaaagaatgtgagcaacccctttggagtggggggataaagattatgggaccccttggcgcgaggggtgacaaaaaaacagggcgccccgggacagaggagaatatttatcaaaggcgggtagggcacaacatttagggcgaattcaaacaaaaatgcccccttatggttaaagatggcggccaaaggggggtctacacctgagcgccccgcagagcggtttggccagacttccttacagaaaa

SEQ ID NO: 174611 - DNA, 801 bp, Zea mays
  Clone ID: MRT4577_90826C.1
gggcgattccggccgggacgaaaaaaaggatcgtcaaatcttcatactaacccgacgaaccgcagcccaccgtcaagatggtttccgccaagaagcacgtccctatcgtcaagaagcgcacgaagcgtttcgaaaggcatcagcatgatcgcttcatgagggtatccccaagctggcgtaagccaaagggtatcgacagtcgtgtccgccgtcgattccgtggtaccattgccatgccctctatcggctacggatctaacaagaagacccgttacatggctccctccggcttcaaggctttcattgtctcaaacaaatccgacttggagctccttttgatgcacaacaagacccatgctgctgagatcgcccacaacgtttcttcccgaaagcgagttgacatcatcgctcgtgctaagcaacttggagtcaaggtcaccaaccccaaggccaaggttaccaccgaggtttaaaaggaaatggatcggtttttgggctgctttacggttatgcatcggaagggggattgcgttgcttgcggttctggcacataaattatgcatgctagagaataaaaaaacgcgccgttgaacgacaaggatactggcatcaaccgcttaaacagcaaatctctcggagtcagaggggcatgagaaacatccatggtctctactccaaaccgatgagggcgctaaggaggggttaagtaaaaagccttgtgcattacaggcgaggctatgaaataaaaacaaaacccctttgagggccccatcggaaaaaaaaaaaaaaaaacccgcggcc

SEQ ID NO: 174612 - DNA, 984 bp, Zea mays
  Clone ID: MRT4577_90827C.1
ccgggttaggaattaggataggacgtgtaatttattctgcatctgaacctagctttatcagctgcagctttcaagtatatgcatcgatggatgattagattcaaagactaacaaatttaggacgacggcttatacagaatagaatagaatagaaggctggctacgttaattggaagccaatgctctgttttctattttttttatttttgatgggtttcagctatggagctgactctggctctggaaaagctggttaatgagaagctgcacagcctgcatggtgtaagttgctctcacatgcttgtttatttacagagaaatatatattgcgtgcttcgcttaaggcatatatacagacttggataatgtatgtgcagatataaattgaatgagtgttgggtcactacatgtaacatgctattattgtaattaacaggtggcaacaaggtgcaatgatcctcagctgatagacttcatcgagagtgagttcctcgaggagcaggtggaagccataaataaggtctccaagtatgtcgcgcagctgaggagagtgggcaacaaggggcacggttagtctgttgctaataaacttggtttcatctgctatatatgtctcgtgcccaaagttacgatattgttgagacgtggcttgcgtgcaggggtgtggcactttgatcagatgctgcttcaggaaggggcctgaaggccaacaagggtggcgtggacggagctgagctctgggtggtgtattcttttctttttcttttctttccagttggttagtgttttagttgtagaacggtgttgcgttgcccacatgacatgatggatgttacgtggaggattgtctcttatatttgaacattatattgtcgttcgttttttgaacataggatacttttctttctttcttcactttttccccttcaattttactggacgttgcatagttgcggtggagaatccgttctctttctttttctc

SEQ ID NO: 174613 - DNA, 2444 bp, Zea mays
  Clone ID: MRT4577_90828C.1
acttggggtacccctcgggccggccgggagcgtgatagcagagggcggccagcagcagcaaatccctgctccttcctcctccccggccccaaaaccggacaaacccctgctcctcccgccgccgccgccgccgccggggcacgccgggatgcataagccagtggcctccgtcgcctccctatgcccgcagctatggcaccgccacttccgtcgcgctcccctcctcccccgcgcccgcggcctcccctcctcctctcctatcctcacacgccgccgctccgtactcccccgttccacttccactcacctcgccgcggtgtcaaccgccgccgccgccgtcgaggccccatcagccacaccgtacccagtgtacgatcggcttctgccgtgccccttgcaggacgaccctccgagaattgagcacctcgtggctcgggaggacgaggtggcagccgatttcatcgccaggtcgctcggcctgcctcctctgtatgctgcagacctcatcgagttcggtgctgtgtactacgcgctcgtcgccccgcagccgcctccctacgcttctccggagcattttaggctctttcgggaagtcaccgagccttccgtcctgcgccggagggcgtccatcaaggggaagacggtgagggaggctcagaagacgttccgggtgacggaccccaaccagcgcctcgaggccggcacctacctgcgtgttcatgtgcatcctaaacggtttccaaggtgctatcaaattgactggaaatccagggtaatagcagtcgctgatgaatacgttgttcttgataaacctgccgcaacatcagttatctgcacagaataaaattcacatccactaatatgagtatgtacaatgtactaccactgcaacatttgacgcagccagaagcacgagttcttggtgaagcaagttttggtttattggatgttgtaggcagctaagttacaaatgaccagtcagtcgctaggttacggttgaacttttctgagtttcagatgataacaacaggtgaattttgaacctttaggtgggcggagcaactgataacattgaggaatcctgtgcagtctttacttcgcgtgcattaggattggaaacgccattgctgacgactcaccagattgacaactgctctgaaggctgtgtggtactatctaaaacgaaagagttctgctctgttttccatggactgataagggagaaacaggttaaaaaactctatcttgcacttactacagcacctgtgtcaacaggaacgattacccattatatgcgcccagttaatcgcgctcctagattagtttctgaaggaatattattcatttttgggtgccgtgaaactgtgtgctctctttatgaacatatgtgcacactgaccaccttttgttgatgctgtggccgctactgaagatagtgaaatactgtattgaaagatggcatctctgtcaaatggaggtactcgattgtaggaaggtaccatggccaagctcttcgatcaggaaagcttacaatgtaaatggttgtgggtggccacagcaagaagctgcttatgaatgtaaaatcaatctcttgacagggaaaactcaccagataagggcacagcttgctgctataggcgctcctattataggggattctgcatacatgactgcagcaatggcagcgatggtcaacccaagcataaacccattcggtagagagaggctgagttacaacagtgaagaggagaaagaagccgccgtcgaagcatggattgcctcccacgggaaggagccaaaatccgtaattgggctgcaagcgtcagagatctcttgggatcacgagggcaagcaccattcttacaaggctggagttccgtggtggtggcaggatcctgactcctgagtgcgatggtggattggatgggggagttccatatgaacccctggaattctcgcctttttagaggacagatgtttttctacattgttccgagtgctgagcgaccactgtccaacacgaacattggtttggtttggttgctgcgcagaaattgttgggtcaccgaaaactgaatttgggcttgggagatgaaactaagcccgagtctgagctctcgaccaggccgacacgaacaccacaccagagctccttcaactgggaaaagcagatccaggccaacacgaacattgctttgctgttcattctagggcatgcaacgtcattcgttctatggctgtagctgtatggttgtgtgcaaggcctagcttctatttgggacagctctcacaataatattccctggagaaaaaaaaaaaaaaaagcggcctctcataaagtcagtgtccgtaacatcaaattttttaaaggcgagcatcttaaaatcgataatggggcgtatggatccctcatttaataggaaatgaagttctctttgccaacc

SEQ ID NO: 174614 - DNA, 364 bp, Zea mays
  unsure (1)..(364): unsure at all n locations
  Clone ID: MRT4577_90829C.1
gacaccttaaaagggcgaaggacagtcatccccggccggagggggcacaaggggccccggccaccggagaagggggcgggcccacgcgcaaaaacaaaaggggaaaacctacaaagaaacggggaaaaacacactaaaaggcgccgataaaaccttaacaacnccccatataaacacaaaccaacaccaaaccggctaaaaaaagctcccaccctgaaaagaaaaggggagctaaacaacagaccccaagaggtcaagacccggaaccaccccatccgccccgccnaggctctgctctcccgggcccgggaggctatcaccagaaagtgcaagggcgccagcagaaaatgcaacaccgccagca

SEQ ID NO: 174615 - DNA, 573 bp, Zea mays
  unsure (1)..(573): unsure at all n locations
  Clone ID: MRT4577_9082C.1
tgcaagaccaacaatgcaacaagcaaggcgcttttgcggcgnnagcgtcttacaacaacccaattgcgccaattgcgaacaaccatatccttgccacattctaacaatacaangccattcacaacgcaacatgcaacaaccagttcctaccagcagctggggggggcgtaggccatgnngtgaacccttgccgccttactttgcaaggagcagcgttgcttgcattccaaacccactttggcgtctgtgcgaacgtatgttgctaaaccagtcaacaacaacatgctacaacagtttcntgccaacgctcagtgcaactagccatgggtgaaccctgctcggctacgtacaacaacaacaactggtttgatgtagcccgctcgctgtgggctatgcacctacatacctgcaacaacaatggttgcagcagattgtaccagttttgactcaactaggtgtggcaaaccctgttggctacttgcaacagttgtttccattcaaccaactgactctttcgaactctgctgcgtacctacaacagggacaacagttacttaatccattggtagtggc

SEQ ID NO: 174616 - DNA, 776 bp, Zea mays
  unsure (1)..(776): unsure at all n locations
  Clone ID: MRT4577_90830C.1
cccacgcgtccgcgcaacatcagtgggcggagcaactgataacattgaggaatcctgtgcagtctttacttcgcgtgcattaggattggaaacgccattgctgacgactcaccagattgacaactgctctgaaggctgtgtggtactatctaaaacgaaagagttctgctctgttttccatggactgataagggagaaacaggttaaaaaactctatcttgcacttactacagcacctgtgtcaacaggaacgattacccattatatgcgcccagttaatcgcgctcctagattagtttctgaagactgtattgaaagatggcatctctgtcaaatggaggtactcgattgtaggaaggtaccatggccaagctcttcgatcaggaaagcttacaatgtaaatggttgtgggtggccacagcaagaagctgcttatgaatgtaaaatcaatctcttgacagggaaaactcaccagataagggcacagcttgctgctataggcgctcctattataggggattctgcatacatgactgcagcaatggcagcgatggtcaacccaagcataaacccattcggtagagagaggctgagttacaacagtgaagaggagaaagaagccgccgtcgaagcatggattgcctcccacgggaaggagccaaaatccgtaattgggctgcaagcgtcagagatctcttgggatcacgagggcaagcaccattcttacaaggctggagttccgnggtggtggcaggatcctgactcctgagtgcgat

SEQ ID NO: 174617 - DNA, 916 bp, Zea mays
  unsure (1)..(916): unsure at all n locations
  Clone ID: MRT4577_90831C.1
ctcgaggccggccggggaaatgttgcttctatatggtactagttcggccaatatgcgttttgtgctttgatgctggcactgttgtcctgacttcaagcatgcatatatctgggtcaggaatattattcatttttgggtgccgtgaaactgtgtgctctctttatgaacatatgtgcacactgaccaccttttgttgatgctgtggccgctactgaagatagtgaaatgtgagtcagcagtttatatctaaaactcgttgattctgcatcaatcgtgtgcatgttgccttctattgttcttaaccactgttttgttgttaataaactctagaagatgaatgatgcataaactcatggcctgaatgcttccaccagaagttttaaataaccttcttgttttagtgtactgcgttttggttgttacattggaatcctttattggtacattgatgttcttcttacttaaccaggctctcctcccacgcactgtattgaaagatggcatctctgtcaaatggaggtactcgattgtagcaaggtaccatggccaagctcttcgatcaggaaagcttacaatgtaaatggttgtgggtggccacagcaagaagctgcttacgaatgtaaaatcaatctcttgacagggaaaactcaccagataagggcacagcttgctgctataggcgctcctattataggggattctgcatacatgactgcagcaatggcagcgatggccaacccaagcataaacccattcggtagagagaggctgagttacaacagtgaagaggagaaagaagccgccgtcgaagcatggattgccttccacgggaaggaaccaaaatccgtaattgggctgcaagcgtcagagatctcttgggatcacganggcaagcaccattcttacaaggctggag

SEQ ID NO: 174618 - DNA, 475 bp, Zea mays
  Clone ID: MRT4577_90832C.1
cacagaataaaattcacatccactaatatgagtatgtacaatgtactaccactgcaacatttgacgcagccagaagcacgagttcttggtgaagcaagttttggtttattggatgttgtaggcagctaagttacaaatgaccagtcagtcgctaggttacggttgaacttttctgagtttcagatgataacaacaggtgaattttgaacctttaggtgggcggagcaactgataacattgaggaatcctgtgcagtctttacttcgcgtgcattaggattggaaacgccattgctgacgactcaccagattgacaactgctctgaaggctggtttgtctatcactttatttgtatatacttatttgctaaaatgtgggaataggcaagcaatgtcatcctttttcgaaactttgcagtgtggtactatctaaaacgaaagagttctgctctgttttccatggactgataagggag

SEQ ID NO: 174619 - DNA, 759 bp, Zea mays
  Clone ID: MRT4577_90833C.1
tgggtacctcgaggccggccgggccgggaatccctttcccaactccccgcaccccggcgcgcaccatgagccgcgccacgccacgccactcctcctcgccctcgcaccatgcccccactccccgcgccagcctcctccatcccctccgccccgccgcggggcgccgccaccgacgccgcccgctcctccgtcaacctcctccgctccctcgcgcgcgcgcggcgcgcggacctgtcccaccgcgcgctgctcctcttccgcacgctgcacgcctccccgtccccgccgccgccgcgctactccctgccggccgcgctctccgcggccgccttcctcgccgcgctcccggagggccgccagctccacgcgctcgccgccaagctcgccctcgcgcccgcgcacaccgtcgtcgccaactccctcgtccacttctacgcctcctgcggccgcccgggcgccgcgctcgccgtcttccgccgcgtcccggaccggtcgctcgtgtcgtggaacaccgccgttgacgcgctcgcgggtaacggggaccacctcgccgcgctcgacctgttccgggagatgcagcgcgacaggcccgacctcgcgcccgacgcctacaccgtgcagagcgtgctcggcgcctgcgcggccaccggcgcgctctcgctcggggtctacgcgcacgcgctgctgctccgggagctcggcggcgcctcggcggtgtcgcgcgacgtgctcatcaacaactcgctcgttgaactctac

SEQ ID NO: 174620 - DNA, 528 bp, Zea mays
  Clone ID: MRT4577_90834C.1
gttttgggtttttttttaccaagatgttttgagtccaacatcattgttaataagctaagaaaattagaacataaagtggacgataagaatttctctaacgcccgtttggatcgtttgacatataccaattaaggcaaataaggcaaataggggggtttgttaagtgaacttcaattcctattaaatgagggatccaaacgccccattatcgattttaagatgcttgcctttaaaaaatttgatgtttcggtcactgactttatgagagacggtctcaccccaactcaatctccagggaatattattgagagctgtcccaaatagaagctaggccttgcacacaaccatacagctacagtcatagaacgaatgacgttgcatgccctagaatgaacagcaaagcaatgttcgtgttggcctggatctgcttttcccagttgaaggagctctggtgtggtgttcgtgttggcctggtcgagagctcagactcgggcttagtttcatcttccaagcccaaattcagttttc

SEQ ID NO: 174621 - DNA, 107 bp, Zea mays
  Clone ID: MRT4577_90835C.1
agctatatctgagcatatatatcacttagaatacccatacattactcggataacaggcaacaacaactgcaccatgaaaagtacttgaacagcatgcttacactcac

SEQ ID NO: 174622 - DNA, 301 bp, Zea mays
  unsure (1)..(301): unsure at all n locations
  Clone ID: MRT4577_90836C.1
tgaggaagtgtttcaacagaaaatnnnccatgaggaggaggacaaataatctgggggaggagtgatnnaggtgcaaaccttattgncaaagttgacaataattatttccggtggggtaaagtttctcatgttactcttgggaaagcagtatatggctcaaaatttaccttagaacccactgnaagtgatttggttgtttgttttaacaccaaatcaagagaggactctcttaatgtgccctaaccggagatgaggctttgctcaatcctttggaaacatatccctcacgatacaggattct

SEQ ID NO: 174623 - DNA, 401 bp, Zea mays
  Clone ID: MRT4577_90837C.1
tggaacctttgggctgatttatgtgcttgcgcgcccctctcagagctccttggtatattaccccaagaaagcccggttcctataggccagtgttctagtacggcgatatcaacccctcgtaacggcgggaaagagccctagtcaccgcagcgaggaaaggaccggatctctctaccacttcgggagtacggacgactcggaagtacaggaatgaagcgacgcctaaaggagccctcttcaactctatctcctcttcggagctcgtcaacgaggaaagggagaaacggtaagccgtaagagttaatggcccacttcccccggtcgtcttcagctgcaacgcccagggatagcggccggggccccccaccccccgacgctccccacggatacccccgcgcacg

SEQ ID NO: 174624 - DNA, 263 bp, Zea mays
  Clone ID: MRT4577_90838C.1
tggggggttatattatgcgatatttggtgacaaacacacagatgtgttggccggcttttgttgcgatggcttccaagaagcagacgcgagcacagatgtcgaataaggacccccattacgcatcgtgctgaaaggtcaaagatgcaatgggaaacttctatgacaaggaataccttcatgcgtgctacggagtgcactcttgtgtctttgctgacgactctattgtgttacgttgccaccacaagctgcatgggcctgatttt

SEQ ID NO: 174625 - DNA, 326 bp, Zea mays
  Clone ID: MRT4577_90839C.1
gtcacagtctcacgctactatcgctatctggagctccggccgtcacagacacgagctagagctgcagggaagaaggaggaggagaatatgagggcgtccgtgctagttggcttcatggcggtgtcggcgtgcatagcatgcatcgcgcatggcggcaacttctaccaggacacggagatgacctgggggcaggggcgcggcaaggtggtggacgggggccgcgggctggacctgagcctggacagggcctccgggtccgggttccagtccaaggacgagtacctgttcggcaagatcgagatgcagatgaagctggtgcctggcaa

SEQ ID NO: 174626 - DNA, 749 bp, Zea mays
  Clone ID: MRT4577_9083C.1
agtgtttgtggtggaagaatgtcagccagcgggtcaaaggggagtggaagcagccgagggcgagccgagtataaaagcggcggcgagaaaggaaagccatataattcccacccaaaggaaagcaaaatattcccatcccaccggcaccacctcctcctccccaagtcaagccccatcgtctcttcagtgttcactggttatcttggaaggacggagaaaccatacagactagactaccatgtcaggaggatcggatgtatcttcaccatcatcgggacgaattagcacgagttctttgtcagacttgaaggacttggagctttcttcagagtctggctgcttgtccattgttgtactaggtgcttctggggaccttgctaaaaagaaaacttttccagcactcttcaacctttttcaacagggatttatacaatctggagaagtccatatatttgggtatgcaagatcagatatatctgatgaagggttaagagaacgcattcgtggatatctcaaaggagcttcagatgaacatctttcacaatttttgcaattaattaagtatgttagtggttcatatgataatggggcaggatttgaattgctaaacaagacaatctctgagaatgaaacatcagagaacaaccaaccaggaaactcccgaagactattttatttggcattacctccttcagtgtacccctcagtatgcaaaatgataagatcatattgcatgactccatcctctc

SEQ ID NO: 174627 - DNA, 359 bp, Zea mays
  unsure (1)..(359): unsure at all n locations
  Clone ID: MRT4577_90840C.1
cggtttcgttttcttgacatgccactaactagtactgcgttgagtttccagtagatatcttcccttcggtagtctatcgcagtgcctcttatactgtcgcgctgacttacaacgcctacctcttatgacgtacaagaaaccaaggcgtccttatgagaaggagcgtgttgatgctgaactgaagctggccgccgcgcatgggctgaggtgcaagcgtgagcttcggagggaccagaaaggagtgaggaggaaccgaaatgctgcttcgctctccctctccctcgacgacaaccaccccccacccaaactcnancccccccccccccctctaccctttttctcttccccccccccccccc

SEQ ID NO: 174628 - DNA, 668 bp, Zea mays
  Clone ID: MRT4577_90841C.1
tttttttttttttttttgaacaggaggcagaaggcgacggatgttattgcgtatgagtttgtttaagttttgcatgcctcttcagaaaccacagactaggtattataccgtcacatgggctggccctgaattacaagagactaggattacacagcccattctgggctcatcacacaaacgttggtgcgtcgagtgcgtttgccgccgagtgctgcctgttccacttccgtctcttccacagcctcctcctccacagaggtgctgacagtcccctctcctttggaagcggcttgtccccaagccggcgcgttcggaaacgcagctttcagggcctcagcgtcctcccatatcgctaaggcgggatcccaacctgaccacaccactttgatttgtggaatcagagctcctcctcgctgaataatgcggtgagccagaacctggacaggcacttgaaaactaggattagcatcaggtaactgaggaaccactgaatgctgacggccgattgaagcttttagttgggaaacatgaaatattggatgtatagaagaggtctccggtaactgaagcttgtacgccacggtgcccacccgttgcagcactgtgtaagggccgaagaatcgaaatgcgagcttttgattcgagcgaactgccacagatgattgaat

SEQ ID NO: 174629 - DNA, 236 bp, Zea mays
  unsure (1)..(236): unsure at all n locations
  Clone ID: MRT4577_90842C.1
gtntcgctacggtgtcgcggcttcgtacagggctctcgcgacgcgatcggccatggcggcgtctctgcgttcctcgtcctccttctgctctcgcctcctctcgttctcctctgggtgntctctgtgtccgtggcgtctcttcttctcttcatctgtccacttggtcgcccccctccagtccgaaaccttctctttcgactagatccagctgtcgccggagaatccggctaccgcca

SEQ ID NO: 174630 - DNA, 263 bp, Zea mays
  unsure (1)..(263): unsure at all n locations
  Clone ID: MRT4577_90843C.1
agccagcccttttttttttttttttttttttttttttttttttttttttttttttttacttggattctttgaccttattcaaaggaaacagcacacagcatgttccatgttcgggtatacatggatccctcgagaggcgaaacaagacgaccgagggccgaaaactgaaacggaaaccaaagcccagtttgaaagaacacacggaaacggagcttcttgggggctagcgccgcctcctcgccggggtngtccaaaaaccaaac

SEQ ID NO: 174631 - DNA, 425 bp, Zea mays
  Clone ID: MRT4577_90844C.1
cttgattttgctgcaattgatggggattctgaagctttgttggtggaaagtagggtaaatttaagtcggatacctaattccccagaaagtacacattgaactcttcctatttcattttaattccttttctgagggtcttgtgccctcagcctaaaaaaaaaaaaaaaaaaaaaaaataaaaaaaaaataaaaaaaaaaaaataaaaaaataaaaaaaataaattaaaaattaattaatagataaaattattaaatgatgaaaaatgcaaaaaacttaattcaatcattggggcggtcctttttgagggtctaagttttcttcccttcgtttactcggtaattgctttttttattgcctccctaaatttaattcattgggcggttttttcaatcggttatctgggaaaacccggggtttcccaaaa

SEQ ID NO: 174632 - DNA, 253 bp, Zea mays
  Clone ID: MRT4577_90845C.1
aggggggggaacaaaaacggcttggcatttcagttccacttgcaacatatttaaccatgtagtccggggaccgggttaatctaacatagttggtggaaaaaaaaacaacccccttttataagttaaccctgttagaagaaaataaaacctgccaaaatcaacatggcttgatcagttagcttcgggcaaaggctttatttgccacggtcccacacttccaacgggtttccatccatcatgacctgggcaatta

SEQ ID NO: 174633 - DNA, 396 bp, Zea mays
  unsure (1)..(396): unsure at all n locations
  Clone ID: MRT4577_90846C.1
cagcagcccacgcnccccaggcgagccaggggaagaagagcagcccggggcacacgaggccgaggggccgggcaggcgccgcgcgcacgcggccccggccccggggaggggggggaggccgccanccagcccgagaaggcaacggaccagggggggcagcccagcaacggcgacccgngcaacggcagccnggagacgcccggcaccgccagcccgcgcaccgggggggaccgcnccaaccggccgggcaaccgcaccgccgngagcccgccgcgggggggcggcgagggcggccgggggcacggacaccggccggccgggcccggcgggcgcaccgggccgcnccgaacacgcccgcgcgcggccaggcgggcgcgcccggggccgccggccccg

SEQ ID NO: 174634 - DNA, 183 bp, Zea mays
  Clone ID: MRT4577_90847C.1
cccactcaacacacccatcctccactactaccacactttttccaacctactaaccactcatcatccaatgatactattataacttctgtaaacatccccacctcactctccatcaactcaacaaatacatctactattccacactactcactccccaccaataacactataccacatatcctc

SEQ ID NO: 174635 - DNA, 391 bp, Zea mays
  Clone ID: MRT4577_90848C.1
ctaaaataagtcccatggaggcaaacttataaaaaaggtgggtcaaaatatggagggattgcttaaggcaggcattaataaaaaccggatgcactccatataaattatgcttcttcggagcaattactaatggttaaaaccaacaaataacatttcattttggtggtaggatgacaaatcattggtacttcattcaattcggcaaccttaaacaccatttaatccattgggccaatggggtcttaaaaacgatctaatgtttgcaagaaccaaaaacgtcgtgccgtgcttgggctgtagcctcaacccggaatggttggcccgcccgacacgattatttttttattttacaaaaaaacatatatacctatatacaatttatattcaatat

SEQ ID NO: 174636 - DNA, 559 bp, Zea mays
  Clone ID: MRT4577_90849C.1
ccccgcgtccgccaacacgtgcgcgcgggcggctgctccaccggcagctacaccgacgacgtgtaccacgagttcaaccacggcttcatcccggtctacatcaccgaccgccagttgacatgaagtggtcttcgtcatgctctgataccaccactgtggatgaccaagtacgggcgggtgggtgagcacctctccgtactacccgaccatcgatttcaccaacgaccgccgcacgcactgcttgcccggggtcctggttgggcttcagatccacgacgagctcgctatggacgccgcgcggctgccaatccaccatacgatccaggatttccgtgtgatgctcgatgacgctcaccgggggcgcatccagacgatcatcaaggaggctaataatgaaactggtgctgcgcggagacaggaacatcggggacgccagaggagccggacacgcttcgcgagcaaagttggctgtgaagacacggtttacgatcatctctcgcgacgggtcgagcgcgatccgagaacgagcgcgacctggtgcggcgccggtgtgggcgcc

SEQ ID NO: 174637 - DNA, 663 bp, Zea mays
  unsure (1)..(663): unsure at all n locations
  Clone ID: MRT4577_9084C.1
aattcggcacgaggcttttccctcctcccgcaccccaggccgcagcagcagcaccggcgcaccgccacccactcgccccgcctccgtgcccgcgcaactcgcgcctgcagcgtgtgggagatgtgatcggagcccggccgtcggttcgagtgttttcttctgcctctgggctgtggcgcggggaggaggcaagctggcggtgagatgggtcggtgcggaggaggaagcggagcaggagcaggagggggagctttgggcggctgtgctctcctcaccgccgccttggttatctcaacgctcgtgatccagggcgctggaggccaagatgccccatcatttcatactggcaatgaacttccaaatcctcatctccgtcaagtacctgctgctttgccatctcttccagttcaaccatatgcgcctcatcctaaaatttctgctgacaatccaaccgctgcaccttcttttcaaaagataccctggttgtcattgacttcaccgcctttgcctgcaattgggcgacgaatgcaaagtccagcagcttctccagaaacagcagttcatccagctaaacatggncaggatcatggaactncagtttcagcaccttcaaatgttagtcatcaccatgcgatgcctgcgaatatacacatggaaaaactc

SEQ ID NO: 174638 - DNA, 411 bp, Zea mays
  Clone ID: MRT4577_90850C.1
gtgatagatcgctatagagcattctagatgacgctcgcttacatgcgacttcatacgaggtctagggtgttatataaagtcaactaactggacttcactgtacaacgttttaaatcgtaataacttggaaatacccaacttaacccaactgaatcacattgcactatatccagctttcgtcatatggaataataccgaacagatcggcattgataacacttgcgcacactgaatcacgattaatacgcactgtgacgcgccccattaagcgccattaatctcgtcgttactcgcagttacacccatactgtatcctacactctacagcccgctactttcggttcctttccttactttctctacacttctggccactttccccgtctatccctaaatagctgtatatcttta

SEQ ID NO: 174639 - DNA, 200 bp, Zea mays
  Clone ID: MRT4577_90851C.1
gtgcccagtcatctgattaagcagatccagttcagacgactaacaccgtacgcgatggtcgtgctcacacgtactgcgatccagcagtctctgtattgagccgtcacgctgcatgtctggaccctcatgaaacttatcaggcacccttgcttagtggagatccacctgctggttatctggatactgcataggtgtatgac

SEQ ID NO: 174640 - DNA, 2778 bp, Zea mays
  Clone ID: MRT4577_90852C.1
atggcagttgttgaaaagaaactcgatgatgataatattgtgctccacattgtcaatggacttgatgaatacaacccgctagttgaacagtcgcgggtggtgacaaacaatgctacatgtggtcatagcggtggcttcaagcatgacaaccatggtcattatgatggttgtactaacaatcaaagaggccgagagggttttttccatgatgatactattcatgggggtagtcctaataatccctacaatgatcatcaacacccagtctgtgtcaagcttggtcacacttctggtcattgttttcgtacctatggcaagtcgtcccctatgcccttaaaggcctatcgtcgctggcgcgtccggtggagcagagagaggcaacacgagtctgtaggtgttcggcaatggtgtgtccgagtggagctcaggtcaccgtggtccgagcagtggaggacgatagagttgacgttgagacgtgtcacgagcgttccaaacatcaacgaagtaaacaacgtcggggacgtaggcgaatgtgctcgggttgaaccagaccgctcctttgaagcttggcaattgcatgatggcactagagatgggggtgaggatgttcatgtgctcggagctcggatggggccgttgaggaaccgggactccaaggtgggtcgatggccatctccgacgatggaactattgagattgactgcaacgaggagtgacggttgtgcgggttggctagagatgacgatgaggatgacctccgggaggatgctgcaacgctctttggccatagcagaagatgaaggggacaaacacagtgtcaagcgttgccgtccttctacttctgcagtgtggttagatttcgagaaacttttcaaaatcgtgaatggtaagaaggtaagtggtggcactggccacctcacccgacatagggatagatgtcccaggaggcgtgaaaaaacctgcatgtctcagtctcagatatcttttaatcctgatggtagtatgcgtatctggaagtattgtcctatggttgcacgtaatgaattggttcgattgcttgctaggctagaaattcctattagtttgggtgaaaatgctgcatttgaacactacattagaactgttcataatcctaaatttgtgcctgtctctaggcaaaccaccaccagagacatggttaaatacttcactgacaaaaaggctaagcttgttgagacactttcttcttctgatgttaattgtgtgtgtttgacctctgacatttggtctggtaatgccaaagaggactaccttagtgttgttgcccattacataaaccctgattggcaactagagaaaagggtgcttgctttagttcttattgatgtgtcacacaatggacaaaacattgctgatcatgttgctggtgtgcttgctgattatggcttgactaataaggtgtttgcttttaccctagacaatgcatcatctaatgctgctgccatgaggttgcttagacctataatgtcaccatatcttggtattgataatggggtagaatctgaaatgttcttgcatcagcgttgtgcatgtcatataatcaatttgatagttaaagacgccctagatgctcttaagaatttgattgaaacatttagaactgcaatatcttttttaaactcctctaatcagagaattgctgcatataaaagttattgcattgctactaagattaggcctagaaaattccagttggacatggaggttaggtggaactctacatatctcatgcttaagcatttgtttcctcataagatacatttcactactttcatgcatgcaaactatcctagggctgaaggtgatcaatttattttaactgatgaacattgggttgttggagagaaagtacttaaatttcttgagctattttatgattctacagttgcattgtctggtgtttattatcctacatctccacttatgcttcattttcttgttaagattgctatacatctaaagaactatgctaatgacactcacatcagaggtgtcattcaacctatgatagataaatataataaatattggaggaacatccctttactttactcttttgcattcatcttggaccctagagctaaaatgaaaggttttagtagagtgcttagaagattaatgaacctgacaagtacagattatgctgtttatcaggttaccactagagctaagcttactgatgtttataataaatatgaagagaaatatggatctgttagattgaacagggttgtccctcctaacttgtctggtaagaaacgatctgcttgggatgaaatttatgatgatgctgatgatgtgggtacttctgttggtatgcattcttttgcttctactctaaacattgctagagatacctctgcaactgctctactgcatgctgcaagctcttcagcttctactgcttctgaactcatttcttacttagattgtgacactgtcaaccaattaactgatgatttcaatatcttgcactggtggcatcagcacaaactcacttatccagtactgtcaattatggctaaagatattttaattgttcctgtgtctaccatctattcagaatccacttttagtttaactggcaggatcatcgacgagcggaggaggagattgaagtctgatgtggttgaaatgttgacatgcattaaagattgggaggatgctgaagcaaggatgcaacacatggtggatgacaaagagcttgaagaaacatttgaagatctttatcttgattag

SEQ ID NO: 174641 - DNA, 410 bp, Zea mays
  Clone ID: MRT4577_90853C.1
aggagctcgacggccttaacatcacctttaatcaggaccagtcccgtggcggcggcgggggcggctgtggatactgtcggcggtcgcagcagaggaggctatggtggcgggcgccgcgacggccgctatggcggcggtggatgattcggcggtaggggcgagggttgtagcagcagctacagaagcgtgggccgctactgtacgccgcgcgagggtgaaggtggagggtaccgacgccgaggtgacggctggaagcactgatgtgtggacccattctgactcgggccggggtatgttatctatctatagtatccagttaccggacgcttatgtcaccgtgttagagatcgatctaccttaggattaggtgttgggacccacgttgttccctttgattgcttccgctatga

SEQ ID NO: 174642 - DNA, 263 bp, Zea mays
  unsure (1)..(263): unsure at all n locations
  Clone ID: MRT4577_90854C.1
cttttnttnntttttttttttttttttttttttttttttgggggtttttttttttttttttttttttttttttttttttttncatgangcttaaatttcctttcccccggacgacttattttccgacagacccgatccatatgtttaaaagggtgctttgggttatttggacaattccaggcatttttgcaattgtttttacaaaaatctttttgtttacccccgggggagaccgatgtaggttccccagcctttttttttac

SEQ ID NO: 174643 - DNA, 132 bp, Zea mays
  unsure (1)..(132): unsure at all n locations
  Clone ID: MRT4577_90855C.1
cggggggnnntnnttggggggccttgtttgttccccaaattttaaaaggaatgggttcttcaacttgtttggaactttaacaagttttaccctttttttcgaatgttttcatcaaccttacttcccttttta

SEQ ID NO: 174644 - DNA, 264 bp, Zea mays
  Clone ID: MRT4577_90856C.1
gagctcactagttgtttgccgcccttttttttttttttttttgggggtttttttttttgggaaggggggacgaataaaaataccacctattctcacaacacatttcaaaatgcatacgcgtaataggaatcctctacagagctgttcctgtgcaagaactactttcaactgaccgtgatgcaccggagagtccgggacccaatccaggctggaagggaaattttggagcaaggaaggaaaaatgctttgctggcatggtctaac

SEQ ID NO: 174645 - DNA, 1037 bp, Zea mays
  Clone ID: MRT4577_90857C.1
gtggttctaccgcaaaggaccctccggcttctctggcgcctccacggccgaggaggtcaccgccggcgtcgacggccaccttctggtcgccgtcatcacaggtgcgacgagcggcatcgggctggagacggcgcgcgttctggcgctgcgcggtgtgcgcgtcgtcatggtcgtccgcaacgtctcagccgggctcatggccaaggatgccatcgtggccaagacccccgacgcaagaatcgacgttctggagctggacctcagctccatagcttccgtgcccacgcgcccccccgcggtcggctctctcaaactgcccctcaacattctcatcaacaacgccggagtgatgacaaggcactgcacacgttcctgcgacggtctggagctgcattttgcaacaaatcacatcggtcattttcttctaacaaacctcgtactggagaacatgaagagcacgtgcagggacacaggcaccgagggacggatcgtcaatgtgacatctgcagggcatgtgatgacctatcctgaagggatacgcttcgaaacaatccgtgatccatccggtttgaatgacttcgttgcttacggccaatccaagctcgccaacatccttcatacaaatgaattgtcccggatcttcaaggaggaaggagtgaacatttcagccaattcagttcatcctggtctcatcgccacgaaccttttcagggcctttggcaggaccatcattgccgctttttttaacaccgttggaaggatcatgcgtagaagcgtagaacagggcgctgcgacaacatgctatgtggcagtgcatcctcaagtgaaggggttaagtgggaagtacttcgctaactgtaatatagccagcccgagctcgcaagcctcggatgctgagttggccaagaagctatgggaattcagtctgcagacagtttcttgattaggcgcttgtcagatctgctgatgcgcgtgtattcatgtgtatgtgtatgtttatacatttgaaacagagtaaataaaggtgtatgccgtta

SEQ ID NO: 174646 - DNA, 277 bp, Zea mays
  Clone ID: MRT4577_90858C.1
gtatatagtaatattgtatacttttgattagtccccatattgtgtttgctactgtgccttaaatcccatctgtcatgcgaaattttgaaaatcaaggaaaatcattcagctgttgttggaaatataagaaagtgtgaccttgaattcgaaagggcttcttgtttgggcacatttggtttcaagcttagatcttactaagtaaaatattgaccatgatatagtagttggggctcttctaatttagatagcgtttgaaacagaagtttgaccatacttt

SEQ ID NO: 174647 - DNA, 158 bp, Zea mays
  unsure (1)..(158): unsure at all n locations
  Clone ID: MRT4577_90859C.1
tgattcgctttcgaaccgnactcgccctcctctgttctcttctctcnctcctatatntngcntctcgaannccnntgctttngatcancgtnctcnnccngccgttttccctaatccaantccaatccatggttctccacggntngctccaacgtagt

SEQ ID NO: 174648 - DNA, 182 bp, Zea mays
  Clone ID: MRT4577_9085C.1
aattaactctgtaacttgcagggttacagcacacagaccagagttttggttggaaacttggatgttgctacattgcggacaaatagcttggcagcagtatgacacctacaccatgtgtctaaaggcgctagatctagtcttgctcactactccctccatttgcaatttataggttgtttttg

SEQ ID NO: 174649 - DNA, 138 bp, Zea mays
  Clone ID: MRT4577_90860C.1
tgactctccctgtaacgtcacattatgcgcggcgggtgtcgtggttactctcatcgtgaccgttacacttgtcagtgctctaacgcccactccttttgctttcttaccttactttctcgacacgttcaacggcttttc

SEQ ID NO: 174650 - DNA, 160 bp, Zea mays
  Clone ID: MRT4577_90861C.1
gtggtagaaagaacaccgggctagtaagagcctaggtgcagtaccacgttggagcacaggcggacgtgaaagcatgtgggaagatttatagatagaaggcaaccgcgtggggagagcaccgatgcaaatgagaggatagatccgcacagcttgagaagga

SEQ ID NO: 174651 - DNA, 510 bp, Zea mays
  Clone ID: MRT4577_90862C.1
aaataattaggatgaggttgctgcactgtttaatatgtcataatatatataataatagaaattaacaaatgtttcttcaactcaaatagcatgtagtcactgacagtattgctgtcgttgcattgttgcagcagataactaatgggatatagaaaccaaacagttctcaaatgcttgtctcttcaactgtcatgtttggtttttcatgctatacacactccatgtctcactgcagtccataggaggtattgtcttcctcttcaaatttctcagtggcagcaaaagctagtttcttctcatttggcctccatcgactctcaaacatcttgttcacctgaatggtcatgtcgtgcacagcatgcccccaaggattataagccatagcgttgttaaaggtcagcctggcatccgcagcaaaatcagatggacttgtgcatgagccagattggagcttcttgtggactgttaccaagatccattggatcttgacaatgcaaactaatcaggaat

SEQ ID NO: 174652 - DNA, 471 bp, Zea mays
  unsure (1)..(471): unsure at all n locations
  Clone ID: MRT4577_90863C.1
gggagcaccaaaaagcaccattttttccttaagaataacttaaaaaaaagccggggggggggaaaagcatccatggacccgcagcccatgcgggtggaggcagggggctggtgaaaccgggggtgaacacaggactaaaaacggacacagagggaccttggaataaaaaacacagggggggaaaaacaaacacgaaacgaacgaaaataaacccttgggactgggggaaaaataaggggagggaacaggaaaactggggcgggggggccccaccggtaaatttctcaagttcccgggggagttggcggagccgccgccacgggtgccaccgccggaggcggcggcaccaccaccggaggtgggggcggcaccgtaggcgggggcaccggggggggggggaacggcataagggggggggggaaccggcgtagangggggggttcaggggccccaccgtaccccccccccccc

SEQ ID NO: 174653 - DNA, 454 bp, Zea mays
  Clone ID: MRT4577_90864C.1
tagcgctgagaataccatgcgaacatagcgtactcgacatacttcttactctactactcgctcttgcaaaaccatagcatcacaccagtctcttcagtgctctcaggatgatatatcacatgttgacaatcgcaaagagcaatctgaactgacacatccttgcttatgtcacatttacacactccctagcagcagacactgctgttcttctctcgcggcgcaacaactgtggactgcgctgcctttatacctcctgctgagaactactctgtgcctcctgaaccacactcccactgattgcctatgatccgctctactgcatcaccacggcatgaattcagaaaatcttgggagctgcatgctgttcaagcacttcgtcctcataaaacaccctctcaacctgtcgacatcatatgacgagcggcgctacatcctactcaacgccactgccact

SEQ ID NO: 174654 - DNA, 689 bp, Zea mays
  Clone ID: MRT4577_90865C.1
gccgggactgaggtttgataccagtctaacacgaactacaaaccgaccgagccgcgaacttcacccctgccttctctcccttctccgtccaggccctggtgcccgcgaatctcgtgcggcaagtgggcgccgccgccagactacgccaggtgcccagttcctcgtcgggtataccctttctcttgagctatctggctatttgcatccggatctgatctaattaccgagcgtgtacatacatactaacttcgattttttggaaaaaaatattggaacatccgtgtcctttactgggttctccccctatagaaaattcgagtattagactctacatgtcaagaaattatggcgccaggaagcaaggcggagcggaaagcagtactagatgctggcgcatgaatgttcaatgtcgtcacatctgttggtaccatcatggtcaacaaagccttaatggcgacacatggttttaattagttttggtaggagcgtgccaaatcttcattcctaaggtctaactgcatgcgatgcctgattcacacgcgccttcttttctgtctacaggtaaactactattgtgcagaaaaatcagtctgcttggcttgtgctaatttgttcactactttttgctcctacagctacaacactgactgtacttcatttttgcaatgataatctttgatgaccgtagt

SEQ ID NO: 174655 - DNA, 800 bp, Zea mays
  Clone ID: MRT4577_90866C.1
cctcgagcccggtcggggccgggacgcgaagcggaaggaaccaaacaggcaaacggaacggaacatctcctcggctccttcctcctctggccagctgctgtcgcccctcgcccgccacggcacctcctccacttccagatcttcccgccgtcccaaaaatagtgcccgccaaaaccctaccctccccgcccgtttcctcccctccctcgcggcctccgaccccgcccttccgccgcctgactaataaaccctagcacccacctccgccgctgccatggcgggcccgtccggcgcatcctcctcctcgcgcggcgtcggcggcggcggcgttgaccgcttctacagcccgccccacgtgcgccgccagcagcaggaggagcagctgcagcggctcaagggcctggcccaggggcagcgcacgtcgtccccggcggcggggacgctcacgcccagggccgccaggcagaagacgccaccggctgagacgcccgccccggtcaacgagtccgagaggccggtcgacgcgtcctccaagccgcccgtgtccgcgacggcctccaccgccaaggcggctgcgacggctgatgcggtcacgacctcgccgccggcgcctgcggtgctggatgaggtcgggaatctcgataggttccttatctccaccacgccatctgtgcccgtgcactacctgcccaagaccagcattaggggatggaggattggtgatgttacgaattctcgaccatatttctgccttggagatctctgggaagctttccatgagtggagcttttacggggctg

SEQ ID NO: 174656 - DNA, 387 bp, Zea mays
  unsure (1)..(387): unsure at all n locations
  Clone ID: MRT4577_90867C.1
ccggccggngagaactaccaatccgaccgagccgcgaacttcacccctgccttctctcccttctccgtccagaccctagtgcccgcgaatctcgtgcagcaagtgagcgccgccgccagactacgccaagtgtccagttcctcgtcggaaaatttgagtattagactctacatgtcaagaaagtatggcgccaagaagcaaggcagagcggaaagcagtactaggtgctggcgcatggatgttcaatgtcgtcacatctgttggtatcatcatggtcaacaaagccttaatggcgacacatggttttagttttggtaggagcatgccaaatcttcattcctaactgcatgcaatgcttgatccaaaaaaaaaaaaaaaaaagcggcc

SEQ ID NO: 174657 - DNA, 1388 bp, Zea mays
  unsure (1)..(1388): unsure at all n locations
  Clone ID: MRT4577_90868C.1
gggaccctcgaggccggccgggccgggagtagtgctccactttcatttcagtccggaaccacgaattctgccaaactacgagaatgtaccgagaatgaaggagtgtatactagtctagcaccaaagcgaccgagccgcggatttcacccctgcctttccttctccccgtgtccaggccctggtgcccgcgcgttcccgtgcggcaactggccgccgccgccgcactacgccaggtgcccaattcctcgtcgggtcctccgccggcgacgagcacccaccaggtacgcccttctcttcccttcctgccgtgcgagacccagcacacgaaccctaacttaagctatttggctatttgcatccggatctgatctaattaccagcgtgtgcatgcctactaacttggaatttttctggggaaatatatttttgggacacccgtgtcctttactgggctctcccctacagaaaactggagtggactctacatgtcaaggcagtatggcgccaggaagcaaggcggagaggaaagcagcactagacgctgncgcatggatgttcaatgtcgtcacatccgttggtatcatcatggtcaacaaggccttaatggcgacgcatggttttagtttcgctacaacgttgactggacttcatttcgcgatgacgaccttgatgacattagtaatgaaatggctgngatatattcagccgtcctatctaccgttacctgaactagtaaagtttgccttttttgcaaacctgtcgatcgtcggaatgaatgttagtttgatgtggaactctgttggattctatcagatcgcgaagttgtgtatcattccagtcttatgcattctggaaatcatattcgacaaagttcgttactcaagagatacaaagctcagtatagtgcttgtcttcataggtgttgctgtgtgtactgtgactgatgttagcgtgaactctcaagggctattagctgcagtaatagctgtttggagcacagcactacaacaacatgctttctagaaattgccttccccagaccacaccttgtgtgggagctctcaacattggccaccaatgttttcagatggcctaatcgtttctgatcgccagaggatcaatcagcccgttcagatcgattaatcggacgatcagcccgattaatcacttctgagtccatgctaacaattctcagtttctcatcgccaagtggtcaagcccatcatgtagcaaacaacaagtatgttcaccatcttcaatggaagtactcgcttggctcattcaatctcttaggccatactgctccagcgcaggcagcatcattggtaatagtggggccccttgtggacttctggctgactaacaaaagagttgatgcttttaactac

SEQ ID NO: 174658 - DNA, 207 bp, Zea mays
  Clone ID: MRT4577_90869C.1
ctggttttttttttttttgaaaacagaaactaacagcacagcgtatttgcagctatattccaaactcacaagatccattccttggaaaccgaacacagagagtggcacctacgaatcccaggttgagaaactcttattgacccaaacacgtctaccaagggtgttttcatatacttccttttttgacttttcagaattcagagaagg

SEQ ID NO: 174659 - DNA, 377 bp, Zea mays
  unsure (1)..(377): unsure at all n locations
  Clone ID: MRT4577_9086C.1
aaaaaacataccctgagttcacggagacagcaagggccaggattgtcaatgctggtggcgagtgcctcacatttgaccagcttgctcttcgtgctccacttttctataacccgtcctcttgannnnccccggggggggccgtgattctttttggcactttnncaannctcctggagtgccgcacagccacaccaagccgtttgtgccctccaatggaaggaagttcgagaaggcttttttttggaggaacagccgnggattcaaggtttaaaacaaattttttccctccgtgttgccgtcagcatagtgcaacccttttgttttttcagtcgacagtnattagtcatcactctgtgccgggattatttgcacacttt

SEQ ID NO: 174660 - DNA, 875 bp, Zea mays
  unsure (1)..(875): unsure at all n locations
  Clone ID: MRT4577_90870C.1
accctcgtgggcggccggaggccgggagaacaggaacgaactaccaaaaccgaccgagccgcgaacttcacccctgccttctctcccttctccgtccaggccctggtgcccgagcgttctcgtgcggcaagtgggcgccgccgccggactacgccaggtgcccagttcctcgtcgggtccttcgtcgacgacgagcacccaccaaaaattcgagtattagactctacatgtcaagaaagtatggcgccaggaagcaaggcggagcggaaagcagcactagatgctggcgcatggatgttcaatgtcgtcacatctgttggtatcatcatggtcaacaaaggcttaatggcgactcatggctttagttttgctacaacactgactggacttcattttgcaatgacaaccttgatgacgttagtaatgaaatggctgggatatattcagccatcttatttaccattaccagaactagtaaagtttgccttttttgcaaacctgtcgatcgtcggaatgaacgttagtttgatgtggaactctgttggattctatcagatcgcgaagttgtgtatcattccagtcttatgcattctggaaatcatattcgacaaagttcgttactcaagagatacaaagctcagtatagtgcttgtcctcataggtgttgctgtgtgtactgtgactgatgttagcgtgaactctcaagggctattagctgcagtaatagctgtttggggcacagcactacaacaacattatgttcaccatcttcaatggaagtactcgcttggctcattcattctcttangccatactggctcagcgcaggcagcatcattggtaatagtggggncttttgtggacttctggctgac

SEQ ID NO: 174661 - DNA, 1173 bp, Zea mays
  Clone ID: MRT4577_90871C.1
tggtaaaaatgacgagtccatggaagattcaacaaggaaatgtattgaaatgctttgtgctcctgatggtgagcttcctgagaagctgaggaatctagaacctcgccttattgaacatgtcagtaatgaaataatggatagggatcctaatgtccgctggaatgacatagctggtttggaacatgcaaagaagtgtgtgacagagatggtgatatggccactgctacgtcctgatatattccgtggttgtcggtctcctggaagaggtctactgttgtttggacctcctggaacaggcaaaaccatgattggaaaggcaatagctggtgaagccaaggcaacatttttctacatatctgctagttcactaacaagcaaatggattggtgagggtgaaaaacttgttcgggcactttttggtgtggccagttgtcgtcaacctgctgtcatatttgtggatgagatagactcattattatctcagcgcaaatcagatggtgaacatgaatcaagcaggagactgaaaacacagtttctaattgagatggaaggttttgacaccggaaatgaacagatcttacttataggagcaacaaacagaccccaggaactggatgaagcagcgcgcaggcgactcacgaaacgtctatacatcccccttccttcattagaagcacgggcttggataattcgcaatctattggagaaagatggacttttcatgctctcggaagaagaaacaagtgccatctgtaaattaactgaaggctactcaggatctgacatgaaaaacttggtgaaagatgcctcaatgggaccactaagagaggctcttcagacgggcgttgaaatcgcaaagctcagcaaggaggatatgcggccagtgatgctgaaggatttcgagaatgctatgcgggaggtaagaccttctgtttcctcaagcgagctggggacttatgaagaatggaacaggcagtttgggagcctatcgatctagtctgtcggcaggcatcaacgaatacaatcatgtcggcactatagaaaaaggagctcaacgattttagccggaacatgacatgcataacacagctctacagtttaacaatcttttgaagcatcaaaatttgaactgtctatttggagtgctgagtaatatccaggagcctacatatc

SEQ ID NO: 174662 - DNA, 580 bp, Zea mays
  unsure (1)..(580): unsure at all n locations
  Clone ID: MRT4577_90872C.1
ggnaaatccaagcaaggaacttcgctttaattcaggcctgttcttgcgaggagaaacaaagatgaggtctcaggtgatactcgtcgtcgtcactctggctcttctcggcgtcctcgcagctctgccgctcggcgaaggctcgtcatggccgtgctgcgacaactgcggtgtttgcaacaagaagttcccgccggagtgccagtgcaacgacatctcggcgcgcgggtgccacccggagtgcaagaagtgcgtcaagaacaagttcaccgttcctcccggcggcggccccggccccgtcgtcacctacacctgcgccgacgttcttacaaacttctgccagcgccgctgcacgccggcgccggcgccaccgcctaaggcgttcgtcggtggtgtcttctgatggcatcggccgggacgccgtcgatctgcgctgcaagaatgcaagccaatcaagtcgagtttgcttctctcgagcttcgcttcgtcagagaagaaataaaataaatgtcgccgctctctgctcgaaagatgcttgctcttgtatgtcgtgagtgtattagtactgtttctggaataaaga

SEQ ID NO: 174663 - DNA, 742 bp, Zea mays
  Clone ID: MRT4577_90873C.1
cattgggtacctcgaggccggccgggtctcatcatcgatcatccggccgtccacctcgtgagccgattggcatggcaggcgagcggattaacaagtgatcgcaacccgtgccactcgtgacgttgcccgtctgatgcgacgcgaggcgaggccggcgtgaggaggaggaaccgacgaacggaagcgcgcgctcccgcgcgcggtgcggggcagttaattgcggggcgcacggtggagccctgggagaatagatgggtaccccccctgccccacccgccggtggcagcggcagccttcatgttgggaagcggatctgaggtggcacggacgagcgggcgcgtgatctgcctgtctgtcagtcagccagcctgccacgaggaacggccgggcaaggtggggtgggtggagggctgtcagactgtcactgtggcgggaggcggcagcgggagtggcgcctcctcccgtggctacggctacggctacgagcctgcctctaggatcgcacctcgcgtcggcaagcactcggcagttcggcaccgcaccgcaccgccacaaccaccgcacggacacatgccgccctctccttttctacgccactccatataaaatcgtagtggcatggctcgtacaccagctcgccgtctcgacgggcgcggcgcatctccagagcctgtactggcacaactttatcagccattgaaggaggcgatgccgggcagccactgtacaggccgttgggaaa

SEQ ID NO: 174664 - DNA, 1745 bp, Zea mays
  Clone ID: MRT4577_90874C.1
cacccctgccttctctcccttctccgtccaggccctagtgcccgcgaatctcgtgcagcaagtgagcgccgccgccagactacgccaagtgtccagttcctcgtcgggtataccctttctcttccttttctgctgtgtggtacctagcaccatcggaaccctaacttgagctatctggctatttgcatccggatctaatctaattaccaagcatgtacatacatactaacttcgattttttggaaaaatattggaacatctgtgtcctttactgggttctccccctatagaaaatttgagtattagactctacatgtcaagaaagtatggcgccaagaagcaaggcagagcggaaagcagtactaggtgctggcgcatggatgttcaatgtcgtcacatctgttggtatcatcatggtcaacaaagccttaatggcgacacatggttttagttttggtaggagcatgctaaatcttcattcctaactgcatgcaatgcttgattcacatgcgccttcttttctgtctaaaagtgaactactattgtgcagaaaaatcagtttgcttgtcttgtgctaatttgttcactactttttgctcctacagctacaacactgactgtacttcatttttgcaatgataaccttgatgacgttagtaatggaaacgtgtcacatgatgaatgtcctcagtcctctgctatataaaaagaagaaaatgagtggagtctgccaagcaaacagtctgctaggcaaaataccaaagaccaaaggagactcgcggaaagaaaagagagagtaaaaaagataaaaagaagaaagaggaagagtcacaattattcaacatacatctctgaacatcctttgctaatgagtagattaaaacattaataaaacatttgcatgtagattatcaacaaaagagaatacactaaccatttgaaataattaattatattcatatgatattcattgctcactcatattttttatcaataataaaagacatcttggttccatagccttgccatttgcttctcgagaggcatctccatattcccttcgcgagcttaagaaaaatataaagttccaacaattatgcaatattttccttcttcaagtcctaatattgtactgactgcaaggtgtaggaaaaaggttacctgaactctttccatgcataaataaaaacatgtcgtatgaataacttacatggaaaaaatataattgtaccatcaaaacatctttggaaggtacacaatagcagtcctagcgacctactctctctacagtcagtcagtcacatataagtgaccttttgcaattgttttaggccaaccatttcaaacataggttgcatattaccttttattcagagtagcaaatgcacttgcatgaagtaaaatatgatggatagaagaatccacttttcctttaatattaggtatatatatatacatgggaaaatggtctgagtatttttgtttctcaatgtagttccataaaaatatatttttgcttactgtctccaatcaccaaaaaatttagggaaagatttagtaccatccacttgatcactataaatatttgtttcatccaacccgccgacaatataatgcctacatacataacagaaaattaaatacccaagcccatagctaactaatggtgcgccaacggtgcaccatactttctagtaatactataaatacaataatgctaagacaatacttcaaatacttgcttt

SEQ ID NO: 174665 - DNA, 3316 bp, Zea mays
  Clone ID: MRT4577_90875C.1
ggcctcgcccccggcggcgtcgacctgtcagccggcagtccagcaatcggcgccaccagccttatccccttgctctctccactcgcccctccccgtcagcccgcgccgcagtgtggggagtcctagtttacctcctgtcctacacgcggaggagttagacacactacctcctcaacgcaacgccgctggcaacgctgttgctggccggagactgcctgcagagctaccaattgataggtacgccgctgacccccgtaatgatcagatcttacttattggacccttcggcagccgtcaggcgcccgatgaaccagctagccggcgattcaccaaccgtcgcaagctcccgttgccttccttaggcaccactatttcttttatgttatgcttctcatttcagaccccttcgcatgccgcggcctgggggtggcgcgggactggatcactagctctctattggagagagaaggcctgttcatcgtgccggtagaagacagcgggaacagtacgggggtactgttcgtctatttataggcacaggacagagcatgtgtgaaatttcagttatgccctttacatttactattgacttatagaaaaacggcccgcgctccccgcgaacggcgaccggtggcaagccgctggcggcgcacgacatctccacgtccgtgtggcacggcgctcctctccgcgacgtgctgctccgatgcggcgtcatgggtgccgcggacggcgccaccaacgtgtgcttcgtcagcggcggcggcgacaactgcaaagtcggccttcagggagagaccgctccgcaggccaagaagtcgtggggctccgagatttatacatgcggtggtcgtcattcctccgatgtttctcttttcttttctacgatgtcttgcagaacccttagtgatccatggttgtgaagaagcccgggcttggataattcgcaatctattggagaaagatggacttttcatgctctcggaagaagaaacaattgccatctgtaaattcactgaaggctagccaggatctgacacgaaaaccgcttttgagcttgcatcaatgggagctggctgtgtttttccaaataagggtgacaataatgttgaaagaatccagcgttcgaagtatttccaagctcttcttcagaagtctaaagcaaatgtttctgaacaacggaatgcaacatgtcaagagttctcagttcaatgggctccatgcgtcgatgaaagccaagctgaaatggaaaatgagaagctaagcatcagggcttcaaagttaatgatgcaaacgaagttgacatcattgtatagcagtaagtccttgaagacaaatggcgtacccaacaaaaatatgttcaaatcagagaactcatctaaagtgtgtgccggtgttgaaaatagaacaagtcaaaatagtaacaggcggcatgcttacctggacgttgaggaggatgagaaatcccatgggcaattgcagaatgcaaagtggaaacatacagggttcagaagtcctatatttgaggttgcaaattctccatcaagtaatgatgaagctgatgctcctgccaatgagtttacgactgccaagagaatgatggggttggatgttgtgcaaaagccagcacaaaatggtccacaaggtgcttctgtatcaccacaatgtgataacaactatagtacacggaattatggcgtgagaccaagttggaattctcgtcgtggaccacgtggtagttttataccccctatcagaaacaatggaggatcaggtacaacgatctcacgggtcactggtaaaaatgacgagtccatggaagattcaacaaggaaatgtattgaaatgctttgtgctcctgatggtgagcttcctgagaagctgaggaatctagaacctcgccttattgaacatgtcagtaatgaaataatggatagggatcctaatgtccgctggaatgacatagctggtttggaacatgcaaagaagtgtgtgacagagatggtgatatggccactgctacgtcctgatatattccgtggttgtcggtctcctggaagaggtctactgttgtttggacctcctggaacaggcaaaaccatgattggaaaggcaatagctggtgaagccaaggcaacatttttctacatatctgctagttcactaacaagcaaatggagaggagttacttctttggagtctggctggggctagaggaatttctcatctcactctagtgccaagtgcaaactagggctcctcagtcgaggtcaagttgtcttttttactgtaatagattggtgagggtgaaaaacttgttcgggcactttttggtgtggccagttgtcgtcaacctgctgtcatatttgtggatgagatagactcattattatctcagcgcaaatcagatggtgaacatgaatcaagcaggagactgaaaacacagtttctaattgagatggaaggttttgacaccggaaatgaacagatcttacttataggagcaacaaacagaccccaggaactggatgaagcagcgcgcaggcgactcacgaaacgtctatacatcccccttccttcattagaagcacgggcttggataattcgcaatctattggagaaagatggacttttcatgctctcggaagaagaaacaagtgccatctgtaaattaactgaaggctactcaggatctgacatgaaaaacttggtgaaagatgcctcaatgggaccactaagagaggctcttcagacgggcgttgaaatcgcaaagctcagcaaggaggatatgcggccagtgatgctgaaggatttcgagaatgctatgcgggaggtaagaccttctgtttcctcaagcgagctggggacttatgaagaatggaacaggcagtttgggagcctatcgatctagtctgtcggcaggcatcaacgaatacaatcatgtcggcactatagaaaaaggagctcaacgattttagccggaacatgacatgcataacacagctctacagtttaacaatcttttgaagcatcaaaatttgaactgtctatttggagtgctgagtaatatccaggagcctacatatcaaatagtttcaattgtttttaaatcttcacttttctgtaaatttgtttgccttggttttgattgacatatgactagcgcggaagtcaaatactccgttccaaattataaaatgttttagcttttccgcatacagttttttagatgaataaaaaaattaatgtatctataaaaagcaatatgtaaagagatggtacaacattgacaacaaagaagaagatttgtgggtcc

SEQ ID NO: 174666 - DNA, 1931 bp, Zea mays
  Clone ID: MRT4577_90876C.1
aattctgccaaactacgagaatgtaccgagaatgaaggagtgtatactagtctagcaccaaagcgaccgagccgcgtcccccggtgcgtccgcggacgcgtgggttgagaaagaccgtatgccgggccgggaccgaactccaaaaccgaccgagccgcgaacttcacccctgccttctctcccttctccgtccaggccctggtgcccgcgcgttctcgtgcggcaagtgggcgccgccgccggactacgccaggtgcccagttcctcgtcgggtccttcgtcgacgacgagcacccaccagttatgccctttctcttcccttcttgctgtgcgaaacccagcaccatccgaaccctaacttgagctatctggctatttgcatccggatctgatctaattaccaagcgtgtacatacatactactaacttcgattttttttttgggaaaaatattggaacatccgtgtcctttaccgggttcccccctatagaaaattcgagtattagactctacatgtcaagaaagtatggcgccaggaagcaaggcggagcggaaagcagcactagatgctggcgcatggatgttcaatgtcgtcacatctgttggtatcatcatggtcaacaaagccttaatggcgactcatggctttagttttgctacaacactgactggacttcattttgcaatgacaaccttgatgacgttagtaatgaaatggctgggatatattcagccatcttatttaccattaccagaactagtaaagtttgccttttttgcaaacctgtcgatcgtcggaatgaatgttagtttgatgtggaactctgttggattctatcagatcgcgaagttgtgtatcattccagtcttatgcattctggaaatcatattcgacaaagttcgttactcaagagatacaaagctcagtatagtgcttgtcttcataggtgttgctgtgtgtactgtgactgatgttagcgtgaactctcaagggctattagctgcagtaatagctgtttggagcacagcactacaacaacattatgttcaccaccttcaatggaagtactcgcttggctcattcaatctcttaggccatactgctccagcgcaggcagcatcattgttaatagtggggccttttgtggacttctggctgactaacaaaagagttgatgcttttaactacacatcaatagttacgttctttatcgtgttgtcgtgcataattgccgttgggacgaatctaagccaattcatatgcatcggaagattcacagccgtctcgttccaagtcctaggccacatgaagacagttctggtgttgaccttggggttccttttctttgggaaagaggggctcaacttccatgtcgcccttggcatgcttctggctgtgatcggcatgatctggtacgggaacgcgtcgtcgaaatctggaggcaaagagcgccaggtctaccccacaccgagcgagaagactcagaagcatggggcgctgtcatcgcagtccgagctggatcaaaaaggtctaaccgagacacacaaaggcatccgatgcttgttgagcaccggtcgacctggctttattttttagtacttatttttgagggatgagatgtttctataggattgtaggtggggccatagcagaaagagggtgcctgggtaaaatgcccacgagtttacttttgcagtgagtatgtcaatctaagctggcagatacttgatttgtaatagtctttgtgtgtgtttcgctcttcatgtggcatgttcagtttgatctatagttgtatctttcactttcacactgaaattgaaaagtaaagcgcaaatttccttgtaaaaaaaaaaaaaaaaaaaagcggcaggaggaaaaaaaaaaaaaaagcgggcgggcccccggtggggggtgggggttggggcgggg

SEQ ID NO: 174667 - DNA, 287 bp, Zea mays
  Clone ID: MRT4577_90877C.1
agacactgcattgattgacatcgcgtgtctatcggctaacagggcgtaggctctgcgacggaatggcgcccctgggggcgattgccgccgccgccagcactggtcgcctgcctccggttacgagggttctccattcttcctacgcgtgctggactagcgctcctctccgtggtggcctcgggtcggccctccccacggcggactcggtgtccggcccccaaaccaaaccttttctggaggcggtggatttggttgagcagctggcgaggcattctctaggcctttga

SEQ ID NO: 174668 - DNA, 1314 bp, Zea mays
  unsure (1)..(1314): unsure at all n locations
  Clone ID: MRT4577_90878C.1
ggccggccgggccgcccctcgagaacactttctccggcttccgcgctgtcgccgtcctcctctcaccccaatctgctcggactctgatcgcagcggacgcgcatccagccagctcggattcaacctctctcccgggtaagacgccgggcctcgcttcggcggatggaaaggatggagttcgggaggaagcccttgagccttgtggagctctgcgtgcggaaggccatcgacaacctccgctacatgggcagcgtcgacggcgtcgagatggatctgctcaagcgcatcctgccgcactgcacgatggagcagctcacccgcgtagagaacagcaccgagatggatcttagcttggtaactgatccgctgtggaggcgattctaccagcgagaattcggtcaggagcatacgagcaaagtcatcgcaaggctgaaggagcttgggcaaaaaacgccgtacacatggagggagctcttcgcggcgaaaaaagagaaacagaaggaagttgaggataagatgcttgacaaattcacaaagaagtttcaggcagagagagctgagaaacaaagcaagcaaatcaaactatgtacaaaggtgcctccaagcagcaaaaggagtttctttggaggaagtggacctagcagtgtatccagttccagctacaagagccctatactgaagaaggctaggatagaggttaacagtcgagcaaggttgcagtctgctatgcaaaagaatacttttgcgaggtcatctcagccaataaggacgacctctgttagtggacagccagtgagaacaactaccattcatagacccaattcaaccgtcaccatcaccaaaccgatgggaaaaagcaggcaaattcagaacagcaggcccaaattctaggaaacggtttgctgcgatatcgcaatttcaactccagagctcatatgtcctctgaagaaagcgcctcctttgtacaaaaggagtagcacaccgtactcattttttttttggcaaaggagagacgtgccaattgtaacgtaaaaggcgttaccattgtttgtaacaaacgatttcttgtattaaaggaaaaaagggtttgttccnnaaaaaaaaaaaaaaaaaaaaaaaaaaaaaaaaaaaaaaaaaaaaaaacccccccccgaccgagccgncgaacttcacccctgcncttctctcccttctccgtccaggccctggtgcccgagcgttctcgtgcggcaagtgggcgccgccgccggactacgccaggtgcccagttcctcgtcgggtccttcgncgacgacgagcacccaccaaaaattc

SEQ ID NO: 174669 - DNA, 1825 bp, Zea mays
  Clone ID: MRT4577_90879C.1
ggtaccctcgaggccggccggggaatcctagctctgatctagcagtgctccactttcatttcagtccggaaccacgaattctgccaaactacgagaatgtaccgagaatgaaggagtgtatactagtctagcaccaaagcgaccgagccgccgaccgccgcggatttcacccctgcctttccttccttctccgtccaggccctggtgcccgcgcgttcccgtgcggcaactggccgccgccgccgcactacgccaggtgcccaattcctcgtcgggtcctccgccggcgacgagcacccaccaaaaactggagtggactctacatgtcaagacagtatggcgccaggaagcaaggcggagaggaaagcagcactagacgctggcgcatggatgttcaatgtcgtcacatccgttggtatcatcatggtcaacaaggccttaatggcgacgcatggttttagtttcgctacaacgttgactggacttcatttcgcgatgacgaccttgatgacattagtaatgaaatggctgggatatattcagccgtcctatctaccgttacctgaactagtaaaattcgccttttttgcgaacctgtctattgttgggatgaatgtaagcttgatgtggaactctgttggattctatcagatcgcaaagctgtgtatcattccagtcttatgcattctggaaatcatgttcgacaaagtccgttactctagagatacaaagctcagtatagtgcttgtccttgtaggtgttgctgtatgcacagtcactgatgttagtgtgaactctcaagggttactagctgcagcaatagctgtttggagcacagcactacagcagcattatgttcaccaccttcaatggaagtactcgcttggctcattcaatctcttaggccatactgctccagcccaggcagcatcattgttagtattgggcccttttgtggacttctggctgaccaacaaaagagttgatgcttttaactacacatcaatagttacgttctttatcgtgttgtcgtgcataattgctgtcgggaccaacctaagccagttcatatgcatcggaagattcacggccgtctcgttccaagtcctaggccacatgaagacggttctcgtgttgaccctggggttctttttctttgggaaagagggtctcaatttccacgtcgcccttggcatgtttctggcagtgatcggcatgatctggtatgggaatgcctcctcgaaacctggagggaaagagcgccaggtttactccacaccgagtgagaaaactcagaagcatggggtgctgtcatcccaatccgagctcgatcagaaggtctgaaatgagacacgcaaaggaatccggtgcttgttgaacattgatcgacctggtttttttatatatacttcttttttttttgagggagatgtttgtttctatagaattgtaggccatagcagaaaatgggtacccagcggcctgcgcctgacattagcagccgggaaccggccacgttccacgatacaaggaactgtttcgttgtaattgctctcccagagtgtgaaattctccaaaggtatcgtatcaccttctttattccaaaaaaaaaaaaaaaaaaaaaaaaaaaaaaaaaaaaaaaaaaaaaaaaaaaaaaaaaaaaaaaaaaaaaaaaaagtgagtatgtcaatctaagctggcagatacttgatttgtaatagtctttgtgtgtgtttcgctcttcatgtggcatgttcagtttgatctatagttgtatctttcactttcaccctgccattcaaaagtaaagcccccatttccttgt

SEQ ID NO: 174670 - DNA, 1028 bp, Zea mays
  unsure (1)..(1028): unsure at all n locations
  Clone ID: MRT4577_9087C.1
aattcggcacgaggcttttccctcctcccgcaccccaggccgcagcagcagcaccggcgcaccgccacccactcgccccgcctccgtgcccgcgcaactcgcgcctgcagcgtgtgggagatgtgatcggagcccggccgtcggttcgagtgttttcttctgcctctgggctgtggcgcggggaggaggcaagctggcggtgagatgggtcggtgcggaggaggaagcggagcaggagcaggagggggagctttgggcgggctgtgctctcctcaccgccgccttggttatctcaacgctcgtgatccagggncgctggaggatctaagcaatctcatgcacnctgctgttgctcgcaaggttcttctatccataacgaattggcacccacacaattacttggatgatgtacttcatccatcacaagtacaagatcaaaggctcgaacgtttaggccaagatgccccatcatttcatactggcaatgaacttccaaatcctcatctccgtcaagtacctgctgctttgccatctcttccagttcaaccatatgcgcctcatcctaaaatttctgctgacaatccaaccgctgcaccttcttttcaaaagataccctggttgtcattgacttcaccgcctttgcctgcaattgggcgacgaatgcaaagtccagcagcttctccagaaacagcagttcatccagctaaacatggcaaggatcatggaactccagtttcagcaccttcaaatgttagtcatcaccatgcgatgcctgcgaataatacacatggaaaaactcatggaactccagttttggcaccagaaaagagaaggcatcaccacttgcctgcaaataattcatatgtgaaaggacctgctgtttctccctcaaagtctcccatcatccacaggaaaggacatggtgttccagttgctgcacctccaaaagacactggagctatttaccacctgcaaatcgtagacccacaaagntnctcgtcctgctccacgtaaaagtaacatacttc

SEQ ID NO: 174671 - DNA, 558 bp, Zea mays
  Clone ID: MRT4577_90880C.1
tgctgaacccatggctacctccgtggtgctctccaccgccgccaatcccacccaactctaccggtcccgggcttcggtgggcaagccggggaaagggcttggcctgagcatgggccgcagagcgcgcccactggagcatagggtgccaagccataagcagcatcttcggcgaccgcggtcccgacgtggagaagcggaagctgatgaacctcctcctcctcggcgccatctcgtgaaccaccgctggcatggacgatccctaccgcgccttcttcctccctgccgaatacgggaacgcctgctgctgacacctactcgaaggacaagctgtgcaacatacatcacggtggatgcgtagcttaacacgcacggacccaacgaccggacactcgcatcagggctaaagggtgaccccacgtacctggtggtggagcacgacaagacgctggtcacctactggatcaacgccttgagcactaaccttgggtgcttattgacctggaacagagcttagaacaagtgcatctgcccctgccacggatcccagttcaacaacca

SEQ ID NO: 174672 - DNA, 270 bp, Zea mays
  Clone ID: MRT4577_90881C.1
caaaacagcaaaaccaaagcgctcagccgctcgcgaggagcgaaaggcgagcgcgcaccgtggcgcccgtggcggaggcgaaacccccgccgccgcatcgccctgagaccctccggttcggcccgggccgaactctagcccgcgcaatctcgccgccggcgtgcttgatctgatccaaggccaccgcgcgccggcgagagcagcgaggtatggggagcgtggacggccgcggggtcgaggggatccacgatactaatcggcgcgcgcagt

SEQ ID NO: 174673 - DNA, 259 bp, Zea mays
  Clone ID: MRT4577_90882C.1
tttttggttgtttttttttttgggtgttggtttttttttttttttttttttttttggacaaatttttttttttccccaaaaaaatttccaaacaaggtttttgtcccacccattttttgttactttagcaatacccactcaagtttgaaaacctgttggtgctcaaactaacaagggtgccaccttcccaacctggggtccaaatatgtttatacccatttattctccaactcgaggaatgagagtttatttactaaag

SEQ ID NO: 174674 - DNA, 528 bp, Zea mays
  Clone ID: MRT4577_90883C.1
ttgggtacctcgaggccggccgggacctccatcaaactcttcgattcagctccagaggatcatctgcggaactcacgatggcgctgccggctgcggttgcggctacctcaaggcgacgacctgtcacgtcgcagcacagcttagcgtcgctccgatgtatggcggctgcgcatctgatgcggtaggagacggcgtacatgtgccaatctggcacaggatccaaaatgccaagaggagatggtgtagtgcatgcagcgcgtcgcgagctccccacgcaggacctgccgaagataggaaatgttcctgaagaagcgcgacatgatgttcatgacctacaagaacgggataccatcccggacggtgtcatggtggatcttctcatccatctaggagacataaaaggcatccacaaactacgtcttctgcgtgctgatcctgagatagcggtactagatcataaccgaggtctcacatatctgaaactcgattttcagcctgactgactcgctcctatcggcataatccgga

SEQ ID NO: 174675 - DNA, 306 bp, Zea mays
  Clone ID: MRT4577_90884C.1
tcgtcaggatcggctaacagaccccgccgacttccaaactccaaccaccgttgagctccacagctgtgccaaataggccgggctggaaataccctccccttcacttacctgctgctggggagcaccgcaagcaccaactcgcgcccaccggtccgttacaccagccaccgccagcatgtctaccgtcgccgccacccccacccacgtgaaattctgtacagcagctagagacgccaatggggacaacacccggctgaacccttccactgttctcaatcgacaaaactctcgaggaccgcgtgtctg

SEQ ID NO: 174676 - DNA, 320 bp, Zea mays
  Clone ID: MRT4577_90885C.1
cccacgcgtccgggaatgcaacaataaagggtccaatggtcccaaaggggcaccatccacaggtgtgttggttttccttttttgcctagctgaactggatgagacggaaaacttattcgaccccttacaccgctttgttggacgctacatgatgaccgacttgagttttcccttgagggcaacacatccattttggctgtcactgttgcgaccggcttcccttgtcattgtggctgccatttacttaaaaaaagaaaaatgtgttttgattcacaccacgggcatacttggattcttggattcagtgcttttaactgctg

SEQ ID NO: 174677 - DNA, 113 bp, Zea mays
  Clone ID: MRT4577_90886C.1
acagaagctccccctaagcggcaccgtgttccatgaacggatgacttctaggcacttggctgagactgttctcttcccactagaacagtctcagccaagtgcctagaagtcat

SEQ ID NO: 174678 - DNA, 375 bp, Zea mays
  Clone ID: MRT4577_90887C.1
cccacgcgtccgcttaagttgttgtcgtaaaaaaaaaaaaataaaaacctacaataaaaagtgacaaataacaaaataaaataaaaaacaaatacaataaaaataacctacaaaatcaactaccacatacaaataaagcaacaaacaacacaaaataaccaggcctgactctttaaaggtacccactttaaataacagtacctcacacttaaaaaccttcttaaaggtaatcattacaatattaatccctcaactattatacaacgtatggcttgtaaaaaccctgcattacccaaaattaaatctctaatagcaaatcccctttttgctgcctttaaaaaacccaaaaatcccccaccctatcgccttttcaaa

SEQ ID NO: 174679 - DNA, 329 bp, Zea mays
  Clone ID: MRT4577_90888C.1
ttacctactctttctcgctgcgagacaacacacccgttaacggtgctttataatgccggctcgcctcgaacaaactgctgcatctatatcccactctattctttttaattacgataaattgtactgagcctacttgaccgctcccccttgacttcctttctctccaccatcctttcttattattttacgaactctttctcacacacgctatctcttttaactacttacatctatacttgttctgaacaattatcttaccttcactatcaaccttgacattatcattttcatagaaatgaaacttacattgcgactttttttgcccctat

SEQ ID NO: 174680 - DNA, 331 bp, Zea mays
  unsure (1)..(331): unsure at all n locations
  Clone ID: MRT4577_90889C.1
gcgcacancagagcgcgggcgaggaacccagnccaaacccgggacaggagggcgnancgggcgnggncggccgcgaccccgcgcggggggcggccgacacccccgccgggcagagnacccgcgnccacaagaccgacgaggacaaggngacggggcccgacncgcaaaagggggggggggccccangggagccnggngaccgggcgcaacncacggagcccacacagaagaaccnccaccnggaccagggccggaacaccancccgcncgcaaccgccgccgccgccaacgncacacgcggcgaacgcgccacagcccnncgcaagaagcc

SEQ ID NO: 174681 - DNA, 1672 bp, Zea mays
  Clone ID: MRT4577_9088C.1
tcggctcgagctcatcctgacaccgaggatatatacgtagtgctgcatggattatgcagaagagctaaggttgaaggttatcattgattgcctcgaggccggccgggactcccgtcgctcctctcctccacgcctccctcgctcgctcgccccctcgtccggtcgtccctccctcgctcgtcttggcatccccgcaaggaatgtcccttccgtagcgtcccttgcttcttccccaccccatcctgtattagtgcgttctctgccgctttattttccggtttctttgggctctttcgccgccttggatcttggttgcctcatccggttcataggattagcattgaagggttatccaatattcagtgaaaactagctactgaagaataggagtagcaatacctttgatgccccataaccccattcattagtttctgcaatgtctttgtcttctatttgctgtgcgaagttccatctactaaggaactctataggagacacttgcagtgtcagatggcttaaataccatagcagattgatatatgaaactttcctctcaagcagaatacatcaaagtaggcctcctagtacaacagtgctagcaagaagcacaagaaaaggaagtaagcagtcatttagcaatggccgccatttgcacagtaaatcggttgaatcatcaattgaagtgttcaagcagtcagagcttgagcagcttaaatcacttcattgctacaatgttgaggaagagttttctgaagtcaagaccgaatggcctgcaactatccttgtttttgatattgaaactactggcttctcacgtcgtgatgacagaattattgagtttgctgtccgtgatcttatggggggaaagaatagcacttttcagacactcataaatcctgagaaagatgtgaaaaatacatatgttcatggtattaacaacagtatgctctgcaggcctgatgttccaagatttggagagattattcccattctgctacaatatgtgtggagtcgtcaaatggacggtaaaccagttctctgggttgctcataatgggcgttcctttgacgtaccctttctcatgtttgagtttcgacggtgtaaagtagaaatgcctggtgattggctctttgtggatactcttcctatcgcaaaacaattggtcgattctaatgggtcaaaactcagttctgtgtcattgaagttcctgagggaacgctacaaaatcccactcacagggagcgcgcatcgtgccatgcaggatgtgacaaccctctcttacgtgcttcagaaattgacctttgagctgaaactaactgttcctcagctgctcgagaagtctttccgagcatcggatcttccagctaatcgtcctgcaaagtgactgtatctgcctcacctgaatatcgcctgaagcactaaattattatcaccgccgttttcgaatatttgtcgtctgcaagtttatttttgaactaaaacacgacaaaaaaagagggagtacattgttgttgtattattacagagatgttatttggagatcccagctctgatttcttctatgttctttctaacaacctaataaagccagcctgattgccactgatacatcagtaacaaagtaataaaagtccccgatactctgacattgtaggcttgtacacattcctaa

SEQ ID NO: 174682 - DNA, 544 bp, Zea mays
  Clone ID: MRT4577_90890C.1
ctctatattgttttttttttttttaacacgctggcaaaacatgcatatggagggaaaaaaagtacagggctacacataccaacttggcactcagtattatttactaggagtgacgggactagtatgatgagtgactccatatacattggtggaattaaacgggggatacaccagctgaacaggaaccacaagacacaaacacaagtgtatatgtcgggatgacgacctgtaatagagcatgcgcgcgttttagataaccacaaggacgcagcaaacatggtgctgtgcactggacatacatatggcccgatctaacggggggagctcctggggtctatgatgaaaagccaggcttacaccgggggggagttgggctcgcgccggtctaaaaggtttgcccccatgcccttggtggccaggttgtttccctggtggaagacgctgggccacacattgccggcgccgcgcggatttgacgacgacgacggtgttaccggtgtagttggggtcgacggactaaactgcgcccgattgtaactgccgc

SEQ ID NO: 174683 - DNA, 377 bp, Zea mays
  Clone ID: MRT4577_90891C.1
acctcgaggccggccgggatactattacacacgcgcacagactccagagcttatcccctgaccaggaagcctgcggcttgtgatcatcctacccgggcgccatcacacagcgtattcatgtacgacagtctggtgtgtggagctagtgtgccgcaccgtcgtctcggacttcctgccctacgtccctgtctgcgagacaatctagaccgtggacacatccagcccgcattttaccaagtgatcctcgaggatgagatcgacagctccgctctctaccttgtcacctattatggtatccaggacatcaacattatctacgagtgtgtggacctgacgtactccaaggagaggcttgagttgcacatgcattagaaggt

SEQ ID NO: 174684 - DNA, 1115 bp, Zea mays
  Clone ID: MRT4577_90892C.1
caacggcaaggcgtggccgtacctccgcgtgcgccgccgccgctaccgcttccgcatcctcaacgccagcaacgcgcgcttcttccggctgtcgctctccgcggggctccgcttcgtgcacgtcgcgtccgactcggtgtacctcgccaggccggtagcgaccgagaggttcgtcgtggcgccgtccgagatcgccgacgtcgtcgtcgacttcgcggagtcgaccgccggcgcggcggtcgtcctcagcgacgacgccccggccccgtaccccggcgaccccggcgagaaggcggagaccatcgccgtgatgaagttcgtggtcgagggcgccgcggaggacccggacacctcgaccgtgccggcgacgctgatgccgcactaccccaggccggacgcgcgcgaggcggccacggcgcggcacatcaccatgtacgagtacaccagggccggcacggacgagccgacgcacctgtacctgaacgcgcgctcgtacatggacccggtgacggagacgcccaaggaaggcacgtcggaggtctgggaggtgatcaacctcacggacgacaaccatccgctgcacgtgcacctggcggtgttcgcggtgctggagcagcggtcgctgcgccgcgtggacgagttcagggactgcatgaagcgccggaacgacgcgcgcgcgtgcggggtcgaccgccacctggccggcgggcggaggcacgtcgtgccgcggcaggagcgcggctggaagaacgtcttcaaggtgcggcccagcgcggtaaccaggatcctcgtgcgcttcaagccgctcacagacgccgcgtcgccggaggagagccgcttccccttcgacgtcaccactggtccgggttacgtgtaccattgccacattttggaccacgaggacaacgagatgatgaggccgatgaagattgtgcgttgaacggtttccaggaagaaaaacatatattctatgaatgattccgtatcgcaaaagaaacgacatgtttactgtgtctttcccattaatgatttaagcaggaagaacttttagatgattgaacttttcagttaatatagcatttgtcgagtaacaacatatatcctaaatgtttgtt

SEQ ID NO: 174685 - DNA, 402 bp, Zea mays
  unsure (1)..(402): unsure at all n locations
  Clone ID: MRT4577_90893C.1
tatgaggatggggtgggntngagtttgaggaaggtnaagnnagaggnnantttagaggtgttnanattattatggatgaagttngnagtggagtggttatnagagttgtttattattatagnnannttgattggggagggggagttgtttttttttttatgggatgagaagngggtgganatttaggtgaanagnagtgtgaagttgntggatatttgnattggggtgagntnggagntnttttggttggatnaagggnagntggttgtgngatatntnntgaatgtgttgaattgtgggagnganatgnngttttaggagnagtttaggagagntgaggtgtnttttaaggaatggatggagngagnnngtgaaaggtntnnnaggtttggtggttgnttg

SEQ ID NO: 174686 - DNA, 455 bp, Zea mays
  unsure (1)..(455): unsure at all n locations
  Clone ID: MRT4577_90894C.1
gggggggncatggcgatgtccctgctctccgctgccaccgtgccagtccagcaggagggggggcggtccgagttctccgggctcaggagctccgcgccggtgcccatgcgccggaatgccacctccgacgacttcatggccgccgtctccttcaggacccacgcgctcggcacgagcgtcgggccgcggggggcgccgacggacgcgaacctgaatgaggccgtcaatggattcggccgcatcggtcgcaacttcctgcggggctggcacggacgcggtgacgcctcacccctcgacgtcatcgccatcaacgacaccgtaagcgccaagaaagcgtgctacctgctcaagaacgactccacgctcggcatcgtcgatggcgacgtcaagaccgtcggggacaacgccatactccgcgacggcaagggcatcaagggcgaggccgaccgcaaccc

SEQ ID NO: 174687 - DNA, 346 bp, Zea mays
  Clone ID: MRT4577_90895C.1
agagaaattaaaaaatagctagagaaagagaacactacatataattgacaggaataattgtccatataagagtaccagctgttaagctgctgccaatgctaacccagcggaacacacatacgccatagaacagaagattcacagagacagaatgtagctaaccaacttgtcaatggcaacctgagaagacccagtgctctccaagcagcctgctagtttcgcgcaaagctcttgcgctgctcttctcatctcagctccctcccgctcacccatcaacttcctaaccgcgtccttgatcttccccctctccagctccccttggagctcgaagccgacgccccagacg

SEQ ID NO: 174688 - DNA, 606 bp, Zea mays
  Clone ID: MRT4577_90896C.1
aattcggcacgaggcctagccgacatgcgccgcccgcagcgccgcgtcgcggcgaagcagactcgcctgcgggaggtcgacgagatacgcctcctcaacgaatggatcgacgccggcaagcccctcccgcgcaccaaacttctgcccccgtcgaaatcagctggaccggttccgaccgccggggagcacccggagtacggcgcgtgcacactgttcgacgagctgccgctgtcgcagaagaccaaggacgggctgcggaaggcggggttcactgagatgagtgagatccagcgcgccgctctgccccacgcgctatgtggccgcgacatcctcggcgcggccaagaccggctccggcaagacccttgcctttgtcatcccgcttattgagaagctgtatagagagagatggggtccagaggatggtgtgggctgcattattctctccccgacaaatgatttggctgggcagatttttgaggtgatcaagaaagtggggcagttccataactttagtggtggcgtcattgttggtaagcgcaagggtatcgagatagagaaggaacgtgtgaacagcttgaatatcttagtgtgcacgccagggcgg

SEQ ID NO: 174689 - DNA, 316 bp, Zea mays
  unsure (1)..(316): unsure at all n locations
  Clone ID: MRT4577_90898C.1
tntttttttctctggtnctaacacttagacaaatatgtttgtacacaaaaaccaatgtactaagtctagaaacataccttctcttggattttcacctttctatcatttgacatgcttaagattgatgttggactcataaatcatcaagtcagcttaacttgatctacactgacatttctgagctccaacatcctgtaaaggtcacatagaatatctctaaacataggaacaacccaaactaaaggtcaaagtgcacttagctcttttgggctgcttctagttctatttttgacatttgttctcgttctagtgacct

SEQ ID NO: 174690 - DNA, 409 bp, Zea mays
  Clone ID: MRT4577_90899C.1
aaaaaaaaaaaaaaaaaaaaaaaaaaaaaaaaaaaaaaaaaaaaaaaaaaaaaaaaaaaaaaaaaaaaaaaaaaaaaaataaaaaaaaaaaaaaaaaataaaaaaaaaaaaaaaaaaaaacaaaaaaaaagggaggcctcccaaaaggttcaaactttatttaaccgtgcatgcaacttcaaaccctttcaaaattgtccccaaatttcatttcaggggccttcttttaaaaaattcttgactggaaaaaccttggggtttcccaatttaaccccctttgcagcaaatcccccttttccaaattgggctaattccaaaaaagccccaaacttttccccttcccaaaattttcccacccttaatggcaaaagggaacccccctttaaagggccattaaaccccgggggtt

SEQ ID NO: 174691 - DNA, 302 bp, Zea mays
  Clone ID: MRT4577_9089C.1
cgggggtgtacccccacacaagatgggaaaaaacaaaacctaccaaatggccctaaggcccgcagcccaggacgcaagagaaagaatacaaacaacatgaacatatacaagccacggatccacaccaagatgactggctccatataagtttcatccgacaaaacaatcaccacaaaagtgggactataacaacagcaaattctgcatgaggttgggcatgaccccaaagcctcctccccttctgaagagccgaatgcaaaacataccccacgcggggattcctctgccccataaaagcaaaa

SEQ ID NO: 174692 - DNA, 1754 bp, Zea mays
  Clone ID: MRT4577_908C.1
ttttttttttttttttttttttttaaaccaggcgagccacttttttttattgatttttgacaagtttgcaacagccttaattttaattttaagagggttacagtgagtttgaacagatgccctcacctgcctcatttacaactctgcaaaactggacatcaaaagggatttagagctgcctgaaacagatgaaaatggcactactctctcgtccaataagctttacgcttggtggtggtcacttgctaatcaggtgctgggacagtttgtccctcaccctgactccattctcatcagctagctggcacacttgctgcctgtacttagcgtcatgatcgctcggccacgcctgtgcctcgtccactgctgtttcctgaaggtctatgattatgttgtgcagcaagcagcagacatggattatccggggcagcttgtgcttgtccggacgccacatctccccttgcaggaacttccatgtgtccttgaacttggccagtgttctcggagcgactgttctcgcagaagagtgcctaatgttgaactcagcactggactctgtgaggtccttctcttggtaaggtgtgagcagccaggggagaagggggtagccggagtcgccgatcaagtattccccgatctctgacccatctgataccttcagcttgctgccattcagccgctcgcctttctcgcagagcttgaaaaggccagagctgtgcaaaatgctcgactctttcatgctaccaggccagccagtcacgatgtctgtgaacttggtgtccagatcaacaacggcttgcaacaccatgctgtagttcttctcctgatcaagccagaccttgcagttcggctcggctgatgaaaggcacattgtgatgtgtgttgtatccacaacgccgcagcagtttggcagaccatggatcttctcgaacttggacttgatcttctccatttcaatagagtctggccagcgcaggtggtggctcgctcgctcctccatagcctcgatgaacctccaggttatcagcgacacggttgagtggttcactccaacagaggatcctacggtcaccagtgacccaccagagttcagccttcgcagagcaatggccactcggtcttccaaacacagcactgtgccatcaaggaaggtatagctgcaggacctcaccatcatttcatctctcaccaaattgcagacatagtcgaaggctcttcttggcattttgaatatagactcaaatctttgtgcatcctcgatagaagataaggttcctgacatacggatgcagaaggcttcccaccagtcgccaggagggtcgcccgcggcggcagacgccattgcgaccgctgccgccttcttctccaacgccgccttccggcggcgcttggctccgcgcagcggcggcatggcgcggacggggatggaatcgggaggagcgacgcgcgggtacgggacgaatcaggaagccggggcggcggccatggacatggacggcgaggcgtggccgcggtggcgtgggggactcgtctgcaggcggtggaggatgcagggcatgaggagtgccgctgggtggatagacgtcggcgcgcgtgcctgcgctgcggcttggggtgtttgagaggggaggcgaagtgagaagcggcggcgaggggacggaggtggagcgccgcaaggtggagagagcgaagggaggagcgagcctctttcttcgggtgtgtgtcgggggttttcttcctactaccccggccgg

SEQ ID NO: 174693 - DNA, 976 bp, Zea mays
  unsure (1)..(976): unsure at all n locations
  Clone ID: MRT4577_90900C.1
atcccgggggtcggccaaaaccaacgcttgcctactccacgttggggcgtcccaacggacgagggttgcaatcaacccctttcaagcggtccaaagacccacttgaataccacggggtttcgttttcctttcactatcccgtttgcaaggaatctccacaaattggagtctcttgcccttacaagtatatgatcacaaatgaaacacagagtaagggagggaagcaacacacacaaatccacagcaaaagcgcacacacacggccaagaatcgagctcacaagactatctcagagttctcacttagaacagagctcgaatcacttagaaacacaaacgaatgcgcagagacttagtgtggatgatcaagaatgctcaaaggttgcttgtgtatctcctccatgcgcctaggggctccttttatagccccaaggcagctaggagccgttgagagcaaatccggaaggccatccttgccttctgtcgtcgggggcaccggacagtctggtgcacaccggacactgtccggtgcccgatttgtttccttaaacggcgaagatgaccgttgcagaccgttggcagatctggcgctgttggcgcaccggacatgtccggtgcacaccggacagtccggtgccgtcttccgaccgttggctcggccacgtgtcccgcgcggattgcgcggccgaccgttggccctggccgaccgttggctcaccggacagtccggtgcacaccggacagtccggtgaattttagccgtacgccgccggccaatttcccgagagcggccagttcgagtcgcgccagcctggcgcaccggacactgtccggtgcacaccggacagtccggtgctccagaccgagctggatcttggcagcacacagccaagtcccttctccttttctctattcttcttctttctgtttctaacacttagacaaatatattagtacttaaacccacgcgnccgaaa

SEQ ID NO: 174694 - DNA, 649 bp, Zea mays
  unsure (1)..(649): unsure at all n locations
  Clone ID: MRT4577_90901C.1
gaaacagggcgatagccaattggcatacggtaaacgcaagtattttgttacctgatctttctccttgctaagttatactactgaacattagctgtataaaccttgctgggtgtaactatagacacaactacggggagaaaaaaaagacagagattgataaggtgccgacgagattttacagggtataggattataggctactatgtcactgcaatcctcatatctatgcgcccaagaaaattctgcacaaagctcaactggtcagctccttttgctaactctatgatcagttgtatccgtctgtatgacctatatataagttctcaccggatcccagctctaagaggtgggaattcatcctcgtctcccactttgcaaagtcccgggggcctgttttcagttgctgaagccctggacctctgtaacacaaatggagaggcatctgtaaacaccttacttgtagtttgtgtgttagtagctccgtttgatttcaatgtggataaaggcagtgcaaaaggtcccaaagatccaaactctatagtctccagtggtcgaccatttgcagcaggtaagtatgattgaggagcattagatgatggatgcctctcttggctattgatgtcatgacaagaaagcaatacnccctggc

SEQ ID NO: 174695 - DNA, 405 bp, Zea mays
  Clone ID: MRT4577_90902C.1
ggccagaaacacaatttttataattggtcaagtggaccagaaaacacacgagctttgtagaggatatgcaacgatgggggcagtaaacaaccaaagtagctcggaacataaacagtgcaattctgaaggcatggaacaatccatagacgaccgggccaggcctactaaacttgggaccggaaggttacaaaaaaaaggttgacagtttggtgactatgagaaatgggacttcgctggaccttagaaccttacgccttgagcttgccaaaaaacctttgcttttgatcgggagaaagaaacccaccgtgccaaaatttggacgaagggccccggacctaaaggtggaccttgtgcagagcaagccgggaaggctgtttcaggagggactgggggagggccaccacc

SEQ ID NO: 174696 - DNA, 257 bp, Zea mays
  Clone ID: MRT4577_90903C.1
atttgccaatttggtatcctgttaacagatctttctcggggggcatgtctttttgttttttcttgttcttatgctggctgacattaccaatttgctatcctttaaagccattactatctggggcattctggatctttgtgtttagtgcagtgattctggtgaaaatgtccttaactgagttctgttgattattagacttcccctggttcatggtgtctcacaggtatctctgatgtcggagttgccaaattgggaga

SEQ ID NO: 174697 - DNA, 395 bp, Zea mays
  Clone ID: MRT4577_90904C.1
atttacaattctgttaagatttatctataccttactatcaccaaagtcctgttagacctctagggcttgtctaatgattactttaactttctcaataaattcctttcctcattcaaatggtcagatgatgaatcatctacaatttgtgattctaattattatgctttttcttcaatcatctagtttgttaaatcgcctaatctctttcaatgtgatttatctcaacattccttctttttcacatcttgagaaggactaaaattatcatttgttttattaacttcttaatatattcctttctaagaatctttattcctacttattattttaaatttcatacttctactttcttaaatttattaatcttattcatttcttatttttatcctatattt

SEQ ID NO: 174698 - DNA, 302 bp, Zea mays
  Clone ID: MRT4577_90905C.1
caactacccccattctcgtaaggttccttccataagctcatgagtctaatttccgtctccttccaattcttgctcgcctcgaatatcacctgagatcacataaacaatgctgaatgctgttactgagcttaatagcagcgatggtgtcaatgccaccatctttttcacccaagatgtacatgcccctaccgctgtcaccgtaagtgtctctgtcctcaagcctgtcctccatggatttcatgtacatgcacttgatgacaccaccaatggatgcatgtcaactggaccacactacaatcctt

SEQ ID NO: 174699 - DNA, 199 bp, Zea mays
  Clone ID: MRT4577_90906C.1
tgttattttttatgttctttttattgtttttatttttttttttatttgttatttttttttttgaaaaaggtatatcccaatccatccatgtgtaaagcccatggattactattttccacggggccgattagcggtcggttgaatattgccaacggtggctgtccctgtcatcaagagtgtttaaaaggaggatttttct

SEQ ID NO: 174700 - DNA, 749 bp, Zea mays
  Clone ID: MRT4577_90907C.1
agagaagtgtagtaataatcttatttgcactcatcaccggctggttacagtacagaggacagcatacagaaaccatgcatctttcattccgcgtgtcttgtacaagatgacatgtcgtcacttgcaattgctaattctcctagctgctacgatttacatacatatatatttctctgacccgtacgtattcgagcgtccgtccgtctagctcgcgtactgtactctgctgctgcattctctctgctctgctcagctgcattgcagagttcatgggatggatccgttttcagttgttgccgtttaatttgccggcggcgcgacgagtttgagcttgccgccatagatctcggcgagctgggagtcatcaatggcctcccggagcgtcctatcaaggtccttatccgccacaaacacgaacttcttcttggtgttgtcgtcgatgaaggggtagacgatcttccaggcggccatgaacacgtagggcacgtggatgaggaagacgcggccgaggcgctccgggtagtagctctgcatgatgtccagcgccgccaggtacccccggatgtcgcagttggcgtagccccagcccttgaggtcggcgacggcggcgaacttctcctgccgcccgggccccggcggcggcaggcgcgcgacggtggcgtccaggacgtgcacgacgtagcgcttgaactcctccatgtcccgccgcgccgggtggtgccgcgcgccgaagccgtagatcaggggcc

SEQ ID NO: 174701 - DNA, 633 bp, Zea mays
  Clone ID: MRT4577_90908C.1
gtcttctgctccgtgtatcagtgccgtgattgctgtccaccactgacgccgtctcccgcgcgcgacacatccactgtcacccgcggtataggccgaatagacgtgcactagatactcaccaagaccacatgcacctgctggcgcaaactcgaggagatgaaagctgagctctgccctcctaccgatattgctcgccaccgtgatggcacccaataagctctccgatatacaggtggtgattacctctagcactcgcatgctcacacaggtctcacaaaaccttagtacagaggagcgtgaggtgtacaagaaaaaaagactgctcatcctcaacatccgtgctaataaaacccgagacatcattcgcagtttgcaccaattaccatctctctctaataacccagacggaaaaaaagcgggcgaaataattcgccatgaggatatatggtatcaaggactatctcaaaaatgtgtagatgctgcgcctacaatatcatcaagctgagaggtccctattggcctctatggacatttgctgtgccccttaaggacgatgaattcctccattgccataaatcgtgtaaatagctgtgactggcgggaaattgatatccgcggacaattccacacaac

SEQ ID NO: 174702 - DNA, 311 bp, Zea mays
  Clone ID: MRT4577_90909C.1
gctcgaattcggctcgagcagaaaggtggagcccagttcttgtcccccgaccaccacggcttaaacggggggggtctatacaaagatttacggggggacaacaaactccatcaggggggaggccggggcgaccgcgacctgcctaaggaagcatggcagtctggcccctccgaagggggccagcaacaggaaaagcgtgttagagaccacactagatggacgcgaaagcacgcactagaggagcgaaacagcatatcccatgagggcgccttaagaagagctgcgcatcgagctacagattggactgccgg

SEQ ID NO: 174703 - DNA, 505 bp, Zea mays
  unsure (1)..(505): unsure at all n locations
  Clone ID: MRT4577_9090C.1
ttttttttttttttttttggtccaatgtctcgtctcatagagagggaacagcgcagcagcagcggtccaagcaaggcccagcaccaaaagctagcgatagcggccgcggctgctggatcgccagctcgatatatcagtcagtggccggtgaattgactctccgtttaatgagccgagcaggagcagtcgagcacagtgtagtggctgcatcgagaggagagagaagggaggaatcgaggtggttgaccccgagattataggccttcaatttgcgtttgcgatccaatcctctccaactccaccccacgacgaagatgcatagtatgcagctgcattcaactgatcgctgagcgccacctcattgacccggacctcccatccgcccagacggccagaccaccaccattgctttcctagctgcggcattccanctctccgtttggcttttgcacnnncgcttccattncgaactgcggcgccggggtgtggggggacgggggggggg

SEQ ID NO: 174704 - DNA, 291 bp, Zea mays
  Clone ID: MRT4577_90910C.1
ggaaacccaaaggcgtggcaattaatccatccgttcttttttatttcccccaatttattaaaaatgatttagcggtccacatataaacattcctgctttctttgtaacacctccaacttataaaaaacagctccatttcaccataacagcattccccaaccaaattttaaaatttttcgcaaatcctaagcagctatggatccttatgccggtttgatgcatatagccattcagccaaaccatattactcaaatctctttagcataaaacggcaaaagcttatccttccac

SEQ ID NO: 174705 - DNA, 252 bp, Zea mays
  Clone ID: MRT4577_90911C.1
ggtgatcgggcgcggcggctccggcgtggtgtaccgcggcgtgctccccgacgggcgcaccgtggcggtgaagaagctcgcgaggccgcgcgacgacggcgacggcgacggcgactgcgagcgcgagtttcgcgccgagatggaggtgctcgccgaccggatggtgtcgtcgtgggcgcacccgaacctggtgacgctggacgggtggtgtctgtactggtcggtctaactcttgttgtacgatcacctgga

SEQ ID NO: 174706 - DNA, 431 bp, Zea mays
  Clone ID: MRT4577_90912C.1
gccacaagctctgtaggtctatattgtgatgacatgcaaaacatagcatgcacaccactcgtacaataatctgagatagagaacgtgtatcaactgtagtatgccaatggagtcctatccaagatgataaatgtaagctgtgaagtgacaaatcacaaatgaatgcatactttgcttttctgttggaggagaaggactgcagtagatgcttgacagccacattatgataatgaaacaaggctataaaattatggacatcctgaaactacaatagaagagacatatataaaccattagaaactatattgtttattaccaaaacgatatacgatactactgcttgttggaaacaaaaaatatatgtgaaaggattgtagctttgaattaaatattatgttactgatcaaaaatactttaatgattaccatgca

SEQ ID NO: 174707 - DNA, 732 bp, Zea mays
  Clone ID: MRT4577_90913C.1
gccattgcaaaggccacacattctgtgggggtgctatctctatttaaacaaagaactgactgcatttcatggtaggaaattattctgctaatcaaggcatgctcgtgatcggtagttgccatcccaactccctgggccatgccatgaatggtgctaatcacctttaccttctatagttaactgcctcatggacttattcaaacaagaagccaaggcctcccgtgccatccttcggaaggctgcttctcctcaacgcaccggagtggaagcacgcactggtggggagctcgtgcgcggtcctctcaggggccatccagcctattttcgcgtacggcatggggtgcacgttctccatctactactccagagaccatgaggagatcaaggacaagacggagaagtatgccttcgtcttcctcgccctcgtcgggatctcgttcctgctcaacattggacagcactacagcttcggtgccatgggggagtgcctgaccaagaggatcaggaaacagatgcttgcgaaaatcctcaccttcgagatcggatggtttgaccatgacgacaactcgactggcaatatatgctcacagctcgctaaggacgccaacatcgtaaggtcactggtgggcgaccgaatggctctgctgatccagacggcttccatggtggtgattgctttcaccgtgggtcttgtcatctcctggcggctggcccttgtcatgatagcgatgc

SEQ ID NO: 174708 - DNA, 240 bp, Zea mays
  Clone ID: MRT4577_90914C.1
cggatcagaggtagttatactcaccagcaacctgtggataagcagatggtagttttaactttatttttatgtgtttagctaaactttaagttggagcaatattttaccattgaccatttcattcttcactgtagctttgaagagggactgtaaatgacggtgctaacaagtcgaaatacgtgcctgcctcgtagtggaagtcgtagctctcaatactacgtatatgggagtcagttgtca

SEQ ID NO: 174709 - DNA, 380 bp, Zea mays
  Clone ID: MRT4577_90915C.1
aacatagaaagcacaatagtgtaccaacaatggcagccaaaatattttgcttccttatgctccttggtctttctgcaagtgttgctaccgcaaccattttcccacaatgctcacaagctcctatagcttcccttcttcccccatacctttcaccagcggtgtcttcaatgtgtgaaaccccaattggtcaaccctacaggatccaacaggcaatcgcaacaagcattttaccattattacccttggttcttcaacaaccggcaggcctattacaagaggtacctttgggcccattggggggacaaaacattaagggacaacaacttccacaaattggggttacaaaaccttgttggtaattttaacaacaataagttttt

SEQ ID NO: 174710 - DNA, 393 bp, Zea mays
  Clone ID: MRT4577_90916C.1
cccacgcgtccgtagcaacatagaaagcacaatagtgtaccaacaatggcagccaaaatatttggctgccttatgctccttggtctttctgcaagtgttgctaccgcaaccattttcccacaatgctcacaagctcctatagcttcccttcttcccccatacctctcaccagcggtgtcttcaatgtgtgaaaccccaattgttcaaccctacaggatccaacaggcaatcgcaacaggcattttaccataataacccttgttcttcaaccacccgtaagccttataacagcagttaccttgggtcaattgggggccccaaaccttcaggccccaccacctccaccacctgggcctaccaaacttggttgattcctttaagaaccttaagttc

SEQ ID NO: 174711 - DNA, 438 bp, Zea mays
  Clone ID: MRT4577_90918C.1
attgagaccaactagcaacatagaaagcacaatagtgtaccaacaatggcagccaaaatatggtgcttccttatgctccttggtctttctgcaagtgttgctaccgcaaccattttcccacaatgctcacaagctcctatagcttcccttcttcccccatacctctcaccagcggtgtcttcaatgtgtgaaaacccaattgttaaaccttacaggatcaaccaggcattcgcaccaggattttaacaatattaaccttggttcttccaccaccggcaagccttatacaacaagtacctttggtccatttgggggcacaaaaaattaaggcacaacaactaccacaacttgggcttacaaaacttggttgataattttaacaacattaagttctttcattcaaacaactggcttgattgaactttgctggttatttgc

SEQ ID NO: 174712 - DNA, 247 bp, Zea mays
  Clone ID: MRT4577_90919C.1
ccgggccgggaggtttctagggttttcgcgtcgccgccgccgccgcttcgtcgtctccgccgcagcgatgccgccgcacaagatcttccggatcaagaagaatgtggagaagaagatgcgccagaaccgccccatcccctactggatccggatgcgcacggacaacaccatccggtacaacgccaagcgcacgcagtggcgacgcaccccgctcgccttctgagcgcgcgaatcggtcggctgctac

SEQ ID NO: 174713 - DNA, 595 bp, Zea mays
  Clone ID: MRT4577_9091C.1
aagctcatcatcgctcgttatgttatgaataaaagaaccagcccaggaatacgatgtcccattcgctatcccatcagctatccaagatgaacaacttcaccaagactctcattgtaaagactatctccatacgacgtcgtagtgctctgacatgcatcgataacatcattgactatatcaatgagaagaaaagcgttccccccatgcacatcaggatcgtcctgaatatcaaggacctccaggaggagatcctgctcgccaactacaacctctacaaggagagcaccctctatcttgttctccgccagatgcgacagcgatgcagatctctgcttgagcaccctcgctggacagagtattatccttgatggggacgcttctgatgccattgacaatgtcctacacaatattcatgacaaggagggtttccctccggaccaggagcgcctcatttttgcatgatagcatcctcgaaacgggcgacatctggccgactacaacctcttgaattacagccccccccacttgatgtggcgatcaacagcgtgatatgtgtatgttaatgaatactctgtactgttaagactatcaccct

SEQ ID NO: 174714 - DNA, 276 bp, Zea mays
  Clone ID: MRT4577_90920C.1
gattcacaccatgttgcgctgatctgaatatagcaattacttgcgaactggaaacactgacaggtcgggagatggtagatcacgcagcatcacctgcagcagacgtgccaaccataggtatgggatagccaatgcactagcggactgatatgactgtgcagatgaacaccattgactctcacgcataactcgcgttgggtgatactgaggatttcattggcaatgcaacgtacacttcatatgctttggtggctgacgtggactgataccatacag

SEQ ID NO: 174715 - DNA, 366 bp, Zea mays
  Clone ID: MRT4577_90921C.1
gagaccaactagcatcatagaaagcacaatagtgtaccaacaatggcagccaaaatattttgcttccttatgctccttggtctttctgcaagtgttgctaccgcaaccattttcccacaatgctcacaagctcctatagcttcccttcttcccccatacctctcaccagcggtgtcttcaatgtgtgaaaacccaattgtcaaccctcaggatcacaggaatcgacaggctttacatataccctgttctcacaccgcagctatacagagtccttgtcattgtgccaacataggcacactcacactggctcaactgtgatcttagactagtctcatcacacgtgatgattgtgtatgaacatcatac

SEQ ID NO: 174716 - DNA, 492 bp, Zea mays
  Clone ID: MRT4577_90922C.1
ccggccgggatctccatcgacctcctctaatccccactcccaggtgatgccctattaactcggagctggagcattcctccgctcttcaacaagacccggaagaaccgtggccactagtccctcgggtactcctggatccgtcctcacaggaagtcacctgtttagcgtcgggtgacactccgaaggcatgctcccctcctcggtagtcctcgttgcgacaaatatgatacgacctacttctgcaagactgcggtgatgttatttctctaggcttagctccaaattctattgcccggcgacctacatcaagtgcatatgccagatgtcgccctcgacctatactgctgaccgccgctctggaaacatcgcaccgtgacatacgatgtgacatcagaacggtgtacttcaaggggcatcgtgaaaggtggctcgttgccgccagaggcgattgtcgtcccataccaagttctatctccatcggcgacgatatga

SEQ ID NO: 174717 - DNA, 392 bp, Zea mays
  unsure (1)..(392): unsure at all n locations
  Clone ID: MRT4577_90923C.1
agcgcaagaggagagagagagagagngaggggggagagagagggcnagggnnccgggccccccacgccncacgcaacgaaaccgagccgggacggggccgcggcgaaccgccggcggggcncgggccgcgcaaccancgcaacggcagccgaaacagacgagaaagccaagacggagagcccgacagccgccgcagcccaagaggagggaggcacccaggacgcacgcaacaccngccncgaggccccccgcgagagngaccccnccgcagacccaccaaaacggagggattttttttttttctccccccccccccccacccaagccaatcggtatccaatccaatactgcagacttagatgccgaagactctgtaccctcaagatttactt

SEQ ID NO: 174718 - DNA, 267 bp, Zea mays
  Clone ID: MRT4577_90924C.1
actcgttgacgaccggtgttgcggagccagggttaactacgattgaatgcgcaccgataattctgctgtcgggccatgtaaagttaatgtactgaccactgttgtacaaagggccgtctgggaacaccgtgtctatgccgagctgtacatgctgaaagaacaaccgattgtcgccctctcgtcgatgggcgaacaggtgaacacggatcgcagtttgaccaggaccaaagactgacatggcgcttcgggcggcagctgtaaaagagg

SEQ ID NO: 174719 - DNA, 250 bp, Zea mays
  Clone ID: MRT4577_90925C.1
tttagatgttactcaaggttatccataccattcttattgtaatctcacagtccatcatcagtgctgctttactacaaaagaggcatgagacatcatctctccttttgattctcaaagaattactatctctgaaacacaaaacatgaatgacaacctgcatgcctgcccccactcgctccctgatcgtctgatgagggccactgaccttatgatcgccggaaaggttgccgtgctctgcgaataccgtgat

SEQ ID NO: 174720 - DNA, 294 bp, Zea mays
  Clone ID: MRT4577_90926C.1
ttggcttggaactttgtctgattagtgcttggatagatcggaatatgggtttaccatccctatcgtacggccttagtggctagtcttgttgcgcgttggtaaggccagccagcaagggcatatcatatttatactttactttactttacgtgcgttatgatgaacgaaaacatcagttcgctagatctctctctcgttgttaacactctctcgtcagttctcgccattctatcgatgattactaattaccagctctattcggatgtaaatcgtaacagtcaatcggttaatctg

SEQ ID NO: 174721 - DNA, 347 bp, Zea mays
  Clone ID: MRT4577_90927C.1
tctattatctaactacccactccccattttctaattacattcatccaattccatctttcataagggcctttgagatatgtgggagcttgaggcagcctctcttcctcccattgaaaatggaatgtaataaagcctctgcgactccacatatgagcttccaatctacttccctcaataactactgattgaaatggacctacatcctgttcaacctgctattcactcacatggagtgactggtcttatactataagatcatattgtgcctatcattacttcctccttcattataacctacacctaacttacttcagattttggccacaccatttacgacaatatgccat

SEQ ID NO: 174722 - DNA, 223 bp, Zea mays
  Clone ID: MRT4577_90928C.1
ttcctcgcgtgcgcggacgcttgggaccattctgaaagctaataaaagagactcatcggtgcggacagattagtcgtggccgcacaattactgctgttttcgtggtcgacagcgagagagtcaagctttctgccgggccttactggctctgatctatgcgccacattttcgaactgaaggtaaggccttaatactactacgacacgaagctgacgaagatgcc

SEQ ID NO: 174723 - DNA, 437 bp, Zea mays
  unsure (1)..(437): unsure at all n locations
  Clone ID: MRT4577_90929C.1
gtgctttagtatgcccacgcgtgtttccatatattaatgcncnnggataaaaaggggatttgcgggtagtagnnnttttctcttgtcgacgggcncnncagggcgcccggctggtacctttgtnngatattntnncttgcttgggacccgcgttntnntatttggcgagtntnnttctggagtgggttaaatnnaccattggnnnatgggttacnnntttttattggggcatgtggaagaccacatnnntacattatgtgcgagggcgaacctgtttcacaaaatttannatgaatcncnntccacttnnatttgtatgtggatggggttatagaagattactcttattggttataacctctntcacccaactctattannatggatatttaatcnncttttggnngatgaatacgttttatcaagtattgggcctt

SEQ ID NO: 174724 - DNA, 238 bp, Zea mays
  Clone ID: MRT4577_90930C.1
gggccggcacaagcagggccaactccccgggagcggcaacaacgctaaggggcacaaggcccataagggggccaccggccaggctgaggccgaccaaggcccaggacaaggatgctgtgcacccctcctggcatggcggacaaagtgaagaccgatgtccattagattcggctctgtgcgtcacccaaacttcgtcacgcctcacaaaatgatggccacgcggttccaagatctactt

SEQ ID NO: 174725 - DNA, 344 bp, Zea mays
  Clone ID: MRT4577_90931C.1
ttttttttttttttttttttttttttttttttttttttttttttttttttttttttttttttttacccaaactgccctgcatgaaaattgttagccaaaaagaacaggaacccaccaacacaagacccaacaaggtgtaaaagtggtaggcatggggcaccgggccactgacaccgggccccaccaccttttccacccgacgcacattttttttagcccacgttacttgcaacccgcaccggacacgttcacgcgaaaatgactggttaatatcgcccgggcttcgttcgagacacacccccccccctaggggggcgcccgtatttaaccggagcggactgaac

SEQ ID NO: 174726 - DNA, 333 bp, Zea mays
  Clone ID: MRT4577_90932C.1
cgtctatctagaggcctgctgccgtttttgtcttctatgaagtttcttttgccaaggaagacaagattacaattttgtctgacagattgagatggcatggtgtattcttggctatcaaatcctcgtgtggcacgtggtttttagttggtggatattcacaatgtggggaagcatggtacatactgtataatctccattacccaagtgtatgtacacctgcaagatctagaacgacacaccgagctgagctgcttgtgactgggtgactttgttcttgccctcttgtgttttgtttcctgtaatacacatattacaaaataaacaaaaccttct

SEQ ID NO: 174727 - DNA, 348 bp, Zea mays
  Clone ID: MRT4577_90933C.1
acacttttatctattcctttcttatttttccgtgctgtcggccgttttttctgtcatctaatcctcactgcatatggacactctttaccttatgccgacaccacgttgcctttcttataaataatttatttattattcgtacaagctttggttggatccatcgcggcgggggttattaattatagcatccgttgttcctttagatctattccaccatatttataaatacgttcggcgaaaggagcctattatatctcgcgttgctcaagaaaaacacctgacgatggcaaacaccacctggcataccatgataatgccatgattatttataaaacttaaccctgctct

SEQ ID NO: 174728 - DNA, 299 bp, Zea mays
  Clone ID: MRT4577_90934C.1
ggtcaagccttttttttttctttttttttagaaaaaaaaaaaaaccacctttcactttagggggggggtaacacaaaaaggggacccttttgctaaaaaaaacagctttgttcccctgggttgcacaaaaaaaaaaaaggggggggtaaaacccggggcgatgaaccctgccttggggctttgccatacacttaaggggagtacaagggcccctcacccaggggttttttggccttcccaccccaaaaactttccgatgtctccttttttaccactgccggtcccgaataaaaaccctt

SEQ ID NO: 174729 - DNA, 819 bp, Zea mays
  Clone ID: MRT4577_90936C.1
cggccgctcgaggcggccgggcccggggaaaaaatcaaatctcatcgtcatccccccgcacccccaacccaaccccaccctcgtctcccccggatcggaggcgcgcgagcgagatggcgaacatcgacatggcggcggtgctggcggacatggagcgggacgcggcggcggacgcgcgcaccccgcggaccaagctggtgtgcacgctcggcccggcctcccgctccgtgcccatgctcgagaagctgctccgcgccgggatgaacgtcgcgcgcttcaacttctcccacggcacccacgagtaccacaaggagaccctcgacgccctccgccaggccatgcacaacaccggcatcctctgcgccgtcatgctcgacaccaagggacctgagattcgtactggatttttgaaggatggtaaaccaatcaaactgacaaagggtcaagaaatcactgtttccaccgactatgatatcaagggcgacacgaacacgatctccatgagttacaagaaacttcctcaggatgtgaagcctgggcatgtcatactatgtgctgatggtaccatctccttggctgttctgtcttgcgacccagcagctggaactgtcagatgtaggtgtgagaacactgcaatgcttggagagaggaagaattgtaatctgccaggaattgtcgtggaccttcctacgctgacggagaaggataaggaggacattttgggatggggtgtgcctaatgacattgacatgattgcctttgtcatttgtccccaaaggatcagatttggtgaccgtcacgcagcttcttggacagcat

SEQ ID NO: 174730 - DNA, 432 bp, Zea mays
  Clone ID: MRT4577_90937C.1
tttactcgtgggtctacagcagaatcgctgggggggcattttggtgcttttgagcacttgaatgacttttcagggtattcctatacagcatcagcttttgaaggattgcctcctttggaaaggacaaacgcattacaaaggatggttctgttttcaagagtggaaccttcccataagaagatgcttgttgaagccttgcaagcacataatgaagtggttgctatgactggagatggtgtcaatgatgcacctgctctaaagaaagcggatataggaatagcaatgggatcaggaactgcagttgctaagagtgcttcaaacatggttttggcggatgacaactttgccaccattgttgcaactggtgcggagggaagggccatatataataacaccaagcaggttatccgatacatgatctcaataaatatt

SEQ ID NO: 174731 - DNA, 300 bp, Zea mays
  Clone ID: MRT4577_90938C.1
gcagcctttctcacctggaagagaactccttgaaggcttacaaaatgtgcgacgcctttgtggggacctggaaactcgtctccagtgagaacttcgatgattacatgacagaagtgggagttggcttcgccaccaggaaagtggccggtatggccaagcccaacttgatcatcagcgtagaaggggacttggttattatccggtcagagagtacttttaaaaacaccgagatttccttcaaactgggcgtggaattcgatgaaatcaccccagatgacaggaaagtgaagagcatcataa

SEQ ID NO: 174732 - DNA, 225 bp, Zea mays
  Clone ID: MRT4577_90939C.1
aacaaaaaacaaaacataaaaaaaatacacataacaaaaaaaaaatcaaatacaacacgcaaggtaaaataacaaaaacaaacacaaaaccataaaatctacataataacacttcaattcctaaaaaccaattcctactacacctactgcaccctcgtccatcccctttcttatcgcgaactccctcgacatagccaacaccagatccattgtctctattaacca

SEQ ID NO: 174733 - DNA, 754 bp, Zea mays
  unsure (1)..(754): unsure at all n locations
  Clone ID: MRT4577_9093C.1
ctcggataggcacctttgccgagggcctgcgtcccgctatctcttccctccgccctcctgctctcccgccgttgtagaaatttccctctcccacgcgtcctcccgctcccgtgcacttgtcactgcgcctagcccgctcgctcgctcgctcccactcccgtacccatgtatcctctcaaccgtgaccagcctgtgccgcaacgttcttgcctctgcctcgtcgcgccatgtacagagcgaccccattcaacgacgggtgaagaaattgggttgtggaatgcatctgcagagattcccctttcgcagttagcgtcaggaaggctagatccggaggcacaccgcccggagggagagctggaacaatccaacgtcgattagatgcatcggggtgtgcttcgtcccataagattcgaagtccaaatgccagaggatctgaccaattctactcaaatcgacggggaggaggcgtagatgggtgagatgctgattgcaatgattatattttttcttgttgattgttcatttcgaactctgcaatctacatttgatgtacgctttcgttcagttctttagagctagcaaaaatctgtgtgttttttgtaattgatacgtttatatggtgttccaaatgcactcatgccgcttaggatgtcgaaaaaacatcaacatattgtcatcatagttcagaattaangacaagaagtttgttgtttcggtagccccaaaaaaaaaaaaaaaaaaggcccctagggcc

SEQ ID NO: 174734 - DNA, 799 bp, Zea mays
  unsure (1)..(799): unsure at all n locations
  Clone ID: MRT4577_90940C.1
gttttctagttctagggtttaaagagctcgccgagcccgtcgtgcgccggcccagcaagagcccactactttccgccgtcgccgtcgccatcgccggcgccgacctctccgtctccgcgcgcggcaatggcattctccttcgcctcgccgccagcttcgaaccccttccagacgccggctgcgtcgaatcccttccagacgccagctgcgtccaatccctttcagacgccggcggcgccgaatccgtttcagacaccgactccggccacctcacaggcgccgtccctatcgccctcgccgttccagttcagcttccagccgcagccgcagcagcagccacagcagcagcaggtggcgccggcggtgcaacctccgcagccgcagccacagcatcagaagctgatgctgtacacgacggatatgaaacccgctgggtacaacaccaagtgggaggagctgcacgccgagtcgcagaaggctttgctccagaatcgagtagggttcttcctctgaatatttacttttcccttttctgctttttttgcanaggaggcgcggttattgcttagatggaatcatggaactcattgtcgatttacacccacaactagaattgctccacccaattagaagaagtacatgattactaggccnaattagtggaatgtgctcccgattgattctttacggtgaaatgagtgtgatttanatttgaagtntgaggtnattgntagatgagntatctaagctggtctcttcctacatggnngctattttttttaatatgaggctgctgcca

SEQ ID NO: 174735 - DNA, 538 bp, Zea mays
  unsure (1)..(538): unsure at all n locations
  Clone ID: MRT4577_90941C.1
acaangctttttttttttttttttttttttttttgtttttgtttttttttttttttttctttttttttttttttttttttttttttttttttttttttttttttttttatattattttttttttaaaacccccggaaaatagggggggggaaatgtttggatagggggggggattttatttaattaaaaaaaaaaaggggggggggggaaggggagagaaaacaacaaaaggggtggagggggggagggggggagatggcccaaggcaacccaaagggaaaggggaagaaaaggaccgggggggcccccaaaattggagcccagtccggcccaaatctaggccatttcaagggcaattttgggggttgaaagaaattcctatccggtgccaatttttgtacaattttgatacttaagttaaatggtaaggggggcaaattccaaaaagggagcaaaataaaaataattgggttgacccaaagggcccctttcgggaaaataaaattggaaaccccgttttctaaaaaaaaaccccaaa

SEQ ID NO: 174736 - DNA, 765 bp, Zea mays
  unsure (1)..(765): unsure at all n locations
  Clone ID: MRT4577_90942C.1
actcctaagggcgaatgggatcctcgaggccggccgggaggtcccttcccgactttcggtggaatccccaatctttttctaggttgctgctccctcatcctttttctcttctcttctttctcttcattcatcttgtcctcacatctctcaaccaaacttttcacgatacaaacgacttaatactattcatcatgtcttctgctctcaaccagctcaaggccaccggcactactgttgtgtctgactctggtgactttgcctccattggcaagtacaagcctcaggatgctaccaccaacccttctctcatcctcgctgcctccaagaaggaggagtacgccaagctgatcgatgtcgccatcgactacgctaagcagaagggtggctctgtcgaccagcaggttgacgatgccctcgaccgcctcctcgttgagttcggcaaggagattctcaagatcatccccggcaaggtctccaccgaggtcgacgctcgttactctttcgacaccgaagcttccgtcaacaaggctctccaccttatcgagctctacggcgagcaaggtatctccaaggaccgcatcctgatcaagattgctgctacctgngagggtatcaaggctgccgagatcctccagcgtgaccacggcatcaacaccaacctttactcttatgttctctctcgtccaggccattggtggctgctgaggctggtgcttacctcatntctcccttcgtcggcgtatccttgactgggttcaggctcta

SEQ ID NO: 174737 - DNA, 304 bp, Zea mays
  Clone ID: MRT4577_90943C.1
aaaaaaaaaaaaaaataaatataaaaagttttattttaaaaaaaaaaaaaaaataaaaaatgaatggattatttaaagggcggccggctttataaatatccaaagcttaacttacacaatcatccgccttcttatctattccatcctacctccctaaatcattcacactaactcccttttttacaactttctccactctaaaatccattgccttacccattttaatcaccttccatcaaaaccccttttctccaccatccctaattacctaacagcccttcccccattgcccttcctaatattt

SEQ ID NO: 174738 - DNA, 935 bp, Zea mays
  Clone ID: MRT4577_90944C.1
ctagggcattagagcagaacagagcagggcaaaagctcccaaaagaaccagtaaaagccaagaagcaccgagggccggagaagcgtacgtagtacgtacaggagcagcagaaacaatgaggccaggagccgggttcaacgcggcggcggcggcggcgaaggccgccgcagtcgcaccggcggtggccggcagcgccgcggcgcactccgcgtggcactcgccggtgccgtaccttttcggcgggctggccgcgatgctgggcctcatagccctggcgcttctcatcctagcgtgctcctactggaagctctccgggtacctggagggcggcgccgccgggcggggaggcgaggacggctccggcgccggcgccggcgccggcggcggaacgaagccggcggcgggcctgccgccgccggtatgggaggagaagatactggtgatcatggccggggacgcgaagccgacgtacctcgccacgcccatgtcgagcagggcgtcctccttcggcggcgaccgtagcagcagcaagggcgtcgacgacgaggaggaggagagcaacaaggaggtgcaggcagacgaagccgccgtggccagcgtcatggacgccggcggacagaatggtggcgagcacagtgagcgccggagagaaggaggagatcaggagcgccgcattcctgaggtgtgatttttgtctcggtttttgctttgctcggagaagctgagctcgcttttgacgctggaaaaaccatctccggccaggagaagagaaccccgacccgagcaagattttggtggggttgtaatttttttttgcaaatgatgaagtggagaacgggactggtggtgtggctgtaattttgctgagttgcatgtaacttcttctacgatgggaatggattaacataaaagcatgcatggccctattgatgacc

SEQ ID NO: 174739 - DNA, 239 bp, Zea mays
  Clone ID: MRT4577_90945C.1
aaacgaggcttccagcgcatggtaatcagatagggtccactcgagaacaaagcaaaacacagccgcacgcgcatataatcacagccacattgtcacgttgagtattttttttttttgcagtgtagtgcatgcagaggaagcaccaaaactaaaaaggtttacaagacaaaaagtgattgctgagtagcccacgcgcgaactacacagttgctgcgattacacagttgctcctcgtgccg

SEQ ID NO: 174740 - DNA, 453 bp, Zea mays
  Clone ID: MRT4577_90946C.1
ccctgctccgacgcctctctccgatcttaccaaggggggtttttcaacctcgggggccgcaaccgacgcctcccttgctaaccaccatggtgtcggacgccagcaagaagaaggccgcatcagccggtcatttcatgtccggggccgccatggaccggcccgacaacaactcatccgccggcgccaggcccttttaatccatcctccctcaccttgcttgttattattcatcagattcagatcaacaacaaaagctacctgcgacgagctagcttaattagcttattgatttctactactgctactcattcttttgggacaggtgagtccccggtctcgtatcgcatatacaatccaaattcttgcaagctatatctatctctttattagcgctagctagtcacaacagtccgcatatatgtatcggggaaaaaagaatcgggggttgggatg

SEQ ID NO: 174741 - DNA, 409 bp, Zea mays
  Clone ID: MRT4577_90947C.1
gggagatcatgttgacacgagagttacatgtatctcgaaactacacaacttttggtgcttatagaagtgcttgattctgagcccatcaccatacatatgcgcagccaaaagaacctactgactacttgtccacctcgaacagatacctaatgctcaagatggtatacaaacaaagacatatctacatcctgtatagatacattgcatttcgttcaatcgacagcattggccgaacggacccaatggacttcgtaatgtaacgtattgaaacaactacagaccttatgaagcatcacaatgtctgactgctagcaataagtgcttaacgaatgtccaacgtgtgatcttgtgtggtatgatccagatgatcggtgtgcttgacttctccgtcgccataacatatgttata

SEQ ID NO: 174742 - DNA, 1167 bp, Zea mays
  Clone ID: MRT4577_90948C.1
atgccagaagttctaagcccaccagcagaggaagaattgccaaaagcgcaaaaggctcctgccgcaactcccaagagaaggagaatgaccagcgtgctagacgctattttggagaccacaaaggccttgagccctgctccttctaagaaaattactgaagcttccaaagtccaggccgaagccaaagctgggccttcagcacccattgagacaaaggttgtcgcgcctgaagataaagcttatcagcaaacttcagataccgcatggcagcagagcaagggcttgattttaagcaatgccttaaggacacaaaagagcaccgaagatgaaagtcgtacaatagctcttacaaccttcgctcagagtaaaataaaagaatacgaagctaagtacaatgttcaggccgaagcccaaaaagtcgaggttgaagaccttcgaaaacaactagtcgaagctaaagaaaattgtgaagtcgcgaaggccagccaagagataagtgaatggtggaaggctaggttggagaaaaatattgaagagcttcgcgagtccaaggaaagatgcttcgaaaaatctttggactgtgtgaaaaatttgaaaaacagttttgcaaaagttggtgcctactcctctgaggagaactttattcgcggtgaccccgaaggcgtcattgagtggataaacggggaagccaaaacttttgaggaaattttgaatgaccgcggcgatatttgtgctttctccggcaccccgggaatcgtagccattctggagaaggttggatgcgaatacgtgaaagctgtagctcaagccgaagacgccttctacttaagcgacacgaaggaccctttagccgaagcaactttaatgggcagaaagttttactctgatgtctgggtaaacggtggccgagaattggcccacaaaattataaaaaagaatgaaaaagacacccatgacgctcgagaagaagctaggcaaactgaagaggctgctgagcgggaaaggcgcatagctgagctatcaccgctgccagagccgtacaatcccctggctggtccagaaatgaaggaagcattggacgttatgagccttgcaaattctattatcgacgaagttgtcgacaaattattaaacgaagctgcagtaaagatccttagtgaagagtag

SEQ ID NO: 174743 - DNA, 2101 bp, Zea mays
  Clone ID: MRT4577_90949C.1
cgggctgaacaacatactcgaacttgggtaccgccgggccggatcctacctgttgccacatctagtggttcggcctttccatctgccgttcgcccagcgtgttctccctctagtgcggcaactgggcgaccgccgccgccgctctactccaggtgcccaggcgttcgtccgtaccttctcaggccttcatcgcgtccttcgccggcgacgatcaccgacaaggatggaaagaacaattaattccttgatgtacaaaggatctattcctgatgcaattaatcaatcaagaagggagaagaagctctttgtagtctacatatcaggtgaagatgaggcttccagtagtttggaacagtcatcactgattgatgaaaacgtggttgaagtgatcggtagatgttgcatcttattgcatctcaagcaaggcaatgttgatgcatcacagttttcagctatctatccccagaagtctgtaccaagtatatcagtgattggactgaatggagttctgctgtggaatcatgatggatatatcaactctgaaaatctgaaagaaagcattgagaaagcgtgggctgctcttcatctacaggagacagcagcgaccttgttgacagcatcacttgctacaagaaattctgaacctgtgaattctgctactactgttttgccagctcaagggggctcttctactttagaaaatccttctgatttatccagtcaatcaccagatgtttctggtgccagtgaagttgctcattcaactgatctggtatcacaaattcctaatagcactgccctttatgaacctcttgagataaatgaaaaagaagggtcaaaatcaaactcggatgataaaactgttgagaagctaggttcaacaagtactgaatttgattgtgatttgcttgatagttcaaggaagtcaaatacggtcagttctgcagattcgaagggagaagacattacaccatcagcaaaaagaaagaacaaagatgatggaagtcacacttctattcccttggaggatactcctagtacactcactaataaaggagtttcttcccagtcacgcgtggaacaagacaaggcaacttcttttgtttctgtgaagtcagatgatattcagcttagtattcgtatgcccagtggaaatagactggagatcaaactaacaaaacaagatgttttaaggaaagtgaagaatttcgtggatgaaaaccaaggcaatgggcttggctcatatgacctttctctggtttatcctaaaagagttttctttgaacaagatatggaagcaacactatccgagctgggtattcaaaaccgtcatgcaatgattgttgttccacatcggcagtctggtcaggtatcaaggcgtcactcctcggcatcttatgatatgggtgtcaattcaggtgcggatgatgttggtggcaattcaggtgcggggggatactttggttacctgagaaccgtcctgtcttatgtgaatccactctcctacctgaggggaaataccaactcatcaaatacagagctacagtcaaatgaaggcctgcggcagcttagacatggatctggtccatggagtgagccacggcctcttggcaataggggccatgaagtgactgatgcagactctgcaaacacgctgcgaaggcggcctagaccatttggtgccaatatccacactctggggagcgaggatcatggtccgtctgatgaaagaaatgttttctggaacgggaactcgacagagtttggaggcgacgacagaaaataggttgtggcgtggctggcagggcctgggacgacactatcagacagaatcaaagttgcgaatagacagctgaaacaaatgcctcgacaggcttattgaggaataagtattgagattatagtgctgaaataatcgctgaattgtgatgtttacatttgtggaaacatacggtcgctggatccgtatactcgttgtatagtacatagccacagatatattaaatccgaactgcttggttctactgtcaaaaaaaaaaaaaaaaaactcgagctcgtgcacgaagaaaatttgccgctaccaaaaaaaaaaaaaaaaaaa

SEQ ID NO: 174744 - DNA, 311 bp, Zea mays
  unsure (1)..(311): unsure at all n locations
  Clone ID: MRT4577_9094C.1
gctgggtttttttttttttttttttttttttttgggaacatcaaacttcacaaggattcaagccatactgctgcaaaagagttttgggtccaacacagaggacacaacaggtccattaaaccaacgaagccacaaccacgattcatggcgcgggatcgacatgggggtattanacnacncccccccatatccccaggtccagcncctgcttatctgaaccatggcttcctgcccccctcgggggcggcgcccctggtggggagtgctctccttctggttgttcgcctctgcttgggtgcgcccttctctcc

SEQ ID NO: 174745 - DNA, 675 bp, Zea mays
  unsure (1)..(675): unsure at all n locations
  Clone ID: MRT4577_90950C.1
acaagaaaaataaatggaattttagaactaaagcatacaaataagccccaaatgttctgtgctgatgcatagacaaatatgtctatcaaatcaaaaacttgaggatgaagaaatacaaactgatgtcaatataaatgatttctaccaaaaataatgattcagtaccttgttcaaagaaaactcttttaggataaaccagagaaaggtcatatgagccaagcccattgccttggttttcatccacgaaattcttcactttccttaaaacatcttgttttgttaatttgatctccagtctatttccactgggcatacgaatactaagctgaatatcatctgacttcacagaaacaaaagaagttgtcttgtcttgttccacgcgtgactgggaagaaactcctttattagtgagtgtactaggagtatcctccaagggaatagaagtgtgacttccatcatctttgttctttctttttgctgatggtgtaatgtcttctcccttcgaatctgcagaactgaccgtatttgacttccttgaactatcaagcaaatcacaatcaaattcagtacttgttgaacctagcttctcaacagttntatcatcccgagtttgattttgacccttctttttcatttatctcaagaagttcatnaaggggcagtgctattaggaac

SEQ ID NO: 174746 - DNA, 417 bp, Zea mays
  Clone ID: MRT4577_90951C.1
taggggcctttttttttttttttttgtttttagccaacgccaaaacaaatgtcgttcgatcagacagtagaaccaagcagttgggatttaatatatctgtggctatgtactatacaacgagtatacggatccagcgaccgtatgtttccacaaatgtaaacatcacaattcagcgattatttcagcactataatctcaatacttattcctcaataagcctgtcgaggcatttgtttcagctgtctattcccaactttgattctgtctgatagtgtcgtcacaggccctgccagccacgccacaacctattttctgtcgtcgcctccaaactctgtcgagttcccgttccagaaaacatttctttcatcagacggaccatgatcctcgctccccagagtgtggatattggcaccaaat

SEQ ID NO: 174747 - DNA, 962 bp, Zea mays
  unsure (1)..(962): unsure at all n locations
  Clone ID: MRT4577_90952C.1
atgctgaagttttgaaaatctagttaaattgtcaacanatattgtccagatatggaagcanaactatccgagctgggtattcaaanccgtcatgcaatgattgttgttccacatcggcagtctggtcaggtatcaaggcgtcactcccgggcatcttatgatatgggtgtcaattcaggtgcggatgatgttggtggcaattcaggtgcggggggatactttggttacctgagaaccgtcctgtcttatgtgaatccactctcctacctgaggggaaataccaactcatcaaatacagagctacagtcaaatgaaggcctgcggcagcttagtatgtttcatatttaattttgagtcagtgagggaattgtattgcattttcatttatgccctttgtagttctgtgatttctaatcacggcaattatctctacatctctgaaacaggacatggatctggtccatggagtgagccacggcctcttggcaataggggccatgaagtgactgatgcagactctgcaaacacgctgcgaaggcggcctagaccatttggtgccaatatccacactctggggagcgaggatcatggtccgtctgatgaaagaaatgttttctggaacgggaactcgacagagtttggaggcgacgccaaaaaataggttgtggcgtggctggcagggcctgggacgacactatcagacagaatcaaagttgggaatagacagctgaaacaaatgcctcgacaggcttattgaggaataagtattgagattatagtgctgaaataatcgctgaattgtgatgttaaaacaaaaaaaaaaaaaaaaaagcggcccccgtatacccgttgtatagtacatacccccagatatattaaatcccccctgcttggttttaaaaaaaaaaaaaaaaaaaaaaaaaaaaaaaaaaaaaaaaaaaaaaaaaaaaaaaaaaaaccac

SEQ ID NO: 174748 - DNA, 781 bp, Zea mays
  unsure (1)..(781): unsure at all n locations
  Clone ID: MRT4577_90953C.1
cattgggtacctcgaggccggccgggaatggcacggctggcaacgacaagacgcgcccgctccccccctccggccgtccactctgtcgacaagatagtcagacagatgcctgtgtctgtactgtgctccgctgctccacacttccgaccctctgagcgcttgcacacgatatcaaggctatccctgaaatcccaacctacgtggcgacatggcaacaccactccagaccgaacccatttcgccgagagctacacctttgcctccgctccctgctgaagatccgctcacgcccgcgcaatggaccacgctgctcgccattgcagatgccgtcattcctgcaatccagcccgcctcgacagctacggcgcaaaatgatattgttgcgtctgaccaagactactctactgctatcagcacgctgagggcccgcatacccgagagcgaccctgatgctggggcggctgccaaagagtacttggccgcatatgcaagtcaggaccccgcattccgtgcagaaatgcagcgagtattcgccctgtacatgccccatagtcagaggaaggaattggccagggtgctcgacttgcttgataccagaccggggggtcgttgttcctaactggatacctcacgcccattagcgcccagcccgtccatggttcgagagtcatttctccacgcttgggcaacccgctcgcttgnggccactcccggcagatgcgtcgctcattcaccattctctgcaaagcagcgtgggatcaaagacgtcgcgggctttgcg

SEQ ID NO: 174749 - DNA, 187 bp, Zea mays
  unsure (1)..(187): unsure at all n locations
  Clone ID: MRT4577_90954C.1
tgctatatctgttatnctccacaggcaaacctggggcatcttgacagatttgcaggtgtcttttacactgtatatcattctaagttgaaagaactattgttttagaccttattattcaaacaatcgactctgttattgtgtcccattacaacattgactagtatccattttgtctcttctctcttat

SEQ ID NO: 174750 - DNA, 209 bp, Zea mays
  unsure (1)..(209): unsure at all n locations
  Clone ID: MRT4577_90955C.1
aaaaaaacccaaaaacccccggatccattaaatatggcgtgcggggccnttcactttattaccaactaatcactccctaaataattctctctctcctccctcaaaaaaagaccggttaaccactccttcctttgtgcttaaaaaccttttggccccaaccccacccccttacctttccctctcaacaccactcataaccccttcttctt

SEQ ID NO: 174751 - DNA, 479 bp, Zea mays
  unsure (1)..(479): unsure at all n locations
  Clone ID: MRT4577_90956C.1
aaaaaaaaaaaaaaaaaaaannnnnnnnannnnnnnanananngaagggaannccgaaagggaacctcgaggccggacgggaaaactacggtacaaaaagaggggcgaccgccccacagactcacccaaacagacaagcgggcgccaaagacaagcgcgggcaacaaccaccagcaagcccgcaccggcaacacgcagccaccacggcgccaagagagcaccacccgcccagcacccccacaagaagcccgaggagcaaaccgccggccaacacgcgcacaccgagaccgaggcgcccaccccaccagcagaacgcgagcaccagaggaccaacaaccaggagaaggagcacccgcaccagcagccaccacggcgaggacggagccaacaccgccggcgccagcgcgcacaacgacaagaacgaggcgaagaaggaccccccccccgcgcccaggcacaagaccacggaggaggacgcc

SEQ ID NO: 174752 - DNA, 404 bp, Zea mays
  Clone ID: MRT4577_90957C.1
gcctacgtaagctcggaattcggctcgaggcgaactgaagcgtctgtttgttatcctgtggagacctcgatagaaacgagcgcgttagtctttgaaagacccacgaggtctcgaccgacacagatcacgagggttggaggacagagcctctaaaggaccgacagctctatgtatcaaaagaacgaactatctcagtgaaacgactgctcaaaatgcatagcagacataatacagaaaggacaagtactaaaccataacatctgagctagtcacatgttgggctgatgaactatagaagccacccgggctgccggttaagatgggcctggccaacggtgaaaaaagagaaactatacatgaacattacacataacagtaatgtctggggctccagtacggtgatg

SEQ ID NO: 174753 - DNA, 352 bp, Zea mays
  Clone ID: MRT4577_90958C.1
agcagtggtaacaacgcagagtactttttttttttttttttttttttttttttggaaccaaaagttgatggggggggggggggaaactccttatgattttacctgcattcaaaacccagcaaagagggcaatctttccaggttcacatgaaacaccagttctgaaaccccccgggggggaagaccaaagcaggacctacattgcctttttcagcacctccaactagcaaaacccgggtccctttgcgtttgcccccctgtttaggggcgatttccggcgctttgggggccgctcctgggggccccggcctggtccccgggctccggcgcccccttggctttaggttgttccc

SEQ ID NO: 174754 - DNA, 279 bp, Zea mays
  Clone ID: MRT4577_90959C.1
taaaaatccccttgtctgtcctacgccaaagcacaagtctaatgcttggccctggtcttggttgttcagcgaggcagcggttcagctgggtttgtctacttgtgtaaggtattattaatacattgtgcaaggctttctgactctacaacgactactttcagttcatgcactagctctaccccatcctaatgtatatactcgtattgtgtacattcatatctgattgatcacagggtacataagcctcctgcacatttgtgatctatgaattattgctca

SEQ ID NO: 174755 - DNA, 174 bp, Zea mays
  Clone ID: MRT4577_9095C.1
acggctctgttctctagctattgtctttgtctctgaccgcagctgcctttcgctagctgagtacctcgtctagtacaggtgagcatgcagagtgtggtggagtccaaaccatttgcaactaggaacaagaaccgagcccagcacaggaacacactcagcaacaggagcacgctg

SEQ ID NO: 174756 - DNA, 519 bp, Zea mays
  unsure (1)..(519): unsure at all n locations
  Clone ID: MRT4577_90960C.1
aaaaaaaaaaaatttttaaaaaaaaaaaaaaaaaaaaaaaaaaaagggggggggaaaaaaaaaaaaaaaaaaaaaaaaaaaaaaaaaaaaaaaaaaaaaaaaaaaaaaaaaaaaaaaaaaaaaaaaaaaataaaaaaaaaaaaaaagggggggccctttttggggttcccctttttcctcccccttctttccccttttgtgggttggttttggggcccttaaattaatttcccttgccccgtttttaccaccttgggacggggaaaacccttgggttcccccctttttttcccttggcccaattcccctttttccccgcttggttaaaacccaaaaggccccccccgtttcccttttccaaacattgcccccccttaattggcaatgggcccccccccttttccgcccttttaaccccgtgggtttgggggttcccccccagggtcccctttcctttccctagccccttacccccctttttttnctttttttcccttttttttttcccccttttcccgg

SEQ ID NO: 174757 - DNA, 126 bp, Zea mays
  unsure (1)..(126): unsure at all n locations
  Clone ID: MRT4577_90961C.1
agaaggcncnncgcaccgatnncgcccttttcccnnnacagttgcgccagccctttgaatggcnngaatgggaccgcgcccctgtnnnagcggcgcattttaagcgnccggcgggtgnntggtggt

SEQ ID NO: 174758 - DNA, 855 bp, Zea mays
  Clone ID: MRT4577_90962C.1
gccggccgggtcgggaatttggatgaaggaggatgagctcttattcaagccttcttctacctgaacatctctcttctctccgatctcctctttctaggcgctaacatctggtatcagattaggtcatcctgaatccattctctgttgtgccgcgacgcccacgatcgctgccatggagcaccaagacgccaccatccacaagctgctcgacgaaatgcgactcatggaggcgcgtctgtctgaacgcatcagtggacgctgcgacgacgtcgagcgccacctggacgagcgctgtgaagagccttgtgacgagacgcctagcttcgacaagggtcccatcttcgatgaggagccctgtttccaccgccgcctcctcgattcggatccgagctctccctgcgacggggtcgatctgctctcggtcatccgtgcggtggccccgagctcccgggatttgcttcctccatcgggcatccgtgccgtgccgagcagctacatcgcgagcgggcatccgcaggaggacagagaacttgtccagcccctgcgacgagtcgaggcggctacttgcgtcgagtcaagcgatcccagggcctccagcactgagctagacagggagttcatcgccgcctccgccttcgtcacatcatcagccacctccggcaccagcgccctcgaggcaggcgcgcgcgtggacgcggctagcgaaccagagtttccgcctcgtgccaccctcggtgcccaccctgactacggacttcgccatgtcgaaccggtgggtcttctcgaggggcggtagtccggcccttctcgagagcttgagcgcagcacagcacggccagcgggtcatcgttgcgc

SEQ ID NO: 174759 - DNA, 1836 bp, Zea mays
  unsure (1)..(1836): unsure at all n locations
  Clone ID: MRT4577_90963C.1
ttgatgagtaccagtaggcttatggggcactcctggtaaatctgtgactgcagatgaaactcaacagtgggctttcctgacagacgccttgacaaaatttcaggttcaaacctttatgtcgaaaacataagtactttttgtccttgtgttgaatgatctaagcttgtataaattatcaccgttgggttgttttctatggaaggtcagataaatgggttggattccaataatatggttgttccggtaccttcattgcaatgtgacatgttcatttgttttcgatgccacaagattgttttgggattgttgtattggacactattgtatgagttggatgtataagcatctggttgttccaggttgtcaagtcactttgttcatgataaagagttagttattcagctggacttctctggtganctgccctagaaaaaaacatgctaactttttaatattatatcatgtgttgcttgtggttgaatgaaatttgttactgttatgtggttgatattggattatgcctgtattcctttacactctatctgcctcataaagaagcatattcacactactcatgatatgttcatcattgtgtgggctgcgaccgaatccaacataagaggaaaggggcgcttgctttatattctttctaacctgcgatctccgtccatccagccgagaggtcgtgtgcgcgtggatctctgcgtggaagggatgaagattacggcgctcctggtgctgaagccgtcgacctccggagccgggagctcctcgtccggcggcgagtcgggcccggaggcggtggtgctcgcgaacgcgatagacgtcagccacttcggctatttccagcgcagcgccgcccgcgagttcatcgtctttgttgcccgcaccgtcgctcagcgcacccagccaggccagcggcagtccgtccagcacgaagaatacaaggtccactcccacaatagaaatgggctttgtgcggttgcattcatggatgatcattatccggtacggagtgcattttctcttctgaatcaggttcttgatgagtaccagaaggcttatggggactcctggaaatctgtgactgcagatgaaactcaacagtgggctttcctgacagacgccttgacaaaatttcaggatcctgcggaagctgacaaattaatgaaaattcagagggacttggatgaaacaaaaattatcctacataaaactattgagagtgtccttgccagaggagagagattggatagcttggttgagaaaagctctgatctgagtgctgcttctcagatgttctacaagcaggcaaagaagacaaaccaatgctgcacaatactgtaaattttggctcttcactcatggttgcaagaaacaaaaacggtcgatatcgtgctaatttatttactgtaagttaagtcgccagtgaagcgtggacacgtggttgcaaggcccgagctcagtgaaggctatacttttcttcaagacctgccagaattggactgttttcttgtgagaattccagctctccaaacaggccatggagtaccatcaacattctttagtgactatgaaacctcgtagtaccagctaacaccatttactctactactactatataaggcttgcgtcaaactgcagaaatcaccaatatggttaaattctcaaagcttgctggagcacattttgtgtccacaacacaacctatgtcacattcttactcaactctaccaaaaaaaaaaaaaaaaaaaaaaaaaaacaaaaaaaaaaaaaaaaaaaaaaaaaaaaaaaaaaaaaaaaaaaaaaaaaaaaaaaaaaaggggggccgtttta

SEQ ID NO: 174760 - DNA, 382 bp, Zea mays
  Clone ID: MRT4577_90964C.1
aactcgaaaaaaacaaattttattcacaaacaaaaagggaccaccggtgttacatgctccgttcatgctaattgtggatgacgcagttgaccacttacagctgaattcttacttattcagactgatccaacatgtggcaacatcagaggttcacatgcttacagacgacaaatatgaatatcaagggccgggctcggctgtttttcagaataaccacacgacaaccacgaaattgccacgcttttaaatggacaggtcagaagcccatggcccgagaagcccgttttacttattaagcactcccgcctggtccttcatggcatacgattcctacttccagcagagaatattagccaggtggccccccttcatcataggagga

SEQ ID NO: 174761 - DNA, 1118 bp, Zea mays
  Clone ID: MRT4577_90965C.1
cagaaactgatgggtttgcagctccacttcgtaggtgcaggactccacatttaggtcgtcctgtcaattgggttcctttcaatctgcattggaattggcataaaagctgctgtgggttcaccagtatgacggacggcttttgattttgtctaccttatacgcgtgtgtcttcaattccgcactgcttatgttgctccatcttcacgcgtgtttgggactggggcgcgcgcgttccctccggtgctcctggtctctatagccatttgaagttactttgcaatggactttgttgcattgctaccacttccacagattgttgtatggagatacctccatattccagatggcccagatgtactgactacgaaaactgcactggtttgggttgttttgatccaatacattccaaggttgcttcgaatattccctgtgatcacagatttgaaaaggacagctggtgtttttattgaaactgcttgggctggtgctgcttattatcttctatggtttatgctggctgggcataatgttggtactttatggtactttttaaccatagaacgtgaagatgattgctggcatctatactgtgacgatcccaactttggcttgggatgtaatagcagctacttgtattgcaataatcatcatcatggcagctatgatagttggcttacgaataatagtacccaagtattcaacatgtgcaatggcggtcaagacaatcctttcaactttggcatttatgagcaagcactggtctctaaaatacttagtccaggaaatttcatctcaaaattatgttattgcttctggtggggattgcaaaatctaagtacacttggtcaagggcttttgacaagcacataccctggagaagtcctgttctctatagcaatatgtgtccttggactaattctttttgctctcctcattggtaacatgcagagctacctacaatctgttgctatacgccttgaagagatgagagttaagaaacgcgatgctgagcagtggatgcatcaccgttcactgccaccggacatcagacatagggtgaggaagtatgaacgttatcggtggttggaaaccaggggagtagacgaagaaactttggt

SEQ ID NO: 174762 - DNA, 307 bp, Zea mays
  unsure (1)..(307): unsure at all n locations
  Clone ID: MRT4577_90966C.1
ctnnttttttttttttttttttttttttttttgagggtttttttttttttttttttttttgaacaaaaaacaaaacccttcccncggactccaaggcttaacatccaaaaaatataccttttttacccccgtagcaanaaaccaaacagtccccacacctgggtctggccccaatggagtttctttttttgccnnctccccccttgagagcttttttcgacccaagccaaatgggaaagccctatccctagtacaggtcgccttccttgtgggtgtggatcccccaaactgactttgggtaggaaac

SEQ ID NO: 174763 - DNA, 116 bp, Zea mays
  Clone ID: MRT4577_90967C.1
ccctcgttttttcaagacgaatcgcaaactgctgggccgtggggggaattccttaaaagtggccccagcgatcccaagacaatgccccagaatgcagaacatggagtggaccttaa

SEQ ID NO: 174764 - DNA, 198 bp, Zea mays
  Clone ID: MRT4577_90968C.1
cgaagcaaggacccactagagcggccgctccacacacctttttctggaagccaagagcagcacaaacgcagaccaaaagagaccaaacagccggcaccatccacgaaccaacgcacaccagtacccagaacagacacggaacgaagcaggcaccacaaaccaggaggcgaccacccaccaaacaacccaacacacaca

SEQ ID NO: 174765 - DNA, 212 bp, Zea mays
  Clone ID: MRT4577_90969C.1
gaaaccagaaacgggctgttcatagcacagatcggccatttaccacacagcaaaaccaatgaaaataaagaccagaccaatgaccgatgaatcgacccgaaagaaagaggaaacccacacaaagacagcaccggagcctaagcaagagacattcaaacaacagggtactattccatgtggagctcatgatggaagaaaccaaacggagacac

SEQ ID NO: 174766 - DNA, 226 bp, Zea mays
  unsure (1)..(226): unsure at all n locations
  Clone ID: MRT4577_9096C.1
catacggtaaacatgaaacatatgctctttcaattaaagaagtttatacaattggagaanaatggcgcagtccacgctctggttaaaatactcgaccaagacacctgcatactactacctatgaaccatacctcctgctcacgatccatgatccatacgtcataaatgggtattttaagaactctgatcatcacaatccacatttacgcccctttgatgaatcaaa

SEQ ID NO: 174767 - DNA, 634 bp, Zea mays
  Clone ID: MRT4577_90970C.1
attccctcccacactcctctctgtcctgaccatgcaccaacggctgagccctggccgagccgctctcccccgacgcacctgcatcgaccctactgccactatgagagttcggagcggaggccgagcgcgaccgcgggagggggcggccggggtccggtccgcggaggcggggaccagggcaacgcacaacgcgccggcggtgaccagtagcccgctctgacaccagctcctcgcatcggatctcccctactaggcctcctcgtcccgacatgcaattgaaaaagagatagatctttttataggcgaagtgttgaacatggctttggtgaaagaaatgtcttgttagcatcaaggaagcggcgacatcacaacccctacaagcttgtgccttaaaacaagaggatacgagacagttggagtgcttttatgaaggcttttgccaatcacttgaagcgctagtacttttgtgaatgattttgtaaagcggttgcaaccatgtgcagaacataataacatgtggaagctctgtgaatgattttgctgcggtgcttgccgacggcctatgtgactgggaatctatccttgggcagttagattttgacatccttgcgattctgcgtataaaaatcggccg

SEQ ID NO: 174768 - DNA, 512 bp, Zea mays
  unsure (1)..(512): unsure at all n locations
  Clone ID: MRT4577_90971C.1
attatccaaaatcaggaccaatcgctgttactaccataaatcaatcacccacagacacaacatacgtaccatgcttccgagcgctcgattgcaaaatcgacagattacaccggtattgctgcaataataccacaaaaagcatcacacagagacatgtgccctaaccagtccccaatatgaagaggcacctaccctagcctcctaagccgtacagggtgcctccctgtcgctcgagcgcgtaaacaacgtccatggcggtcacgggcttgcggagcgcgtgctccgtgtaggtgacagcatcgcggataacgttctctagaaaaatattaagcacgccaagggtctcctcgtacatgagccccaaaatgcgcttcacgccacccctcctaaccagactgacagatcaccggcttggcgataccctgcatgttgtcgtgtacaccttccgagtgggcgcttcgagccgnccttgcccagacccttgccgcccttgccgcacccagacatatacg

SEQ ID NO: 174769 - DNA, 297 bp, Zea mays
  Clone ID: MRT4577_90972C.1
cctagctaaaggataaaggttccaagtgtctaaagtactgaagacagggctagctccttattttttgttgtcaaaaaaatcgtgtatgattgcaacaatactgacaaaatatggttgtactttatattttggcatattgtccacaaaacaagtttcttatttttatgcgttttacgatattttctttttttaatttgaattttgcatttccttcttctaagttgctatgtaaaaaaaagagctacactacttactccaacgtcaaggccgaactcgtacagagcctaatcacctaag

SEQ ID NO: 174770 - DNA, 633 bp, Zea mays
  unsure (1)..(633): unsure at all n locations
  Clone ID: MRT4577_90973C.1
cccacgcgtccggagagagaggagagaaagggggtacttgcatgatgtgaggcgacatctccgggagcggcagcgagatgtcgacggaggccgccgacgtgggaaccctagagagaggcgagagcccgtgagcacgaacatgagaggcgagaccgagtgaaccctagaaagaggcgagagccgaggcggcggctgcgagtgaactcgagaggcgagtgaaccctagcacggttttaccagcgcgagcacgggccaggctgatgcgcgaagcaagttatctgtgtttcaattgggcctggctatgaagtcagatgtggctcgcctcagccaggcccccaagctgggccaggataccaaacatggtgtgcttgtttcaaatgggcctgctcatacgctgggccaggcaagcaaacatatcctaagaaaacgcgaagccttcgtgcaatggtgcctgttgtgatccgatttggtggttgctgctctgtttttctcagacctctctgttcatgaccgtgttcaccgataggattcatttttgttttgcattgcatccttgtgtaagcactangggtgtgattggtagcatgaatacaggttggccgggccctgcagatgcgtacgtatctgatcata

SEQ ID NO: 174771 - DNA, 144 bp, Zea mays
  Clone ID: MRT4577_90974C.1
gagccccccccccccaggaattcggcacgaggggcttcttgagcattagcgagagccccttacatggcgcagcgctcgcatagttgctggcgacctcgctgaggcctcacctgcaaagcacgcagccagctgcgcctacgctac

SEQ ID NO: 174772 - DNA, 535 bp, Zea mays
  Clone ID: MRT4577_90975C.1
agctggcaggcactggcagagggagaagaaccgcgaacacacctgcgacagtagagcaacctggcgctaactgggccatcatgggccatcttggtagacagtttcatactggcttcaccctctacctacatgatggctagacggtaagccgcagaaatcgctgaggacgatgaggacttcgttaggataatcatgcgactgcatatgacggagacttcttttttacacctggaccatagaacagactgtccaaacgggctactggccccgctgaagcgatctatgccgaacctgagcaccggcgtacatgggcggcacgccatgaaacttgctagcctgccacagcacatggctggacaagaacacgccaccgatcattctcgggaggattgctgatcgtagcaagctgtttgacgaacgatgagtgctcttatacaaacaggtggacacagtgaagagcgctcgatcgttgcggctgattcaattaccgagggaagcgctagctgctgcgttgtacatgccgctgacgattgat

SEQ ID NO: 174773 - DNA, 363 bp, Zea mays
  Clone ID: MRT4577_90976C.1
aaaaaaaaaaaaaaaaaaaaaaaaaaaaaaaaaaaaaaaaaaaaaaaaaaaaaaaaaaaaaaaaattaaattataaaaaaaaaaaaaaaaaaaaaaaaaaaaaaaaaaaggtttgtccttgccgggggggcggttaaaaggggggatttttggaaatttccataaaacgggggggggttggagcttgcttttagggggcccaattggccttatgggggggggtttaaaaattaacgggccgtggttttaaaagttggggatgggaaaaaccttggggttccccaatttaatggcttgggagaaaatccccttttggcaagttggggtaatagcaaaaaggcccgacccgatggcctttccaaa

SEQ ID NO: 174774 - DNA, 1355 bp, Zea mays
  Clone ID: MRT4577_90977C.1
cccacgcgtccggagaggggaattcagacttcgcatctttgctctgagtagtgaatactgccatactgcttaggcgtttactaccttgcattgttaatggcgttgggaagaccacaggtatggagtacccagagcgccctggacagccactctgtgagtactatgcaaagaatggcacatgcaaatttggttccaattgcaagtttgatcatcccagggaaagtggttttgtacctgtcgctttaaacaacagtggattccctctacgtctgggtgaaaaggaatgttcctattacatgaaaactggacattgcaaatttggaggtacatgtaaattccatcacccagaacttggttttcttacagagacgcctggcatgtacccaccagttcaaccatcacctatttcctccccacatccatatccacatcattccaactggcaaatggggaggcctgctgttgtgccagggtcatttttaccaggcccgtatccaccaatgatgcttccacctacagttatgccaatgcagggatggaacccttatgtttcacctatgaaccaaactacaccagctgggggccagcaagctgttccagcagggccatcttatggcttgtcgcaccaggagccaacctctgcagtgacttatggcagtcattatgcgcaattgtattcttctgggacttcaagcagcaacatacaagaatatgtgtttccagagcggcctgggcagcctgaatgtgaacattacatgaagacaggaacctgtaaatatggagcagcctgcaaatatcatcatcctcaatacttcagtggaccaaagtctaactgtatactgagccctctgggtcttcccctgcgtcctggttctcagcgatgtgcttactacgcacaccatggcttttgcaagtttgggccgacatgcaagtttgatcacccgatgggtactccaaactacagtcttccagcaccatcacttactgatttgccagtcgctccatatcctcacactttctctgttactcctattgctccatatctgctgccccctgatccgcggccgcaattctgactgtagtcggattcagagctccgttattatctcgtgtaacgtgcacaattgcaggggattcgaatgggaaagctgatgggttccatagctctagcccaaatcttttgtttatctcgtcatcttattacatatatgatatgatgtttatctcgccaagcttactaaagtttagtaaggggaaccaagacccttctaacataatatgtaaaacgatttgtgaagcgaggtggctatatatatgagctatctctataatttatacacagccggctccgttct

SEQ ID NO: 174775 - DNA, 449 bp, Zea mays
  Clone ID: MRT4577_90978C.1
aaccaaattcatagcagtttaagacccctttttaaattttttttgggggttttgggcaaatgtttaaattaacatacaaaggggagcgccccaaaaaacgcactaaaaaaaagggggccatggaaacaaggcccctgacaagccctaaaaaaaaaatttaaacttggcgcaaaacagtatttaacaaaaaggacccacggacaaattaaattgttgcccctccaaaacccctgaaaaaggccattttcgggggttaaacaaactgactttggctttaccttttttcggggggggatttaaaaaacaaactgggaaaaaacttgggggatttatttatttttttgaacaaaaaggtccggcaccaaaaaaaaaaatttattttgaaaccaaataaatgttctggagcaccatgcctgggtcaaccatgggggagaacaacccaaccagga

SEQ ID NO: 174776 - DNA, 1358 bp, Zea mays
  unsure (1)..(1358): unsure at all n locations
  Clone ID: MRT4577_90979C.1
gcgagcccggaaccggcctcgacgtcgaagcgccggttcctgccatggacgaggaggagcagggacttcgacaagaggagcgccgccgagtcgctctcccaagaggcgacgaaccctgcgcaggacgacggtccgggtccggccggcggctgggagacgcgcgagttcacgagcagggacgccgagacgaggctgaggacgccggtgttcttcgcgtccatcgaccagcgggacggcagcgccgggggggagggcgcgtgcgcggcgctcgccgccgtcctcgcggcggcgctccacgcggtccacccggcgatgcccacccggccggagctggacgcgctcatccgggacggctcgtcggagtggaggcggctctgcgacgacgaggcgcgcgcggcgcggttccccaaccggcacctcgacctggacaccgtgctggcgtcccgggcgtggcccatcgcggtgcggcacgacagggccttcgtcggcttcttccagccggagagcttcgcgtcgctgtccggcgccatgtcgttcgacgacatctggcgcgagatcgccgccggcggcggacgcgcggacgtgtacatcgtcagctggaacgaccacttcttcgcgctcaaggtggagagcgactgctactacgtcgtcgacacgctcggcgagaggctgcacgagggctgcgacaaggcctacatgctgaggttcgacggctcgtcccagatgcgggctgaaggcacggaggaggtggtcgtcgccgggaaggagtgctgcagggagttcatcaagaggttcctggccgccatcccgctcagggaggagctggagatcgagaaaaggggcggcagcggcatcgacggtggcggcgcgccgcaccggcggctgcagatcgagttccacttcacagcctttacaagacgacaatagatgatgagttggcgatccgacagcagttgggggatgttccttcctcctccctgatcacagcatcatactaaccttgtgtaaattcgtctgtatatctgtatacagtttacaagataaaaatttacagggtaggatttggttctcgtttcacaattttagataggaaacaaaacattaagaggaataccattttgtaagcgagctcagtattacatgattttgcttctgttgaaaaaaaaaaaaaaaaaaaaaaaaaaaaaaaaaaaaaaaaaaaaaaaaaaaaaaaaaaaaaaaaaaaaaaaaaaaaaaaaaaaaaaaaaaaaaaaaaaaaaaaaaaaaaaaaaaaaaaaanggggggggggcctttttaaaagaaacaaattttatttgccggggattgcaaaagaaaaatttttgttttggggccccca

SEQ ID NO: 174777 - DNA, 669 bp, Zea mays
  unsure (1)..(669): unsure at all n locations
  Clone ID: MRT4577_9097C.1
agngactgagattatagagtttgagaaacatgggattcagttatccttaatggttcaggaatccttttgtgctgctgcaatcatgcaatggggaggatctgaatgaacaaggcacagtgcctgtaaatgacattttcgatgtattggctgctggccaggagttgaattttggcaacgtcaccttgatcatttatgggggatgccaaggagcaatgggtctgcaggttctttttgcagaattacacccttggcaccacaatgtctttacctccatagaattagcaatacagtcatggagaatcaatggtttcagtccaggaagctgcaagctcaacagacaatctatacttgttgctactaacttgcagttcaattataaagcttccaagtttgtatcctttactgatacttatcagatatacaagaacacatgcatttgtatcggagaattggaacctgctagttggagagatacttgttggctacctgagatctcacatgccaatgtgtccacacttgctagtgaggaaatagataacatgcttttccaggttggtgattttcatccaggagagattgagcagcttgagctttacatgataacattgatccagtgggatctaggtccagtagatttttacaaatcagactgtaggtgccctgctgcag

SEQ ID NO: 174778 - DNA, 2579 bp, Zea mays
  Clone ID: MRT4577_90980C.1
ctttttagttcttgtttgtgccttttcagttttcaatacatcttcatctggggcttgggttgatttgcaggtaagctcggaattcggctcgagcacgcgtccgcccgtttcgctcgctgtctcccgcggcacgggggctccagcgccgaacggaaaaccccaccccactaccactggctactcccgatccccagtccccatccctctcctcgcaaaaggccaccgcgacgcgaccgcgtactgggggcgagacgccagtgcaggcaggcaggcagaagaggagtcgccaggaagcaaccgcgagggagctgcaagcgagcacagcagcagcgcagaaaaaaaattctggaataatttttcttccctttggctccgtgaggttccggtgctcgctcgctcgcctgagcttcgatcgagcccggtcggcgaggcaggcgcccgatcgccgctctccgggagcttccggggggccgtcggatggagccgtacgcggcggcgaagagcggcggggccgacgccggcaccggcaccggactggaagactcgatgcggaggctggggctcggcgacgacggggaagcaggggaggagaagcttccggagcggccgggcgaggcggactgcgcctactacctccgcacgggcgcctgcggctacggggagcgctgccgctacaaccacccccgcgatcggccggccccggttaatggagttggaaagaccgcagttacagtggagtacccagagcgtcctggacagcctctctgtgagtactatgcaaagaatggcacatgcaaatttggttccaattgcaagtttgatcatcccagggaaagtggttttgtacctgtcgctttaaacaacagtggattccctctacgtctgggtgaaaaggaatgttcctattacatgaaaactggacattgcaaatttggaggtacatgtaaattccatcacccagaacttggttttcttacagagacgcctggcatgtacccaccagttcaaccatcacctatttcctccccacatccatatccacatcattccaactggcaaatggggaggcctgctgttgtgccagggtcatttttaccaggcccgtatccaccaatgatgcttccacctacagttatgccaatgcagggatggaacccttatgtttcacctatgaaccaaactacaccagctgggggccagcaagctgttccagcagggccatcttatggcttgtcgcaccaggagccaacctctgcagtgacttatggcagtcattatgcgcaattgtattcttctgggacttcaagcagcaacatacaagaatatgtgtttccagagcggcctgggcagcctgaatgtgaacattacatgaagacaggaacctgtaaatatggagcagcctgcaaatatcatcatcctcaatacttcagtggaccaaagtctaactgcatactgagccctctgggtctccccctgcgtcctggttctcagcgatgtgcttactatgcacaccatgggtattgcaagtttgggccgacatgcaagtttgatcacccgatgggtactccaaactatagtatttcaacatcttcacttactgatgtgccaatcgctccatatcctcagagtttccctgttactcctatgccttcatatctgccatcttctgatctgcgtccacaatacactcaagtcaaggattcctctgctaatccaccaccatcgcctggaactacttatggtcctgttgggtctatatcaaaggtttatgctccccacacgcttatccgatccccggcttctgcagctgctggcatgcaagcgtcctaatgagacacggttgagagcattagtcctctctgtcatgaagatagttcttgggcaatcttctcaggttttttctaccattggcggaatgaggtctcgattcttttttgctccagttcgacttcccagcaattgtgaataaaggctgcagctgacatagaaaagtctcaataaatgcaaagataggaattggcaagctcattcacttgccatttttctgtccatctcggaaatgagaggagaaaattctgattgtagtaggatccagagctacgttattatcctgtataagatgcaccgatgcaagggattcgtatctgaaagctgatgggttctgtagctcaaaaccttttgtttatctcaccatcatatatatagagagggcagattaccctaggtgatgattatccacgctggaatggtttaacaaatcttcaataattgttaaaccattcgtgctttttgttaaaccatttcaggatgggtgatcatcacctaggtgatgaatagccatatatatgaatatgagcagcagctatgatttcacaacatgtatatctacctatatatatgaactgggaacacggcatgttgtagcgagacgctttggaacccttaattgaatcatctgaaaccattcgctggtcatcccctgattttcgggtgttttagttctgctatatatataaagagggcagattcccctaaaaaaaaaaaaaaaaaaaaaaaaaaaaaaaaaaaaaaaaaaaaaa

SEQ ID NO: 174779 - DNA, 1999 bp, Zea mays
  Clone ID: MRT4577_90981C.1
cagtgcagtgcaggcaggcaggccgagagaagagccggctccggttaatggcgttgggaagaccacaggtatggagtacccagagcgccctggacagccactctgtgagtactatgcaaagaatggcacatgcaaatttggttccaattgcaagtttgatcatcccagggaaagtggttttgtacctgtcgctttaaacaacagtggattccctctacgtctgggtgaaaaggaatgttcgtattacatgaaaactggacattgcaaatttggaggtacatgtaaattccatcacccagaacttggttttcttacagagacgcctggcatgtacccaccagttcaaccatcacctatttcctccccacatccatatccacatcattccaactggcaaatggggaggcctgctgttgtgccagggtcatttttaccaggcccatatccaccaatgatgcttccacctacagttatgccaatgcagggatggaacccttatgttgtaagtttctattacttgtcattttgtactttattactttaaagaaggcacttgcgtgccttatataaattaggaagatatctttgttctaaattggcatctccaatattgcggtaaatagtgagaattcagtggtaagttcataacaaaatagaggcaatgggctaaaatggaggttttataggaccacatataattggatgtaagttagtaattccttcatgccttgaaaacacaatcttagccatgaatagaagacaccactgactgcctgatgatttttaaaaactctttttggttctcagtcacctatgaaccaaactacaccagctgggggccagcaagctgttccagcagggccatcttatggcttgtcgcaccaggagccaacctctgcagtgacttatggcagtcattatgcgcaattgtattcttcttctgggacttcaagcagcaacatacaagaatatgtgtttccagagcggcctgggcagcctgaatgtgaacattacatgaagacaggaacctgtaaatatggagcagcctgcaaatatcatcatcctcaatacttcagtggaccaaagtctaactgtatactgagccctctgggtcttcccctgcgtcctggttctcagcgatgtgcttactacgcacatcatggcttttgcaagtttgggccgacatgcaagtttgatcacccgatgggtactccaaactacagtcttccagcaccatcacttactgatgtgccagtcgctccatatcctcacactttctctgttactcctattgctccatatctgctgccccctgatccgcggccgcaatacactctagccaaggatccctctgcttatccaccacaagcgcccggaactacgtacggacctgttggggcgatatcaaaggtttatgcccgccacacgcttatccgatccccgacttctggagctgctggcatgcaagcgtcgtaatgagacaagagttgagagcactagtcccctctctgtcatgaagatagatcttgggcaaaccttctcaggatttttctgccataggtggaatggggtctcggattcttttttttgctccaattcgacttcccatcaactgtgaataacggccgcagctgacatagaaaggtctcaataaatggaaagatagggattggcaagctcattcacttgccatttttctgtccatctctgaaacgagaggaggtaattctgactgtagtcggattcagagctccgttattatctcgtgtaacgtgcacaattgcaggggattcgaatgggaaagctgatgggttccatagctctagcccaaatcttttgtttatctcgtcatcttattacatatatgatatgatgtgtatcccccgtcggaacagcaacatgtatatctatctatatatattactctaaactcatgttactgttaaaaaaaaaaaaaaaaaaggcccctaatgagctatctctataatttatacacaga

SEQ ID NO: 174780 - DNA, 172 bp, Zea mays
  Clone ID: MRT4577_90982C.1
cctcgagccgccggggattcgctcataactctccccggccacgcactatcccgccccccgaccccgcaacctctcaccgccggtccccgccctccgaccctccacgcacaaatagcccgcctccatccactaggaggatccccgatgaactaggagaagtgtggatttcaat

SEQ ID NO: 174781 - DNA, 332 bp, Zea mays
  Clone ID: MRT4577_90983C.1
atgactttgtccatggggtcaataaggcggtagcgagccgagctctatgcaattgtcccaacagatgtagataaattcaataccattgattagttgtggcacaaccgcattatagtaagcaactcttataatgtgtttggtagggattcaaatctagatgcatattttagttccatattcatatgggtgtagagtagtggacgatcatatataaagtagacatgaagctctaccgagcaacaccaacactagtttccccttcaccatggataaaaagataagccataatcatcgtccaccataatgtctgtcagagatttatatacttttat

SEQ ID NO: 174782 - DNA, 478 bp, Zea mays
  Clone ID: MRT4577_90984C.1
gggggggacatgatttccaaagtgccactgaccagcgcgcgcgtcaagcttgcttagatagccttcatggtctccctcgccggcgcctccgcgcaccccgcgaccatcaagggtctccacgagcagcttcatctccggcaggtagctcgccgtcgccaggccggcggcccgctccatccgcaggccccgcgcagccgccgtggtggtcaagtacggcgacaagcagcgtctactttgacctccacgacatcggcaacaccaccgggacagtggcacctctacgggtctgacgcgccgtccccctacaacccactacagagcaagttcttcgagacgttcgcggctccgttcaccaagagaggtctgcctgctcacgcgcctgctgcgtgcgcggcgggtcagttctggcctacgccagctcgtcggcgtcaccggcccttcctgccgatcaagaagggacctcaggagccgtcgcagc

SEQ ID NO: 174783 - DNA, 191 bp, Zea mays
  Clone ID: MRT4577_90985C.1
gggagctagtttttatatttagagttgcttctttaagacagttacaatacaccattgcttgtctacaatcttttttttgtgttccttgaccatatgcttatttttttcttacagtttgttcaatatatctcttctaaattgttctatacttttcagtgtattttacacttttttttgtttgtcccattttt

SEQ ID NO: 174784 - DNA, 191 bp, Zea mays
  Clone ID: MRT4577_90986C.1
gagcccacacatcatataggatatgatatacatagcgcaacagacaggaagcacgacagcccagccacgtgacatggcacgaaaacatgctgagaatcgcacacaccatatactagatagtgtaacgacacgcaaagcacggcatatctattggagaaacgctacacgcattgttcacaagcagctagctg

SEQ ID NO: 174785 - DNA, 379 bp, Zea mays
  Clone ID: MRT4577_90987C.1
aagaccgtccagtacctcatcggctccggcatggatcccggaacggagaacaacccgtacctgggcttcgtgtacacgagcttccaggagcgcgcgacggccgtctcgcacggcaacaccgcgcggctcgccagggcgccgaggacagggccaagaaggacgagcccaggacggtcaagttcagctggatctttgatagggaagccgttgtttaggcacttgttgctgactgtgatatgtgctcagatcatgtcgctagctgtcagtgtctttgtcacaatgtgtttatgtgtttgaaatgcagtaagagtgtttttttcctgctaaaaaaaaaaaaaaaaaaaaaaaagcttgtacacctgcccgggcggccgctcga

SEQ ID NO: 174786 - DNA, 1394 bp, Zea mays
  Clone ID: MRT4577_90988C.1
aattcggcacgacgctccctccacagtcaccgccgcctcccccagcgtccagcccgtacgccgcgcagccaacccagcggacacgatgcaggcccacggcatcgccatccgcgcccgcgggccggtggcggcgacgcaggcccccgcgcgccgacggcaatgccgcgtgtctgcggcggcggtcggcgcgcccgccgcgcgagcccgcgtgacgcactcgatgccgccggagaaggcggaggtgttccgctcgctggagggctgggcggcgcggtcgctgctgccgctgctcaagcccgtggaggagtgctggcagccggcggacttcctcccggactcctcgtccgagatgttcgggcacgaggtccgcgagctgcgcgcccgcgccgcggggctccccgacgagtacttcgtcgtgctcgtgggcgacatggtcacggaagaggcgctgcccacgtaccagaccatgatcaacacgctcgacggcgtccgcgacgagaccggcgccagcaactgcccctgggcggtctggacgcgcgcctggaccgccgaggagaaccgccacggcgacatcctcggcaagtacatgtacctatccggccgcgtcgacatgcgcatggtcgagaagaccgtccagtacctcatcggctccggcatggatcccggaacggagaacaacccgtacctgggcttcgtgtacacgagcttccaggagcgcgcgacggccgtctcgcacggcaacaccgcgcggctcgccagggcgcacggggacgacgtcctggcgcgcgcctgcggcaccatcgccgccgacgagaagcggcacgagacggcgtacgggcgcatcgtcgagcagctgctgcagctggacccggagggcgccgtgctcgccgtcgcggacatgatgcgcaagcggatcaccatgcccgcgcacctcatgcacgacggccgcgacatggacctgttcgagcacttcgccgccgtcgcccagcgcctcggcgtgtacaccgcccgggactacgcggacatcgtcgagttccttgtcaagcggtggaagctggagacactggagagcgggctctccggcgagggccgcagggccagggacttcgtctgcgggctcgcgccgaggatgcgccgggccgcggagcgcgccgaggacagggccaagaaggacgagcccaggatggtcaagttcagctggatctttgatagggaagccgttgtttaggcacttgttgctaactgtgatatgtgctcagatcatgtcgctagctgtcagtgtctttgtcacattgtgtttatgtgtttgaaatgccgtaagagtgtttttttcctgctattatcacaaaattctgcagaaatatatgttctagaatgctgacttccaccccgga

SEQ ID NO: 174787 - DNA, 969 bp, Zea mays
  Clone ID: MRT4577_90989C.1
actagattaagcctagagaatgctagtgatatttttattttgccagaaagaaagatactgcccccccctccctcagctgtgggtataacccacgacaaggaatgcaacactgatgccttccgtcacgccaaccaccacgaatcactaatacagatgtcagcggcatgcgctgaagttcttgttagagaggaggagaagataatttgtacagttgatacagtggaattttgtcagctacccactgaagcttataatctacttaagcaatcaggattaaatactccagaggcagcaccttgtaggtcaaggaacctgcgcactgaagcaaagttcggtgatgctctttcttccactaccaaattggagaaaataatggcaggtactgcagtgaagaagggatctcaactaaagaagtcaattcaaagcagcatagggagattgattcatggtactgaaagaaggaacgcgcagcattcagcacaagggactccaactaaaatcatagctagcggatgccataataatgtctccccagttacagttgatatcaggttaaggagaagacagtcactgacaggtatcccacccccgctcccaactatgtcacgcagatcctcacttggagggaggtcggatacaagttcaaacgacaaaagaggtgcaaaaacaccccctcccgtgaactcggcagcaaaggctaaaagatggctttgaatctgaagcagaactgtcagaaaattttgactccaagcagagctcaaggcagacacgtatttggtgccatcacttaactgtggttttaccgttttaggccttgggtggtggttacattctttgtaacagctgaagcattagttgtacaagggggaagggtgtgtgtttgttttattctggatttctatgatggagcattggagcaactcacttgttcgatttattatgggatgtttgttttggggaaatcacccc

SEQ ID NO: 174788 - DNA, 302 bp, Zea mays
  Clone ID: MRT4577_9098C.1
gcacccggggagcaacctggccaccaagggcatgggcgccaacctcttcgaccggccgcagcccaactcccccaacgtctacgaactggctctacagccgacgaggaccaggagcaaccaccgctagatcggggcgagatggatggacagtgaagaaggccatgtttgctggaccttagggtattctaaaaccgcaccgcatgctctattatagctagtcctcactagatatatacttgtgttcgtgaatggtggtcctagttctgctggtgtctcccgcggttaattggaccaatgttatg

SEQ ID NO: 174789 - DNA, 480 bp, Zea mays
  Clone ID: MRT4577_90990C.1
gatcatcaaccatccaacgatttaagacgaaaggaacaagtacaaccctcgaaagtgaattaggaagaaaacacaaggaaggaaaaccatacacagaagaagattccagagaaattcaataatacacaatttttttttttattttcattttcccccctctagtagtcagcggtgggaagctgctcgtgggtgtggctgataaagacaacctcgtaaacaaggccagcgattccaccaccgatgagaggcccggcccagtagatccagtggttggtccaggtccagctcacgacagcaggcccaaatgtcacagcggggttcatggccgctccagagaaggccccacccaacaaaatgttagcgccgacaatgaaaccaatggcgatgggagcaataattcccaaattacccttcttggggtcaatggcagttgcgtagaccgtgtacaccagaccgaaggtcatcacgatctccaacacc

SEQ ID NO: 174790 - DNA, 1093 bp, Zea mays
  unsure (1)..(1093): unsure at all n locations
  Clone ID: MRT4577_90991C.1
nnnnnnnnnnnnnnnnnnnnnnnnnnnnnnnnngggcaaagggagctgcattaacaaaatatagcttcagacaggaccatatttttttcaaacgattccgctgttcaagtaccaattagaaacatcggtaatcagagaaattctcgagtccaaataaaatgacgggaacagaacttccattgctgctagtttccgcgacaaccatcagcagcagaagccgaattaattgataacggacaccattttcacatgttccatcaggaaacggaaaggaggcagaaaagtgttcattctcttctaaccaaagaaagcatatcttttacatatatagtggcaacatcgtgtgattgcgttgcagtgaagcaacagcttaacgtgtttctggttcagatccaggattccctcgcaggaagaacgcaaagatgataatatacaacaacaaaattgtgaaccagagatgtcgagtatcgacgattagaaccatatgtaaatcaatggttagttggctaccagcaaatgaactgggaggaaggttacgaagtagtagaagaccctgaatttgtctgtgtaagaggttttactttccttgtgtgacccaaactattcacaagatccctgcgagtgcatacaggaaacatgctcaatccatgcatgtttagccgccacaaaacgtatggaaaactgagctgatcacgagatgtgaagcgaaccacttcattaaaccaagcacacatgaaatggttcgttgcaggggtgagttccctcacaataacagaggcttcggctagagctttcagtccgtgcaatctttttgtgtccggcattccatcttgacgataccgagtcaattgtacctctacctcttcaggggtagccttgtgcttttgaacaatagctttcccctcatcatatatgttactccgtgctccatgttcagagatagcaaatgtagagtttgtcctccaaagaagagcttcaagcattcctataggatctcttcgtaattggtatttagagtcaacccatatagagtaccttgcctctgtgaaaaggcgatgagtcaacatctttggtatcttcccatttaatcgaa

SEQ ID NO: 174791 - DNA, 200 bp, Zea mays
  Clone ID: MRT4577_90992C.1
gcgcccacgcgtccgcccacgcgtacgcggacttgtgtttctctcagtcagctttatagctccgtgaatgtacatttatatcgctttacatttattatttatttttgtaagacttccgctatgtaataatgacataataatgacatttatgatatttgtgacatttatctctaaaaaaaatactatataaaattcaaatt

SEQ ID NO: 174792 - DNA, 212 bp, Zea mays
  Clone ID: MRT4577_90993C.1
acacgctttacctgctccataccttgcattccttcctaatgtgcaactttagccataagtacactcgaatactacagttgactctgaatttaaaataaagaatctgaccaaagattatattacagaactgatctatcgaacgattttggcctattatacacagatgctacactactacatgacactgctacaacatattagtttcctctatc

SEQ ID NO: 174793 - DNA, 143 bp, Zea mays
  Clone ID: MRT4577_90994C.1
ttacattttctgtacatgatataaatagtgaatggtgcaaagttagggtgtgttggctctcaaaatgcacatcaagctcgtttaagtacaatcacacagaggatggctgatctttatttattgtggaatatacttacaacttg

SEQ ID NO: 174794 - DNA, 481 bp, Zea mays
  Clone ID: MRT4577_90995C.1
ggtgtggggggggttttttttttttttttttttttttttttttttttttttttttttttttttttttttttttttttttttttttttttccatcggacccaaggccccacccaaacggaaaaaaaaagccccccgggttttcccccccggggtagaagggggccgagcccaaaaaaaaaccccggcgggattcagggaacaagaaacaaatgcccctgtttaagagggcctttaatttatttggggttggcaaagttaaccccaatctaaaagcccgccattttaagaggcccccaattacccggccaaggcacctttgaccccccggggaacatcgcccccgatctgagcctaacccttttccagggcaggaagggcccacccaacctgggcagggaattcagcgggccccttctaaacaaaagcgggggcaatctgaccccagggccagcctcaacagcccaatatcagaaagggggtt

SEQ ID NO: 174795 - DNA, 1797 bp, Zea mays
  Clone ID: MRT4577_90996C.1
gccctagggaaggattaggagtgatcgagatcgaatcggcggccacccggcaccctgcccgcctgtcgacactgtcgggtccggttggtgccccagcgaaaagcaaaagaaatactactaccggaagaaactgcctcctcctctcctcgcttctctctttggaggcaggcgcaggcgggcgagtggtccggtacacctctagctgcagatcccagctcgcgcggtccagcaggccagcactaagctccctgcctcctgtccacctggacagcgcgcccgatcgtgaatcgtcgcttgctctggagaaagcttgcatttttttttcgtttcttcttctaatcttcttcttcttcttttttttttttttgccccgcatcctttttcctggcgcggtttccttcgtacgggaaattttcggttggtgcggttggttggtcattttcctgcaccttctctttggttcttgcgcgagagcgccatctttcctgctgcccgttgactcgggcgggcattccgtcgagcaccttccgtgcggtgtggggagcggcggttcctggtttctcgggaacgttccttgatgccgctgttgtgtcaggcgcaggattctagcggatggaatgccacagctggtacgcgctgaaatcaagaagatctgtagcgatcgctgatgcggggtttgaagatgctgcagacggcgccggcgatcttggtggcacgatgagtcttgcacgcaagcagaaggttgtcaaggaaacagtggagatggaggaggagcaggagtttgtttggaaatctaacctgctcccctacaaggacgatgatgctttcgttcttcctgagagtagtaaggaggagtacgcatcaacatcaggagacacagctccgtctggcaaaatggacccgaggatggaaaggtctggaagcaatgggacaagcaaggtccctagactgggttccatgcttgggacagccagcatggctggatttggcaaggcagtggagattctagacacgttaggctgcttgatgacgaccttgagctcagatggtggctttgtttccaggaccaagaccaaaggatgcaagatatcaattcttgcttttgaggttgccaacacaatacttaaaggtgctagtattatgcaatctctctcggaagacactgtcacatacttcaagcaggttgtgcttccttccgaaggtgtgcagaatttggtttctagtgagatgagtgaactgatgcgaattgcagctaacgacaaaagagaagagctgaaaatattttcccaggagattgttaggttcgggaaccgctgtaaagatccccagtggcataacctggatcgctactttgtgaagttagaatcagagagtgcaccccagaagcagctgaaagaaacagcaatagcagagatgcaaaagttgatgaacctcgttcaacgtacaactgatttgtatcatgagctgcatgcattagacagattcgagcaagagtaccgctctaggctaaacggaaagggtaatacagatagatttgaaaaaggagacaatattcaaattgtgagactagagttgaagacccaaagtagttatgtgaagagcttgaaaaaaagatctctctggtccaagacgttggaagaagtggtcgagaagcttgtagaagttgtgcactacttgcatgtcgagatcgacaatgctttcgggccttctgatggaggaggtgtggtggtgaatgcggaaccagccgtgagctgtcaaaggctaggtcctgccgggctcgcattacattatgcaaac

SEQ ID NO: 174796 - DNA, 351 bp, Zea mays
  Clone ID: MRT4577_90997C.1
aattaatatataaaacacaaactggttaaacgctatggttgatgcatcaacatatataggggtcctcaattggctctgcttaactataacaggaaaacaacgcaagagaatacgctcttctacacataaattaagcatggctcatggaaaaaagaatgctaacacaaaatctacctcacagcggaactaataacgaatacttgacaccgcggcaagctggcatatgcaaacaccaagccatgttcagagcttggagttgctcgcaatgttgagccactcggtgtggaaagaaccgaccatggcaaccctctggtacgtgtgagcgcccaagtacgaatctctgagcctgac

SEQ ID NO: 174797 - DNA, 290 bp, Zea mays
  Clone ID: MRT4577_90998C.1
gttctagatcgcgagcagccgccctttttttttttttttttttttttttttttttttttttcgtgagatgcagatatattgatgctacaagtaacaggaacccttgccgccattaagatatatgtatacatatccaagcgcaaaacatgaaaaacacaacacccagcccatttattgatacaaagggaaaaaggaaaaagtccaaaaccagtctggataatatatgccatgtaactttaacaggaaaagggagatacacaaggaatatgctaatgagtgtggtgaggctg

SEQ ID NO: 174798 - DNA, 396 bp, Zea mays
  Clone ID: MRT4577_90999C.1
cttagtggagggatgggtgctgcattactctccaaacctgagcttatacacgatattctgacaacactgcggaggaacttggacacaactgtgacatgtaaaatccgtcttctgaacacacctaaagacactgtggagttggcacgccggattgagaaaactggtgttcctgctcttgctgtccatggaagaaagattaaagatagaccgagagatcttgccaagtgggatgagatagctgatgttgtgtcagcgctgtcaattccagttatagctaatggagatgtctttgagtatgaggattttaagagaattaaagatgcaacagagcatattgtgggacaacgatgtgaagagcacgaaacataccttgaaagaaatgataatgcactattc

SEQ ID NO: 174799 - DNA, 449 bp, Zea mays
  Clone ID: MRT4577_9099C.1
ctgacactgctttactatcaagagttattagtacacataccagcagctgatgctgtggtgatcatcataaacatcttcaggatcctcatctacaacaacatcattcaccaaggcacacatcatacaacacagacacacacatcatcactatcagcagtgacacaaacaactacatgttaccatgcgatcacaaaaacattaacaacaacatgaagtacatgtacagacaacaacaacaatgactgtagcatcagcagaacatacaacaacggcaccagctacaacatcatgaatgtgaaagtcatcaactcatgaccatcaatctacaggccatgtgcaacaatacgaacagagccatgtacatcactaagacagagccatgagcaactacatcgacaacaatatcagcgtcatgacaagcacgaacatccacgacatgcttatgaata

SEQ ID NO: 174800 - DNA, 450 bp, Zea mays
  Clone ID: MRT4577_909C.1
taaaaaaaaatttatattaagctaactattttaaaaaataaaaaaattaaataacattttaaagggggggtaaaaaaatagggggggggggcactaggggggcccgcttttggggggccgggttctacttcttgggtggggcccccctttcttttctttgggggctcgtaattcattttttctggcccttatttcctaggctctgcccggggaaacccccgcggtgccccctttttttctccctggtccccttttccttttttccgccgcgctttttctcttgcggcccgccccttttgccttttcccaattgtccctcccttttttgcgcttggtgcccccctctttgcggcggtttttcgccgcgtggggtttgtggttcccccccgtgtttcccttcctcttttcgcggctctttggccccttcttttagccttgttcccttttttt

SEQ ID NO: 174801 - DNA, 108 bp, Zea mays
  unsure (1)..(108): unsure at all n locations
  Clone ID: MRT4577_90C.1
ggcaactacaagctgcccaagcactgcgacaacaactgtttgctcaaggcgttgttcgtcgaggcggantgggtcnnnnaggactactgtaccacctacctaaagatc

SEQ ID NO: 174802 - DNA, 1865 bp, Zea mays
  Clone ID: MRT4577_91000C.1
gtgacgcggagctgcctttgcccctccgccgctgcctagatgtttcatttcatctttcggcgtgtgaggcacacgacacgataaggatggatgttgggtggggctgctccctctttcaatggaatgacagtcaatatcacgttggggagggactttagtgtactcctgaaagacttcagagtattgttgcagtaaggcttgaatagccagacgaagagtgtggtgcctacagagacaagctgttgagatgcagaatgaaactagaaatgcctttgttgagaagcttgttcattatccttttcagttgttcagtgtacgcatcctgagatgtacaatcctttaatgagagaagagtatcatcttctaaggactcaagggtgttgttcaaggcatgttcctgaatagagaatgcagtgcctgttatgattgccccagatttagtggagaaattacagatacttccaccgcgtactccctccctccctcgtctcgtcttcgtctccaggtttcgcgggggccaaggtttctgccggagcagtcgcggtctgcgctgcggcacggcgacgaggtggggatggagtaccgcgacaagctcgtgctggcgcccatggtccgcgtgggcaccttgccatttaggctactggctgctgaatatggtgctgatattacttatggagaagaaattattgatcacaaattcttgaagtgtgagcgtgttacaaatgaatctcttgggactactgattttgtggagaaagggactgacagtgtagttttccgtacatgcccacaagaaaggggcagggttgtattccaaatgggcacatcaaatgctgtgagggcacttaaagctgctcagatcgtgtgccgtgatgtttctgctatagatatcaacatgggttgtccaaagtctttttcacttagtggagggatgggtgctgcattactctccaaacctgagcttatacacgatattttgacaacattgcggaggaacttggacacaactgtgacatgtaaaatccgtcttctgaacacacctaaagacactgtggagttggcacgccggattgagaaaactggtgttcctgctcttgctgtccatggaagaaagattaaagatagaccgagagatcttgccaagtgggatgagatagctgatgttgtgtcagcgctgtcaattccagttatagctaatggagatgtctttgagtatgaggattttaagagaattaaagatgcaacaggtgccgcgtctgttatggttgctagaggtgccatgtggaatgcctccatcttttgtgccaaaggaaaaacaccttgggaggatgtcaaaagagagtatgtaagaaagagcatattgtgggacaacgatgtgaagagcacgaaacatacattgaaagaaatgataatgcactattcttgccttgaacttcctgaggggaaaggcgttataaagtgtgatacatcagaagatttagcgagactgtacggggaagaggactactataattttgttgttgcaaataggaaatgaatacaatttgatgttgtgagctctcatgtgtaccagcttctgcttgattcctatctcaccctttattgatgggattaggaggaattcctgccaccaaggacaacgggatttgccattttggcgctgtctggacttaacactgaagctgctgatctttctcttgtactggtaatagataggtttatacctggaattaatcgaataccatatttttttttgaaacacatactaatttatttgctttctataccattgaaattttgtcatgtattgttggtggaagtactattgtgctttgaaggaattgaaagactttgataaagaaaac

SEQ ID NO: 174803 - DNA, 601 bp, Zea mays
  Clone ID: MRT4577_91001C.1
ggactactataattttgttgttgcaaataggaaatgaatacaatttgatgttgtgagctctcatgtgtaccagtaaggcttgaatagccagacgaagagtgtggtgcctgcagagacaagctgttgagatgcagaatgaaactagaaatgcctttgttgagaagcttgttcattatccttttcagttgttcagtgtacgcatcctgagatgtacaatcctttaatgagaggagagtatcatcttctaaggagtcaagggtgttgttcaaggcatgttcctgaatagagaatgcagtgcctgttatgattgccccagatcttctgcttggattcctatctcaccctttattgatgggattaggaggaattcctgccaccaaggacaacgggatttgccattttggcgctgtctggacttaacactgaagctgctgatctttctcttgtactggtaatagataggtttatacctggaattaatcgaataccaatttttttttgaaacacatactaatttatttgctttctataccattgaaattttgtcatgtattgttggtggaagtactattgtgctttgaaggaattgaaagactttgat

SEQ ID NO: 174804 - DNA, 183 bp, Zea mays
  Clone ID: MRT4577_91002C.1
cgcccccagtccgcctctcctctttctaaaaaaaccagaggtacgagagttctcgacataagacggccaaccgaggagggaggtccaactttttgggaacgggctagaagtcgagagtttacgaatcgtccttccaaccaaggagacaatcaccgctaagggtaccgtgggaacttagaggta

SEQ ID NO: 174805 - DNA, 344 bp, Zea mays
  Clone ID: MRT4577_91003C.1
tggacaggtactacctgtactacgacgagccaaaaacggtgttccctgacgaggcgtgctatgaccttgtcagctagttctgcgaggctccgtaccaggacggcgtttgcaaggagctggctcacgcctgaagaccctgatccatccatttctgtccaccacactatgtacatatgtgtagcagatagtttacatgtacatgttagatccctgagagctggagaagctagctagcgtgcttacagaataacagcagccaagcaaagccaagggtgtgtatataataagcatgcctatggttgtgtcaaatgcgaatgtatgtatagttaaactaaaatgaaatg

SEQ ID NO: 174806 - DNA, 189 bp, Zea mays
  Clone ID: MRT4577_91004C.1
gcctctctctaccgaatgggtttatgcttgggttgaccatcgctgccattgctgcagtcatgtatgcagaatcccctataataggagcgcctatagcagcaagctgtgcccttatctgcaacataatggcgggctattagctcggtaacctttttattgatcaagcctcgagtgatgcatgtttgttac

SEQ ID NO: 174807 - DNA, 301 bp, Zea mays
  Clone ID: MRT4577_91005C.1
agtagggggcataaaagcattaaaaatacagggtccagaatgtaaccacatataatgctgacacggggcaacccctaaagacccctgcaatttgtgtttgccatagcaaaagccagctcaagcccgatggatgtccctgtagcaaactttgatacacctttttttttcgatttaaggttttgagatcacagattcttcaaggcagggtagttatcttggggtcaacatctttttagtgcgcagaattagtttcttccccataagcagataggaccgtaacaaacaagaactttggcgtttt

SEQ ID NO: 174808 - DNA, 451 bp, Zea mays
  Clone ID: MRT4577_91006C.1
gccggccgggttcggattgtttcttgactccccactcatcaccaaagtaaacatgcttcgtgccttctcctctgtcgttcgtcgtactgctgttgtccaatcagctactgtcactcgccctgctacaatgagtatgaccaagcgtttctattctgctggacatgaagacgaaagctttgaatccttcactgaacgttacgtcaagttctttgacggtgttgaagacctttttgaacttcaacgtggtttgaacaatgcattcgcttacgatcttgttcctgcaccttccgttattgaatctgccctcaaggcctctcgtcgtgtcaacgattttgctactgctgttcgtgtattcgaaggactcaaggataaggttgagaacgaaggtcaatacaagcaataccttgaagaattagcacctattagacaagaattgggtgttttgaccaaa

SEQ ID NO: 174809 - DNA, 505 bp, Zea mays
  Clone ID: MRT4577_91007C.1
gaccctcgggctggccgggacaccagccgcacaagaaacgaaggcggcggcccgcggcgtgcttcctcggaggttgcagcggctctttctctctctttttttttctccatgatgcacacctctgcttccttccctcattttgcctcttgttactctccttctcgtgctctggtttcttgatttaaaacctagttttgggggattttgcattgccaagacaaggcagtggggatttgagcagggatggatgtcgacgaagttcctgaaaggatcgatccgaagaatgcttgtagaattgaggacttgaggtcaatgtcaatgcatacttcagctttaaagatggaaaaaaaaaggtgtacaatcgaggtaggattgtgagctgggttgttgattcagaagagtatggcatcattgatctggaaaaggatatcacttcgtactttacatgggacgacaatcaaaaggcaaatttctgggttctaactggctctgctttggcatgctt

SEQ ID NO: 174810 - DNA, 236 bp, Zea mays
  Clone ID: MRT4577_91009C.1
tcttatttctatttctgcggttaagcacacataggatgagcagctacgtaccagcgacataacacttaagtacacacagcagcaaacagaacactgttgacgagaataggaccaccgaagggacatgatctaataacgaccactagtagaattcacttcatgctcatggcttgaattgagacacgtgggtatgaatcaattaacggcgcagcaccacattatcctgaaccgagcta

SEQ ID NO: 174811 - DNA, 387 bp, Zea mays
  Clone ID: MRT4577_9100C.1
taccgttcggaatgccctacgcgacccacgcatacagcatttgtgtccaatatttatgtctacactgctctgctgaatctgtacaacaggtgtggggatctcctatctgctcgtagggtgtcctataaaatcaatgaccaaaattctctgacttggtgtgctatgattggcggttatggaatgcaaggcgattctgcaggttccattcatcttttcggtgaaatgctgaaagatggtgtctacccaaatgatatagcattcacaagcatcttatccacttgcagccattctgggatggttactgcagggaagaggtattttgatagcatggcacaacatttcaacatcacaccttccatgaaacattatgcttgtatggtcgatgtg

SEQ ID NO: 174812 - DNA, 392 bp, Zea mays
  Clone ID: MRT4577_91010C.1
cgttgctgtcggataacagcaaatatcagtagctgtagagcacaagagaccttccagcaatgaccttgcacctacagcagcactgacctccaatcctccattcgccttcaccattcaccattcaccaaacagaacagaagcaggatgaagggctgcaagggaaagtcatggtacatgatggccgtgtgagtcagtttcatatgacagagatgattccatttgttagagtggcgaccagaatgatcactcgtgcaggtcgaatcagagtacgcctgaagctagcgagaactagagtgagggaacaaaaatgcggcaagagacagttccacgaaggtatcacagaacacgaaggaggtgagcatagtggagctaggtaggggccgacagcaacg

SEQ ID NO: 174813 - DNA, 239 bp, Zea mays
  Clone ID: MRT4577_91011C.1
cggaacctgaatttaactcaaatgtctctaccgtgagaaactaatatgcctgggtttggagactactatattaaacccttcctgtccatcctcaatgaccataataaaaactcttgccggtgaagaactgatatgatttgcaagaataaaaataaatttctgtcgatcattccaaaaaaaaaaaaataacaaaaaaaaaaacaaaaaaaacaaaaaagccagaaaaaaaacaaaaaccg

SEQ ID NO: 174814 - DNA, 345 bp, Zea mays
  Clone ID: MRT4577_91012C.1
ctcttcaaccacgctaaaaggttgcatcacctatgaaagctctgtccctccaaatcgagatgtggctcagattgaaaacggtgttagcagtgctgaaaaggatgcccaacactattctacggaattatctgcacgaaggaagtcagcttcaccacctgagaaacggtgtgcaaatcaaagggctgaatcacccaggcgtacacctgacccatcatttatgtgtcgaactaattcttcgtctattcgccgccgaccatatccttctctggtctggcgtggcggcacacctcgcatgagaccactattctcagttagaaggcgctcgtcttaatgtcacttgattgg

SEQ ID NO: 174815 - DNA, 197 bp, Zea mays
  Clone ID: MRT4577_91013C.1
caaaaaaaagcaaagtgccatgcaggtgcagatagaagtgtttattaactcttaaattgatcacacgaaatgattggacatcttctagcctacacatatgtacaaacttcatatacaaatcaatgcatatttttgtggctgaagcagatttctgtacctaattaggtttgcacacctgtgcacttgaaaagattcac

SEQ ID NO: 174816 - DNA, 449 bp, Zea mays
  Clone ID: MRT4577_91014C.1
gacctttgggctggtttcagtgcttgtgtcggtgtcgctactttagaggttcgtaccaagcctggtgtcaatcgcggtttcgaggtcgctcggcctaagattggtgtgtcgtcttcggatggtaatatttctaatcatcctggtaatagtacttttactaattcggcggcggttgcgactgtggaggctacttctgctggtggtgttgagcatcattggactattaatggatcggattccgaggataagtcgtattttggcgggtttcctgatttttcgggttcggttagtgattttgattaggttgctacttctaaggcgaaggagactaagaatggttggtcggttacgcctcttacgcctgttcctcctacttaggttcatgctattggtgaaggttttgcggagaattctgttaagtattctagtgattttcctggtaataattc

SEQ ID NO: 174817 - DNA, 258 bp, Zea mays
  Clone ID: MRT4577_91015C.1
gccgagcgccgccgccctccggcaggtcttcttcccggccacgaccacccacgccaggtcttcccggccccgaacgcgaacacccagccctcctccaggtcttcccggcgacgagcgcgtagaagaggggacctagcacaatggagaagagcacagggcgtcgcaagcatccggatctggaacacgaccgaaagaccaccggccgtggcagactcacgtctgtcgcgactccggagctgctgtcggcgatgctcacgc

SEQ ID NO: 174818 - DNA, 191 bp, Zea mays
  Clone ID: MRT4577_91016C.1
gcccccctccgaaggctgggaattcgtttgggggcgtcaagcacagcttgttaggtggcctgctgccacgacaacctggtgggcaccattagtgcgtcgctgaggaaattatagctgggagcagtggaaatcatgggcactgatcatggccgacgttgggggagcaacgacctgctgtttcttacaagagt

SEQ ID NO: 174819 - DNA, 1145 bp, Zea mays
  Clone ID: MRT4577_91017C.1
cggacgcgtgggggcgacggacaacgacagcgacgggcgttcttggcatatttgactacactgtccaaagcctacaaatgctcaaatgcctaccaccagattttgccctacccaaatctcgtccaagcttcctgtgccgtcttccgttccactcaaatctgctgtgaacacaggctagcaggtgaaagatcgatgtcgaacgctgccatcgcgatcggtaccatcatattcgtcattttcgtcgccgcgataattgcctgcgcctacaggcgggccgaggcatgcgccggcggcgtcgcgaggagctgcgcggtggtgtcggaccaacagatccggcacgccaccatcgagaaattcctctcggagatcaggcacgagaagcccttcaggttcacgtcgcagcagctcgccgggttcacgggcaactacacgacccggctcggcgccggcggcttcggcacggtgtacaagggcgtgctccccaacggcctcgccgtggcggtcaaggtcttcgaccgcagcctcacgcagaggtcccaggaggagcagttcatggccgaggtgggaaccatcggccgcacgtaccacgtcaacctcgtcaggctcttcggcttctgttcgacgacgtcgcgcgcgccctggtgtacgagtacatgggcaacggcgcgctcgacgcctacctcctgggccggggccgcggcgccggcctcccggcgctacgcgacatcgccgccggcgtcgccaggggcatccggtacctgcacgaggagtgccagcagaagatagtgcactacgacatcaagcccgggaacgtgctcctcgacgccgccctcacgcccaaggtcgccgacttcgggctcgcgcggctggtgaaccgcgccgacacgcacgtgtccgtctcctgcgtgcgcggcaccccgggcttcgccgcgccggagatgtggatgctgtcgggcgtcacggagaagtgcgacgtgtacagcttcggcatgctcctgctcgagatcgtcggccggcgccggaacttccacgaggaggcgtccgagagccagcagtggttccccacgctggcgtggaccaagtacgagagcggcgagctcgtggacctcgtcgcgtgcagcagcggcaccggcgcggatggtggt

SEQ ID NO: 174820 - DNA, 438 bp, Zea mays
  Clone ID: MRT4577_91018C.1
cgctcgctttggccgttggaagggccatgcctggcatactatatgccctctaagccagcctgccattcactgatcttacaagcttaggccggaccctcatgtccaaagtgaatgctcttcatgccacatcccctgctaggactatcacctttgtagacactctgacgttatatctggaggaaaaccaccctcccaacgtcgctatgatttcactgatgggacctcacggtcacctgccaagtgcgaccttatccttcttatgattgacccttacatgcttgatttaagacataagaccaaacggggcatttcatctttacgtcgtcatgactacaaaatacgcatggtgttgaacattgccgatcacattgacacacatcagcttatgagagtgtatgatgcattgacttgctcacttgtaaaagtgctaaatactca

SEQ ID NO: 174821 - DNA, 438 bp, Zea mays
  Clone ID: MRT4577_91019C.1
aattcggcacgagggctccgaatctactctcacctctgcaccctctggccactactactgcaattattagcacccccaccgcacctcccattggatctgtttgtagtattaccgactagcacgatgctgcagctctacagtctacaaggatgaagccttgggacccaaccgacaaatcctggctcgcgagttgtgctacatgtcgtgtaaagctgtccagagagggtaggtggatacggagggcaagctagtctgagcggtagggagagagacttctctgacctgcgccgtcatgctgatcctcactgatcggtggagggttggcggctctcacctctggaaaaaaacaatcgattgttgtctcggctcgcttggaggcggccggctgtatgatcgggtcatgtcttgcggctagttggacatgagattttaagacca

SEQ ID NO: 174822 - DNA, 167 bp, Zea mays
  Clone ID: MRT4577_9101C.1
agaatcacatccgaagtactagatctttttctcatttcctccatttcagcaagaagagtctttatcctaactaactccttctaaagctctttctcagcctcctttaattcagcaatcacagcatcaaactttaacttagtcctagcccaaacaaccactcaaaagag

SEQ ID NO: 174823 - DNA, 404 bp, Zea mays
  Clone ID: MRT4577_91020C.1
caggtgccattgccatttactgacgtgtgacctccgtatttacaaacagagctagcgagctagagctagcaaagcggcaggcaccttactgctcaaggaacatggccagcacgcagcacttgtcaatagtggcgaccgacgtggtggccttggtgctgatggcgggagtagagacctatgaggcggacatcagctgctgtcaggaggtgatttccatcgcacgctgtatcttctacacgcgctgccaggacttggggccctccgccagatgatacaacggcgttaggagcctgaacaacaccgaccgcatcaccgtcgaccgacgcgccgactgcaactgcctcaagaacgccgacaccggcttcagcggactcaacgccggcaacgccgtcagcatccccttg

SEQ ID NO: 174824 - DNA, 2041 bp, Zea mays
  unsure (1)..(2041): unsure at all n locations
  Clone ID: MRT4577_91021C.1
gattcccgggtatcacggcggcctcacgaggcttagtgacttagtcccacctgtcagctgcagcagcaagcaaattgacagcaccccgcatctcttctcctggacgcgacgccgtccccaacctctccgtcccgcgccgccgccgcgcgtcactgtgctcgcgatctcgccggcggccccagaggacttgtcgcgtgctcggccatggcatcgccaccgccggccctcgagatcctagttcgcgagcccgacggagtcacggtgtggtccggacccccctacccgccgggcaccaccagcccgccgcagagactccccaagacggcgtgcagcgccacctctttctccaccgacggtgcccgcctgctcgcgacggtggcatcggcctcggccaccgtctacgactgccgcacactcgctgtagtcaagtgcttcgagctcccgggtctcctcgccgctgcgctatcgcccacgggggcgtatctgcagaccttccagaagtcatcctcgccgcaggagaagaatgtcacggtctggcacgtcgacacagctgccgctctttaccaacactatcagaagagcatgtctaaaaccacctggccaatggttcagttttctgcggatgaatcggtcgcttgccggatgatgcctaatgagatacaattctttgatccaaaagattttgcaaaaggaattttgtataggataagaatgcctggcatagctacgatgaagctagcaactgcaccaggatctcatgttgctggattcgtcccagaggctaagggtgttccagctagcgttcagatattttcttgcaacaaggatgcacaaaatcaagttgttgctcgcaggagcttttttcgctgttccaccgttcaattacagtggaacaaagggtccactggccttctaattcttgctcaagctgacgtggataaaaccaatcagagttactatggtgaaaccaagttgaactacttgacaactgacagggccttcgaaggaattgttccactcaaaaaggacgggccagtccacgatgtgcagtggtcttcctctggctctgaatttgctgtggtttatggtgttatgccgcccaaggcaacaatattcaacaagaagtgcaaccctcttgttgagtttggtgaaggaccctacaatacgataagatggaaccccaaaggacgatttgttgtattagcaggttttggcaatttgcctggtgatatggcattctgggattattcagaaaaaaaattggtagcgaaaacaaaggcagaatgttctgtcacaagtgaatggtcccctgatggtcgtcattttatgactgctacaacagctccgaggcttcaaatagacaattgtataaaaatatttgaccacaacggatctctgcagtttaagaagatgtttgaaaggctgtatcaggctgattggaaacctgaagcagctgaaagattcactgacattgctgacctgacaacatccttgagtaccttaaagattgaagaaacaaaaaaacaagtttcagcacaaggttccaagtcagcacaaacatcaagcaaggcccctgcaattacagcgccaaaacctacagcataccgcccacctcatgctaagggttctgcagaacttcaggacaagctctttggtggactagctcctgctgggggggagatgagcaaaaatgcattgcgaaacaagaagcgcagagagaaacagaaggaaaagaaagctgctgaagcgtcaggctctcctgctgatgaaagttgatctgtgccggattactttcagcattgccaaccaccgagtataacagcgacaaatgatttctttcaatctggtgaaacggccatgcaccgattcacgtttacaatatgaaactttttggtagtttggtgcagacactcggttattttttcagaactatactgagtttgtataaccatagcgaagaaacataaaaagtgagctatttcatattttcatgcaacataaaaagcgaaaaaacaaccanaaaaaaaaacaaacagggcgg

SEQ ID NO: 174825 - DNA, 2201 bp, Zea mays
  Clone ID: MRT4577_91022C.1
caaggcctcccgagtcgcgaggtcgacgccacgcgtccgcatcaataaagaggagcttgggaagttgccaaggcctccgatttcgctaatgcgacgataatggcgaccacgacgtcagcgaccaccgccgccgcagcagccgccaccaccgccaagccgcgggggtcgtcgtcggccctctgccagagggtggccggcggcggcaggcggcgctccggggtggtgcggtgcgacgccgccggcgtggaggcccaggcgcaggccgtggcaaaggctgccagcgtcgccgccctcgagcagttcaagatatccgccgaccggtacatgaaggaaaggagtaccatagctgtgataggcctcagtgtacacacagcaccagtggagatgcgtgaaaaacttgcggttgcagaggaactgtggccccgtgctattcaagaactcactagcctgaaccatattgaagaggctgctgttcttagtacctgtaatagaatggaaatttatgtggtggccctatcatggaaccgaggtatcagagaagtagtggactggatgtcgaagaaaagtggtattcctgcttctgagcttagggagcacctattcatgctgcgaaacagtgatgctacacgccatctgtttgaggtgtcagctgggctggactctttggttctcggtgaaggacaaatccttgctcaagttaaacaagttgtgaggagtgggcagaacagtggaggcttgggaaagaacatcgataggatgttcaaggatgcaatcactgctggaaagcgtgtccgctgcgagaccaacatatcatctggtgctgtttctgtcagttcagcggcggttgaactggccctgatgaagcttccgaagtctgaagcactgtcagctaggatgcttctgattggtgctggtaaaatgggaaagctagtgatcaaacatctggttgccaaaggatgcaagaaggttgttgtggtgaaccgctccgtggaaagggtggatgctattcgtgaggagatgaaagatatagagatcgtgtacaggcctctctcagacatgtatcaagctgctgctgaagctgatgtcgtgttcaccagcaccgcatctgaaacttcattgttcgcaaaagaacacgcagaggcactcccccctgtctctgatactatgggaggtgttcgcctgtttgtcgacatatctgtccccaggaatgtcagcgcatgtgtgtctgaagttggcgctgcacgagtgtacaatgtcgacgacttgaaagaggtggtggaagccaacaaggaggaccggctcaggaaagcaatggaggcgcagacaatcatcaccgaagaactgagacggttcgaggcatggagggactcgctggagaccgttccgaccatcaagaagctgaggtcgtacgcggacaggatcagggcctcggagctcgagaagtgcctgcagaaagtcggtgaggacgccctcaccaagaagatgaggagagccatcgaggagctgagcaccggcatcgttaacaagctcctccatggcccgctgcagcacctgaggtgcgacggcagcgacagccgcacccttgacgagacgctcgagaacatgcacgccctcaaccggatgttcagcctcgacatggagaaggcgatcatcgagcagaagatcaaggccaaggtggagaagacacaaaactgaggccaggaagcaatttttctaccaccattatctatatatatagcgtctccaatctcattccatttttttatcctttcactcagtgagcccttcccctgctcactgtgatcgttaactgtgtctgtgaattagagccatggcagcgtgttgtcaataacagcaatgtgtcccaattccccacagaagaaagactatatttatatgcatttattggagcaaatagtttacttaaaaaaaaccccgagagacaaaaaaaaattttaattttctgtcccttgcccctcgcctctggaaatccccccccgttgttgcctccctgtaaggctgtaacctgtaaccctgggatgcgggggattgtgctgtcccggtttggtgtgtgcgcgatttaaggaaccttttgtcgaggtccctgctccagttgggattagttttgttttggtacgggccaaaacttgtgggtggttttcggaaaagtaaggaataggtgtgaactttgcattgccccc

SEQ ID NO: 174826 - DNA, 1238 bp, Zea mays
  unsure (1)..(1238): unsure at all n locations
  Clone ID: MRT4577_91023C.1
cgacggtngaaatcccgcacctacctccttcctctctcaccgnggnacnncctcgcaccaagnaactgncattgggtacctcgaggccggccgggcaaattcggcacgacatcacactccgctacgctctcatcctccggctcatctcctttctcctccccgatgccaccgagtccaccgccaccacgcccaacacgcgtcataaaaaatgggtacgcatcaataaagaggagcttgggaagttgccaaggcctccgatttcgctaatgcgacggtgaaatcccgcacctaacctccttcctctctcaccgaggaccctcgcaccaagaactgagcgggaagagaggtagagaggcaagcgcacgagagtttctgctcctcgccccgcctccgtctcctttccctctctggttctctctgcgattctcgtcgcattggttccgttccctcacgaaaggcggtagctttctgtcttccctaatctatctagataatggcgaccacgacgtcagcgaccaccgccgcagcagcagccgccaccaccgccaagccgcgggggtcgtcgtcggccctctgccagagggtggccggcggcggcaggcggcgctccggggtggtgcggtgcgacgccgccggcgtggaggcccaggcgcaggccgtggcaaaggctgccagcgtcgccgccctcgagcagttcaagatatccgccgaccggtacatgaaggaaaggagtaccatagctgtgataggcctcagtgtacacacagcaccagtggagatgcgtgaaaaacttgctgttgcagaggaactgtggccccgtgctattcaagaactcactagcctgaaccatattgaagaggctgctgttcttagtacctgtaatagaatggaaatttatgtggtggcgctatcatggaaccgtggtatcagagaagtagtggactggatgtcgaagaaaagtggtattcccgcttccgagcttagggagcacctgttcatcttgcgaagcagtgatgccacacgccatctgtttgaggtgtcagctggccttgactctttggttctcgtccttgctgtnccttgcccctcgcctctggaaatccgccgccgttgntgcctccctgtaaggctgtgagctgtaaccctgggatgcgggggattgtgctgtgccggtctggtgtgtgcgcgatttgaggaaccttttgtcgaggtcactgctgcagttgggattagttttg

SEQ ID NO: 174827 - DNA, 572 bp, Zea mays
  Clone ID: MRT4577_91024C.1
gcctccgtctcctttccctctctggttctctctctgcgattctcgtcgcattggttccgttccctcacgaaaggcggtagctttctgtcttccctgatctatctagataatggcgaccacgacgtcagcgaccaccgccgcagcagcagccgccaccaccgccaagccgcgggggtcgtcgtcggccctctgccagagggtggccggcggcggcaggcggcgctccggggtggtgcggtgcgacgccgccggcgtggaggcccaggcgcaggccgtggcaaaggcggccagcgtcgccgccctcgagcagttcaagatatccgccgaccgtgagtcccttgcccctcgcctctggaaatccgccgccgttgttgcctccctgtaaggctgtaagctgtaaccctgggatgcgggggattgtgctgtgccggtctggtgtgtgcgcgatttgaggaaccttttgtcgaggtcactgctgcagttgggattagttttgttttggtacgggccaaaacttgtgggtggtttgcggaagagtaaggaataggtgtgaactttgcattgccctgttg

SEQ ID NO: 174828 - DNA, 853 bp, Zea mays
  Clone ID: MRT4577_91025C.1
gtgaaatcccgcacctacctccttcctctctcatctaggaccctcgcaccaagaactgagcgggaagagaggtagagagataatggcgaccacgacgtcagcgaccaccgccgcagcagcagccgccaccaccgccaagccgcgggggtcgtcgtcggccctctgccagagggtggccggcggcggcaggcggcgctccgccgacaggatccgagcctcagagctcgagaagtgcctacagaagaccgtggctgacgttctcaccaagaagatgaggagagccatcgaggagctaagcaccggcatcgtgaacaagctcctccacggcccgctgcagcacctgaggtgcgacggtagtaacagccgcacccttgatgagacgctcgagaacatgcatgctctcaaccggatgttcagcctcgacacggagaaggcgatcatcgagcagaagatcaaggccaaggtggagaagacccaaaattaaggccaaggagtcaatttttctacccgtgtatacttaccctccaacctgattctattttttttatcatctcacttactgagctcctccccgtcttgccgagacatcaaatgtgtcgtgaattagcgccatggcagcagctcaatctgtcgagagagtggcaaattctctctactcgagctgcttttctttgtacatttttgcttgagctgctgtggggcaagagcccctttcttaagttatatactttattcggacgaaataaacaggaatatagcaatgtgtcagctgatgccgttttcccttggcatcacacttgtaaggtttactgataccgtataccttttaatgcgttaacatttccggacgcgt

SEQ ID NO: 174829 - DNA, 305 bp, Zea mays
  Clone ID: MRT4577_91026C.1
caatacatcttccgccactaccaccgtcttcgaacctggcgctggccctcgaaccgtcagtggcaacggcgcgcccggcgctgacgggttcatgttccagaccaccaccgactgtcacgtacagggttaaatgatgagcgagaggaggggaaggaagcaaaaagccatagaccttggtggctacctctctagctgctgctccacctcctgccgatggcgtgggcggtaataaactatctctctttatatctcgccgctgctggcgttactgctgttgcagagatgcaggaatgaaaagaggggtg

SEQ ID NO: 174830 - DNA, 637 bp, Zea mays
  unsure (1)..(637): unsure at all n locations
  Clone ID: MRT4577_91027C.1
cgacggtngaaatcccgcacctacctccttcctctctcaccgagnaccctcgcaccaanaactgagcgggtaaaagaggtagagaggcaagcgcacgagagtttctgctcctagtctcgtctcgccccgcctccgtctcctttccctctctggttctctctctgcgattctcgtcgcattggttccgttccctcacgaaaggcggtagctttctgtcttccctgatctatctagataatggcgaccacgacgtcagcgaccaccgccgcagcagcagccgccaccaccgccaagccgcgggggtcgtcgtcggccctctgccagagggtggccggcggcggcaggcggcgctccggggtggtgcggtgcgacgccgccctcgagcagttcaagatatccgccgaccggtacatgaaggaaaggagtaccatagctgtgataggcctcagtgtacacacagcaccagtggagatgcgtgaaaaacttgctgttgcagaggaactgtggccccgtgctattcaagaactcactagcctgaaccatattgaagaggctgctgttcttagtacctgtaatagaatggaaatttatgtggtggcgctatcatggaaccgtggtatcagagaagtagtggact

SEQ ID NO: 174831 - DNA, 592 bp, Zea mays
  unsure (1)..(592): unsure at all n locations
  Clone ID: MRT4577_91028C.1
ccggccgggtccgcatcccggccatggtggcggcgcgcgtcttccagctcacgcgtgaactcggacaccgcaccgacggagagaccatcgagtggttgctgcgccaggccgagccttccataatcgccgccaccggcaccggtgtcacgaccgaggaggcgcccccgtctctcgtccccgtcgcccccatcgcgtcctcagtgtcccttacgccggtcccgtactacaccgcgctcctcatgcaaccaccgcccaccgccaatgagtcccctgtcgcctctgcatccgtatctggcactgttgcggataacaactaggctaggtggaagaggattatcaaatggcagttaggctaaaagttagttagtggttagggtttattatgtgtgctatgtggtcatggcttattaccttgggagaggattacggtgatttagctagcaaaactgattgagaatgtaacaacagaaggaatgacatcttttaaagtgttttttgagtcatactggtgttgcaaacgaagtcttatctcttgtgatatgtctagtgcttctgatttctattaaaaaaaaaaaaaaaaanaggggcggcc

SEQ ID NO: 174832 - DNA, 447 bp, Zea mays
  Clone ID: MRT4577_91029C.1
taccggtctttaattctcttctcgagggacgcgtccggtcaaatgaggagcaccagctgcaggcggcgccgaggagcgtcatcccactcactgcttggagccatggctaggggattgaagaagcacttgaacaggctcaatgcgcccaaacattggatgctcgacaagcttggcggaactcttgctcccaagcacatgttctggacctcacaagtgcagggagtgccttcctctgatcctcatcatcaggaacaggctcaagtatgctctggactaccgggaggtcatttttatcctgatgcaacgccatggacttggtgatgtgcaaggtcatggacagacaggacctaccctgctggggtcatggatgtcattgccatccccaagacaatggagaactacaggctggtttatgactccaagggccggttcgtgtttacccaatca

SEQ ID NO: 174833 - DNA, 712 bp, Zea mays
  Clone ID: MRT4577_9102C.1
tagtacgtcgttgtgaactctcttctaatcactccattcattagtcatgttgtaccaaaacatacttacatactagatggagtaaacaacaacatcagttagtcaaataaaaaaattatgcagagagcagagacaattaataaaaaatcttgagatcttttttcgtggatagtttatgtgggtattgttgtgagccgtgcgcacgggcaaccgactagtcctagttaatggaatggactatccccctcgtccttacgaggtgtcggagtgcagggtgtgtcaggcgtgcgtaagggtgtgagcttgtgtggggtgtgttggtgtgtgtgtggttgggggtgttctcctgtttgttttcaggcctcatacctttttcttctttttaaaatataataatacgcaggtcttctgcgtattcgagtttaaaaattaaaaaaatcttgtggtatcttcaacaaggtataatcttaacaaaggataacttgacaaaaagaaactagaaaggaagcagtttatgttatttctgtaatagtaatgaaattttcaacatgttatttttgactgccaccatgcaaaaccattttgagggtagtgtatgtaactacgggtgtcggggcgtgtagatcgatattaggacctgtgcattattcattcaacaggaccgacgcttgcaaggcaagcatcttgactttcttgagttcttgaccccagc

SEQ ID NO: 174834 - DNA, 231 bp, Zea mays
  Clone ID: MRT4577_91030C.1
acgcccacgcgtacgctgacgattatgtccattccacacgcctctaccctatgcatcggcatcgtaacatctcgatcgcagtatccagagcgaggcgaggacaacatggcgcacattggaaggtggtggagaccatataccccgacgtgcttattgtccactgacggcaagtcaagaccgctggcattgctgaaaccctgtagctatggaacatggtcatctgtggacaac

SEQ ID NO: 174835 - DNA, 254 bp, Zea mays
  Clone ID: MRT4577_91031C.1
cttgatatttggagtttcgctgccagtcattatagaagattgtaattttctatgacttatgttaaaaatgagtagttacatgtgtttttttagataatagataaaaaaacaggctttcacgtattttatggtcggaccttatggagtgtttgaaaaaaaaaaaaaaaaaaaaaaaaaaaaaaaaaaaaaaaaaaaaaaaaaaaaaacaaaaaaaaaaaaaaataaaaaataataacaaataatataaagaaaaa

SEQ ID NO: 174836 - DNA, 1377 bp, Zea mays
  unsure (1)..(1377): unsure at all n locations
  Clone ID: MRT4577_91032C.1
ggtacctcgaggccggccggggcaagaccccttcgggctccggccgccagtgccctcttcgctgcgcgatggagctccaaggcgccacccctcaccaacgatgcttctagacgcccagatgacgccatctccagacgatgtcatgctgtcggcgtggtctcccgcagatccaatcgaagcgccttccagtctaccctcaaacatcgtcgcagtgcctgggccgccgtgaggagccccaaacccaatctcctcctcctactcagacgtcgctggtctcctccctccctcaaacgtcgtcgtgctgtcggccctgtctatcgcggctccaagcggagcaccatcccacctcccccgtcaaacaccgctgcggtgcttgtgccgccgtcgggagcccgaatctgccccctcagacgtcgccgcctcgaaacgcgcaggccggcacggagggggcactggtggtccgacgtggttgcctagcgaacgacgatgaagaggatgaggtggtcgggtctatcaagaagaggcactgtgaagagccgccgctatcgccaatggatcaggtgccggttgcattcatcgaagatttggccctctcctccaccgtatcgctatcccatacccatcgtccctgcatatctaaatgatgcaacttcgatctatcgctgcccaacgagcgaatggggaaggatcgacccgagcgttctgtccggtacctgggtagtaagaagcaccagcccttcccgctcccaagttcaaaaggacacaactgctgagattgctaagaaacaagagcaagaacaacaaaggtaggaaaaagcttctgaagttggtcgatacaggctttgtagccacagtggaagtcttagccattctccgccaaggttaaaaaaaccaatcgttgttgtttcatgttattatcttcttgagttccagaaggtttattctttgttccttagcatgtcatggctaaccacttttaagtaagtgtaacatgttttgattaggccttttggtcagatatcagatcacaaggaactggtacaaggcctacccagatcacaaggcctgccccatgatgttcctccacatgatgttgccgatgaagttccctttccttacaacaggagtcctcttcatgagctcatcgtttgggtgttctgtggtcagtgccagcgctccctgaattgatgacaggcacaggagcaagcgatgacgagttacggaagaagctagacaacaagttgaagacatgttccatcatttactgnngaatggtcagatttagttccccattagtatctggcacacntgttctgatgtttgtgacatagttggaatagcatgttcatgagtatgccccaatagttgatgcaatgc

SEQ ID NO: 174837 - DNA, 485 bp, Zea mays
  unsure (1)..(485): unsure at all n locations
  Clone ID: MRT4577_91033C.1
naaaaaaaaaaaaaaaaaaaaaaaaaaaaaaaaaaaaaaaaaaaaaaaaaaaaaaaaaaaaaaaaagggaagaacaatataaaagaaaccaaaactaacaaacaacgggcatgcggcggtactggttctaggtttcccagtcctcctgaccgcatttcttgtggccgtcttttttccttctttcgtgactgcgtaaatccctgccgttgcccaacttttcccccttggggaacatggcagatttcgccggctgcccgtctttttggggatgcccgccctttccccctttcccacttttgtaaatcctgaatggccattgccattcgcctctgtccggcgtttcaaacccggagggggtggtggttcccccccgggtgtccgcttcaatggccggggcccttgcgcccgccccttcaggttccttgccttatttgctagccccgtgcgcccggctctccccggcttgctttaattcgggggctccc

SEQ ID NO: 174838 - DNA, 354 bp, Zea mays
  Clone ID: MRT4577_91034C.1
aggacgcgtgggtcgtataaccacttactgtttatgacccgtgtgctagctggtaggttctgctttagcggctaaagataaaaatagagatggtacacgatggtggcctttgaaaaggcaagcatcaatacacttgatgataaatattagcgtagcgaaagttgtcgccagcatgtttaactagaaaaaggtgaactgaatggtcgatgataaatgtgccctcttaattctatggagggaataaatatatcaatcaaacagtacaacagtggctcccgctggaggttacttacgcgcatagtttttattgggaagtgattacacactcgcgaaggcattgactgctatttttta

SEQ ID NO: 174839 - DNA, 345 bp, Zea mays
  Clone ID: MRT4577_91035C.1
tcttacgcgtgggcggacgcgtgggataaactatgtctgtgtgatttacattcgtatctaatgtgtcctgcaacattgattttctgaatataaatatggaattaaccaacctgatgaagtgactgattgagatgatatcaacatgaaaccagaaattacttctgttgaattaacactttttgcagccgccgctttttaaattgtccctcaaggcctcaagcttttacactaaaccgtagaggtaaccttatattattcggtcttctgaagtttggttcgaatattgatacacataccactgggctttatttggcaataggttggcctcctaaggttggacccttt

SEQ ID NO: 174840 - DNA, 2026 bp, Zea mays
  unsure (1)..(2026): unsure at all n locations
  Clone ID: MRT4577_91036C.1
cgccggcgcctcatctagggtttaatcctctcagccacgctttcagaaacaattcgttgattgctattcgatagatcgtactaaaggaagcacatggatctagtatgatttatctggacggggtcgcatccacgcgtggggccgtgctcaccactcgcgccgccgtctccctctcttcgcagccatggtgaagaggctcaggcgtaagggcgacgtctcctccgcgccgccgcccaaggcctccgccccggggtctaccaagtccgtcaagttaaagaagggggtcaaaaccgttccgaagaagttgaaggggctctgcactgaatccgtgggcatcgctgaggcgtctgcttcggcgcagacaccggccccaaaatcaatcaagacgagtccggcagcggccaccgccgcagagaccgcagatgatcgggtcgcccagaacaaaacggtggacagaaatttgagtaggaaggagacaatgaaggggagagaggcggagaagggagagatgaccagtgatggggtcgcccagaccaagacggaggacaggaaggccagtaggaaggaaacgatgaaggggatagagaagaaggcggagggggaagagaagaggacgagtaggaaggagatgatgaaggggagggaagaggagcgtgtgaagagggaagagaagagaaggaagttgacagggaaggaaaaggagaaagagagtgcctctggattcatattcatgtgcagtgcgaggacaaagccagagtgctaccagaacggcgtgtttggcctgccccgggggaagatggatgtggtggagaagatccggccaggtgctaagctgttcttgtatgattttgacctcaagctaatgtatggggtatacaaggcagatacaaggggaggattggatcttgtgcgacatgcctttgatgggaaattccctgcacaggttaaatttagtgttgacaaggattgtcttcctattcctgagagtagtttcaagcatgccattaaggagaactacagctcaaaaggcaggttcacccaagagctgaactctaaacaagttcaaagactattggcaatgttcaagcctatcgaccttcctcaatcagctccacaacatatcgaggaagtgcgacaatcacatatcattgaagatattagaaacccgagtgactatgaagatagaagacgattgcaacatattgaagaaagaggtgcacctattgatgtccatgcatatcctcttgaagatcagtacaatatcacacgatcattacatcctccactttttgatgagcctcgacgtttggtgctagatccttatcatatgcaagagcctcaacatgttcctcttaattactatcaccaagtggctactaggtccccatactgtcaacctcatatggatattatgcatgaaagaactgcagctgaggcaaccctgatggatccacttccggtaagagatcaccgagcactgccaggagagcttgctgcacggtctgaacgcgtggatgagctgtaccgttcttacaaactctctacacgcgggatggacttcaatccgggagcatcctaccagacaacttatcacccgtctagtagtgtttatggtgaaggcattcagaggccagttttggcaaggggtaatggcccaagtgtgcctgtgtccagccgttattcctttaatggcccaccagcatattgatggattgcctagatgcaagcactcaaatcggccccagcctattgtactgcgtaccagttaatgtaggcaatgccttcttgtataccgttggaagccaggatagaacttgatggtagttaggggccctaatggtagtagcttcgcagtttgttcatcgccgtgggattcattttgcaagataaatgtatgaaatgaaatgttaaccttgtttgatccaagttgtttaaacaaaaatgcaaagcgattaatgtctttctgtcgaattgttgcattttttttaacaagaaaaaggaaaaaaaaaaacaaaaaaaanngagg

SEQ ID NO: 174841 - DNA, 1542 bp, Zea mays
  Clone ID: MRT4577_91037C.1
cccattcgtccgctcatctagggtttaatcctctgaggcacgctttcagaaacaattggttgattgctattcgatagatcgtactaaaggaagcacatggatctagtatgatttatatctaattcagcgcaactgatcgtggggattcgattctccatcgtgaattgtggtgcctttccgatcagccatggtgaagaggctcaggcgtaagggcgacgtctcctccgcgccgccgcccaaggcctccgcccctgggtctaccaagtccgtcaagttaaagaagggggtcaaaaccgttccgaagaagttgaaggggctctgcactgaatccgtgggcatcgctgaggcgtctgcttcggcgcagacaccggccccgaaatcaatcaagacgagtccggcagcggccaccgccgcagagaccgcagatggtcgggtcgcccagaacaaaacggaggacagaaatttgagtaggaaggagacaatgaaggggagagaggcggagaagggagagatgaccagtgatggggtcgcccagaccaagacggaggacaggaaggccagtaggaaggaaacgatgaaggggatagagaagaaggcggagggggaagagaagaggacgagtaggaaggagatgatgaaggggagggaagaggagcgtgtgaagagggaagagaagagaaggaagttgacagggaaggaaaaggagaaagagagtgcctctggattcatattcatgtgcagtgcgaggacaaagccagagtgctaccagaacggcgtgtttggcctgccccgggggaagatggatgtggtggagaagatccggccaggtgctaagctgttcttgtatgattttgacctcaagctaatgtatggggtataccaggcagataccaggggaggattggatccgcatgcctttgatggagagttcatttatcctcacaagattgtatttctattatcttttatgtaaatattcaaattcttgaacttcactgttgctttcagaactgcagctgaggtaactgtaagagatcaccaagcactgccaggagagcttgctgcacggtctgaacgcgtggatgagctgtaccgttcttacaaactctctacacgcgcaatggacctcagtccgggagcatcctacctgacaacttatgagcacccgactagtgtttatggtgagggcattcagaggccagctttgacaagggttagtggcccaagtgtgcctgtgtccacccgttattcctttgctggcccaccagcatattgatcatccagatgcaagcactcaaatcggccccagccgctgtacaagttactgtaggcaatggcttcttgtacaccgttggaagccaggatagaacctgatggtagtagctttgcagtttaattattgcctttggtttcttttgcaagataaatctatgagatgtaatgtggaacttgtttgacccaagttgtttaaactaaaatgcaaaacgatggatgtctttgtgtttaaaaaaaaaaaaaaaaaaaaaaaaactcgagaggggg

SEQ ID NO: 174842 - DNA, 234 bp, Zea mays
  Clone ID: MRT4577_91038C.1
ataggatgtcttattgatgttgaaaagatcagttctttgtgtgtgtgtgtgtgtggctatgctagggtttactttgttgtagtacccaatacgcggcaaaactgaagaacatttacacaatgtcttcagagttttttagcctaaacgaaaacatgatcatctcgaaaaaaaaaaaaaaaaaaaaaaaaaaaaaaaaaaaaaaaaaaaaaaaaaaaaaaaaaaaaaaaaaaaaaa

SEQ ID NO: 174843 - DNA, 873 bp, Zea mays
  Clone ID: MRT4577_91039C.1
ctcgagcccgcgcctactagctattaacagtaaaagtccacgagaaagggagggaacaaccgcgagcagcgaatcaagccaagggtacatacggcgatggaggcggccaaggagcggcagcagcggaaggccgccggcgagggcgacagcaccacggtgcagctgccgacggagacgagcccgtacgtgcagtacgagggcctcgaggactacaagatgcgcggctacggcgcgcagggccacctccccgtctccgacgtaccccacggcggctccggcactgaggcgcccaccgtccccggcactgccatccccgtggcggagccgaagcgccgcgacgacgtccagcctcagcgagacctgggaggagacggaggagggggcgtccggcgccccggggacacgtccaccgacgccatcaaccgccacggcgtgccgtagctttagcttggctttggctgggtctcgtccgggcgcgcgcgtctccaggagaccaggacacatggccgagcctctcgtcaatgtgagcctgtccgtgtgttggatgtaaaaccatacgcaagttctgtaactaaaaataatgggcgctttatgtcactgcaataacttgatacgagtgactagtgctgggaatatgggctagactttttgggccagtacgaacacggtctaaaaacaggagctcaaagcacagttcgacacgaaataatatgtgtcgcgctaggccggacctcaaatttcgatccgtcaggccccagtatggcccacgtagataggccgggtttaggccggcacgacccaattagatctaatttgtttaattttttaattttagtaagatatcgtggagtttatatatggagtttatgtggt

SEQ ID NO: 174844 - DNA, 325 bp, Zea mays
  unsure (1)..(325): unsure at all n locations
  Clone ID: MRT4577_9103C.1
cctttnccccactcccgggtctccagcattcctatcctctccccgcncgcncgtnnnnnnnnnnnnnnnnnnnnnnnnnnnnnnccttcctctcccgagccaagatgaatgttgaaaagctcaagaagatggcaggtgctgtgcgcaccggggggaagggtagcgtgcgcaggaagaagagggcnntccanaagactacaaccacagatganaanggnnttnanaccactttaaaaaanatgggtgtnnnnnnttccnggtatttaangggtcaactntttanggnanatgtgatanncatttgaaaacccctagggnccaggtc

SEQ ID NO: 174845 - DNA, 579 bp, Zea mays
  unsure (1)..(579): unsure at all n locations
  Clone ID: MRT4577_91040C.1
aaatagcaagtatggttataagaggaatgcaacaccatctatccaaaaaggcatactacaaatatcaacacagtcaaaatgaatgacttactgatgtatgtcctcaggattgcttcgaagtttttaggagcagatctacatttcatcaccaaccacttgttcccattttagcaagtaaaaaattccatggaagtaaaagcctaaccaattccttaccttttaaagatggacacattctggaacaacaattgcaacatgaaagatgacatgtgtctattaagcttgcctatgggcacctaggtacagggaagttgtcactaacacgacttcgatcaagattcaagaatgataattgggaatagccatgttgtatcatatgaagaacaaacagatatggacgacatgtttcacctgattagttgtagttttagtagctttaactgaaagctttttttgcctctttatccaaagctaaccactttagagaagcatgaggttaatggncaacagaacacaccttcaactattctcgataaacataaacaaagcataatatacataccacccatctagaccctt

SEQ ID NO: 174846 - DNA, 278 bp, Zea mays
  Clone ID: MRT4577_91041C.1
agcaacggaagcggcactacacttgcatgcctgttactgctgaaatgtgacaaaggtggtgacttggtcccacatagacattgatagagacgggctagaaagagccatagatgttgctgaagatatgaaagagaacaaccgtatcttatgaaggattgtacaaattaattgttaatgatggacttaagctggacctagctgatgctcaagctcttgagaatgatatacgtcacaactattacaaaggactgacttatgaacagttgacgaatatgcag

SEQ ID NO: 174847 - DNA, 476 bp, Zea mays
  Clone ID: MRT4577_91042C.1
gcacgacggcgtcgccgtcatagccttccaggtggacatgaacttgctccgctcccattagcccggtcatccccacctaataagcgagatacttagcacaccgttggtgtccgctaagttccaagatgaggttttgccctagacaaggtatgtgaacactggaattatcagttggacgagacccgactggtgttgctcgctcccacaaagaagatcgatgagttcacatacctaggaatgaagaagaggaagaagaaaagctcatgcacagtgcagaggtcattacacaaaaggctgtgtgtataaaaagttgaggcgcacgaggacaacagcagcctcgatgctcaggcaacgacgattgcaaagatcgtgcctgagcacgagtttgggagagactacgaggttaataagaaaactgtacggacatttcgcgagaagagagtataggctgcatattcaacaacgacgcgccacct

SEQ ID NO: 174848 - DNA, 357 bp, Zea mays
  Clone ID: MRT4577_91043C.1
gtcatcatgaacgacaacttcgacacggtggtgacggccacccggtggggccgctgcgtcttcaacaacatccagaagttcatccagttccagctcaccgtcaacgtcgccgcgctcatcatcaacttcgtgtcggcgatgacctctggcaagatgccgctcacgaccgtgcagctgctgtgggtgaacctgatcatggacaccatgggcgccctggcgctggcgacggacacgcctaccaaggcgctcatgcgcgcccgcccatcggccgcactgcaccgctcatcagcaacgccatgtggcgcaacctcgccgcgcaggcggcgttccaggtcgccgtccttctggcgctgcagt

SEQ ID NO: 174849 - DNA, 348 bp, Zea mays
  Clone ID: MRT4577_91044C.1
ttggaaaagcaacaggagaatccccaaaaacccaacaggtcccggacaaaatcaggggggggggaacactaacaaagggaggctttctttgggggaaaaagggaaaaataatacaacccaaaaaaaatgggaaaggaaattaagagcacaaatcgctgagaagggggagaaggcaacagcgaagctatgaccgggcaggaaaaagcaaccggcccaacaagcacaaaaaaaaaaagaagtttattccaaggaaaagcaaaaacattctcaaggcacaccagaaaaaggaggaacctattaccccaccaccttccaaacacgaaggcaagcatcctcgccggcaggcac

SEQ ID NO: 174850 - DNA, 108 bp, Zea mays
  Clone ID: MRT4577_91045C.1
tcggatacacgttcacggactcgtgcgtgaaaagtactaagtcgagtactagacactctagggggggttaatggccctacgtgttcaactgtgcaactctgagatcct

SEQ ID NO: 174851 - DNA, 351 bp, Zea mays
  Clone ID: MRT4577_91046C.1
attcgggtcgagcagcagcccatttcttttggcttcatttgtcccacctgtaaagataggatgtctggtcatcacagtgtgcccaacaatggttcatggcatgtcaaaagtgcatatgctaagggcatgcaaaggaagtggctactggatgggacctggggtgaatgttgccactactcatgcgtgtgacctgcttaggtctgacaatggtcctctgaagcagccgttgtccccccttaacattcttattactgtcgagtgactaccatgctttgtgtttcaacagatccagctgggagctggtgttgtcagggtattacttgtgcatctcttgccgagaacataccttga

SEQ ID NO: 174852 - DNA, 252 bp, Zea mays
  Clone ID: MRT4577_91047C.1
aattctagcagtcttttaaatagcgggctatagtggcattatagcggagatatagcgagctagcggctcaggatagttgccactacaacacggctatactaaatagcaggctatatggggaattattctagagaagtatgcttgttctttactgtcttgcatttatgcccacctgggctgcgtctttgcactgtaatgtaatgcatcactttcaactttacatatgagagggtgcccaccacattttattat

SEQ ID NO: 174853 - DNA, 827 bp, Zea mays
  unsure (1)..(827): unsure at all n locations
  Clone ID: MRT4577_91048C.1
cgaccccacagcaagagccagccacggagggacggatgggatacctccaagtcggaacgcggcttccttcctccggcggtccggcccgaatcaacgcgtggcgtcggagctccgtggcgtcgtcgtcctctcccctctctttcccaacacctcgcgtgttgtctagcactctagctgcttctctcggttctcgcgactcccaaacggcaaaacgccaaaaccctagccgcggccattccggaattggccatggaggcgagggcgtcgccgcgtccgtcggtctccatcggtggcggcggcggcttcggagctgggcggggtgacgacagcgccttctcgtttctctcaaaggggtggcgcgaggtgcgggattccgccaccgccgacctgcgcctcatgcgtgcgagggctgattccctccgcacgctcgcggaccgcgagctcgagcacatcctcgcgtccgcctccactgcgctgatctccgcgccgccgacgccgctcgccgcgggggcgcccatagccgagctcgagttcgtgcgcacacggatccaacccaagatctccgaactgcggcgccggtacgtgtcgcaggagcgggagctcggccgcagggtgctcgaggggtgggcgccgcgcgcggcggggaaacccgcgcgcgcacgtgtcgacctctctgggatcaccgccatccgcaacgccatcgtctctgaagtggatggcggngagcgctggaggcgcgtggtgtggaacggggaggcggaagaggggaaagagtgggaggtgctcaggatgataccggacggcatcaaagagttcgagcgccggag

SEQ ID NO: 174854 - DNA, 284 bp, Zea mays
  Clone ID: MRT4577_91049C.1
ggaaaaacgatgtgtacctcgagccggccgaacgacactcctcttctccgacccggtgcgcgacggtttgagtttgctcaagatttggaacctgaacaagtgcggtggcgtgatgggtgtgttcaactgccagggagccgagatggtgccgcgtgaccaagcggactcacatccacgatttctccccgttcactctgacctgcactgtgcgcgcctactacttctacgccataacgcgcgtcactggcgacaacggcgattgcaacgaatacatcgtggtgata

SEQ ID NO: 174855 - DNA, 166 bp, Zea mays
  Clone ID: MRT4577_9104C.1
cgggggatatcagcgacttcacataaaattctggactgcgaggatttaggctgcaagtgaacaaatttttttaaggactccgaaggccccataggcccttttttttctgggggggtggaaccgttttcccacagccgtccccaaatccatctgataaaggaaccca

SEQ ID NO: 174856 - DNA, 423 bp, Zea mays
  unsure (1)..(423): unsure at all n locations
  Clone ID: MRT4577_91050C.1
tggaactttgggctgatttatgtgcatgtggatgtgcgggtggatgtgcgggtggatgtgcggggctgtcgtctgcttcgttcagtcgatggcttggttagtactattcttcgtctgtggttctgtttagtctttcttatttcttagcgagatgtagactcttcgtctgtggttctgtttagtctttcttatttcctggcgagatgtagactccggcgtgatggggtatcatggaggtagggcagcgtagccgcgtgcgcgccggcggttcggcctcagtaattgagaacgtctagagacgaaccatagagagacggtacgttcaataccgaaagaataccgtgataaggaccttagatccggcctagaatttacacntctagaacgtggaacacaaactaagaagaagtcgacgacgactca

SEQ ID NO: 174857 - DNA, 425 bp, Zea mays
  unsure (1)..(425): unsure at all n locations
  Clone ID: MRT4577_91051C.1
aattcggcacgaggctcttccaccctggagcaccacacctcctgccatgcactgcatagcccacaggacaggagaggagaggttgggtctgggacaccatggctccgatgaagctgtacggggcggtgatgtcgtggaacgtgacgaggtgcgcaacggcgctggaggaggctggcggcgactacganatcgggtccttcaacttcgccaccgccgagcacaagagccccaaccacctcgtccgcaccccgtttggccaggttccatctttgcggggtggatactgtgccctcttctagtcgggaactatctgaatacgctctggtgccaaacactacccagatctggtggggggatgacccctcgaggcgcaacgctggtggctggttgcatcggggggggtggtaaccactacaccgctgtgc

SEQ ID NO: 174858 - DNA, 414 bp, Zea mays
  Clone ID: MRT4577_91052C.1
gagaacagggaggaacacacccgttccccaacagggaaggggggggaatgcaaacgggaattcagatggaaaaaaaacccttctggggcccccaaaaatggggggcgggggggcccagccccccccgccaaaaactaaagcgggaaggggccggggtttcatgagggggcctccttgtttttacccccccaccgaaagggaagagcttggggggcccattctttcccgttgaccctaaacagatgcctgtccccccccaagggggaagcccccgagaaatccccccccccgggggggaagaagcttttgtcataccaaccaaacttgagggcccaaaagaaggccctgcccgggggacttcaaagggcttgaacaaaaacccccctgcgaaaagcaaggggaatggcccttgaa

SEQ ID NO: 174859 - DNA, 224 bp, Zea mays
  unsure (1)..(224): unsure at all n locations
  Clone ID: MRT4577_91053C.1
tgtcccctttnttttttattccccctcccacctcttcttttttagggtggtttttttaccagcacaaaggggaattcacccctgagtaaaaaaacaggaagcccccctccctgtttgttgggggaccgaaatggtttaagaggaatgtctctatccccaccacaagaatattgatcttgcgtcagtccttttccaggagggggaaatttaggggacaaattttc

SEQ ID NO: 174860 - DNA, 317 bp, Zea mays
  unsure (1)..(317): unsure at all n locations
  Clone ID: MRT4577_91054C.1
gggaaaaaaaaaattcctctgggatgggctattaaggggtttttgggcgatttgatacagcccgaaaatcgataggcccttgctaggtgggcctacaacacaagatccgccgatcgagggactttacatatgcctgccttacatgagtgggcaggggtggacctttttgtggttgaaaatggacatgttcttgacctccggagggctggggttttccatggcctggggggccctacggacaaaaccccggggagcctttttttctaagaccccccccccctaagggttgggggtgagggtttngggccctttaggcc

SEQ ID NO: 174861 - DNA, 419 bp, Zea mays
  Clone ID: MRT4577_91055C.1
ggaggatccccctagcaccgtacgtaagctcggactccggctttagcttaggttcatcttcggcaagctctacaccaactttagcctctgtgttggcaactggttcctccactgggccatgagcggctgcagcttctgaagcatttgggacagtcagtcccagctgtttctaccaatggttgtagttgggcagttgcgccatcatcatcaggagctgcagctactgccactaccaccactagcacaagtgcttatacatttggtaggcatgacaaccacggttcctttgactggaacaacggggttaccaaattgtaatcttaaaacaactaccccagatcgtacctcatctgcaatactgggattagggggttcatactactgctgctagcgtctatcaccacccgcaccccaactca

SEQ ID NO: 174862 - DNA, 378 bp, Zea mays
  Clone ID: MRT4577_91056C.1
aatcgaaatcgatccgatctacgcttgctctgaagcctgatctccaccgtggtcgcagcatgggcgcatgaccttgatcaccaagaggcaatggagcatgcatccacaaccacatgccatggcagtgagggccctcatactcacttacaactacgtcctgatcgcactcatcgtcgacatagtacaccgtgactggcttcttgattgccgactgtgtgcatgttgatctgcccatgaaaaccaactaccttgtcgtcgacatcaataccactgctaaacaaatcgaggatgcgtacaatgaatttactacgagggatgatatcgctattgtgctcatcagtcaggatattgccaacatgataaggtgtttggtgggta

SEQ ID NO: 174863 - DNA, 277 bp, Zea mays
  Clone ID: MRT4577_91057C.1
tcgtttttttttttttttttttttttttatgttgttggggcctacagggatcaagttttatactgaggcctcaaaaaatcgttatatataaacacggggaagcagctacaattacaactagttaccagagaagaaaagcatggaaatgaacaagtaaaccggcaaaatagaataaactgaacagaagactctttttactgatagaaaggaaatggaaacgatctgtttcacgggtccgaaaaccgatgataagcaagaatgggggtggatatggggg

SEQ ID NO: 174864 - DNA, 321 bp, Zea mays
  Clone ID: MRT4577_91058C.1
ggaaaccaaagcaaaagatctggttcggatttgcagacctcgtaccaaagaagacccaaaattatgttttcattacactgatgtttaggatagtttcccacattattcataaaatctgcaggattgataagacagttattacaactgcacctacagttgcattatgcgcaacaacggaaccgtcacagcaatgttacccctcctcgtcgcaggctgcatttcactcagacctcaaacatgacgccaaacctggtagcaagaggaatggatatgatggcagcacccagcgcaacgccaaatatacggtgtgagatggagaac

SEQ ID NO: 174865 - DNA, 285 bp, Zea mays
  Clone ID: MRT4577_91059C.1
tatcgccattgtagtcggcaagtacgcacaggcaatatagtgtggctggacacagggacggtgtgctagaaaagagtgcgcaattgtttcggcagatgcttaaaaatgcatagagtaatgctgaacttaagggcttggatgtagactctctggtcagtgaacacatccaggtggacaaggctccgaagatgcgcagacgaacctacagagctcacggccggattaacccatacatgagctccccctgccacatcgagatgatcctcactgagaaggatcagattg

SEQ ID NO: 174866 - DNA, 123 bp, Zea mays
  Clone ID: MRT4577_9105C.1
gaagactactcccttgactgtaatgttggcataaaggatccatttgcagctcacgatgtcccactgggccgatccattaatgaggtgcatggaacctgggttgtaaaccacattgtttcagca

SEQ ID NO: 174867 - DNA, 1483 bp, Zea mays
  Clone ID: MRT4577_91060C.1
cagctggcagtcgcaagtcgccgagccgtcctaacacagcgagagggtttcgaattggcgccaagccgccaaccatttcccccaatcccgcctgccagccctagggtttctgctacgccatggcgggaaccgccgccgccgctcccatggacatcgacgcagccgcgccgcctcccccgccgcctggtgcggcggccaagggcaaggcgccgctctccgctggcggcagggcagcgccctgggtcgagaagtaccggccccagtccctcgccgacgtcgccgcccaccgcgatatcgtcgacacaattgacaggcttacaaacgagaatagacttccacacttgttgctatatgggccacctggcactgggaaaacatcaacgattctggctgttgcgaggaagctatatgggtctcagtatagcaacatgatcctggagctcaatgcgtcagatgaacgtggcattgatgttgtcaggcagcagatccaggattttgctggggcacgcagcctctcttttggagcaaggccttctgttaagctggttctcttggatgaagcagacgcaatgacaaaggatgcacaatttgcattgagaagagttatcgagaagtatacaaggagcacaaggtttgcactcatatgcaaccatgtcaacaaaattatccctgcgctacaatcaaggtgcaccaggtttagatttgccccactagatggcagtcatgttagagagcgtcttcaacatataataaaatctgaggggctcagtgtagatgacggtggcttgacagccctagtgcggttaagcaatggtgatatgaggaaggctttgaatatattgcagtcaacgcacatggcatcccaacaaatcacagaagaagctgtctatctttgcacaggaaaccccatgccaaaagatattgagcagatagctttttggctattaaatgaaccattttcaaccagcttcaaatatatatctgacatgaagatgagaaaagggctggccttggttgatatcatacgggaggttactatgtttgtgttcaaaatacaaatgccatctgatgttcgtgtaaagctaatcaatgacttggctgatattgagtacagactaagctttgcatgcaacgataaactgcagctgggcgcactgatctcaactttcacggacactcgcacggctatggttgctgctgccagctaattccagtaatgtgaaggatctttctgctgctccctctggaatctgaagatgaagcgcagctacattatggggtcaacgtcttgcctgtagttagcaagctgaaaggtttggtgagggttgtcttagatcatctgtatgtctgctggacgtgatgtggtaactgcctggaacttgggagtactcgtatgactgaacgctgccaggcgttctcatgttatgcgtgtaagattctatccagtagtataaaccctagtgccgttctttgacgaagttac

SEQ ID NO: 174868 - DNA, 368 bp, Zea mays
  Clone ID: MRT4577_91061C.1
gttggtagaagccaaaccggggggcaagcatgcattagtgctagtagcagtttacaaaatatttggcctcaacatggagttcgcaaactaaaatttttgatcagcaacaagcgggatgcaacagtacatggggcatgcaaactccgtacagaatgtaccagtctgtttaagcttaacaacacatagcatgcaggggactgtttatttggggcatgcaagctttgaactgaactgaataaactggggggagctcttggatcaggccccacaacaaggtactcattggtgggcatagaaaacaaatgcccacgcccacaggaagcaacttaatgggccatcacttcatcagtcgcaccttatccatttta

SEQ ID NO: 174869 - DNA, 330 bp, Zea mays
  Clone ID: MRT4577_91062C.1
cgcgcagagcatcctggccatctgggcgtgccaggtggtgctcatgggcgccgtagaagggtaccgcgtcgccagcggcccgctcggagaggtggtcgacccgctgtaccctggcgggagcttcaacccgctcgggctcgccgaccagcgggaggcgttcgcctagctcaaggggaaggagattaagaacggccccctggctatgttctccatgttccgcttcttcccgcacgctatcaacctcggaaagggccccctccagaacctaaaccaccacatcgccgacctcgtgaacaacaagccgtgggcttactccaccaaattcatacc

SEQ ID NO: 174870 - DNA, 411 bp, Zea mays
  Clone ID: MRT4577_91063C.1
ggcaccggggggcacgcaccattttttttttttcacccaagttccagagaaggacataaatgggttttttaaaaaaaattttggggaaactttgaaagcccaaatggacatccccctccaccatgaaggaaaaaaaaggcgaggggttacccttttgggcggcccatggtttttttgtccaaattccccattagggggacccatgtcccccagtttcgggacaaatttccaaggggggaagggaaaaaaaatccccgggaccttccaaaaatttccccaaaccacaatggggaggggatagggcgggttttgggactctaaaaaaaaatttagcccttggaaccctaaaaccccagccctcgctggaaaaacagggagttcgcggtcttttgggggagcgaaccttggggg

SEQ ID NO: 174871 - DNA, 301 bp, Zea mays
  Clone ID: MRT4577_91064C.1
aaattcaggcttcacaaacacgaccggaacagatttaataacgcgccccactgcgctaaacaacgtaaacgatcagcgtcaacaacacgtgcatcagcacgtaaccacatgcaaaaccgagcgaccaggacccgaggatcactaactacatgtcgggcttacactaaataccaaatagatatgaaagaacaaagtgacactcaatttgggacagacatctatttgtaaaaagctcgggttgataactataacttataattgaagcataactagcgcgacaacctgataagcatcgaataaa

SEQ ID NO: 174872 - DNA, 225 bp, Zea mays
  Clone ID: MRT4577_91065C.1
gaagaaatccccggggcgcccacctccgggcacttaataacctggagttattaaatgctgatggcatcccaggagcatttttcattcatttatcacacaccagccaaaccctcaacaatctgagtccaattctcactaaactgtactttgaagacacatatatttactagatcgtaaattcacctcccttctactttatactatacattcaaacctgtgctcaaa

SEQ ID NO: 174873 - DNA, 379 bp, Zea mays
  Clone ID: MRT4577_91066C.1
aaaaaataaaaataaaataaaaaaaaaatacagaaaaaaaacaaaaaagattgcctcaaaaatccaacttaatagacacttaaaaaaaagtaaaagaggaaaaaagaacaaaaacggggaaataactaaaatccggggtcaaattagaatgccgatcacaattaaacacaaaaatcacaaaacctcaaccataaagtgcaaagcctgggctgcctcctgagccgagtataactcacattaatatgcgccgctctcactgcccgctctccagccggcaagattgtagtgacagctgctttaatgaatcgcccaaggagaggttataggaggattgcctattgagagcttctccgattcctcctcaatgaatcggtgcgat

SEQ ID NO: 174874 - DNA, 155 bp, Zea mays
  Clone ID: MRT4577_91067C.1
accacctggtcggtggagttctacaacgtaggggacagcatgaagtcagaggacagggtgcacttgtaccatacggaactgaccacggatgagactacattgactcaggtccggatgatcctagagataactatgatgatggctttctgaaagat

SEQ ID NO: 174875 - DNA, 924 bp, Zea mays
  Clone ID: MRT4577_91068C.1
tgggacctcgagccgggccggccgggagaaggaaagtgctactgggcattggctactgccaactacccgtggggtcccgtggaagagaagagagcatcgccggagttggggacggcgcgccgacgaggaacaaaagaagacggcggtggggcggagatggggagccctctgggcgggtggccgtcttacaacccgcacaacttcagccagctcgtcccggccgacccatccgcccagccctcgaatgtcacaccagccacttatgttgcgacccacaggactgatccgccacccaatcaagtgataacaacggagtccaggaacatcctgctgaggcacttctaccagaaatccgagaagctgaggccaaagagacctgccccggacaacctcgatacggagaacaacagcagcagcaacaacaagcagcccaggggaccggtcggcgacgtcggtgggcagtcgtcgagcgcgagaagctgaagccacagctggtggccgtccactcctcccctgcctgcctgcttctttctcatctctgggtgtcgtcatgcagaggcagaggcagaggcagatgcagccctgtgttgtctgtcctcttcgctactaacctaatctgaagttagggttacatacatggatatcggatagatgggtgtacataagctcctgagagcagtcttgtgttatcctaaatgctaaacggtaaacagcgggcaacatcctctgtttagcgtataatcggactacacgtgcctgtaggcggaataaaaaaacggattatacggggggaagtaaacggcataaatggccaacacggttagctactgagtagtgtttaaacggcgtgtaaatagtttaagggtttgttcggttagcattcaatccatatagattgagtgtgattggatgagtttgaatcct

SEQ ID NO: 174876 - DNA, 318 bp, Zea mays
  Clone ID: MRT4577_91069C.1
ttcccggttttcctattcttttttttagaaatgtactttaccatgcgaggctttccatcaacatcatacaaccaaactgctatggtagaactataactcacttgcacatctagaccagggcaccaccgacgcagaggcgttggtagtatgcatggtgctatcgtgctactagtgctatgtttcgcagcatgctgcaaccatttacttaaattgactctcttcatccaaccgtgctagccttcaggctacaactagaagctttctgcagggtcttaaaactatgaattgtcctattgcaacaactattattggcaaaga

SEQ ID NO: 174877 - DNA, 753 bp, Zea mays
  Clone ID: MRT4577_9106C.1
ggccgcttttttttttttttttttccaagggccaacgggacattttttttcttacttgttttactttcgtacgaagacttgtttcaacgaactaggagttttgaatgcaaaatgcgaaatgaaacgagacacctattgacaatacaaggggacgtatgcaggacagaagaggatggcatgagggtgttgacagtggagaacctcaggaatccttacgagagcaacctaggagggaccaacaagaggttcaagctgacactgaacaagctttatgcctggaccctggtggactacgagcgtgtcgtcatgattgattccgataacatcttcctccagaacacagacgagctattccaatgtggacagttctgtgctgttttcatcaacccgtgctacttccacaccggtcttttcgtgctccaggtatgtactgaatctttcgttgttccacttgtgacctgtcccgatacaaccaaaatctgtgtcattttgcttgaaatcgtgagagcttgttgacttagctatgtcatacaaaacttctttagtcaaaatgccagttacaaactaatagaatttgagcatgcgtacccccaaagctgaagtatacgtcttcttccagtatgaatgatccattgaaaagaaaattcccaccatccataacttgattcttgttaaactcacacactgagatatgttgtgctcagacatgtaatggccaaccagactaatattggactcttcttcaatctgcag

SEQ ID NO: 174878 - DNA, 497 bp, Zea mays
  Clone ID: MRT4577_91070C.1
aaacataattattgtttatttatttttgaccattcattcattatttttttgaatggttcaagtaggggcagcgcaggataagaatccccggctgatcgatactgagccatggaaatcaaaaagcaagacagctgcatcctcgcctccggtggccattcaacaggacaaaaccacagacgtggacctcttatctggttggattgggattaggattccgattaggattagcaccaggaaagcctgcaggcgccacctgacgcattattgccaaatgccaaaccacccaccaaaaattgctactaaaaaatagttttttgtttctttttactcctgtcttggtcttgacccgatgtctttatgctataacagctccagctctcggtctaaatgccatccccgaaaaaactcgatgggagcttccagtagaacccggagtccagaacctcatactaatacctctttccctccctggggcccttaccgttgtaatggtacgc

SEQ ID NO: 174879 - DNA, 753 bp, Zea mays
  Clone ID: MRT4577_91071C.1
ccggccgggactggcctaccgccaactacccgtggggtcccgtggaagagaagagagcatcgccggagttggggtcggcgcgccgacgaggaacaaaagaagacggcggtggggcggagatggggagtcctctgggcgggtggccgtcttacaacccgcacaacttcagccagctcgtcccggccgacccatccgcacagccctcgaatgtcacaccagccacttatgttgcgacccacaggactgatccgccacccaatcaagtgataacaacggagtcgaggaacatcctgctgaggcacttctaccagaaatccgagaagctgaggcccaagagacctgccccggacaacctcgctccggagaacaacaacagcaacaacaagcagcccaggggaccggtcggcgacgtcggtgggcagtcgtcgagcgcgagaagctgaagccacagctggtggccgtccactcctccccctgcctgcttgtttctcatctctgggtttcgtcatgcagaggtagaggcagaggcagatgcagccctgtgttgtcctcttcgctcctcacgtctgtacgtacgacccaaagagctactaacctaatctgaagttagggttacatacatggatatcggatagatgggtgtacataagcacctgagagcagtgttgtgttatcctaaatgctaaacggtaaacagtcgttcaacatcctctgtgtttagcaaaaaaaaaaaaaaaatttgcacccgcggcc

SEQ ID NO: 174880 - DNA, 286 bp, Zea mays
  Clone ID: MRT4577_91072C.1
ctcaaggctataatatgggtgagtgtttccttgttaaatggtgtaatcaaagctgggacactcaatacagggtgtacaagcgagtgagtgatgtctctattgctaaaccaccctcacattgtgaacagagcgttgggctaaattgacgcatgcgttgatgaacccactacgccttctagactctactgatctcccaaagctaactgacctgcgagtcaatattcaggacactcatggggtgtagcctgaactactcctagtagcttgacctaaatcatatattaac

SEQ ID NO: 174881 - DNA, 1839 bp, Zea mays
  unsure (1)..(1839): unsure at all n locations
  Clone ID: MRT4577_91073C.1
ctcgaggccggccgggganaaatatgcgaattattcgaggcggctttatggtcggacggatcacccccagcaaggagccgccacccgccactccgccagagcattgcagcgccagccacctcgccccctctcgctgtcccgcaccacccgctccgagggaaggagaggtaaccggtggcgggcgcggcggcgagcggagatcccgggaactccgatcgagcgcaagcggcgggacctgcgggggcagagagcgtgcagggaggacaagtgagtagcgtggttcgatggtaagggagacgggatactacgacgtgctggaagtgagcccgacggcctccgaggccgagatcaagaaggcatattacgtcaaggcgaggcaggtccatccggacaagaacccagatgatccgcttgcggcggcgaggttccaggaattgggggaggcataccaagtgctcagtaatcccaagcagcgtgaagactatgacttacatgggaaacctggtatttcaacggaagcgataattgatcctgcagcaatttttgcgatgctgttcggtagcgagctttttgaggactacattggtcagctggcgatggcatccatggcttcacttgatggttttactgaaaacgaacagatcgatccaagaaggttgcaagagcaaatgcgagttgtacaaaaagaaagagaggagaaacttgcagaggcactaaaagataggttgcatctttatgttcaaggaaacaaagaggaatttatccagtatgctgatgctgaggttactagactctctaatgccgcatacggtgttgatatgttgagtactattggttatgtgtattcgagacaagcttctaaggagcttggaaagcaagctaaatatcttggtgttccatttattgctgaatggttcagaaacaaagggcattctattaaatcccaaataactgctgcaacaggtgcattagctcttatgcagctgcaggaagactggagaaagcatctcagtgatgagtgccactacaatgaagaggaactggaggcttacatgctgacacataagagtgttatggtggactcgttatggaagcttaatgttgctgatatagaggaaaccctgtcacatgtgtgtcaaatggtgcttcatgacagcagtgccaggaaagaggaactgcgagttcgagctaaaggattgaaaactttaggcaaaatattccatcaagccaagcttagcactgctgagggagatccagcaacaatgaataatacaataaataacttggatgagaatgatgatagttcaccggagtcatctccaagatctcccagggaccaaatgttcgatacaaacccaccttattcccagagtccatacgtggaggcccctgagttgggcgggtatttttccttcgacttcccaatgcctatcgctccgcctggcgcgcagagggaccctattccgtgaccgccgtgagtgcggcggctctgttttgtgtggatcgtcattttgtacaatattgcctgtgtaaatcatttttatttgtaacattagtagcagtagtgtgagacagcagcttggcacccattgcatcgtttcttttctttttcatcgtgtaatcaatcaatcaagcatgcgacgacggcagccttgtcttgttcgtagggcttggtctgcttctggccacgtgtcagccattggtgtacatgaactaccacctctttgtttcttgtgtttatcagtttatgggtgcataattgttttagcctatgggcccatctgggcaaacaacacttgcttgtgctaagctttgctcgggctacaactaagtgcaaga

SEQ ID NO: 174882 - DNA, 627 bp, Zea mays
  Clone ID: MRT4577_91074C.1
ggttcggaattcgacgcctccaacgcgggcggggagtgtcacacatagaccatacatctcacttcgccaaaaaaattccgtcaacagttgaagttatacccatggcaaaactactcttgggtttgctccttgcccttgctattctagggacaacatcggctgctggttgtgtacaagacgcggaagacatgaaacgagagtgcaagcagtttgagctattcccagcgaacccaaagttgccaccgtcggcagcatgttgtgctgtgtggaagagggcagatgttccatgcctatgcaaatatgttaacaaggaagtagagaaggtatggtgcatggagaaggttgtgtacgtcgccaactattgtaagaggccgtttcaacctggctacaagtgcgggagttatacagttcctcttagtatgtaaaaggagtggttgggacatgtggtactctctcctagaactttaatttgagatttgtaacatgtgagagactattgagaataatatgtatggagtaatatgcttccttcttttaaaaaaaaaaaaaaaaaaaaaaaaaaaaaaaaaagcggccacaaaaaaaaaaaaaaacccgcccctaggggaccaaattttagaaaaatgg

SEQ ID NO: 174883 - DNA, 471 bp, Zea mays
  Clone ID: MRT4577_91075C.1
tggctcggaacctttgggctgatttatgtgcttgtttatgtgcttggactcatagtcggttagccgcgggctaacggcgatctttaagtagcatgaaaactcccggccatagaaatttcgctaagggtaacgtagagaatcgctttttagttcgtagcgaaggctatatgctgggtcgacttttagtcactcgccaaggtgttggccggaagactcgattcattcttaaagcccctgggaagcgcgggtttcctattcgtcagagcgattggaagaccccgcttcgtattcgccaagatgtaatagagaaccgagtacttattccttacggcgctatagagagccgacttctaggtgaaggcgctatagaaggaaacgggactcgtcgcccgttcgttataagtcttatacttcttcgccccgtagaaatttaaggatccgttcgccttcaaatagtgggagttcactaat

SEQ ID NO: 174884 - DNA, 378 bp, Zea mays
  unsure (1)..(378): unsure at all n locations
  Clone ID: MRT4577_91076C.1
tctcttccttgtacccatctccaccagtcaagtcctactacccgagacggggaaactcatactttgtttgtcttactacaaaacancnaacaactagacaataatacattcgacaacaactttgaaaagccgtatgaacttgacaatactaatccccactacacaaatatcgcaacaaatggacaccaccatcaaacttatcatccttggtaaatactcacaacgctaactacccgcagactacctacttttttctgaaaaatcaacaaaaactaaaacatatcttttcactttcaaaatgctcaccgccttcccacaaaaaaaataccatgtcaaatcctaataagacacttgtaccaatcataaaaaactatcaca

SEQ ID NO: 174885 - DNA, 177 bp, Zea mays
  unsure (1)..(177): unsure at all n locations
  Clone ID: MRT4577_91077C.1
gccnggccgggttcggcgtgcgcaatcaaactgacggtggccagacctctggcaagcggcggtgggcaatagcagtgacagacgacatagaagcgaaacttcacgccaccggaaactctacacatactgctccccgattcatcgtcgagatacctcagtcattacgtaccctcatcc

SEQ ID NO: 174886 - DNA, 229 bp, Zea mays
  Clone ID: MRT4577_91078C.1
cggctggccacgggctgcggtcgctttctaacgacctgggggcgctccaattccgcaagaagggctacatcccgctcaccacctacctccgcacctacaagatcggcgactacgtcgacgtcaaggtgaacggcgccgatcacaaggggatgccatacaagcactaccacagtcgcacccgtcgagtatggaacgtcaccaagcgcgccagataccacaacataaacaa

SEQ ID NO: 174887 - DNA, 400 bp, Zea mays
  Clone ID: MRT4577_91079C.1
gaagagcatacgatggcgtgcacgaacaatgccacgagcgcatcgatgctagtgatggtgggattagtccttcgttgggagaaggataagtcgaaggtcttgtctgcgaacgcttacgcgactggtactgactccaacgttatcaacttgagcccctccaaccacagcttctaaaacagcaagaaaggttacaactaagcattgccataagcatgggcctgggcctgtcaaccaaactatcatcatacccaagggagactcatttgccgaacaacttaattccaaaggcccttgaaagggcaacgggacgttcaagttgaatgtcaatttgcaagtcaacacggacttaagccagtacacaacccatggtaatggcatcgctattttactcacgaataac

SEQ ID NO: 174888 - DNA, 762 bp, Zea mays
  Clone ID: MRT4577_9107C.1
tcgggactttgaggatgccgacattgacaacgccatttcttgggtcaactttggtgtcttcttcaaccacggccagacttgctgcgccggaactcgtgtctacgtccaggagagcatctacgacaacttcgttaagaagttcaaggagcgcgcagagaagaacgttgttggcgaccccttctccgccgacaccttccagggccctcaggtttccaagatccagttcgaccgcatcatggaatacatccaggcaggcaaggacgccggtgccaccgtcgagactggcggcaagcgcaagggtgacaagggctacttcatcgagcccaccatcttctccaacgtcacagaagacatgaagatcgtgcaagaggagatcttcggcccggtctgctcgatcgccaagttcaagaccaaggaggacgccatcaagctcggcaactccacctcctacggtctcgccgccgccctccacaccaagaacctcaacaccgccatcgaggtctccaacgccctcaaggcaggtaccgtctgggtcaacacctacaacaccctgcaccaccagatgcccttcggtggctacaaggagtccggtatcggccgcgagctcggcgaggatgctttggccaactacacccagaccaagtctgtcagcattcgtctgggtgacgctctcttcggttagaagagtgttgttgtcttggttcgattcgggtattgtccgatgtaattacgtatgatgttatgaatgcaaacaattttaag

SEQ ID NO: 174889 - DNA, 172 bp, Zea mays
  Clone ID: MRT4577_91080C.1
atattactccaatattcccattgttgttccaaaactaccttacctcattcccttacattaataatctacttcattttacttatacaatgctatctatctagaaatgacactttttttacatcaatatattcctttctatatcacaaatcatattacacatcttatactatat

SEQ ID NO: 174890 - DNA, 441 bp, Zea mays
  Clone ID: MRT4577_91081C.1
gtatgatcacaatcaaggcataccataagattgacagcattgggaaatcaaatgttcaaccatctccatactaatgctagacctgttcatcaaattgcttcaatggtcttaaataaataatgccccttcgtttatgtgtagctatcaggccaacacatcaaggccccatatggacatgtagcttaacttatttcttgggtggtttggtgccataaaataaccaacaaagtagatggtcttgctaacacagtgcgccagatgagctcttttgaaatatagattattttcagatgctgattagatgctgagtgtgggcttattagaggtgccccccctgaaatcggcagggattacgtctcccgcgatgggcgtgtcaccagacttgacagctaagcggagagccagtgtgctcttgagcggagccttggtgttgagtgtcca

SEQ ID NO: 174891 - DNA, 372 bp, Zea mays
  unsure (1)..(372): unsure at all n locations
  Clone ID: MRT4577_91082C.1
ccctattctcanattacttttctttcatctgactaccaatgcanaagagatgctttctaacaaaacaacactccacccattcaaatcctcaantattctnaacaaaattcaattaaataattttcacaccatcactaaaatanaagctttnatattacttactgtnattcattaattgctaaaaanttnctanactattttcacaagatcaaatcccaacagctaacgaaacaagtactgcatcttctgctgctaccattccatctcatgatacttcactgcattctgttaatttctgttaaaccacaataaaaaatttaacttgttctatttttccttaaaaaccagtctcaacttgccacactaataacc

SEQ ID NO: 174892 - DNA, 1659 bp, Zea mays
  Clone ID: MRT4577_91083C.1
ggccgtcaaataatgagtttcgaaagcgataatggtcccacccaccccatccacccgcacgcccaggaggtggacctaccaatcatcactgtccctgttctcttccagcggcgcgggggatagctcgccggagtccggagtcgccgctgccggtccacagccccaccgtctgcttcacctcgcccgtcatgtctgctgccgcagcagctgcagctgccgctcggtgcgtccctctccgggtgtcctcgccggagaccgcgaagtccgccgcttccattcccacctcctcggccgcctctgcgtctgctcccctccgcgccgccgtcgccgcgggacccggccgccggcttccggcgccgccgttccggtgctcctcatcgtcgccggagaactctgccccgcgcgatcttggattgcttctggaggtggaaggagttcttgcagatgtctaccgttttggcaatcgccaagctttcaatgtagcatttcgaagcctcggactagattgtgcaaattggacagagccaatatatgctgatttggtgaggaaagcttgtggtgatgaggaaaggatgctggcattattctttgacaggattggctggcctacatctttgccaactagtgagaaaggatcatttataaaaagtgttcttcgtgagaagctgaaagccttggaagaattctcagcttctgatagcttaccactacggcctggagtggaaaagtaagacttcaagcttctattatcactgttcattgacgatgcacttggtgaaggtgttcctttggccatattggctgcatatgggagaaatggagaaaagatttcaagatctatagctatgaagttaggccccgaaagaatctcaaaaataaagattgttggaaacgttgaggttgaagaaagcttttatgggcaacttgttcttggtaaaggagtcacgtccggtttggatgagcaacttgtcagggaagcccagaaggctgcttctgcagagaagcagaggattgcagaaaaggttgcatcgatcctaaaacttagtgttgacatcacagcatccgaaagctctgacaaggtaatagctgctctccgagctggttcagaatacgttgggtgcgacgtgcaaagctgcatccttgttgcgggcagccaatctggtgtccttgcagccgaacgcattggcatgccatgcatagttgttcgaagcagctttaccgcaagagccgaatttcactccgcgaaggccgttatggatggattcggcgacacagacttgaccgtttcgaaactgctgagcaaaaagtggttttgattgtctgtcacctgtggaaacgaagggttggattggaggctgttgtgatttatgaacctgtaaatgattcagtgctaaccggagcaaacctttgtataaacaagaggtgttgctgattaaagttaatgagtgacaaactgaaagaataaattcaggtggcgccatcgtgtgcttctggttatcagtaatctgcctctatcaagtgtcatgcatgtttgatgtggaggcaatgaataaataggtaaacagttcctctcaatatggagcttttgcttcccatttttttctatttaaaccatagcagtcgactgcaaaaaatctttaatatctatgaatataatgg

SEQ ID NO: 174893 - DNA, 409 bp, Zea mays
  Clone ID: MRT4577_91084C.1
aaaaaaacccttttaccccgggtcgggggttttttacctctgggtggggggggaaaaacgtccctttggggggccaaccggggcctacaacagggggggggccccaaactggcccagggggcccttggggggtttggatcctcctggactggcatccaaaggtggggggcccccggataccaagacaagccccatggggccaaggccttgaaacaaccaaggggacacaacgggggggggccccccccactctggcttaggcttgggtctgagcacatcgcctgtaaaccacaaaggggaacgcttgatccacatacctttcaacacaaaccacttccacttcattggaaatgtggcacaatcgtcgagcaaatggccaaaaaactcctgtcaagacaatgagcccccc

SEQ ID NO: 174894 - DNA, 583 bp, Zea mays
  Clone ID: MRT4577_91085C.1
gcagggcgacaacgacggcggcaagggcgatggcgacgatagcaaaggcgacggcaagggcgacggcaagggcgacggtgacggtggcaaggtcagaggcataatgctactggtttagatattagtatagatagcagtagtagtagcaataagtagtagtaagtaatagtggattagagtagtattagtatagcatagtgtaagtagagtagtgtaatgtaatgtaatgaccaggggtgggagaggctgactcataatgagtcggcttcaagtttgtgatgaactcccctttatgaataaagaatgcagttcttttgcttatccactgccgcgtgcttttttgtttgtgcatttgaaggctcgctggcattttagaggtaatgcccgagtgatgattgtgatccttgcttttccgagttatgatctggcactctttgcgcccgacctattgagccaacttatatttatgccgacgtgtcttcttgagttttgaaccctaattcttgcttttctccttcgccgcttctctattttctgagttcttgagcctgcccacttcgctcgagagattgcgatggccccc

SEQ ID NO: 174895 - DNA, 284 bp, Zea mays
  Clone ID: MRT4577_91086C.1
ccagcccaaaaaagttgcaccccactcgaaaacaaattagctctggccggggaaaaacggtttaaatcgctaatttttaaacaacaattccccccaaccttgaacccccagggggtccccaaacccaatggtggtattttgggaaacaaaaaagcgggggatcccctgtggggggtgggcggcctcacaaaattctaccaggaaaaaggggggccctaacccttggcccccttctttacaataagaagcttggggccggttaaaatccctacggggggcggggc

SEQ ID NO: 174896 - DNA, 972 bp, Zea mays
  Clone ID: MRT4577_91087C.1
ggtaccctcgggtccgccgccatggcggctcagttcgcggattcggcggtaagcctcgaattcttccttccttaatcctatggcgtgggagaccaaagcaagttcgagtttgaatgtacagggtcagaagcggcacagccgtatcgtctctctgggcgactccgccgccgccgccgccgaaaaccaccaattgccccctcccccggccgccgcctgtcggcaccaccttttctccctcctctatcactctttttctccatcttgcgattgaacctctcgcagcgtcggcgccgtccggtcggcggctgtgtggatccggggcccccaggtgtggatccgctcgtaccttctccggatctggtgtcctgtcgcccgggtgtgctcctccgatgcactgcccggctctctggcgtcgtgcacgggcagaacaacgtgatcatcgaggaggtgaacaagggcctgaacccaggaatggtggttctgctcgtggttgccagcttcctgctgctcttcttcgccgggaactacgcgctgtatgtgtacgcgcagaagacgctcccgcccaagaagaagaagccggtctccaagaagaagctgaagagggaaaagctgaagcagggggtctccgctccaggggagtgaacagacagggatgccgccgatcggcccgtcctgagcccgccccctatttacatgattgtcgaagaaaaaagatacacctgctggagccgcggtgttcgtagtaattttgttctgtagatgccttttgttgtcttcgatggtagtgcatttgtattggacaccttgtttcagcaactgatgaatctttagcctaaaccgagctactcttttgttcctgtaaactacaagtactaaaaagttcaaacgacgctggtgatggtgaacctgagcaaaaattggcgagtcccagctcccgcctactctctaaaaaaaaaaaaaaaaaggccccta

SEQ ID NO: 174897 - DNA, 365 bp, Zea mays
  Clone ID: MRT4577_91088C.1
gctaaaccaattgtcgaaggcactcatatgcatcgcatgcaacaacaacacgacgtatatactttgtcctacctagctagtagatctcgagtatcgcaccatgcagtatacagaaaccacttgcagagagatgcatgcttagcataaggcatagctacgtacatgcatgagcatgggcggatcatgcatgggctgctgatactatgccgttcggcgctagctaaccgatcgaggacgtcagtcagaccgcgccagtgtagcccggctgcagcatattgccaaaggtgaggaggaactggagcgccaggggcaggtacaggttgaccttgaggagactgaactcgttggtggtggacaggcacact

SEQ ID NO: 174898 - DNA, 998 bp, Zea mays
  Clone ID: MRT4577_91089C.1
gcaaggaagattctagagaagaatggcatggcggcctgtaatccctgccaagtgcccatggaggcacgtttgaagctgagcaagttcagcactgaaccaccgttggacttcacgacatacaggagcgtcgtcgggagcctaaggtacttggttaatacctgtcctgatatagcatttgttgttggctatgttagtcgttttctggaggatccacgtaaggatcacttggctgcggtgaaacatattctgcgctacctggcgggaaccaaaacttgggggttatggtttgagcggaggaagaaagaggaagcaaaactgataggtttcagcgacaatgattttgctggtgatgttgatgctaggaaaagcacaacaggggtaatcttcttcctcaatagcagcccaataatttggcaatccatgaagcaaaaggttgtggcacaatcgagctgtgaagcggaatacatagccgctgcaaacgccgcttgccaagctgtgtggctggctcgggtactggcagaggtgcagggaacaacaacaaaggcaccaatgttaagggtggacaatcagtccgccattgctttaattagaaatccagtacaccatggacaaagcaagcatattcaagttaagtaccattttgtccgggagtctgaagatgaaggcctaatcaatgtgaagttcatcaggagcgaagatcaacttagcgacattctgacaaagccgttgggtaaaaccaagtttctagagctaagatcaaaaatcggcctgattaatgtacaacagctggcacctcaaggtttaggaggagaatgtagaaagtaatccttgggtgccatgtttagcagcttatcttgattagcttaaattaggtatgtgattggaataaggctgattgagagccgttatttagtttccttactaaggtaattcttttccatgtaatagtctatataaatcaagagatatcaatgaaaatgcagtcactcgacagcacc

SEQ ID NO: 174899 - DNA, 282 bp, Zea mays
  Clone ID: MRT4577_9108C.1
gagctcacttgtcggcggccgccctccttttttttttttttttttttttttttttttttttttttttttttaaaaagagttagttgcattagtggccctttcaagccgtcaaaggatgatacttaggtccacaaactttgaaaacccatttctagacccttaaacttgttaagggatgccccacatcctctaaacttataaaaatggcgcactgcaagcctatttttgggactatcccgaccactgtgaagcgctacttaacaagcttaaggacctagaaat

SEQ ID NO: 174900 - DNA, 383 bp, Zea mays
  Clone ID: MRT4577_91090C.1
tactctggtactaatatgacctatgattgccaggagaatacaggctttattagtatagacagaactcatgctcactgactactattgactcactgtagcgatcggccaccgacttaaacaaatgacactccatcttgtaccacatcacattcatcacctgatctaatactcacctcatactcctacagctcaactccatgctcgattgtctcagaatataccaagtgtacatcaacatcgtgctgccgtccaaccttccagacatctacgatatacaaatatgcgaacccattagcggatccttactctacaacactatcattctcctgatctcacgcactatctgcatacttgttcgtcactccggctacaagctcttattc

SEQ ID NO: 174901 - DNA, 247 bp, Zea mays
  Clone ID: MRT4577_91091C.1
ggaatctaatggagcagctcaagccatgtccggtactcacaaaatgattaccttgagccaccgcacctatgacttctaagacgcgaacgatccccgacacctcagtctccacgccgtgggccacactgcggaccaccaacacctgctttcttcgccgccagccgctttctcccgcttcgttgctccgccgacataatacctacaagcagacgtagatctggcctgggaccaagtacgctcgatcctc

SEQ ID NO: 174902 - DNA, 276 bp, Zea mays
  Clone ID: MRT4577_91092C.1
cggaatataattaatataaaattctgtttaaatccagagcaagtatctggcatctgctaggccttgttgctttgctcatagcagacattaccaacctaagccttcctgctaagcctagacttagcagactacattattacacaaatcagtcagcattggcatctatttgtcatctattgttagtaattccctaagacagctgaactaagacctatagaatgagcagaaattttgttaggaaataaccagtagcttagccctactgtaatagaaagt

SEQ ID NO: 174903 - DNA, 644 bp, Zea mays
  unsure (1)..(644): unsure at all n locations
  Clone ID: MRT4577_91093C.1
gccgggcccagtcatcattgcttgacgcccgactcaacccgccgccagtacaggtcaggagagtcatgagaagctgaaatggctcctaaagctgctcctaccaagaagggtgatgccaagacccaggccttgaagggtgacaacgttgagaagattgggacagcaaagaagaccaaggaagatccaggacgtggcgtgacattacaccgtcccaagacccatgaaaaaggtaaggaccccaaggacccaaaaattactactaacggaaggaataaactcgatcaccaacaaattgtcaagtatcccctcaacacagaatcggctgtgaagaagattgaagataacaacactttggtcttcattgtacacctcaaggcagacaaaaagaatatcaacgctgctgtcacgaagatgaatgacattcacgccgacgagaaaaacaccctgatcagacctgatggcaagaagaaggcttacgatgaagcttacgcgctgactatgatgctgcttgatggnggccaaccacaattaggactcatgtaaaacatactgatatagagcaaccgctgtgctctatttccacgtgaaaccaaagattatgttaatatggatcaggggctccatgaccatgtcttatgcaacac

SEQ ID NO: 174904 - DNA, 259 bp, Zea mays
  Clone ID: MRT4577_91094C.1
accacccttacacccactcgtatttccgcgccttcccggaaaacgggaaggtgtaatcaatcacgtgttttagaaggaaacaactttcttttattttcctttgctaatgttaagaagaaaaacgcggtccttatacagcatgtattccatttaataaaacgccaaatcctcatgctattgtgtttcttgcatattaaatgaattgagaggtactcaaacttgaccaccgatacccgcttcggggtgttatacctggcgt

SEQ ID NO: 174905 - DNA, 276 bp, Zea mays
  Clone ID: MRT4577_91095C.1
aaagacaccaatgtctttcacacttttgctttgttttttgaaaaagacaccaatggcgcgcccccttttgcttgggaaaaggccccattggggtgttaaaccggtgcccgccccgaaaaaaaaggcctaagttgcaggggcaccccccaggtggggagggaaaaaaagaggagggggggtaaaacaaaaacgggccttatatggcctggcccggggggccatcaatcctatgaagggcgctaaaaacggcacctctggggggtgattggtcaaaaa

SEQ ID NO: 174906 - DNA, 245 bp, Zea mays
  unsure (1)..(245): unsure at all n locations
  Clone ID: MRT4577_91096C.1
aatcccaacaataaatcttaacatggaagctatatcacaatactttcataattncatcaaaaaaaccaataactaactccactctnatcatatatcaaaaccattattttctattatcactcaaacaacttcaatccctataccaaaactaaataatcaacataatcttcaaacacaacaactattttataaacataccaaattcacatccccctttaacaacaactaataactacacccaacct

SEQ ID NO: 174907 - DNA, 444 bp, Zea mays
  Clone ID: MRT4577_91097C.1
cactcctatagggcgattgggctcatcgaggccggccgggagtcgaggtcttccaatccagtcacctgattgtagttagcgatcccatggacaatctcggcgtcctcctcctcctcgtcgtggccgcgcgcgccatagcggcggagcacggccgcgataccccgactgatatcaagctcatcaaaggcacggacgcctccgccgcggacgacgacagaatggagtgcgagtacacggagctcatccgtacggggtccatcttgaaggccgcgacggacactaacgtcacgtctggagctggccgccgcggacggaaacggcgtgcagatctcgaacctgcccgcctgcagcgtcatcatggtctacgtctactcctacttccagcacatgaacctgtacatcttcagcgcgcctcgagcctccagattttggtctctgtataga

SEQ ID NO: 174908 - DNA, 125 bp, Zea mays
  unsure (1)..(125): unsure at all n locations
  Clone ID: MRT4577_9109C.1
ccaataatantaaccccccaacaacccgaattgcagaaagtacacttattggacactctatcgcggcttcaaccacgctatagaaacactggaagaaaacatctctaaacacttaaaacaccata

SEQ ID NO: 174909 - DNA, 501 bp, Zea mays
  Clone ID: MRT4577_910C.1
aaacagggaaagaactgctgatgcctgatctgctatacaacaacaacactactcttttgtaaaagttcccatgaacatgaatttttggtaatattccagcaacatacatgaattcgctagtatatatacttttgctgctgcttcctgcaactgcaatgctcgtgtaatcgtgtaccactaaccaataccgccgtgacagatccaactccaagatcagaaatcgagatgaatggagtcgccgcgtgcttcgtcgtcgtctacgtgagaatgatagatggagtcgtcgtgggcttttgcttcgccgtctacgtgagatagatggagtcgccgtgtgctccagacgacgcgtcctgcgtcgcgagaggagtggcggcggcagcggcagcggcactgcggtgcgaacggatctgcgagctgctggtgccgtcaccgtcagcatcgcgactacttcagccatggatggcctgtcagcttgggactgctgcacgcagagaaggccga

SEQ ID NO: 174910 - DNA, 606 bp, Zea mays
  Clone ID: MRT4577_91101C.1
gggtcccgtgcgcgactgtctgaagaatctagcggacagcgtgggccacctccgcgacgcggcgcaggagataggcggcgccgggatggcccgcgccgggacgcgcgcgttcaggtggcacctgagcaacgtgcagacctggtgcagcgccgcgctcacggacgagaacacctgcctggacgggctctcgtcccgcgccgtggacgccgccacgcgcgccgccgtccgcggcagggtcgtcgaggtcgcgcaggtcaccagcaacgcgctcgcactcgtcaacaaggtcgggcctgggtactagtagcccagggcggcctgggtgctactactactactgcctcctccacgacgttggttgtttcagcctcggcagttaactagttctgttattatcaatgtgtgtgtttctttgcatataagtatatgctttgtatctgttgtgtgaggtaatttatatatagttaaggccttaagggtaatttgtatattgtattatgggtggcgagaggtacacgaagacggataatccttcttatgaattgtcaccatataaaaaaaaaaaaaaaaaaaaaagaccggccgtcgcgatcagaactagtccgc

SEQ ID NO: 174911 - DNA, 272 bp, Zea mays
  Clone ID: MRT4577_91102C.1
gcatctgcggagtgtactactctacaataacattcggaccaacactaataacctaggtggtaacgtaaaaacaagtgtggaggggcgacacactgttaaacaccagcagggcgtgtgtgtttgctgaatggcctcttacggattaaccacaaccttcctataatagtcgcacggttgaaggtgggggctaggcgaccaggatacaccgttacccaaccgcttaggggtatctgctgtcggttactcggtaattgctataggcaatatactgt

SEQ ID NO: 174912 - DNA, 425 bp, Zea mays
  Clone ID: MRT4577_91103C.1
aaaaaaaaggccgggtttgggatatatatataggataaaaacatattacgggggcccaattaaaataggggtcccggaaacccaattgggtcaaccaaaatggatggggacccccgtacatgggcccaaaaacgggccccaaacttggggggggggggggcaaactggaaaacccgggtttttttttttttaccccccccccccacaattcctttggtggggagccagctgggccctgtttatttttggtcaaccccccccccagggcggaggggaaaaaatcatatcccggggcgcccaacggggggaaaaacaaggggggggggggaacttggaacccctccccaaaatgaagccggggggggccttcccggatccccgcgggggcttaaaaaaacggggggccggctttttttgggggcccc

SEQ ID NO: 174913 - DNA, 269 bp, Zea mays
  Clone ID: MRT4577_91104C.1
cagaaacatcagtttactggaaacttcacagaatttgtcatttaccatcctagtttatctactttgctctatgtttttatctttcatattaaatttatgttttgccctgctgctttcagtgaggatgataattaggcacagtggtaacagcaacttatttgttctttctgttctgttctggaattcgaacgaacctcatattcttatggcagtttagttctgtaaatccaaataaacatggttgatatttattgattaatccagcacat

SEQ ID NO: 174914 - DNA, 267 bp, Zea mays
  unsure (1)..(267): unsure at all n locations
  Clone ID: MRT4577_91105C.1
tctcacgcgtccgcccacgcgtccggcgcgacgatggaggcgccgcggtggtgcacgcggaccgggtaccggcggccgtagccgaccatgtagctgagccgcagcgggttgcggcccaggatgtagtcggcctgcgagcgcgccagggccagcaggtcggacggcgcggcgggggcgcccgcggggcagcggaggaggccgccgccgaggtagcgcgagtaggctgtgagagngaaggcggcgctggagacgcttgaagggttgttt

SEQ ID NO: 174915 - DNA, 325 bp, Zea mays
  unsure (1)..(325): unsure at all n locations
  Clone ID: MRT4577_91106C.1
gcggccggcccgacgggctcctttatccaggggaggcctcggtatgagaacaacaccaacttctttatccgtactggatctcacaggaaatctcagctaggcctcctaccattgatcgaccctggtgtcctgcaccgctgcacgcagctcgtattacatcaggttgcctgtaggggcagtttattggggacagaagcatcgagggcagcaacaagctacgacgcacttggggctgagcagaaccgttgcctgcctgactctcggcaacnagaaggtatcttgcattcacaccaacttagctgcattgaacgtctgcttgcttatt

SEQ ID NO: 174916 - DNA, 366 bp, Zea mays
  Clone ID: MRT4577_91107C.1
ggtgtgggtgtgggcaagtggaaaaagggaaggcggggcaatttaagaagggtaggaggagcccggcgtaatgcaaaagcgagagggaaggaaaaggaggggagggggccaaagggagcggaggggggggaagatggcgagaaaaggcgtaaaaaaacgccaagagcggaagtaggggggggaatggaaggcgatggtaccgtgggccgagctaggaaggaaattggggggggaggacttatccaagccaggggggaggagggtaaccaggggcgggtcatggtgggaggggggaaccgggcagtgacgggggatctggggccatgatgtaaaggggaccggacggggtgggagaccccggggttc

SEQ ID NO: 174917 - DNA, 444 bp, Zea mays
  Clone ID: MRT4577_91108C.1
ccaatagtttgtcccgtgcgtgttatatctcttctgacaaaatgacaggactgttgtattcatctcatgaagtgtacatatatatacatagtgaagggacaccacaacgggtcgcaccccttggaattagatcacataaaatattttctaacagagacattacctttgggcgccacctgagctgcgagtctgcaactgaacgaactgcacgtgcgcggaggcaactcggcgcgcgggcctggcgtgcaggttcagccgctcaccgtcagtgcgatgaggagccacgtcgacgtcgtggccagcgccacgacggccgccgccgtcttgcggccgggcagtgccctcacggtcacggcggcgctggtgttgtcaccgtagtccggcggcgacatgttcccgtacagcggaggggacctgccgtctccagccggtggagagctccga

SEQ ID NO: 174918 - DNA, 250 bp, Zea mays
  Clone ID: MRT4577_91109C.1
gttgatcatagaaccgaagaaaagcttttagtactgccttgtgggccatctgctgtgggcataatgctgctgaccatactttctggtgtttacgtgatccattgtgtgtgggctgctgcagaagcatattcagtaccttcaattgttctaacatctcgttcacatggattggttgcatgtttttgatgatttccgcgaacttatggatggctgcgccataacacagatgcagatgacaatgtggcatctt

SEQ ID NO: 174919 - DNA, 221 bp, Zea mays
  Clone ID: MRT4577_9110C.1
gtggcctctttacaatggtgagacttatttctaccctctactttccactattatttttttcccctattggataatactagtctgagacaccctaatactagatgtacctaaacagagatacaagccaagtcattgttcagtgtagtcatttcttagtatctgtttatattttgtcacatatcagaatgtatattttatagagcatgtgtttgtctacttgt

SEQ ID NO: 174920 - DNA, 2508 bp, Zea mays
  Clone ID: MRT4577_91110C.1
tattgggtccctcgggccggccgggaacctacgccatctccaagcctgaacagcccccaaaaccaaacgaaaatcccatcgcccacacactccaatccacccttgttcattcctctcccttcctatttggtcagtcgacctctcaccgcaccgccgtcggcccatggcgaccacgaccttccccacctcgaccccattcttcgcggcccaccacggtccccgccggagccgaccctccatctccgccgcggtctacgcccggggccgccggtggcgcccgctgcgggtggcgtgcgagaaggtggtaggcatcgacctgggcaccaccaactccgcggtggccgctatggagggcggcaagcccacgattgttaccaacgcagagggggcgcggaccacgccctcggtggtggcgtacaccaagtccggcgaccgcctcgttggccagatcgccaagcgccaggccgtggtcaacccggagaacaccttcttctccgtcaagcgcttcatcggccgcaagatgaacgaggtcgacgaggagtccaagcaggtctcgtatctcgtcatcagggacgacaacggcaacgtcaagctcgattgcccggcgattggcaagcagttcgcagctgaggagatctccgcacaggtgctgagaaagctggtggatgatgcatcaaagtttttgaatgacaaggtcacaaaggcagtgatcacagtccctgcttacttcaatgattcacaaaggacagcgaccaaagatgctggccgcattgctgggctggaggttctgcgtattataaatgagcctactgctgcatcactagcatatggttttgagaaaaagaacaatgaaacaattctggtttttgacctcgtaggtgtgaccttccagctttcatttctaggaatctgggtttgagagttcaggttactgactcaattctggttcacgacccatgagggggcatacttggcgtagagggacgtgaattggctgttggcgctcttgaggcgcgatgaggataatgtgtttctaaaagataaggtagaagcttggacattagaatttttgataggcaggcgagaaactgaagaatgaactttcatctttacttgcaacaagctaccttttgcctcagataatagatattgccgatggtctattgaaaattgtctctccagtgataaatttgaagagctatgctcagatctccttgaccggctgcggacccctgtggacaatgcccttagagatgcaaagttgcaattcaaagatattgatgaggttattcttgttggtggctcaactagaataccagctgttcaggagcttgtcaagaaaatgacaggaaaggaccccaatgtgacagtcaaccctgatgaggttgttgcacttggagcagctgtgcaggctggagttctgtctggtgatgttagcgacattgtacttcttgatgtgacccccttgtccctaggtttggagacactgggtggtgtcatgaccaagattatcccacggaatacaaccttgcctacctcaaagtcggaagttttctcaacagcagctgatggccagactagtgtggagatcaatgttctccaaggagaaagagagtttgtgagagacaacaagtctattggtagcttccggcttgatggaatccctcctgccccacgtggtgttccacagatcgaagtcaagtttgatattgatgctaacggtatcctctctgtcagtgctgtggacaagggtacagggaagaagcaggatatcacaattactggtgctagcactctgccaaaggacgaggtggagaggatggttggcgaagctgagaagtttgcaaaggaggacaaggagaagcgagacgccattgacaccaagaaccaagccgagtcggtcatctaccagaccgagaagcaactgaaggaactaggggacaaggtcccaggtgacgtcaaggggaaagtcgagtcgaagctgcaagagctcaaggatgctgttgctggtggctccacgcagacgatgaaggacgccatgagtgcgttgaaccaggaagtcatgcagatcgggcaggccctctacagccagcagggtgccccaggcgcaggacctggtgcagctgatgcttcttctgctggttcagcgggcacttctgagaagccaggtgacggaggcgatgtgattgacgcagattttactgacagcaaatgagggggcatgctaggtattagatggaggcggttttgccgcgagggagataatttgtttccacaagattgtctaggatgtggatgttctactttttggtagattggcacctaactgtggaatgaatatacataggtccttttcttctgctatcaagagcattcgacgtttgacctggcagtctttttggttcccatttggagttcgaatgaaggagagttaaagaaaggtcaggttttaactgtcaaatgaatgtacataggcctatttttctttaaaaaaaaaaaaaaaaaagg

SEQ ID NO: 174921 - DNA, 680 bp, Zea mays
  Clone ID: MRT4577_91111C.1
acgcaaccggccctcggtgacgctagccgtgccagcctcgcatcccaggatcctaattcggcacgagggctagatgcaggttctcctccatctaaaccctaacacagcttcaccactgcgccgccagcctcaccgcagtcgtctccatctcgacctcctgctcctccttctccgcgtccccgaccacctcctacccgtcgtcgtcgcactcgcagcgacaccagccgcagaggcccgtggtgacgtcctcctcggtatcccctccagccgggtggctccgcaccgcatccggccccgaccccggatccgacgcaactcacacatcgctaggcgcccgcagaatcccacccgacgccatcagcgcccgccatgccatgccccagaagcccgtccgcggttgctgctccaatcccttccgcggatgccgcataatcccaactgacgcaactccgcctcaagtcgtccttctcaggcgacgggtccggccgtccgggtgcgtcggcttgggcggcaccgacgggtccttcttgcaagcgctttggaatgcctactcgcactatgcttgagccttgaattatttagctatataacatatctgtatctgtccatagcaaacaatcatgcatcgaatcagtgttattgggggggggggggctcttcagcattgctgacctttacct

SEQ ID NO: 174922 - DNA, 681 bp, Zea mays
  Clone ID: MRT4577_91112C.1
aagaaaaataggcctatgtacattcatttgacagttaaaacccggcttttccggaattaccttcatccggactccaaatgggacaaaggtgcaattttaccaaaagtacacccacatccttacaaaacaaatctctccctcggcggcaaacatccccagcgaacagcttcccatctaaacttagcatgccactcatttgctgtcagtgaaatctgcgtctattacatcgccatcgtcacctggcttctcagaagtgcccgccgctgaaccagcagaagcatcagctggaccaggtccggcgcctggggcaccctgctggctgtagagggactgcccaatctgcatgacttcctggttcaatgcactaatggcgtccttcatcgtctgtgtggagccaccagcaacagcatccttgagctcttgcagcttcgactcgaccttccccttgacgtcgcccgggaccttgtcccctagttccttcagttgtttctcggtctggtaaatgaccgactcggcttggttcttggtgtcaatggcatctctcttctccttatcctcctttgcaaacttctcagcttcgtcaaccatcctctccacctcgtcctttggcagagtgctggcaccagtaattgtaatatcctgcttcttccctgtacccttgtccacaggttaccctcgtgc

SEQ ID NO: 174923 - DNA, 660 bp, Zea mays
  Clone ID: MRT4577_91113C.1
atcgccagaccactatagaccactgccagtcagccacatcactagctatctgtgcagaggcaatggcgtccaaggttgagctggtggtggaggtcaagtccccggctgacaagctgtgggcggcgctgcgtgactcgacggagctgttccccaagatcttccccgagaacaaggtggtgtcgtacagcgtggtggacggcgagctggcggacttctacaagaacttcaagatcacgctgaaggtgactccggccaaggcggagggcgagggcggcgccgtcgtcagctgggccatggagttcgacaaggccaacgaccaggtgcctgacccggacgtcatcaaggagaccgccaccaagacgttccacgacctcgacgactacctcctcaagaactagatggagcgagaactggagatggtccagtacagtacagttccagtccattcatcgacgcgtcacagtttactagtgcacgtcgctggtgtggtgtggtgcccgtgctggttccttaatttgcttactagctagctacgtaccgcggtccgtgtccttgtctctggctgatgtttgctgcctgcgtccgtcgtgcatccgacgacgtgtcgttgcgttgcgcaccggtcctccgagtcaataaagctctccgtgttcattgctc

SEQ ID NO: 174924 - DNA, 2490 bp, Zea mays
  Clone ID: MRT4577_91114C.1
ctcgaagccggccgggggggggctccaggctccagccacagctttcacgcggcatcccgccagtgagcagtgagctctataaaatccacctcctttcccttatctcttcctcaacctctagccacttcccagggttaaccgcaaaagccaaaatccggtcgcccgctcactccaatccacgttcttcattcctctccctccatagggttttgtgaactctcctgtttgggcaccaccgtcggcccatggcgaccacgaccttccccacctcgaccccattctttgcggcccatcacggcccccgccggagccgaccctccatctccgccgcggtctacagccgcagccgccggtggcgcccgctgcgggtggcgtgcgagaaggtggtaggcatcgacctggggaccacaaattccgcggtggcagctatggagggcggcaagcccacgatcgttaccaacgccgagggggcgcggaccacgccctcggtggtggcgtacaccaagtccggcgaccgcctcgttggccagatcgccaagcgccaggccgtcgtcaacccggagaacaccttcttctccgtgaagcgcttcatcggccgcaagatgaacgaggtagacgaggagtccaagcaggtctcgtatcgcgtcatcagggatgacaacggcaacgtcaagctcgattgcccggcgattggcaagcagttcgcagctgaggagatttccgcacaggtgctgagaaagctggtggatgatgcatcaaagtttttgaatgataaagtcacaaaggcagtgatcacagtccctgcttacttcaacgattcacaaaggacagcgaccaaagatgctggccgcattgctgggctggaggttctgcgtattataaatgagcctactgctgcatcactagcatatggttttgagaaaaagaacaatgaaacaattctggtttttgacctcggaggtggcacctttgatgtttcagttcttgaagtcggtgatggtgttttcgaggtgctgtctacatcaggtgacactcaccttggtggtgatgactttgacaagagaattgtagattggctcgctgggaacttcaagaatgatgagggtattgatttgctaaaagataagcaagctctgcagcgattgacagaagcagctgagaaggcaaagatggaactgtcatctttgacccaaacaaacatgagcttgccttttattacagctactgcagatggtcccaagcatattgagactactcttaccagggctaaatttgaagagctatgctcagatctccttgacaggctgaggacccctgtggacaatgcccttagagatgcaaagttgcaattcaaagatattgatgaggttattcttgttggtggctcaactagaataccagctgttcaggagcttgtcaagaaaatgacaggaaaggaccccaatgtgacagtcaaccctgatgaggttgttgcacttggagcagctgtgcaggctggagttctgtctggcgatgttagcgacattgtacttcttgatgtgacccccttgtccctagggttggagacactgggtggtgtcatgaccaagattatcccacggaatacaaccttgcctacctcaaagtcggaagttttctcaacagcagctgatggccagactagtgtggagatcaatgttctccaaggagaaagagagttcgtgagagacaacaagtctattggtagcttccggcttgatggaatccctcctgccccacgtggtgttccacagatcgaagtcaagtttgatattgatgctaacggtatcctctctgtcagtgctgtggacaagggtacagggaagaagcaggatatcacaattactggtgctagcactctgccaaaggacgaggtggagaggatggttggcgaagctgagaagtttgcaaaggaggacaaggagaagcgagacgccattgacaccaagaaccaagccgagtcggtcatctaccagaccgagaagcaactgaaggaactaggggacaaggtcccaggtgacgtcaaggggaaagtcgagtcgaagctgcaagagctcaaggatgctgttgctggtggctccacgcagacgatgaaggacgccatgagtgcgttgaaccaggaagtcatgcagatcgggcaggccctctacagccagcagggtgccccaggcgctggacctggtgcagctgatgcttcttctgctggttcagcgggcacttctgagaagccaggtgacggaggcgatgtgattgacgcagattttactgacagcaaatgagggggcatgctaggtttagatggaggcggtttgccgggggagctgttttgccgcgagggagataatttgtttccacaagattgtgtaggatgtggatgttctacattttggtagattggcacctaactgtggaatgaatatacatataggtctttttcttctgctatcaagagcattcgacgtttgacctggc

SEQ ID NO: 174925 - DNA, 478 bp, Zea mays
  Clone ID: MRT4577_91115C.1
attgccgaccactatagaccacagccagtcagccacatcactagctagctgtgcagaggcaatggcgtccaaggttgagctggtggtggaggtcaagtccccggctgacaagctgtgggcggcgctgcgcgactccacggagctgttccccaagatcttccccgagcagtacaagagcatcgagaccgtcgagggcgacggcaagtcggccggcaccgtccgcctcctcaagtacaccgaggcggtgccgatgctgacgttcgccaaggagaagcttgagacggcggacgacgacgtgttgttgcgttgcgcactggtcctccgagtcaataaagctctgcttgttcattgcgcatcgcttcgaactatcggacatagttgctttgtcgattgtctaaattatttggtaaaatctgtaaaacactcggcaaaatttttagcgagtgtgacactcaataaaaaattatcgttgaactgc

SEQ ID NO: 174926 - DNA, 400 bp, Zea mays
  Clone ID: MRT4577_91116C.1
attagaaggttgtgacctcaaccatataaatcatgtttgtccacccacaactcacaatgtgggacaattcccaacaaacaattgcaaaacttagtcatcaaggaggatcaccagtatgcattgtttgccaggatgctttagttttgtgcatccatatcagtatcaaaatgcaagtcaatacatcagttcattgtgtgctacatgcattgccattgtattgcaagtgctcaattgttctgttggatgccattgccaccataatactgttttgttgtctgacgagaaaattctgcaaatgtcatcccttcttttagccttgatgatagaggtggaacttttttcagaatttcttgcataaatgcatcttcattacaaggccctgctgatccatcactgatga

SEQ ID NO: 174927 - DNA, 416 bp, Zea mays
  Clone ID: MRT4577_91117C.1
tttagactaaccgtatgcttgcgtctcagaggtggattgaatgggcaaggcgaacttgggccactgaaagagtaacttatttcatgttcatatccatactcttattgcctttttactctgagttgactatgattgtgaggcactggggctgtagggactattatgatcccgttctggtgcttaatgcccatggcggagacattaatggccaaagctaatgtatcaactaccacttgagaaatatgaaaatagtttagagtctgaactattgactagataacatactcttaatgtgctacattgggtctctcgcggagagactatactgatatgggaaaagggaggatttttggctcttgaccaagtttttacttgtatacaatatctacatgcgctcggcaagtgtgttttacttg

SEQ ID NO: 174928 - DNA, 1039 bp, Zea mays
  Clone ID: MRT4577_91118C.1
gccggcctttccgggatgtagcgaccccagcctcacgtggtcacgcctcaccatcttcaccggcagcttgcaccgccgccgccgccgccgtcccacgcattgtctgttgctcagcttctcctagcccagctcctgctagctaggctaggcctaggctgctacatactgccatcatccatggagtcgcctcctgatcaggcggcggcggcggcggcgcgccaggacaaggagcagcgggactacagactcatcgcaaaagccgtggacgaagcgtaccgggcggtggagtgcgacggcggcgggtaccccttcggcgcggtcgtcgtccacggcggcggcgacgacgaggtggtcagcagcagccacaactcggtccggaaggacgccgacccgtcggcgcacgccgaagtgaccgccatcagacaggcgtgcaagaagctggggaaaaccagcctcgccggctgcgagatctacacgtcctgcgagccgtgcccgatgtgcctggggctcattcgcctggccaagataaagaaggtggtgtacggagccaagtcggaggtcgccgctgccgccgggctcaacggcgtcctcccagaggtcttcagagagtactaccagaaatccggcgtggagatgaggcaggccgagggcgaggcggcaacccggatcgccgaggaggtgttcgagaagaccaagggcaagtttcgcaacaagtaaacgcgctggagatggcgccgggcggatggctgttgcctgttgctagtggaatggttgccgtttccaagcttttgtccgggggaccgttgatcagaggtcacatgtccagagaccggaataaattccgccccccccccccctactccatttcacatggtttgttgtatcagcgtgttattttttttaacgtccgcctcgacctgtgacattttttttcttaataatgtacggtgctactctatctgtctccgaataaataaataaatagatttgtaaaattattctatgtcggatttctaaaagaaacttcccgatttataat

SEQ ID NO: 174929 - DNA, 1355 bp, Zea mays
  Clone ID: MRT4577_91119C.1
catgtcaatcgccattgttctttctttctttccttcccgctctctttattctgtcattcttgctgtcctttgagcgattgaaagtctgtgtatattgcatttgcatgatctctccacacccccccaccccacccaccccagaaaaaaaggaaacaactgcagtgagagtgagctactagtgaacagaacagaacagaagcgcatgcgtccatggtgtgtctgtgtgcaaaataagtggtggcctcgtaaccgaaccgacgaaggatttttttgccatgaccatatatgatatgttgttgtatgtatagtagtgcagcagtgtacatgaatcagacaatgttctcaacgtacgtgtttccttgtgctagctcccggatgtaatgtaaatgaatggtatactatatgaatctatgatggatggcccaccaaaaaaaaaaaaaaaaaaaaaaaaaaaaaaaaatcgccagacacactatagaccacagccagtcagcccacatcactagctagctgtgcagaggcaatggcgtccaaggttgagctggtggtggaggtcaagtccccggctgacaagctgtgggcggcgctgcgcgactccacggagctgttccccaagatcttccccgagcagtacaagagcatcgagaccgtcgagggcgacggcaagtcggccggcaccgtccgcctcctcaagtacaccgaggcggtgccgatgctgacgttcgccaaggagaagcttgagacggcggacgacgagaacaaggtggtgtcgtacagcgtggtggacggcgagctggcggacttctacaagaacttcaagatcacgctgaaggtgactccggccaaggcggagggcgagggcggcgccgtcgtcagctgggccatggagttcgacaaggccaacgaccaggtgcccgacccggacgtcatcaaggagaccgccaccaagacgttccacgacctcgacgactacctcctcaagaactagatggagcgacaactggagatggtccagtacagtacagttccagtccattcatcgacgcgtcacagtttactagtgcacgtcgctggtgtggtgtggtgcccgtgcagccgtgctggttccttaatttgcttgctagctagctacgtaccgcggtccgtgtccttgtctctggctgatgtttgctgcctgcgtccgtcgtgcatccgacgacgtgtcgttgcgttgcgcactggtcctccgagtcaataaagctctgcgtgttcattgcgcaaaaaaaaaaaaaaaaaagcccccggccgcgaacaaaattgcctaaaaaaaaaaaaaaaaggactctgccgttgttaccacagtttaagggcgaatt

SEQ ID NO: 174930 - DNA, 196 bp, Zea mays
  Clone ID: MRT4577_9111C.1
cgtacatagtcccatggaccggccgtccggccagcctagctcttggctcttgctccgatcggatcgagcgccggacaaagcattgtatccgtacacgtacgactatggcgcagggcaaccgcaacgctaccgtgcccgccgcaacgtccttcttcgcccttgacgacgtggccccgctgttcctgtgctgcgcgcc

SEQ ID NO: 174931 - DNA, 254 bp, Zea mays
  Clone ID: MRT4577_91120C.1
gcgtccgcgaggagctagcgacttattatctcgcgcgtactgtgcaaggaaagtaacccagggggtcgagggctcagggcaccttggacattatctatacatacctacccacttgtgactaagcgtctacccctgcggtaacgactgaaacacccccttggaaaataactatgggggtaggggttgacaatagccagctcatcatttactcgctttagtaaccactgaataacttattcccggcacgtcaggcg

SEQ ID NO: 174932 - DNA, 271 bp, Zea mays
  Clone ID: MRT4577_91121C.1
cttttatgcggaacctgatttttagactgaattgactgggttctgtgtatgacaattactataaataaatgctaacttatactgtttatgcaagatgaataaagacactttaatgcttctgaactgcttacctaacatacttaggtcctatttggttttctacttgattatataaattgggttatggggggagggtaggaggagaaaatattacttttggggcacaaataaactgtgatagctcctcaatgcttggttattttaactttat

SEQ ID NO: 174933 - DNA, 724 bp, Zea mays
  Clone ID: MRT4577_91122C.1
cctcgaggccggccggaagacttcactctcctcctcatctataaaaccggtgcttgtagatccagcgcaatggccagcattaccatgcgcctctcctccacagccttctgcgtaaaagcagtgaactggccgccgtctctcttctcagagccccgcgtgacaatgcacaagacgtcgacaaaaggtacaaccggagccaatctccgaaagaccgtgaaacaccccctaccgcatgatctacctgcgaccgctgtcctgtgcaccccagagctacctgacgcaacgagttcccaggtcgactatccgctggtacaccgcgtgttctgttggcgaacccggagacgatcaccaataaccgtgagctgaatgttatccactcccgctgcatcatgctgaatgctgtggggtgcatggttccatatctgctcaaccgcaacgctgtcaaggacattcatgccgtgtggttcaaggccgttacgcagatcttcatggaggtggttgtgcactacctcgagaacccgaacctgatccacgcttagatcatcctcgccatctgagactgccgaagacgtgctcatgctctacatccagaggtaccgcgctgccagcaacccgctcggagatgtcgactacccgctctaccccggcgttgagattcgacccgatcggtctgttcgactaccctgaggccttcgcggagctcaaggtgaaggagctcaagaac

SEQ ID NO: 174934 - DNA, 564 bp, Zea mays
  Clone ID: MRT4577_91123C.1
ctcacgtcgtgggggtagctgacgaggctccatccaaaaaacatatgtcacctctgatgtaggcttcgggtgggctatgaagggcactaggaaagccatttgttattccgtcttccatactgaaggccccaccaaatgctattgattatactaggccctaacacgggccctgtggatggtgttattaaaactgctattaaaacgtggttaaaacgtcgttaaaccacaaatcaaactacaaaacgagctcagagtttagaacgagcagacactcgaacaaaaacccgtaaaaacttcgaaaatcacgttaaaacgcggcttaaacgtctctgactcgctaagcaacgttataagcacgtacaggacttgctacgtgcacagggcctttaacaggccagatacccacagggctacgaggagagcattgctgacagcctctcttctcttctgtcctctcttctgtctccattttcctacagatcctccaacagatgacagctaacaggccacctaagtaccaccatacttagatttagacttagaatcatgaagagttccacagtc

SEQ ID NO: 174935 - DNA, 507 bp, Zea mays
  Clone ID: MRT4577_91124C.1
caagccccgtgccattgcccgaacgctccactctgttcgcgccattggaagagagggagaagttgcggggtgcacgccaggggggatttcctccaccgtacgtcctctagcgggtgctatggcacttttggccgggtgtgtggatccaagcggaggcaggattggcgcctgcgaggccatagcgtgtcgggaattgttcaccggagccaggagttcgcgccgtgaagctccccaccgtggtccgacctccgcgcgacacctctgccgacgaaccagtgaccgaggatccaagtgttcagtaggtgaagttgctgagcaggagcttattgaaggagaagaacaggtggtccagggggagccttacaacgaggagtacgagcttatctaggtggcatctcccagtcagcttgatggcgctaaggaataatacttagttctctttgttgttctcatttttttgtaagacttccgctatgtaataatgatatttatgacatttatctctat

SEQ ID NO: 174936 - DNA, 245 bp, Zea mays
  unsure (1)..(245): unsure at all n locations
  Clone ID: MRT4577_91125C.1
ggccccacaacaatccagcaacagacaggggaacattttttcaatatcattggacaaaaatagctgcgaacaaaaaccttgctcattcttctctcgtctcgtttcatagcgggggcggccaaggcgaacaacagggttccaacacctattccaaaggttgaacgggcactttctcggtgtccggagcgntcggtgtcccgcttcttttgttggttgtgatttcttggccgtggcctggatgggcc

SEQ ID NO: 174937 - DNA, 312 bp, Zea mays
  Clone ID: MRT4577_91126C.1
attctgacgcgtgggccgcaccaccttagggacaaactgcaaaacacgtctcgatctcatcatcgcaagaatcaagctactgtccaacaggaggccgccacaactcataaatatgcgcaatgaaatggtacaatatctgcagactgcccaggaatcaatcgggaggacccgagtggggcacatatttggggagccaacaacattggctgcctatgagaccgctgcgctatgatgcgaatccgctctggcaagagcccctattgtctaaggccaaaacgaatgcccctgagaactgggtgaagccattgctag

SEQ ID NO: 174938 - DNA, 401 bp, Zea mays
  unsure (1)..(401): unsure at all n locations
  Clone ID: MRT4577_91127C.1
ggtcgactcgcagaattattcagtcaggaaaagatcttagcaattgactaccgggaaaagaagaccctggtgacgtaaccggaacccatagtcggcttgcgactatcgcgtaaattagacagggtaagcaaatttattattcggcgagtggattaatgaatgatctaactaggtctataatgaattgggtcacaataaatgtagtaatttactaatttagcatgcctatattgtgataatcgatttaggtaaatcggtaaatcaagtaattaagatacatagttaaagagttaataaaaagctaggattaaaatagatctagtgtaatatgtcaattnggtaatggatgtagtcgatgccctgctgtgaatccatgnatgcttaattttggtttaaggttc

SEQ ID NO: 174939 - DNA, 150 bp, Zea mays
  Clone ID: MRT4577_91128C.1
cacaaaatttgtaccgttggtttttcttcgcgtctcctatggacatcactcgagagcctattaaatgaagagcatcaccctttctacttacatttccttaacctctatttccttcttctacatctactcctccgtccaaacccaatcttc

SEQ ID NO: 174940 - DNA, 608 bp, Zea mays
  Clone ID: MRT4577_91129C.1
gccggccggtccgggagaacaacatccgactgatggccgacccctacgatctttgggcgtctgttctcttcttcgaatactccatgagccggagagcatttcctgatgccaacagctcgaactcgattcaaatgtccaggtgcaaccctcgcagaggccatctgccacagcaacaggatcgtcattgagctgttgcctctacgcgggacttgaaggacggcactgcccttactgccgctgtatacatgggattggctgcattggatccctaccactacctgctctcagataggtcgtttcgtgaataaaagactggattgactatatgtatgcgtacgcatccgcgatccctcagatagccagatgtcggggatcttccccgatctctgatgtttgctgatgtcagtgctatgccatgagctcgcccttgtgatgcactgttgatttatgctgattagcaacaggtgattcttatcggtaagatgcatagaagcatcgcctgaactctgaactatttgactgcatacctatgtctggaatacgtggctggaagtgatgtccttaaatctctctatctgatgaaagattacttgcgctaggtgcgcatt

SEQ ID NO: 174941 - DNA, 522 bp, Zea mays
  Clone ID: MRT4577_9112C.1
gagcgcatcaggcgcgcccttaaatgggggcagcccaagccactatccttacctctgataagaccgggactgccggtggcgaacggacacttgcagccaagggctgcaggttaaacgcctctgcggcccgtacaggccggcgccatgacggaagcaccatactagcagggaccggtccttaattccaaactctggtgagcatatccgtgacatgaatgcaaacgcctgcccaaacgaatcgagagcttaccctgccataccagctgctcaagaagcgccacatcgatcaaaggagctaggccttacaagactgaacatgaaggtgatccccaccggctgcaagcatgaacaagaccgttgtacctgagaacgaagatgcacttacgcatcttgctaggagggcgaagagaatgctacgcatggaggcatccacgcggggggcctacgtatgagtaggaaacaaaggcgccatgtgatgttaaatacaaacgcgagcatttttaccagttctggaaatcttac

SEQ ID NO: 174942 - DNA, 315 bp, Zea mays
  Clone ID: MRT4577_91130C.1
cgcgcacgacggattatatgtgggcgatgatacggcgacccattccacaagaggctgaggccaggaggacggaacaggaactgcgggcgagattactcttgagagggacaccccaaaacgtagcaacacaccttggccagcgtgcaccgacaaaaccagcgacaggagcacagagacgaacggcggggtatcctggtggcttagctgcttcctagcttggggcgctccctaccgttccgaggacgcattcaacccgaggctcttcctcgccaaagcgcgaggagggacgtgcacgctcgctccctgtgaccctga

SEQ ID NO: 174943 - DNA, 1649 bp, Zea mays
  Clone ID: MRT4577_91131C.1
tgttatactggaacattttgccattgcagtcacaattgttgttgttgctgttcctgagggattgcctttagcagtgacattgagccttgcatttgcaatgaagaagatgatgagtgagaaggcactggtgcgacagttatctgcctgtgaaactatgggctcagccactgttatctgtagtgataagacaggaacacttacaactaatcgcatgtctgtcacgaaggcctgcatatgtggaaacaccatggaagtgaacaattcatcagtgctttcaagtttttcttccaaagtcccagaatttgctttgcaaattcttatggaatccatttttaacaacactgctggtgaagtggtgattaaccaagatgggaagtgtcagatattagggaccccaactgaggctgctttgttggactttgcattgacaataggtggagacttcaaagaaaaacggcaggaaactaagattgttaaagtcgagccttttaattcaacaaaaaaaaggatgggcatcattctcgagcttcctggtggaggataccgtgcacattgtaaaggtgcttcagaagtagtcttagctgcctgtgataatttcatagatgccagaggtactattgttgcactcgataaaacagctacaaagaaactcagtgatgtcattgaaaccttttctaaagaagcactcaggacactctgccttgcttatcgggaaatggatgatagtttttctgttgacgagcaaataccgctacaaggatacacatgcattggcattgttgggatcaaagatcctgttcgtccaggtgtcaggcagtccgtggcaacttgtcggtctgctggcattgcggttcgaatggttacaggagacaacataaataccgctaaggcaaccgggcgtgaatgcggtgtttttactgtatctaataatttacctttagcttgcaaatttttagagatataggaaattgaactcttcgagtttgcctcaaagatgcaggtcctggcccgatcatcaccacttgataagcatgcacttgtgaaatacttgcgtaccacgtttaatgaggtcgttgctgtgactggggatggtacaaatgatgcaccggcactacgtgaggcagatattggacttgccatgggaatttcagggactgaggttgctaaggagagcgctgatgttgttattcttgatgacaatttctccaccattgtaacagttgcgaaatggggacgctctgtttatgtcaacatccaaaagtttgtgcagttccagctgactgttaatgttgtcgcacttctggttaacttctcttcagcgtgctttacaggagatgctccactgaccgctgttcaacttctttgggttaacatgatcatggataccctaggagcgcttgctcttgcaactgaaccacctgatgacaacttaatgaagaaatcaccagtcggaaggacagggaggttcatcacgaacgtgatgtggaggaatattgtgggcagtcaatattccagtttgaggtcatttggtatctacaaacacaaggggaatacttgtttgggcttgaaagctctgaagctaatactgttctaatacaatcatattcaacactttcgtatcctgccaggttttcaatgagataagctcg

SEQ ID NO: 174944 - DNA, 144 bp, Zea mays
  Clone ID: MRT4577_91132C.1
cggacgcgtgggtgactctgacactgttgtcattgacaatagttatggtattactgcccctgtaggggcttggagtctaataccaaccattgtgggggctgatacaaatgtttatggtgctaaaatatactgtgatcctacaga

SEQ ID NO: 174945 - DNA, 1245 bp, Zea mays
  unsure (1)..(1245): unsure at all n locations
  Clone ID: MRT4577_91133C.1
ggtttacgactcaacgcacgcgcacgcacacgcacgcacgcacaccactccaggtccgaaatccaagtccaggaagaaggaccgtacgtcgagatggccggcgtcgtggtggtgttcgacttcgacaagaccatcatcgacgtcgacagcgacaactgggtcgtcgacggcctcggcgccaccgagctcttcgaccgcctgctgcccaccatgccgtggaacaccctcatcgacaccgtcatgggggagctgcacgcgcagggcaggaccctccgcgacgtcgccgacgtgctccgagccgcgcccatcgacccgcaggtcgtcgccgccatcagggccgcctacagcctcggctgcgacctcagggtcctcagcgacgccaaccgcttcttcatcgagaccgtcctcgaccaccacggcctccggggctgcttctccgagatcaacaccaaccccagccacgtcgacgccgacggccgcctccgcatcgcgccgcaccacgacttccacgccgccccgcacggctgcggcctcggcacctgcccgcccaacatgtgcaagggccaggtgctccaccgcatccgcgcctccgccgccgcggcggacggcgccaggaagcgcttcatctacctcggcgacggccgcggcgactactgcccgtcgctgcggctggcccgggaggacttcatgatgccgcgcaggggttaccccgtgtgggacctcatccgcgaggaccccgcgcgggtgcaggcggaggtgcacccgtgggccgacggcgccgacctggaggagacgctgctgcgcctcgtcgggagggcgctcgtggaggaggccgcgctgccgccgccgctcgactgcaagctcgagtccaccatgcccgttgccgcgcaggacggcggcatgcccatcatgccgctcggcgtcaagaactgatgccgtcttgtctctggttgagaatctgatattattgccggttcgggttcgttgtgagagctcgagcaagtgcgggcgaggcacggcgtacgatacgatggattaatagtagcgtttgttaactgtattattgactaattttgtgtgcgtgtggtgtattccctccggatcgagcctgtcactgctgaattggctatggctcgttgtatcttctttgctaccgacaaaagataaaattaatggatgaaatcccttacgatttacgacaaaaaaaaaaaaaaaaagggcggcgctcgcgatctagaactagnc

SEQ ID NO: 174946 - DNA, 656 bp, Zea mays
  Clone ID: MRT4577_91135C.1
tcactctagttacacccgtgtgcgccgcaagctgccagccttccctatatcctctcttccctctccgctctcgggttgcttcaccattagatcccaccgattccactctccactgatcctgctggcccggcggctcgccgctaccgattgaacaccccaattcgggcccctccattcggtcgaattgggaggctctttggaagcgcatccacccacgaatcgaggattggagctttcttgcagatgcattcaggaatcatgaataatttgttgcaagactgaggcgggtgttgaggtaactactggatgaatttgttattatggccaatgccctgattctgcgcggggcttatgagcttgctgaatatctgaagcacaagtaaccatggatagaaaagtcggagtggtgtttagtctgcctgctcttcctactcattggggaagtttcagcggatgcccaaaccgaggatggtcatgtgcgtggaacacaggaggcaccagatctgaagctagaggatgctggtagacatgatgtgtcccaaagtggaaggtggtcggtgaatgttgttgcatgggccacgcttgcgatggctgcagcaacaggggtgggagcagatgccttctctttcctgcagataaaggcccaatgggccggc

SEQ ID NO: 174947 - DNA, 174 bp, Zea mays
  Clone ID: MRT4577_91137C.1
aatgggggaggggaaacttggaaacccaggatgggattcattgcaagcatgacaaggccagactgaattggaacaaagcgttattagccaaggggctggatagaatgcctccagaaccttttgtggcggaaaaaaacagaaaatttacggttcgaaaccacataccattttttt

SEQ ID NO: 174948 - DNA, 315 bp, Zea mays
  Clone ID: MRT4577_91138C.1
acgcagtgcatgcatacggtcaggagggctgtttagctcatatacgaggctgatcacatctcgggcgggtatactccggtgagttcactggagttgggtggcaagatctatgacatgatggtgatcgccctcgacctgagatggataaagtccaacgtgcaggacaactaagcgctgaactttgaggccagcccagagccaaactactctgacgtcaccatgacgtacgtgcatacgcccatggaagagatccccgagaaccatccgtagatggaccagagggacatcccatacgcatacttaactgcattttta

SEQ ID NO: 174949 - DNA, 317 bp, Zea mays
  Clone ID: MRT4577_91139C.1
gccggggattctaatcttactttgaaaaaatctaaaaaaaaaaacctttgaagaaaaacctacacccccattcaccaaacgcttcatgccctaaggttggccccaattgcaaacctcactccccccgatgaccttccccccgctaaaacttaccttgtcaagggaaccaaaacaactttttgcccccccaaaacccgctcttctgggccccaaggccctccaacggttacccaatcccccttgaaccttaccccaacaaaacttgagagattaacacaaagcccctcaccggtgggcccccccccccataatacccc

SEQ ID NO: 174950 - DNA, 727 bp, Zea mays
  Clone ID: MRT4577_9113C.1
agctatcctcatcatattttaatgcctcgtgcataatacggagtacatatctatatttacgtcagcgttattgcaacgccctctctctgtggtctcttcttctacatactataatagtagtacattagtactaacaatgtggttggccatggcatgcttgcttcgagatcaacatgaacaatggaagcacaagtacgagaatccatgtagaaggtgatgaaaatcctatatctgtaatggtttttgttcagatatcttctgattttgatggtttgcagtggattgttttccagcgtgaagattttccggtgccaattgccacagaataatgccttctactcagctcaacctccaaagcatgatggctctgacaaaccactctgtccaggaggtagtgttgtcttctgttgagtggcagttgacagtatatatcctgcactagatgttgtataaatatgtgaaattgtaaatgtttgatactgacttctgcttctcctgatttcttgacattgtcatttattacattagtagtttctgtcagtgtgcaacattttctccatgtcaactactaccttgttttctcatttaaaaaaatttctgtttatttatgggtttggagtgtctagggacctatagcagatgcaaattttattcaagagaagtttatttcggaagtatgtaaacttagcataaatatacgacaattgctgtctttaaaccttttctg

SEQ ID NO: 174951 - DNA, 337 bp, Zea mays
  Clone ID: MRT4577_91140C.1
ggggtcgaccattggtccacccataatcatgggaacaaaccaggggaacaaacgggaggccccacggccgggcaagggggcgggggagggaaactggggaaacccacacgctcacaaaagagagcggggaccccccccacagacccgacagacctaaaaagaaaacctaacccgaagagggcaccaaaacccagctggggggccccccaggggtgcacccgaggggaaaagcccttttataatttacgaattaaaacttggattgagacagcaccctggctcccgatcttaaataggcctactgttaaaagaaaaggtccaaaggacctctggggac

SEQ ID NO: 174952 - DNA, 310 bp, Zea mays
  Clone ID: MRT4577_91141C.1
ggctactaaatgctgatcaaatccttgtatatatttttgttcctacttgctaggacctttagacatcccaagatttgacaatcgcaggtttaattcacacaaggaacaaataataaaggatgttgagctaaagtttgccttcccaaggcaaaccatacatcttacaagggactggatcctaaggacagttaataataggtggcgagcatacaaatctaagttgaagaaacaatacttcaatcgtgacgagagaactctaaaagaaatcctaagagagaagccactaacgactaatgaacatcaatggaga

SEQ ID NO: 174953 - DNA, 284 bp, Zea mays
  Clone ID: MRT4577_91142C.1
ggaaccttctcaaaagaaaggggaaaaacttttttgggcgggttagtctttttttccttgggtaaaaacctaaccattccattttaatgaaatgccgggccgcccctttttttttcggggcccaaccctgaaaggttttcatgcctgttaaaaaatttaacaaatttttttttttaaagagggagaaagggccaaatcgaagttcccccccctcaggggggggttggtcttcagtcttcacaggggaagcccccttttttgggcaggcccggggcaaccaattt

SEQ ID NO: 174954 - DNA, 391 bp, Zea mays
  Clone ID: MRT4577_91143C.1
aaagagagtagaatagtttattggatcatctgcatcattgtatcttgaacaagtatcacatcaaagtaaagtggaaataaataacaggggcaatctcccacaggaagatgatcggtgcatcgttagacttagaattccccgtcgtcaagatctccatcaaagtttccagcatcaccctcttgctcaaacgcgtcctgcagatcgtcttcgaacggattcggttcgtctaccacaccgtcagcttcttcactgtttcctatgtgtagaacgatgagtgagcagggagggtcgtcgagcagtggggtttggccggcagcagttgcctggggtcgcggcttcactcggctcaacggcgttctgggtaggtattcgtcgaaggggactcgtcttt

SEQ ID NO: 174955 - DNA, 420 bp, Zea mays
  Clone ID: MRT4577_91144C.1
aattcggcacgaggctcctagcaatcctctgccggagtccaagctccaatcagatccggacccacccctccccctccgaagaagccctaggcatgccccgcagccgatgaggtcgctccgccgggtcctcatcccgctcgtcctcctcgcaggactcgtcttccgcgtggacgacggcggcggcgcgttcctcccgcccccgccccccgcgctccccgctcccccgccccgcctcgcacttaacggagaagcggctccggaggatgatggggcggcggtttcccgctccacggagatcgtcgcggcggaggcgcgctccaccgagttcgtcgccccagcgaggcccaagaagcagagcttgcggtggctccttgtgcgggcggaggctgggcgccacgagccggctgggtgggttgccgg

SEQ ID NO: 174956 - DNA, 382 bp, Zea mays
  unsure (1)..(382): unsure at all n locations
  Clone ID: MRT4577_91145C.1
atagtgagtcgtattataagnncacgcgtccgcccatgcgtccgcaggtgaggctccgcgcctgcgcgggccctagccgtcgtctgcgggacttcatcttcgcggtgggggaatacttcttcaggcactggcagaggtgaggggtccaggatattggggtccatcagcttgatgtcatcatgtgcggggaggtatctggcatctcgattgggggcctttgcgcagaaatgtgttgcgatttttgttgtatgcgaatcgtaggtgcgccgatgtgcgcttgtccgggtcggcgaggagtgactttaggggaaattccaggggaagtctctgatctgattggattgtctgtgtcgcaggtggttgctatcgggtggcctttttg

SEQ ID NO: 174957 - DNA, 515 bp, Zea mays
  Clone ID: MRT4577_91146C.1
cccggggggaaaatcctttttctgtgtatctgcccttgcctcaggggggcggtgtgtgcagccaacacttgtggtacttactcgtgctggaccacttgtgaaaggagaactctttggtcctgttctttatgctgtgaaatttcagacctttaaggaggcgaccgatatcaataactctgtggctcactgattgagcagttctttgtttacgaagaggccaaatattatttttaagtggctcgggccctatgggcctgattgtggggtactgaatgtgaacatacctactcttgtgcgctccggttggtggggcatttggtggggaaaaagcagctggcggtggtctagaagcctgagtgattcctggaggccgtcatgtggagggcgacttggagggaggtcctcgaggtggtgggtcacttgtttactccctggtggccctcgcgggccggtctcgggggtgcctatggctgctacggcctgagagagcggaggttcttttggatggctgctgc

SEQ ID NO: 174958 - DNA, 430 bp, Zea mays
  Clone ID: MRT4577_91147C.1
cacaacgagtggggctacagcaaccgcgaaaaccacctgatccgccacatgttgcaagacccagtaggctagaagagagatagaaccttgactaccctatggtggttcgacacccaatgagcctttggtacacagaccatctttgctggttgtcatatgctgcagaataatatgtgaaccgagcgaccctcatggacgctggatccatgctggctttggacactactgtctctttgagcagaacttatctgctgacgaactgtaacgaatgcacaagtgttagttcttttgagctctgctaaagaatataacaatgaggtatcagctgcctacccccagcaatttcttccatgtacctgcctgacggccgttaaaaagggcgaatattgacaatatccataacaatggcgatcgatccagcttgcatgta

SEQ ID NO: 174959 - DNA, 185 bp, Zea mays
  Clone ID: MRT4577_91148C.1
ctcactcgttctggcacgcatccggtctctcgttcgcagacacataggctcgacgggagggtccgccgtttgttcctcgaggtctccaacgatctcctgccgtttgtctactgccccttgcgcgcagcgcgccaggaaagcaccggacgtcctggccacgatcctggagtacgtggctgatgcac

SEQ ID NO: 174960 - DNA, 129 bp, Zea mays
  Clone ID: MRT4577_91149C.1
agtggcatgcggttcctgctgtccccgtgtcaattttaccatgtgaaaatgaaggatccagatcagaagtactacaggaatgggacgtcggtcggagaacaacatgaatcaatgtatgtacattcaggt

SEQ ID NO: 174961 - DNA, 363 bp, Zea mays
  Clone ID: MRT4577_9114C.1
ggcccccaacaggcaaaaatttggggaaaaagctgggttaaaggggggggggaatcccccccacaatcagaaaaaacttatccaggccttggggggggttttccttaaaaaaaaaaccaagggggtctttttggggggggaactaaaattttttaaacccgtaactagaaaacaaattttttttttttgagttaaggggttgggaaaaattttaaatgggagaaaaaaagccccatgcccaaaaaaatttgagaagaaagcccctgccccttgccttttaacccatgcaaaaggcagggtcctggggccaaagggaaaccgaaaaatgggggggggggggttaccagggcaaaaaccgttttg

SEQ ID NO: 174962 - DNA, 1300 bp, Zea mays
  Clone ID: MRT4577_91150C.1
cccacgcgtccgcccacgcgtccgcgcacgcgtccgcccacgcgtccgggcgctcctggcggcgcagtcccagctgcgggcacagcgcatgctggccctccagctccacgaccaccaccacccgacgcctcccagaccacgccagtcgccgcagcacccgaggcaccgccgctcctacgagatggaccggtcgtgcgaggacaacgccaagatcgtggaggtggacgtgggcgagcccgtgcggcggggcgcggcggggaaggacaggcagctctacgccggcggccggtcctccccggcgccgtcgttggcggcgacggagctgctgagcccgcgggcgtacagcgcccacttcgacgacctctcggtggccaacacggcgcagagcagcccgcggcaggcgccggaggcctgctgcccgggctacatggccaacacggagtcgtcccgcgccaaggcgcggtcccagagcgcgccccgccagcgcaccgacgcgctggagcggctgcccagccgcaggaagcaggggacgccgcccagggccgccgccaggatgcacttgcagcgctcgtcgtcgctggccggcaactactcctccccgtggtcgtcgtcggctgccaggctcgacgtctccgccgcgtcgctcaaggacagcgagtgcggctccaccagctccgtgctcaccgccgccaccctctacagccggacgcggtcgctcgtcggctccgaggtgcgccgtggcctgtactgagagtgagaggagctcgtgttcgtgttcctggcgacgccatggatggatgctgatagctcctgttcttcaaatggtccgtgattcttcgctgggatgggagcttcaaataaatggaatgcttatgaccagttcgtgctacataaaatagtcgcgtttcaaactgtacatttttgtagcccacttgtagccgtctgcaggtattgggtactagtatatagacgtgtacagctacacaaaatgtttgtacaacaaggttagcgatcgcttgtaatgggtctgcttagctgccaagaagcaggggttgttaatgcgatcgcttgtaatgtgtctgcgatgacgaagatgggtacatgatccttggcttcgtgctgaagcccccaacccaagggctgctcgcccgcatcccaactatatattgtgcacgtctagtttttaatttatgtagttttttcgtgcaaatgtggtgccaatctaacaaatgaattatctgcaaatctatttgtgtagtccatcgttgagtgttttcttctgcactcgtggtgcctatct

SEQ ID NO: 174963 - DNA, 775 bp, Zea mays
  Clone ID: MRT4577_91151C.1
ccgggccgacccacgcgttcgcggacgcgtgggcggcaggcgccggaggttttgctttccgggctacatggccaacacggaggcgtggcgcgccaaggcgcggtcccagagcgcgccccgccagcgcaccgacgcgctggagcggctgcccagccgcaggaagcaggggacgccgcccagggccgtcgccaggatgcacttgcagcgctcgtcgtcgctggccggcaactactcctccccgtggtcgtcgtcggctgccaggctcgacgtctccgctagttgtcgctcaaggacagcgagtgcggctccaccagcttcgtgctcaccgccgtcaccctctacagccggacgcggtcgctcgtcggctcccacgcgcgcggtggcctgtactgagaggagctagctcgtgttcctggcgaccccatggatggatgctggtagcttctgttcttcgaatggtccgtgattcttcgctgggagattcaaataaatggaatgcttatgaccagttcgtgctacataaaatagtcgcgtttcaaactgtacatttttgtagcccacttgtggccgtctgcaggtattgggtactagtatatagacgtatacagctacacaaaatgtttgtacaacaaggtttgcgatcgcttgtaatgggtctgcttagctgccaagaagcaggggttgtaaatgatccttggcttcgtgctgatgcccccaagggctgctcgcccgcatcccaactatatattgtgcacgtctagtttaatttatgtag

SEQ ID NO: 174964 - DNA, 570 bp, Zea mays
  Clone ID: MRT4577_91152C.1
gcagcactccttctctacacttcgttcacttccacgatctccacaccacagagagacagagagagagagagggtgtgtgttgaagcaaagatgaagcttatggggagccggaggagcggaggaggcctgagcaggagcctcaaggagcacagggccagactctacatcatccagcgctgcgtcgtcatgctgctgcgctggcacgactgactccgatccctcgctccatggatggatctgtccttccattccatggatggtgtttgaagcaaagatatactttctgattttgggtctgtgattgtgctgtgccagaatggtgccggcaggtagtacttgtacataagaggtcacttaattatagaagtagaagtagaagtagtagcaaagcaataggatcgatctagtgttcgctgattcaccactttttcctctgccctccacccccttccagcaggtgtgtctgtcccattgtacagttacatcactgccgaatactcgtgtgatgcaatatatcaactgaaagagaaggaatcaccggatcaaaaacaaaaaaaaaaaaggccccta

SEQ ID NO: 174965 - DNA, 1939 bp, Zea mays
  Clone ID: MRT4577_91153C.1
ccggccgggaagagcacgcagtcggcacacacacagagacaagtcactgtctcgaagtgtcgggtttcgaactcgaacagggcaggtgctcgccgtccctcttttactagccttcggaaagcgcggcctgtgtctccggcctttgccgcttccacagggagtccggggccatgcagagctccgtaaagctcgcggtgcttgctcttctgctagcggcagcagctcaccacggtctgctgccgctgccgacggcgcgatgctactggctcaacccggagatctacgacgccggcgggctgagccgccgcgcgttcccggatggcttcgtcttcgggacggccgcgtcggcgtaccaggtcgaggggatggccaagcacggcgggcggggccccagcatctgggacgccttcatagaggttcccgggaccatccctaacaatgccaccgctgacgtgacggtcgacgagtatcatcggtacaaggaagatgtgaacataatgaagaacatgggctttgatgcgtaccggttttcgatctcttggtcgaggattttcccagatggaactggcaaggtgaaccaggaaggagtggattactacaacaggctcatagattacatgctccagcaaggtatcgcgccgtatgcaaatctctaccattatgacctcccattggcactccatgaacagtacctgggctggcttagcccaaagattgtggaggcgtttgcagactacgccgagttctgcttccacgcgttcggagacagggtgaagaactggtttaccttcaacgagccgaggtgcgtcgctgctctgggctacgacaatggcttgcacgcaccgggaaggtgttccgggtgccccgccggaggcaactccaccacggagccgtaccttgtcgcacaccatctcatcctttctcatgcagctgcggtcaggcgataccgcgacaagtatcagcttcaccagaaggggaagattggaattctcctggatttcgtgtggtacgaacctttcagcgacagcaatgcggaccaggctgcagcacagcgagccagggacttccacctaggctggttccttgaccccattgtacatggacggtacccgtactcgatgcaagagattgccaaagacaggctaccgttgttcagcgatgaagaagccaggatggtgaaaggctctatagactatgttggcatcaaccactacacttctttctacatgaaggaccctgggacatggaacctgacgccagtcagctaccaggatgattggcatgttggttttgtctacgaacgaaatggagttcctattggcgctcacgcaaactcctactggctgtacattgtgccgtggggcatcaacaaggctgtcagctatgtcaaggaaacttacaaaaatcctacaatgatccttgctgaaaacggaatggaccaacctggtgatgtcagtattactcagggtgtgcatgacacagtaagaatccgttattacagagactacataactgagctcaagaaggcaatagatgatggtgccagagtcattgggtactttgcgtggtcgctgcttgacaacttcgagtggaggcttgggtacacttcgcggtttggcttggtgtacgtggactacaagactctgaagaggtaccccaaggattcagctttctggttcaagcatatgctgtccaagaaaaggagctagagaattgcagacaagaggaccactggcttcacgtgtcatacaaaagttcactctgcaaatcctcttagtatgtcagatttagcttaaggaaccgtgcagacaattgagtctcaaggctcgacatctctagcttcgttaattgttgcaaggcaataaattggtatcttcgttgttgcaaggcaataaattggtgtctccataaaagaacaagtagaagcactcatctacct

SEQ ID NO: 174966 - DNA, 375 bp, Zea mays
  Clone ID: MRT4577_91154C.1
gtgaactttgtttctagcagcatatgatgttagtgttgtgcaatgaaatgttacatgtttgtggaatgtatgatgaattgctttataatgatgcttgttgctattttattataataagggtctgttaatatgtaagttaatatatatttggttatttaatttaatatcaaaagttagaagctagtatgatgattcgataataatattataaaggttttaggtttgtagcgttaaacactcaaaatatgatttttcggttatatatatatttatgtacatagatctttgtatttagttgtgtggctcgcgagcctaacgagctggctcgagctttctaacgagccgagccgagctagatgtttagcttattagtat

SEQ ID NO: 174967 - DNA, 289 bp, Zea mays
  Clone ID: MRT4577_91155C.1
ttggcccacacatccatactcttccacattctcaaatttcacggtccacgattagggggtttctcgcgcactgatccaatttacccgctaaacgaactacacccgcctaagataactcgacttctcgtggaccccatctcttcttggaactcgcacacttgccatgccgcggtcaaaactccaacaccaaccaccatcgcgatcattatacaaccccctttccaaaaccaactacaatcttttgccttttcccccccccgtaccctaaataccgccagaaaccccaccc

SEQ ID NO: 174968 - DNA, 600 bp, Zea mays
  Clone ID: MRT4577_91156C.1
cgggaatgaagaactgggctttgatgcgtaccggttttcgatctcttggtcgaggattttcccagatggaactggcaaggtgaaccaggaaggagtggattactacaacaggctcatagattacatgctccagcaaggtatcgcgccgtatgcaaatctctaccattatgacctcccattggcactccatgaacagtacctgggctggcttagcccaaagattgttctgacccagctgcacgccgtgcccaatcgaagggaggcgtttgcagactacgccgagttctgcttccacgcgttcggagacagggtgaagaactggtttaccttcaacgagccgaggtgcgtcgctgctctgggctacgacaatggcttgcacgcaccgggaaggtgttccgggtgccccgccggaggcaactccaccacggaaccgtaccttgtcgcacaccatctcatcctttctcatgcagctgcggtaggcgataccgcgacaagatagcttaccagaggggaagattggaattctcctggatttcgtgtggtacgaacctttcagcgacagcaatgcggaccaggctgcagcacagcgagccagggact

SEQ ID NO: 174969 - DNA, 1785 bp, Zea mays
  Clone ID: MRT4577_91157C.1
tgaattcggcacgaggcagcaacacaaccatggccttcttctttttcttccgattcttggttgggatggtggcactacttgaaattgtcttctcgttgatccggggaatgaaaaaacaagggaccatccctaacaatgccaccgctgacgtgacggtcgacgagtatcatcggtacaaggaagatgtgaacataatgaagaacatgggctttgatgcgtaccggttttcgatctcttggtcgaggattttcccagatggaactggcaaggtgaaccaggaaggagtggattactacaacaggctcatagattacatgctccagcaaggtatcgcgccgtatgcaaatctctaccattatgacctcccattggcactccatgaacagtacctgggctggcttagcccaaagattgtcaaggtatcgcgccttatgcaaatctctaccattatgacctcccattggcactccatgaacagtacctgggctggcttagcccaaagattgtgtaagaattgcaaactagacgacatcgagaaaccaaatttcaaattgattcgaccatgtgtcagtcagtctgacccagctgcacaccgtgcccaatcgaagggaggcgtttgcagactacgccgagttctgcttccacgcgttcggagacagggtgaagaactggtttaccttcaacgagccgaggtgcgtcgctgctctgggctacgacaatggcttgcacgcaccgggaaggtgttccgggtgccccgccggaggcaactccaccacggagccgtaccttgtcgcacaccatctcatcctttctcatgcagctgcggtcaggcgataccgcgacaagtatcagcttcaccagaaggggaagattggaattctcctggatttcgtgtggtacgaacctttcagcgacagcaatgcggaccaggctgcagcacagcgagccagggacttccacctaggctggttccttgaccccattgtacatggacggtacccgtactcgatgcaagagattgccaaagacaggctaccgttgttcagcgatgaagaagccaggatggtgaaaggctctatagactatgttggcatcaaccactacacttctttctacatgaaggaccctgggacatggaacctgacgccagtcagctaccaggatgattggcatgttggttttgtctacgaacgaaatggagttcctattggcgctcacgcaaactcctactggctgtacattgtgccgtggggcatcaacaaggctgtcagctatgtcaaggaaacttacaaaaatcctacaatgatccttgctgaaaacggaatggaccaacctggtgatgtcagtattactcagggtgtgcatgacacagtaagaatccgttattacagagactacataactgagctcaagaaggcaatagatgatggtgccagagtcattgggtactttgcgtggtcgctgcttgacaacttcgagtggaggcttgggtacacttcgcggtttggcttggtgtacgtggactacaagactctgaagaggtaccccaaggactcagctttctggttcaagcatatgctgtccaagaaaaggagctagagaattgcagacaagaggaccactggcttcaggtgtcatacaaaagttcactctgcaaatcctcttagtatgtcagatttagcttaagaaaccgtgcagacaattgagtctcaaggctcgacatctctagcttcgttaattgttgcaaggcaataaattggtatcttcgaaaaaaaaaaaaaaaaa

SEQ ID NO: 174970 - DNA, 327 bp, Zea mays
  unsure (1)..(327): unsure at all n locations
  Clone ID: MRT4577_91158C.1
gaggacgnnaagggggggggggcccgcaccgaacagcggggccgncctcgccgncatggccgcgctgncgccctccccgacgcgcttggggaagcgcangggcctggggacttttttccaccacntgaatatctggtaagtcaggcctgntttttttttttgtncgaggngatctcgtcgatgtggtccatgagcgtgcggtgcgtgcccttggcgggctcgncgaccatgacgccggatttgaagagcgtcggcgttgctcccgccgcggcgatctccggcctgtcgagccggtcgtcgtccttcctcangctgagggggtcggcg

SEQ ID NO: 174971 - DNA, 170 bp, Zea mays
  Clone ID: MRT4577_91159C.1
gcacgaggtggaatggtagaagagggtacacgtgaggggtgatgtgtggtgaggggttcgattcctagcaaccgcgtatacacaacaaatgccacgacttgtgacttcgatagagacaggcgagtggggtgggtgagccgaggcctcacctaataaaaatattttaggag

SEQ ID NO: 174972 - DNA, 209 bp, Zea mays
  Clone ID: MRT4577_9115C.1
cgcccgcgagtcctaatacctcagctggtcattgcagatacggaggtccctgagcctctgaagcggccagatgaacttcaccttgagatccaacaccgagtacagagggacgggaagccacagtttgagtgtgttctccggcggacgcctccgttactttccgtcaagatacctggatctggaggaaatctacagggtgaccctcgtct

SEQ ID NO: 174973 - DNA, 365 bp, Zea mays
  Clone ID: MRT4577_91160C.1
attcccgttcgacggacgcgtgacgctctcaccgacgcttcccggcctacgaccctgcacgctcatacagcccgccttcattcacggggatggctgatgaggtgaggcctgctaccgatctcttttcgcgcactaatcccatctatctaccctccaatggccctctacttctatagcgacgaaatcccatgctcgagcctttcacgcgtggtatccatgagcctcaaatagaatgccgaccagcctttgtactggcttgcgacctccattactgcggctcctggacctgactatagctagcgttcatatccgtacgctaggctagagaacatcagatctgaagattctgggagtgaacgattgtg

SEQ ID NO: 174974 - DNA, 601 bp, Zea mays
  Clone ID: MRT4577_91161C.1
tcccgggtcgacccacacgtccgaggacgcgtgggcggacgcgtgggcggacgcgtgggggtctggggagcgtgactttgaccgtgatcgtcagtatgagcgaagcagaggaagagatagggtttatgattacagggacagaggatcagaacaccgaagcgtccgatctctacagaaatgggagggattccgaaagaggtggacacagatacaggagtggtgatatgacaaacgaccgggggagaatgaggagcagatcacgttctccaacaaggcatggctatggaagatctggaagtccaaatcattagctgaatatttagatagttttattcacagttgggactcatgagctctgttggaaccctacagtcttgctttttacatgagaaaaaaaaaattctcagttaaactcgtaaggccggttctggactttatgtgtggatgatgatgttaacagaattacagtctatagcaggtaaaccttgaacattaaggtttggggtacacaatttttttaattcccttgacaactttgttaaaaacctaattctggtctttggcctaaaattttttcaattcttaaggcaagtattttttt

SEQ ID NO: 174975 - DNA, 661 bp, Zea mays
  unsure (1)..(661): unsure at all n locations
  Clone ID: MRT4577_91162C.1
gtaccggcgctctttctgcgngttttttttttttttttttttttttttttttttttttttttttttttttttttttttgtttttttttttttttttttttattttttttttttttttttaaaaaaacccaaccagaccccctgggccgggggggctgggtgggggttaaacgaggtataatgggccaagtttcaccccccaaaccccccccattattctccccaattttccatggggggggggggggcaatcaggggaaaaaaaaaaaaacgggaaaaaacccaagggggtttgggaaaaaaaaacacccgggggggggggccccccccctggccggggggggggccccgaaaaaagggcattccttaacccctgggtttaaagggggggggggggattgggcaaaaacccccgggggggggcggggggggaacacccgggacatttccttactaaaacaaaagacccacccccgggcacgcggaaaaaaaaaaaaacggggatctggggggactgctttggggaaaaaaattggggcccgggggttttttcccccttaaaaaaaaggcaaggcatatgttttatgggcacccccccactggggggcaacaccctttgaaaagccaaaaaaaaccttaattggggcaaaacccggtaaaaa

SEQ ID NO: 174976 - DNA, 398 bp, Zea mays
  Clone ID: MRT4577_91163C.1
gcgggcgcccctttttttttttttttgtttgggtaaaaatccagccttgccatttatttgtttttttcctttaattctttttcccactaaaagataggaacttttccctaggggcccttcctggccccccagacaagaccccatcctggccgaatggcctcacttgaaagtggcggataaaacccggcccagccggcttcccgccgaatcgttccccggggaaaaattcttccccccacccggtcctcaacccaagggccccccgggaaggccgggaagcccacccccccaccttggtggaagacaaaactgaagggggacgccccccccccaaaggtcccaaaaaagggggaccagggtaccccccctattttaaaaaccaaagggagcaccgggga

SEQ ID NO: 174977 - DNA, 459 bp, Zea mays
  Clone ID: MRT4577_91164C.1
attcttatattctttttttatgattcatttttttatcatttttctcatctcttttgttgtttttttttctacggaagggggcgggtaaaaacccccaaaaagggggggggggggcactaaaaaagaaacaacaagggtcaaaaacgggacacccgctgcaagcagggaaataaacaccagcggaaagcggaacccccgccggcccagcagccctctaaaaaacccaaaaagacccccccgccaaaagccccggaagggctcaaccggggactaaaaaaacaaaatcccagcccctggggagaaggccccaacccccggaaaccccacgggctgggggagaaccgacctgtgaatctgaaggccccctttttcacacggacaagaaaaaacccggtggggccccccaccccatccttgcggcacctttttcccaaaagggagcccccgaacacaaaaggg

SEQ ID NO: 174978 - DNA, 378 bp, Zea mays
  Clone ID: MRT4577_91165C.1
ctggcatcatatcaccatgcaactccaagaacaagtttcagcttgttcaactggacagtgctgttgggtatgtcggcactagattcacactgcctgtgcccaagacaaacctcacaggatgcaggaatgcctgcatgggtaactgctcatgcattgctgtattcttcgaccagacttcaggaaattgcttccttttcgaccagataggaagcttgcaacagagagatggaggggtccttgtgtatgttggtttctgcatttaccggaggaggagtcaccatacaccctcgcaggatggtggtggttcgtcagaagatgatggtttcctgcacactatatcaggagcaccgacacggttcacttacaggcagctccagg

SEQ ID NO: 174979 - DNA, 780 bp, Zea mays
  Clone ID: MRT4577_91166C.1
aattcggcacgagggccgtatcacgcgttcctctcctttttcttttccttattacagacaaagactttttcccactcccgttattcggcacgagggctcgttccccctttgtctagcccgtacgaaaccctaggctccgccgcccaaaacctcgccgccgcgccgccgtacggcggcgccccatgggcccggccttctccgtccctgacgcagaagacctcccagcccgcagatccgacgcctccgacgtcgcaggcaacgtctgggacctcgccaccctccccacgccccccgccggcggcggccgcgaaatatacatctaccgcaacacgtttaacctcgtcccgcgctccatcggcggtagagcccgcggtctcaggtcgcttaagttcttcggcaacgatgtggaggtgctacccgcggattccggggacgagctggacgggctcgaaagcctccaggtcaaggtgtccgcgcccagggtctcaggggcgccgctccgtcggatgcaggctctcaaggagctcgagctctcaatggtgccgcccaggccatgctcgtgctccatactggcggaggttgcccggctcaagtgcctcaccaagctcaccatttgccacttctcgattaggtaccttcctcctgagattggttccctcaagaagctccaagaacttgacctctctttcaacaaattgaaaaactttcctaactgtataattgagttgagtgcattgaagtttctcaaagtgaccaataataagttcggtggatgtaccc

SEQ ID NO: 174980 - DNA, 401 bp, Zea mays
  Clone ID: MRT4577_91167C.1
cctgataccctcccgcaggcagagcaaaccaggggggctttttcaggcagttttatgtaacataccacctaaggaggccaagcacgctacctcgactgcccatctgaacgctccgaagaaagagccgttgaactgccccatgctccaactactggaagcgccacaccatcaggagcagatcgatgaatctgagccgatccgcaaaatgaagctgagacaaactgcgagacctgacagctgaacgaactgaagctgggactgactgagaccaaggatgttctgcgctggatttggcacacccaatgcttccatagaaccccacagctggtccgtaccacagatgctgacggtgattgcctcgatagcacttatggacgatgtggcctaccggaactagaaaa

SEQ ID NO: 174981 - DNA, 339 bp, Zea mays
  Clone ID: MRT4577_91168C.1
gttgaccctgatggggatcctctatattaccccatctctctgttttacactgtacagtacaggatgctcttggtcccatgtatagggatgaccactcggttggtctacatcagctgggcccccacggtgtctactggtgaagggcgggtgcagggatctctgacggatcgggcggaacttggacgcccacatatcgttgagctcctggttttccctgcacaggcaaaactcatcataggatgggaaacggtattactgcaggatgactggacactttatccggaggatccaaacagcggccgcgtggggcctgcccaaaaaaagcgctgcattgggtgg

SEQ ID NO: 174982 - DNA, 242 bp, Zea mays
  unsure (1)..(242): unsure at all n locations
  Clone ID: MRT4577_91169C.1
gcgattccgcaggaggcgacacccgcgcaagtaagcgccagacacgtggggtgcacccccaccccgctctncntcaccctaaacatcgtcatcggcaccatcgcggtcacctccaaggccgccgcctcgtctaccggcggcgacgaggagaaagtcacctctgctggcgcgaaataggagcctcaccggcggctggcccccataccaaccacagccttctaagcctttcaagtcgaccaact

SEQ ID NO: 174983 - DNA, 331 bp, Zea mays
  Clone ID: MRT4577_9116C.1
cccacgcgtccgcccacgcgtccgcccacgcgtccgctccgagtacctccatgccgtggaagctccgcacacttacttcacttccccgtaggtgctggtagtaacgtcatgatgtgactcgtgacctcacatctctcagcattggctctggctcctgtctctcgacgccgctttgtccgtgccagcccagatgtttctccactccctcttgatgcaaaaaatggcaaagaacacgcagcagccaagaaaagatggcggcgcgagatcaggcggtatgtcgtccaagaagtcccggtggtaccagcgcgcggtggaggtgcttcttcttcta

SEQ ID NO: 174984 - DNA, 787 bp, Zea mays
  Clone ID: MRT4577_91170C.1
cctcgttctgggccgggccgggtcgctgagtgcgcgcgcgctctcatccctcgctcgcccgctcgctcgcgacggcaactaggcgatcaacctcgccgcccgccgcccgccgccctaatttacgtgcccaggtcttcgtgcgtcccctctctaggacttcgccgatcctttctcaggcgacgggagccaaccagctgccccaatggaagttgagctgccaaacatccataaagctacttcgagtgaccattggagtttaaccagcagccaatacccgtctggtaaatttcctaaggtctcagtgggtatcatgattccgaaggcaggtagtataccaagagccagaggtggagatgctaccccaactcctacatttgacaggaacttgtctcaaggaactgatggtttatctagaccaaaaggtgataatacttcacttcgtgtttcacaagaagctctgaaccatgatgtatccactgaaggggctcctaaagctgatcctgttacgaaggtctctgtatcacaacctgatgacaatacatgtgagcaaacaggaaccttttcctttggaacaagaagagaacaaggcatcagcgttgaaaaattggagacacctgagtttttaagttcccaaagaaaacagaacacggagtctgcagataaagctaaacccaatagtgagatgctcaggatgaaagtgggggagatccttggtggcacttcacaaaacaagcaggccgctgcttcaccaaccctgatgacatgaagacacctgatcaggctaaag

SEQ ID NO: 174985 - DNA, 295 bp, Zea mays
  Clone ID: MRT4577_91171C.1
ccaagtgatctcaagaagcaagctcaccttatcgagctcaaggcgcattaatacgggggggatcaatgtttatgtatacttctcttgctaacccgatacccctcctccaatttgtccatatatccgcttatgctgactatcatacaaattcctctaaccagcataatctccactttctttaaacccactacttcaaccctacatgaaccaacaagcaatcgaagcaggcatcttacctttatcacccttgttcctccaacaaccgtcagccctattacagcagttacctttgtat

SEQ ID NO: 174986 - DNA, 167 bp, Zea mays
  Clone ID: MRT4577_91172C.1
atttcttcgtttttagggaaatttggatccataccattaaaagatcaccactttggggccggaccattactatcttacttacatgagggcccacattaatcaatgacatgtacggtccatgatatatatctaaagtttggatcttttaatggtaaaaaaaacaaaaa

SEQ ID NO: 174987 - DNA, 906 bp, Zea mays
  unsure (1)..(906): unsure at all n locations
  Clone ID: MRT4577_91173C.1
atccaaaccagcctttttccccctccgtgcgcccacagcaaagcccgatgaggagacgagaggaaagaagaagaagaaaccactaggcgcggcaaggatttgctccgagaggcgtactccctccagtccagaaccaccgccggagtattccgagcggcatttcctgcataaacaccggtgccaatcaggagggttctgtgtgtttctgttccattccgtatccggatcaccgtgcggaaattcttggttggtatggtatgagtaaatgcgatctgcagtgacttgtgagacaggtttctgcacattagattcacgaaaaagttgcgacctttattgcattcaggagtgttggtcggaactgccagagtgatgcgcttaaggattcacgacaatggcttcattggtgcccggtgtcctcgtgaagctccttcagcatatgaacacggatgtaaaagtcgccggcgagcatcgctcctcgctccttcaggttgtcagcatcgtcccagcgctcgccgggagcgatcttttcaccaacaaaggcttctacctcaaggtgtcggattcatcccatgcgacctacgtttcccttccagaggaacagcatgatctcatcttgagcgacaagattcagctgggccagttcatccatgtagaccgtctagaggctgccactcctgttcccatccttagaggagttcgcccagttccgggtcgccatgcttgcgttggcacccctgaggatcttgtggtgaccagctcctccagttttcatggcagcaagaaagcgcaaccatcaaatggaacgaatgatgccagcatcttgtcgctagaaaaggaaacgagncaattggagaaaataaagctttcacgtaagcttaccgngacggnaaataagaagccgatgct

SEQ ID NO: 174988 - DNA, 594 bp, Zea mays
  Clone ID: MRT4577_91174C.1
ctgattaaagcggtagttactttttcaactttgtattccataaaaaattatataagtactcttatgggtgttgcttcaggagttagaatcagtacatattgggcacggtgttacacttgatgttgtgtatgcaaatttagacaatgataattcttttctcagcttatgtttgatctacctatgcacctagctgtaattgaggtactgtttgataatttattttggaactttattatgtctaagaaattccaaacatgatacttcttttgtggacaaatatttgaattccttcaagtctaaaatgcatcaacttatttgttacttatttcatttctcgatctcaataccaggtttcaaggaggtaaactaaaagtttgttagttgtagcatccttgatgattatgttcctgtttgtagtcgatcttctttgttttaagaaaataaatctcactctccagcttatatcaattccattggctattctggacatgatcgaagaaagggagaaatggatgctccttacaacatacaaatatcttagtatgattgtcctgatttgtacaggtaagtttgagagaacccatccgtactggt

SEQ ID NO: 174989 - DNA, 468 bp, Zea mays
  Clone ID: MRT4577_91175C.1
cgcaacccagacgcgcgtatgtcagcttgatggactgcactaccctgacctgccatgatattgaacgtgagccccgccgagcgaaagcgaggcgagacgcatgcggtgctacctaacctcacgacgctggcgctggccgagctcctggcagcagaccgaggtggctaccccggccgaggcgcgcgcggtgacgtcttgtgccaccgaggacagcacgctggagccgagcctgacgtgcgtccataagggcgcagacatgccgccccatgcgggctgctgtggtatacgcagtctgatgaagtatgccaacaacacccccaactcgtctgaccatgtgggaatgcctcaaggaacgtccatcaactgagccatacggcagcgtcaccatacccagcacgcgccggcgggctggcctacatgtgacgttgaagacctgccgaacatggaccacgacacaagcctaactgc

SEQ ID NO: 174990 - DNA, 349 bp, Zea mays
  Clone ID: MRT4577_91176C.1
attcggctcgagtccttcctgggcctcgacgagtggttccagcacgggacgggtccgtccccgtgcgagctggccaatggccgtcacatatggaccctgtgcggtcgcgacgcgcgcttcggcaagctcttcgacaactggatggtcgcggacagcgcattaatcatggacgtcgcgcacaaggagtgcggcgacgtgtgccgaggggtcggctccctggtcgacatcgccggcggtctcggggatgccacccacaccatcgcgagcgttttcccggacgtggcgtgccgcgcgctggacctaccacacgtggtcgccaatgctcccaccgacaccaccgtgaagtaca

SEQ ID NO: 174991 - DNA, 433 bp, Zea mays
  Clone ID: MRT4577_91177C.1
tgggtccctcgaggccggccggtgaggcacctacaccacctacctgccggactgctcgtgctttttcacgagtcgaggcatggcgacctcttcagctcagtccacccagtcgaaggtgatggcgtcgtgcgatcgccgtggaacgctcccgtcgctgtcggtcccgcccgaacatcaagcggttcggcgtttccacgtacatgatagggaatgaacgcctacagcgacctcaacgaggtgtagcaaggtgctcatggtcgccgtgcgcatgaccgtcgactactccttcgccaaggtctcggtgtcgctctcccccgcggggatcaagatcagcgcggtcgcgttcgccgaccagatgaacgccaacgctgagatcttcaggatcgccgccaccatgaacgtcctcatgctcttcagattcgccggaccattc

SEQ ID NO: 174992 - DNA, 664 bp, Zea mays
  Clone ID: MRT4577_91178C.1
cattgggtacctcgagccggcgggacttttcgttggcgttccccggagcccacacaccgccttggaccggactaattcttcctatcccgctaagacgactcctcccaggcacgcgacctgcagaatggccccctgctgcccccactcctagtctgatgcttcatcgattggttctactcctcactacctgcatatgcctgtccaaaatagctacgtgactacgagcacgcaccactccttttgctatctcatctggagcggagaaggaggggtgccattgccgaagttctcattgctgctttacgtacagggatgtcctacctgttgtcgcatttcgtgatgcacatgaacctcaacggcggcgattccatctacacttgcacggccttctacctgtacgcccaccactcaatatatgatgaagatgacatggatatccatgtttacaagggaagctgcacatctacatgctgcagaacacattcttgcactgggtcctttatagactcctctccagcagatattgcatctgcctccctgccaccaatgagtaccactactactcgcccgatgtggaacctctactctgtgcgtcgatctgtcttcttacatggtgccgatcctgtacgctctttgactatgactgtgtcacctggctttcttc

SEQ ID NO: 174993 - DNA, 231 bp, Zea mays
  Clone ID: MRT4577_91179C.1
gatcgtccgcttacacgtggatccgcctccactcatcgcgccgatgccgcatctcctctacaggtaacaaggagagaacgagggcgaactggtgaatcacaacaacgccatccccaaggggcacttaaagaacccctgacagatcttttttaagacagggtgcaaccatcccccccgtaagcacaggccccttattcacacttcaaatgaaggctgagaacacttctccca

SEQ ID NO: 174994 - DNA, 458 bp, Zea mays
  Clone ID: MRT4577_9117C.1
cattgggtacctcgaggccggccgggctttcattcctttctgaacggagtggacatgggtgggcttccagatccagcggcctcaccatcaccacccgacacgaggacacgcgacgacagggggagcagccggcgggcgatggtcggcggcggcgcacatggcggcaccacctacaaaggctacaccatcccacacaacaagcgctggcacaccgtcgccggcaagggcctctgcgctgtgatgtgggatcgtgacattaagttgcctactctcggcggacggtgatttgatgctttgcatgtcacaacaactaaagattgagttaataaattctatcacccttcatggtactcatgttgtatgcaactggtttagcacaaactggtttcgttacgattgtgcttatgtatttgatttgaagcatcggttatgtggaaaagaatctggtttatgttgac

SEQ ID NO: 174995 - DNA, 451 bp, Zea mays
  Clone ID: MRT4577_91180C.1
ggggcgttgtttctctctcagaccctcacctgccaggcaaccaaaccttctacgatgggcgcgaccgtgtcacaaccggcggtgtccgccagggcgtccacacggttgctctccccgcggaataggcgcgctctccggagtcctcccccacgtccctccggttatccgtcggtcgtcgtcgccgcgactccactctaaaggtgaaggcatcaggaaatgtgttcggaaactacttccaggttgcaacctatgcgcgaatctcatggacggggcgctgactcgcgatatcacgaggctgaccacccagaattcctctcactgaggcagatgtgcaagcagaactcgatagaagacgtccgtatcaaagtataattacgacccctataaaggagactgatacatgcaaaattctatcaaggacacatagatgggatgactactggaacaccaa

SEQ ID NO: 174996 - DNA, 362 bp, Zea mays
  Clone ID: MRT4577_91181C.1
aaaataatattttttttgttttttgttttttttttatttttttttcttttttttccccaaaaaaccccaaaactttcttttttcacaaagggatcccttagaacacatacccccaatccaaaaaaatccaaggttcaaacacccccctatttttgaaatctgaactaataccccataccaaaacacccactaaattatggtataaccctcttaacccttaaacccctttctgaaaacagagccaacaaagctgacccttttaaaaacccccaaaccttggacctgaactcaaaaaacccccaacctttcctacccacacccttatttttgccattttttaccccaaaaccaaccccccccct

SEQ ID NO: 174997 - DNA, 528 bp, Zea mays
  Clone ID: MRT4577_91182C.1
attcccgggccgacccacacgtcttagcttcatacttggtctcttgttaaactattgacaatgtatcttgttttttgttgaaaagtttagtacttgagtgtcaatcatacgtattcgcttgctaaactattgacaatgtatcttgttctttgttgaaaagtttagtacttgagtgtcaatcatatttcagagtcattgtgatatactgagcttggaggttttggccattgatctgcagaagttcaatacaattggaagaataagttaaaaaaaacgtggtccaaagtaaccttcagcagtaatgtttgtgtgctaaatgctcttccggagaattgtggtgatgcaaaccttgtaccaatgaatatactgtcaatctgctatcttttccgtggcctctaactcttagagtgtgtttggtttgagttgaggaattacttcatccagcataaagtggtgtatcgtgaatctatttcttaaatttgatgggttgatcttattacttgtgttttgagaagatagactagctta

SEQ ID NO: 174998 - DNA, 361 bp, Zea mays
  Clone ID: MRT4577_91183C.1
tccagattgcatcttgtgtgattgtggtacttcttctgtcctcaccagtgttcacctctccgctcgcatttttgcccattcccacggtctattatgccatccctctgtcagtggttaccactcccactgacttcctacctcaccattgccaaaacttctcaaggattgaccatccctcatgaccctctttccaccttcttttaagaacacctatacgacgtggtatttgaagaaatctactccaacccctgcttctcaagtggattaaaccatctaacttcgtattgaatagaatgatctaaaaccacttcactgcaacaaaatctatccccctttcattcaaccccttccttgtgtattt

SEQ ID NO: 174999 - DNA, 370 bp, Zea mays
  unsure (1)..(370): unsure at all n locations
  Clone ID: MRT4577_91184C.1
catcaatgcaaaaattttacagcccccacaaaattttgcttgggtcggggtttgtctcggagacgggtttacagcgtcacaaaagcgcaagcgctcagcttctctgagcaaaccaagaagaagaagaagaaaaaaaaaatgctctgccctgttacgttctggccatcacgattccactccaccgatggaaaacccgagacaatacctaatctaacttctttcagaagtggggatcacacctcagggatatggcgctcctctccttctctccgccggctctcgctgcgctcaccgttcagttcggcgtccttgacgacgctggccatggcgacttgttgttgcaccttgctcttnttntcctcctcctcct

SEQ ID NO: 175000 - DNA, 587 bp, Zea mays
  Clone ID: MRT4577_91185C.1
gggaaaattgggatgctgtgtgagtgtctggcaaaaagtgatgcagacatcctcagttgtgaccacttctgttgtaacacacaggtaacatacaatgcaatggatacttcgtcgaatcaactgctgttgtactccctcgtatccttaaacttaaaacttcgttctaaagaaattaatagattcatagaatacttgatgtacatgttttttatgtgtcagattcatcatcaaacatttgaatatacacataaaaaccaatagctaaaatgaatactattttgggacggatggagtattatttttgggtatccactgtaacatttttttggttaggagtcctccaattttctgaactatgtgaatgtaactctttttggttggcaaactttccatgccattttggcattttagcagcaaagtccatatggtgtatcatacatataagaatgaaacaggacttttaaaacaatttagatcaaattcaaattattattcaataaccagaagaagattgaaatgcaggagatccaaaaaaaaatgttcttttagaaaaatggcaatggacccatgaactaggaaatactgct

SEQ ID NO: 175001 - DNA, 242 bp, Zea mays
  Clone ID: MRT4577_91186C.1
agccctcagaccctcacacactcactatagactagccctgctgcagcaagagggacgaagctagcgtctccctagctctcgctgacagcaatggacaccaccgccgcgtccagcctcctcaagtcctccttcgcgggctcccggctcccttcgaccacgcgcaccaccaccccgccgtccgtggccgaggtccccccaggcgccggtggcggcaccatccgcgcgcccatcgcctcccccaa

SEQ ID NO: 175002 - DNA, 405 bp, Zea mays
  Clone ID: MRT4577_91187C.1
ccggccgggatcctacctctcgctccttcgtcacaggaacgcttgcagccccaatcccccacttcgactatggtcggggtcgcactgagtacctctcccagcaggagacgatgggcgcccataacgccgaggtgatggcgatcgcgaccccgatcgaaaactcgtctttcatacgcctcctcctctcgggacaagtctcgatgctggtgtgggacctgatcaagccgggccagctccaccccggaatccggcgtcccgactgctacgagcgtcgacttccgccgcctcaacggccactcccacttccgccaggacgtccgcctgtagtttcgacctgcagatagaactctctggatgcggggacgggaagtgccggcttatgctacctcgcctgcgttactacca

SEQ ID NO: 175003 - DNA, 917 bp, Zea mays
  Clone ID: MRT4577_91188C.1
atttccagcgaggctctagctggtactcgggcaagagggaagacaagggcagatgactttcaaatcggtcaggatttgcttctaagtagcaaagaggacatcgaattcactatagtacgggacagcatcaagaacaagctggaggcaagatgatctgtgatgaggtggttgtccatcccagcaaggctctgcggaaacttccaagagtccagcatctgtcagcgcagttagctgcgcgaataaggaacgaagatgatgagtttgagattctaaacaccctccatccgagtccagctgtttgtggcttgcccactgaagaggcacgccaattcatacgggattgtgaaatttttgaccgtggaatgtatgccggtcctgttggctggtttggaggagctgagtgcgagttcgctgtcgggattagatcagcgttacttggaaaaggtcacagcactctggtgtacgccggtgcggggatcgttgaaggtacaaacccatcttttgaatgggatgagcttgatctcaaagcatctcagtttgcaaagctgttgcggtaccaagaacgacctattcgctaccaagaggctgaaaatctgggaacggtgatctgaatagagaagtacagaagaaactagaaagtcatcacaaagttcggcattcatttagcgagttatttatacaattgtttgtttgatatagtaagctagaagggggattcagttggatttgtgtaattatggaatccagaacagcggcagtgctgaaaaatacattgattgaacctgaatgggaaattgttcaatgtaacaaaaatatgtttacaacataaattatttgattcagagcaccggcagtgttcaaaaatacattgattgaacctgaatgggaaattgttcactgtaacaatgatatgtttc

SEQ ID NO: 175004 - DNA, 474 bp, Zea mays
  Clone ID: MRT4577_91189C.1
gggggctgggaacaacgaacagttttttcagacttttttcactggaatttaaaaaactcaatagagatcgggacccacttcttcctaaaaacgggggactaacaccctgcctggccccccataaccattatgggcaggtgccatcccaactgcctgggggatacatggggcaatacccgcttttcatgcaaacaaaaacccccacgtccgagcccaactagacttaggccaattttggggcaaagttcctggaacttgactttgccgagtgggttggtcaaaatatcccccaactgtttttcaatactgatgaacttcaccttgatttgccctgaattttcatactcccgaataaaaagaaatctggtataaatatgctttgaccgggcgggatgcactggatttttaatcaacgaaataggggacttgttgtccacccttaacaaagggctgcttggctctgagttcctgatt

SEQ ID NO: 175005 - DNA, 760 bp, Zea mays
  unsure (1)..(760): unsure at all n locations
  Clone ID: MRT4577_9118C.1
acgcctgcaggtttcggtccggaattcccgggtcgacccacgcgtccgtctacagcgtcagcttcggtggcgaccccggtgcggaagagggccaggcccgcaagtcgcaactgcagaggcgattcaaggagttcctgagacagtaccgagtgggcaccgatcgcacgggcttcaccttcaagtacagagatgaactcaagcggcattacaacctgggtgaatactggatcgaggtggagatggaggacctggccagttttgacgaggaactggctgaccacttgcataaacagccggccgagcacttacagctgcttgaggaagctgccaaggaggtggcagatgaggtgacccggccccggccagctggagatgagctgctccaagacatccaggtcatgctcaagtcagatgccagcccgtcgagcattcggattctgaagtcagacatgatgtcacacctggtgaagatccctggcatcatcatttcagcctctgcagtccgtgccaaggctactcgtatctccattcagtgccgcagctgccacaacaccctcaccaatatcgccatgcgcccaggcctagagggctatgcccttcccaggaagtgcaatatggatcaggctgggcgcccaaagtgcccactggatccatacttcatcatgcctgnacagtgcaagtgtgtggacttccagactctgaaactgcaggagctgcctgatgcagtccctcatggtgagatgcccaggcacatgcagct

SEQ ID NO: 175006 - DNA, 589 bp, Zea mays
  Clone ID: MRT4577_91190C.1
cctcgaggccggccgggggacccacctgccacaaaaccaagtaatgttcgtgtagtttgatggtgatcggttctgtatgttatcaggtggtgctgggttcgattccttggcccaccatttaaaaaaaaaaaaaaaaaaaaaaaaaaaaaaaaaaaaaaaaaaaaaaaaaaaaaaaaaaaaaaaaaaaaaaaaaaaaaattctctagtttcccactccgttcggccaccagtttggacggcctcccctcccctcggttccggttcctcaaaaccccacccccccgaagaaggggggggggggcggcggcgaaaaagccaaaggaaaaaggttcgggggcgcgccaaaaaaaagcgacaacaccaagaactacgaaatcctcggggggcccaagtcggggccccagaacgacctcaaaaaggcctaccgcaaggaagttatcaaaaaccaccccgaaaaggggggggaccccaaaaagttcaaggagctcgcacaagccaatgaggttttgagggatccaaaaaaacgggaaatttatgatcagaatggggaaaatgcccttaagaaagaaatgggggggggggggcccca

SEQ ID NO: 175007 - DNA, 807 bp, Zea mays
  Clone ID: MRT4577_91191C.1
cctcgaggccggccggctcccgccccaaaaacagggctctctctcttctgccgttccgagcccaaatcgcggcggatccctcgctctccagggagccgctgcggcgccgggttttgtacaccgacttgtttgcctacctccagctcctcctcggcgacccatggctctcctcgcccccgccatctccggcgagttgtgctgttgggattggtctacctgtatactccactttcagagctatagagaagaaggatgaacaagagaaagagcggatgcttttgtattgggcagcatatggatcttttagcattgctgaagtgtttgcagataagcttctttcaaggtatgaacatctgacattatttaagtgtttgacattttaattgaagaagtattttttgtcatgatcatgaatagcaatgccagtattcattgagcactggtctggttgtaatattttgttctgcagccttgcgttattagactccatgtattctccttatcttttaaggaagaccttctggatagaattatttctttaggagtgatgcattgagagtttctttattttaagaaaatctttcagtaacttgctacattttttttttgtttttgtgctttacatttgaagtgtcattctgtttgtcttcatgacattcttatttcataacattgtgtgcgcacttgattattttactttacatttgccataagcaacacacctttttgtgctatcgtttgacatcagttaagtgtttttaatcttaccttagaatttaaaactatttggacatgtgtctgctgctg

SEQ ID NO: 175008 - DNA, 502 bp, Zea mays
  Clone ID: MRT4577_91192C.1
ggaaacaacaaacagttttttcaaactttattcactggaatataaaaaactcaatggagatcgggacccactacttcctaaaaacgaggcactaacaccctgcctgaccccccataaccattatgggcaggtgccatcccaactgcctgggggatacatggggcaaaaccccctttccatgcaaacaaaaacgcgcacgtccgagcccactacacgcacagccaacaacaaaccgggcgattgactttagttaacaaaaataaaacaaaccccagctaaaagcccaaggatttttttaacaattttcctcctaaaacttgggcatttacttacactaaacttaggccaatcttggggcaaagttcctggaacttgactttgccgaggggcttggtcaaaatatcccccagctgttcttcaatactgaggaacttcaccttgatttgccctgaattttcatactcccgaatcaaaggaaatctggtatcaatatgctttgacc

SEQ ID NO: 175009 - DNA, 870 bp, Zea mays
  Clone ID: MRT4577_91193C.1
gccgttgacggccggccgggcaggcagttgcaccagctctcctcctcctatccctagcccaccagtccagtccgcaagcatccctctgctttgcgcagtgctgttgggttttttcagcctccatggcatcgtccaaggccttcttcctcgtggccctcaacctggtcctcttcacggtggccaacgcctgcggcggcggctgcccgacgccaacgccgccaaccccgacgccgccgtcgccttcaaccggtggcaagtgccccaagcacgcgcttaagttcgctgcgtgcgccaacgtgctgggcctcgtcagcgccgaggtcggccacccgcccgccgagccgtgctgcagcatcctcggcggcctcgccgacttggaggccgccgtctgcctctgcaccgccatcaaggccaacgtgctcggcatcaccgtcgacatccctgtcaagctcagcctcattatcaactactgtggcaagaacctcccaagtggcttcatatgcgcctgatagatactctgatagatagctgcgcgtgtgacgtacttcgcatgcatgcagcccatgcattggctgtctccttctacctttttcttttgtctttgctttgtcatgttagcttggttctgaatgtagaagtactctagacaatgaagctagtgtgagtcaaatcattttcttttttgagtgaagcgtgttgcgttgcgtgcctatattatcttcttcaaggtctaggtaggctagctaggaactgcatgcagtgctatttgtctatgtttcctatcccccgttgtactcctttgattccaaggaaactgtgtgcccctgcttttatttcctttaattaaaactttgggcttaaagaattgat

SEQ ID NO: 175010 - DNA, 374 bp, Zea mays
  Clone ID: MRT4577_91194C.1
agaccattagctttatctactccagagcgcagaaaaacccgatcgacaccatgagggcgtggctcgctggcctcgctctcctggctctcggtgagagcgccaccttcacgcatacaagcggcggctgcggatgccagccaccgtcgccggttcatctaccgacggcggtgcatctgccaccgtacgattcacctgccaactccgaagcatctaccaccgccggtgcacctggcgtctgaggtccatctgccaccgtcggtccatatgccgccgccggatcatatgacgacgccaccatgccactaccgtactaaaacgtcacggcctaagacttataacaagtcacactcatgcacgtgccaacagacgcatac

SEQ ID NO: 175011 - DNA, 419 bp, Zea mays
  Clone ID: MRT4577_91195C.1
attcggctcgtggtgtggcacttgacccggtttttaggcgcgggcctctactcgggagcgggcatcctgttcatggagcaaggggcctgggagcttgtcaggggaagggtgcctactgtgctcggtgacagagctcagggggctcgcaagttcgcacaacataagagccttaagaataattactaaagcatcgcaggccctgtgtgtgcccaaacttacatgactttcatttacctcacaggacgtgtatcagctgaggaacctgctgagccagctgtattacttattgaagctacgaacggacagaggcagacacaacctggatctcctggggggttgagctttggaccactgaaactggcaccagctgatggtcttctagcgcttgacacggaaatagttcctctatgaggcccacg

SEQ ID NO: 175012 - DNA, 113 bp, Zea mays
  Clone ID: MRT4577_91196C.1
tcggctgaacatatagaggatcctcaaagagaacaccatgaacatgcgcaccagctctcatatactaactggttccgacaactgccaaggcctgtgaattgctgatgccctgc

SEQ ID NO: 175013 - DNA, 244 bp, Zea mays
  Clone ID: MRT4577_91197C.1
gacgagctcgccccggccgtcgggaccggccttcctcattgactcgaggcaacgaaggggccggatgggaaccacaaccttacccttaccccattagcccggccggcatgctggttcccgtctgctccgtcgcgcccagcttggtccccctctggccggtgacggcctcgcacgtcgtcgcgcgggttgcgcggagggtggacgtcggcgccgcgctcaagtcctacgccgactcgctcgtcgc

SEQ ID NO: 175014 - DNA, 412 bp, Zea mays
  unsure (1)..(412): unsure at all n locations
  Clone ID: MRT4577_91198C.1
gcaaaaggccacacactgctaggtctaggtgctagcagaagcagctagcgggcgggacgcgcgtggccggcggcagacatgtcgacgacggagccgctcctctcggccggcagcaatgatggcgaggcgtggaagaagcagaagcagaagagcagcggcgagggccggcggcgcgtgagcatcgacgaggcgctgtcggcgcacgcgggggagttcgggcggtggcagctgcggcacttcgtgttggtgtccgcggcgtgggcgctggaggcgctgcacaccatggtgatcatcttcgcggaccgtgagccggccacgtctggcgcccggcgcnngnncngngnncngggncccctgcgccggcgccggcgcggcccggnggcngngggccggcggcgccgggggcggcgcc

SEQ ID NO: 175015 - DNA, 372 bp, Zea mays
  Clone ID: MRT4577_91199C.1
cgtgcaggttgcaatcaaaaggctcggccaatgttcaggacagggcgtggaggagttcaggagcgaagccgtcctgatcgcgaagctgcagcacaggaacctggtcaggcttcttggatgctgcatcgacggagacgagaagctgctagtctacgaatacttaccgaacagaagcctggactccattatttttgatgctgcaagtaaacacctccttgattggccaacacgtttcaagataatcagaggagtatgtcgagggctcctttatctccaccaggactcaaggctgactataatccacagagacctgaagacgagcaacatactgctggacgcagatatgagccccaagatatcggatttcggcat

SEQ ID NO: 175016 - DNA, 639 bp, Zea mays
  Clone ID: MRT4577_9119C.1
cattgggtacctcgaggccggccgggcttttcagtcctttcatgaacggcagtggtacatgggtgggcttccagatccagcggcctcaccatcaccacccgacacgaggacacgcgacgacagggggagcagtcggcgggcgatggtcggcggcggcgcacatggcggcaccacctacaaaggctacaccatcccacacaacaagcgctggcacaccgtcgccggcaagggcctctgcgctgtgatgtggttctgggtcttctacagggctaagcaggatggtgctacgctcttgggtttgcgtcatccttgggatgggcatgatgaccactctcatggtcatggacatgggaatgaggcatcgtgacattaagttgcctactctcggcggacggtgatttgatgctttgcatgtcacaacaactaaagattgagttaataaattctatcacccttcatggtactcatgttgtatgcaactggtttagcacaaactggtttcgttacgattgtgcttatgtatttgatttgaagcatcggttatgtggaaaagaatctggtttatgttgatagttcagtacattgctttgcttctaaaaaaaaaaaaaaaaaagcggcctaaaaaaaaaaaagcgggcc

SEQ ID NO: 175017 - DNA, 478 bp, Zea mays
  Clone ID: MRT4577_911C.1
acaaggaaaccccattttttttcttattacttttaaattttatggggaattaaaaaacaacggggggggacaaaactttccatattggggggcctcccaaacatggtcccattgggccccccctttacaagaacccaatgggccccccctttacaggggggaccccttcctggggggggaaattttcggcccggccatgggtggattcaattccagggggagaccaccaaacctggctcgggaaaaaaaggggtttgcaaaccccccggccctggatgtcaaaaagggtgggctgacggggcccccgaggattcaagaaaggggtttacccggggaccgaggtctccatggggaccccctcggggtaaaacacgtcctccccctttttgggctcctcccacaaccccgggagggccctcctggaagttggggatgctctccagacgcgggggccgggcctttcacccggtgggacttg

SEQ ID NO: 175018 - DNA, 266 bp, Zea mays
  Clone ID: MRT4577_91200C.1
cacagaaattataaccaccggggaacgataaccaccttttttgcacaaacatggtttatcttaatgtgcaacgccaacttataaattatacttgtctatacaatgcaatgtgaaataaaaaaaacacatgcatttttcagcatcaatctattcaggtacatacacccttttcgttcccaaagacaatgaaattgggtatcattgccggtgagctaacttgcccgggacaaaatttgtggcctgggcccatgccttgtttttgactg

SEQ ID NO: 175019 - DNA, 579 bp, Zea mays
  Clone ID: MRT4577_91201C.1
ctggtcccctgcagtaccgtccgtattcccggtcgacccagccgtccggcgagccggcgccccttttttttttttttttttttttttttttttgctaaaagcatcctgtatttaatagaaagttgggccgctcgtgtttcgttgagtaacatgacagtgtttcatacagatgaattacacagaaataaaccaacctttacaagaaagcgctacatatatacattgtatacacaaacaaaaaagtggaaaataataatgataaccataccctcgtttcatcgctgacttgagagatggaccaagactgaacaatttcatgacaatacatgcagatgaaatggttcagctaaactggaactggtcccgatccttgattctgttcgcaaccaaacagtgagcggagccaggtccaaaagctcctctcatctgtttccttctggctcacttcccttgcagcagccatattcttcatataattaaccagctcctgagcccctaattttacaacttctttaggcctagtttggatactttgggattaggagtgttttggagggattggaaaagggtataaatccc

SEQ ID NO: 175020 - DNA, 683 bp, Zea mays
  Clone ID: MRT4577_91202C.1
gtgaggataaaaatttctgatgtttgtcaaaaacaagacatataccgtctcgtaaaagttattggaacacataaggttccagaaaagtatagtattggaaagaagatgacaaatgttgcacttgagatattgaatttaaacaaaaaggagattattacaatggatacaatatctaatcatgattttacagaggaggagtgcaaacgtttaaggcagagcatgaagtgtgatttaattagcagactaaaagtgggtgatatcctagagaaagccaagatattgcaatatgtaagagtgaatgattggtttgaaaatgaaaagcagaggcttgggcatcttcgtgaccgtgcaagtgaaactgggcgcagaaaggaacttagagaatatgtagaaaagctgcagcttctcaacgattctgaggaaagaactcgcaggattattgaaattctggaattgcatgttgactcacatatggatcctaattatgagtctgctgaagaaacagatgagaaaggaactggtatatatcttcctgtaatgttaatgcttcatgttgcatgttgattagtaaatatcggaatgtaactgtttctcttgcattgaataaatcttaagctgtagcataatttcatgtggtttgttgcaatatattctaaatatacatctactagaagtttctgcac

SEQ ID NO: 175021 - DNA, 655 bp, Zea mays
  Clone ID: MRT4577_91203C.1
gtggaggcggtgaccgcggctatggcggcggcggcgaccgtgtctacggtggtggaggtgaccgcggctacggccgcggcggcggaggcggctacggtggtggtggcggcggcggtcgcggctgcttcaagtgcggcgaggagggccacatggcaagggactgctcccagggcggcggcggcggcggctacggaggtggcggcggcggtggttacggaggtggcggcggtggccgcgagtgctacaactgccaccaggagggccacatctcccgcgactgccccgagaagatgcgctaggcgcggcgccaccgtcgcgtcggatccggcggagtcccatgtcgtctctcgcccgcttccctacccgctcaaggtatcgctcggctgactctgcctgaagtcgtcggagccagttatctatcagtagtagcagtgtcgtgtttcgttctcgtcgatgctatcgtatcgtaggtggtggtagcaagaaaagcaagccgtatggggctatctttagtagtttggatctgtgttggagcagtatcagtttctttctgttggaatcgtcagttgtatggcagccttttcatggatggctctgcctaatctatcagtcatgaactatctataatatatcaatgcaatcgtgtcggttggcc

SEQ ID NO: 175022 - DNA, 284 bp, Zea mays
  Clone ID: MRT4577_91204C.1
gctgatgtcaaatgctttagactgtaatgtctctgatacgcacaccaactacatgagggagtccattaggagtgactgaggttacgaattgatcataaaggatatcggataactgggactccattaccgaaagcacatcaccgcgtacggtgactgcaacgagcgactgcttacatgccgccacgagactctcgacatcaacacctgaagtctagtgcgtctggaatcagctctacgtctggtctgtacgacgatgacaccgagaaggaaggctgatgctactt

SEQ ID NO: 175023 - DNA, 109 bp, Zea mays
  Clone ID: MRT4577_91205C.1
tttcttcccaaacttcattttaaaccggaactggtacacagaaacgcatagtgttgatttaaatttatgtgcaggcccaacacaataaatacctacttaatgaacctta

SEQ ID NO: 175024 - DNA, 315 bp, Zea mays
  Clone ID: MRT4577_91206C.1
ctttcacgtagggggagatctcaccacctcttcgagtggaacgacctatatgtttggcgccggtgatcgacacagcccatggctttggggactgaactcggaggtcactagaaggttcttatgatatgcgactgggggcagttgacccgaagggtggtttcacaatatgggcagtggagttatgacaagcgggaaacaattggggcaattctgagagcaagagaactaccactgtgaacagtttttgtcggggtcggagatgaaccatgggacatggtgcaccagtttgatgacaatattcctgttggggaattt

SEQ ID NO: 175025 - DNA, 339 bp, Zea mays
  Clone ID: MRT4577_91207C.1
aaaaaccgggactttgggttaaatgggggccgggccacacaaaaattgtccattccttgggacaaaaatgggcaatccagttacaggggaaacacttgtctcttataagggctgggaaaaaatttatttacaacacaggcttcgtgtacaagggggtgggaacaattcaacccaacacagggcaccggggaaaaattttttatgccaaccccccaaagttggtgggccccaacccccatttattttgggaccaggttgaaaaagaacacttttgggacaatattactgttggggggggggcttcctgggggggctttgccgggaaattccaaaccccgg

SEQ ID NO: 175026 - DNA, 233 bp, Zea mays
  Clone ID: MRT4577_91208C.1
ttttttttttgcattacatctagaatatataatatctcaataacttatatatacaaatatgtattatacgattatgccggaatgacatcaaagaaaaacccaagcctgaaacgcactcacctaatagggtattatataaaatttaacaaaaagatttaaggacaaaatttcaaaaatcaataaatataaaataaacataatctatttcatataattgtttccataatacgatc

SEQ ID NO: 175027 - DNA, 1279 bp, Zea mays
  unsure (1)..(1279): unsure at all n locations
  Clone ID: MRT4577_91209C.1
ttgggtacctcgaggccggccgggatttgcgcaccacaaaggaggaaaaagtgaggagaaagaagagaggaaacaggaaagagtacaactcggcggcgacaccaccgctcgcagcctcccgccgcgatggcgatgcgttcgctcgccaggctccaccgccaactctccccttctctcctccaccgccatagcacacggcgtgggtggcctcccgcttctgacgcggcctttctctggcgcgggctcgcctcgtcatcaccttccgcggccggtcgggagaagagctcgagacggactttggggtaccttctcggcgttgcggtcgccatggtcggcgcctcgtacgccgccgtaccgctataccgtcgcttctgccaggctaccggctacggcggcaccgtccaacgacgcgagagtgtggaggagaagatctcacggcatgctcgagacggaactacgacatcacgagaaataattgttcaatttaatgctgatgttgctgatggaatgccgtggaagttcatccctacacagagagaggtcagggttaaacctggtgaaagtgctcttgctttttatactgctgagaatcgcagttcagctccaattactggtgtatccacgtataatgttgctcctatgaaggctgcgatttacttcaataagatacaatgtttctgctttgaggagcaaacacttcttcctggagaacagattgacatgccagtattcttctatatcgatcctgagtttgagacagaccccaaaatggacggggtgaacaatatcgttctttcgtatacattcttcaaggtgaacgatagttagaaaacgtgccaacagcattgttgtattaggaaaacaacacttgaacaatccatatgcagatatgctgcggaatagcatctcatgtaacaccaagagttttttttttggtagttagctcacatttgtctatggagaattttgcaaataatctataacggtgtaaccgatggccaaaaaggtcaatgtggctgtgaagtggcaattgtgtgttattcgctttttttacatgattcacatatacctgctgtgtcttcttgaagctgagggggttatcattgatataaaactgatatgtgatagaatggggcactttaccacaacagggtgtattactccaatacttctggggatatttataggctattctanattgcgaggtgtgtgtgttctcccatgagtgcaccttttttgtgagagcattctgggatggacaaattgtggtcaattttaa

SEQ ID NO: 175028 - DNA, 1151 bp, Zea mays
  unsure (1)..(1151): unsure at all n locations
  Clone ID: MRT4577_9120C.1
ggccgggaattttatcccaagcaaaaaatcccagctcccctccgcatctccgttcgccatggcatcctcctccgagccctcggcgctgccgacgctcctggtgttccgcgtccgagagctgcggttcctcgcggcgctgcgcgagcggtaccgcgtcctcgacttcttcacgtcgggctcgccgctcgccgccttcctggccgcggcggccggcggcgcggacccgccccgcgcgttggtgaccgtggggggcgactccgtccgcgtggacgccgcgctcctggacgccgtcccgtcgctccgcttcgtccacagcacgggggccgggctggaccacatcgacctcggcgagtgcgcgcgccgcggcgtgggcgtcgccagctccggcacggtcacntccaccgacgtcgccgaccacgccgtcggcttgctcgtcgacgtgctccgccgcgtgtccgccgccgaccggttcgtccgccgcgggctctggccgctccacggcgactatcccctcggcacccagctgggcggcaagcgcgtgggcatcatcggcctgggcaacatcggcacgctgatcgcgaagaggctggcagccttcggctgcgtcatctgctacagctccagaaagcccaaggaatccgtctcctacaggtacttccctagcgtccacgacctcgcgtcggaatcggacgtgctcgtcgtcgcgtgcgcgctgaccagggagacgcgccacatcgtgaacaaggacgtgctggcggcgctcgggaaggacggggtcgtggtaaacatcggccggggcccgaacatcgacgaggcggagctggtcgcggcgctcaaggaggggaggatcgccggagccggcctggatgtctttgataaggagcctaaggtgccggcagagctcttctccatggacaatgtggtgctgacgcatcacgtcgcggtcttcacgacagagtccaggtccgacctccgtgacgtcaccatctaaccttgaagctttcttcgccggtaggccgctgcttaacccggtgcttcactcttgatggtttgttcgtgttattgcagcaggtcgatccatgtacgtgtaggaatgtgatttgttgaatacattttattttcgacccaatataattaaagtttgtttgggg

SEQ ID NO: 175029 - DNA, 372 bp, Zea mays
  Clone ID: MRT4577_91210C.1
caccacagcttctgaccagcgctaccctcgaggggtcggaaggcggccaagaagccgtcggtgaataaacctgcagaggaggagcccgcaacagaaaaagcggagaaagctccaacggcgtagaagcccaaagccgcgaagcgcctcccggccgtcatgtgcgactttttggagggctgcctgggcattaaggggaaatagatagcgaataagtccgtggagacctacaagatctacactttcaaagaggcttaagcaagtgcaccccgacatcggatctggatcacaggcataagcatcattaactccttaaataacgacatattcatgaagctcacagcctgagacgccaagctgacgcgcctataacaa

SEQ ID NO: 175030 - DNA, 146 bp, Zea mays
  Clone ID: MRT4577_91211C.1
cgcgcgtaaccaaccagaaactttaggatgattacatacagatcctgacggaggggtatatatactgtttgatccgtggagctgtgctgatcacttgcttacttagccagtatttctttcattcaaggctttacaaagaactatgg

SEQ ID NO: 175031 - DNA, 1296 bp, Zea mays
  Clone ID: MRT4577_91212C.1
atggcccgccaacttcaggcagggacctaccccaagtacaacggcagcaccgacccagcacaatacatcatgagctatcaagtcgctgtcgcatcatccggaggggacgacgctacaatggccaagtctttcatcatcgccctcgagggtccggccttgacctggtacaccaggttgcccccattgtccatcgattcctggaaaagtctccgagacaagtttctgctcaacttccaagggtaccgacccgacaccgatgcattggccgagctatcactctacaaacagcaagagaaggaaaccctacgggagtactaccgcaagttcctgactctcaaccaagcggacatcatcttcctgcacgccttcgaccgcatgggcatcagccacagtttactcaagccttcggacaaccccttatatggcttcgacggcaaaggcaccttccctgtgggcatgatagaactacccctgtcattcagcgtagcacccaatgcgcgaagcgaacaggtcactttcgacatcgtcgacatggtctatccctacaacgctataatgggtcggggctccatcaacaaattcaaagcggccattcacggattgtacctctacatgaaaattctgggcccgcaaggtgtgataacggtttacgacaaccagcagactgcgcgcaacatcgagagagacttcgttctaggacaacggaatgtacactgccttacaacacagcgcgaagtctccaaggtgacccgcccaaccaccgatgaaaaagtaaaagcacagctgcaaagcaacgacggaacaaagacggttcccctcgacctggcgacccccaagcaaacggtcgtaataagcgaagacctgacttcgcaagacgaggagaaactcatctcctgtctcttcagaaacaaggacgtcttcgcctggtccaccctcgacctggtcgaagtcagccgcaccgtcatcgagcacagtctgggcatcgacccttcggtgcacccaaaaaagcagcagctacgcaaaatgtccgatgaaaaaacagaagccgccaaagccaaagggcaccgcctgctggaggccaatttcattgaaccaatcgcctaccctacgtggctcgccaacgtagtcatggtacaaaagaaaagcgacaagtggcgcatgtgcattgatttcaccagcctcaataaggcttgtcccaaggacaatttcccgctaccacggattgacaagatagtcgataatgcagccggatgcgaagtcatgtcacttctcgactgtttctccggctaccactag

SEQ ID NO: 175032 - DNA, 387 bp, Zea mays
  Clone ID: MRT4577_91213C.1
ctgatttggcgtcggatttttgtttgtcatctgtcattcctgtgctgatctgaattgctgtttgtttattattattattattacaattactatcaattaaaaaaaaaaaaaaaaaaaaaaaaaaaaaaaaaaaaaaaaaaaaaaaaaaaaaaaaaaaaaaaaaaaaaaaaaaaaaaaaaaaaaaaaaaaaaaaaaaaaaaaaagggggggccgttttaaagaatcaaagtttacttacccgtgcatgcaacgtaaaaatttttttatagggccaccaaaattaaattaattggccggggttttaaaacgttggaattggaaaaaccctggctttaccaaattaaatggctttgaaaaaaatccccttttcgccagttggggtaatac

SEQ ID NO: 175033 - DNA, 311 bp, Zea mays
  Clone ID: MRT4577_91214C.1
taattacgggggtattttttttgagaaatgctgctgcatcacctaaacagcgggggaaagcaagccccacccggatgccttttttaatcggcccagagttaccgaccatggctcggggctgacccccgggcacccactcgggtaagcaaggacacaacacgctccgagggaggcactgtcgttcccaagctaaaggaatccgggtacaaggggcacacgcaccatgaagggattgcgccagaaaaaaacacactgaagaaccaccaggggggaaaaaatcccggaaaggggcaaaggccaacctcagggac

SEQ ID NO: 175034 - DNA, 543 bp, Zea mays
  Clone ID: MRT4577_91215C.1
taggggccttttttttttttttttttgcccatcaaagctgaccatcagattggcacacaacaaaatacgtacaccatgacacgcgtacaaataccactcgactaatcagttctagatatccaacacgttactactctccaggcataattggaaatcagcttaaccacaggcgactccaacggaacctattatactcatccctccgcctaatccattcaaccatacctgagcatacatacacatgcatcaactaaatcgcagcgagcaaattacacctcacaccacctgcccgaatcggatttggattgcgcacgtcacccaatcagctagcactacatcgtataagaacatgacgacgtgcgacacctactacgccaaggattgatgtcagccccaccggtgctgcgaacatcggggggaccacccaacgccaagacgtccgggctgctgctgcacctcggttcacgtgaccccaaggggctgtcgtggggaggagaagacacggaggagccccagctgccaaggatggcgtgaagggcgaaa

SEQ ID NO: 175035 - DNA, 476 bp, Zea mays
  Clone ID: MRT4577_91216C.1
aaaacacaacccgctcaaaagggggttgggcataataggggtccccaccaaaggggaaatttcatgggccttttctgggggccccgtttattaccgggcctaaccgaccccagtctcccataaacctgggcaaatagcaccaaattttctcctagaaaagaccccatttaaatggggaacggaacccaaaagctgggggcggccaccctgccccctatctaatatcactttcaccatcacccttttgtttcttaaaaaattcgctgggggctcatattccggatagcttgggtattgctgacaaacttgcccactatcgctggcaaatatttcttggccttcttcaccatgacagggagggagttcatttgctctccaaaaacagggttcccacttgatatagaaagggccgttccccataacttgaaaatgttttcaacttggcagtctaacacatttagcatccttttaactgg

SEQ ID NO: 175036 - DNA, 293 bp, Zea mays
  Clone ID: MRT4577_91217C.1
cggttgcattgtaagtattgattgtctgagggcttgatgttttctaagtgtggagcctgtttgtgaatgtattaggggaacgagcttcctgatagcacagccatcttacttttcttgtctacaaaaaaaatgctaagtccttttttactcttactggatccagttttgaactaaatttataaattagcaatcactgcttcttagaacagcagtgactggcattgagatcacttgtcaatgcctgctggccccacagcctgacagctattgtctacggaatagtcctgggttct

SEQ ID NO: 175037 - DNA, 263 bp, Zea mays
  Clone ID: MRT4577_91218C.1
gcgtccgcacagaaatccgcagacgcttgggaggtcacatcgccgtgaccgtcggttgtgcatttcctcaatttactgctatcatgtgcgccagatagcatttttgtttaagtcgtggatcggggtggaaacattccatataatttttcgtttcgtattgacaccaatgtcgtcatatcataaaatcatcccggggaatctttctaatatctgtcacactatccgaaagaacacgcccctttaatcagtatcatccttatatt

SEQ ID NO: 175038 - DNA, 420 bp, Zea mays
  unsure (1)..(420): unsure at all n locations
  Clone ID: MRT4577_91219C.1
gtgttttttttttttttttttttttttttttttttttttttttttttttttattatgaccatgcctatattattgggcataccacacatgataatgggggggggcttactgcattattacatatatanatagaaagagatgggggggggggggggcccaaatttcattaatcaatattaggggggaatgggggcggagaccccacaggggttggggcgggagctgggcaactggtactgggggagtccacccatgggcgggatgttctgcgccctcattatgggcatgggggtgagaccctgggctgccagcagctgctgctgcttctgcatcaaagctggcttgtccaggctgtttctgggggcggcggccccctcaagctgcgttatcatttgcagcttctgcgccccgggctgcccc

SEQ ID NO: 175039 - DNA, 614 bp, Zea mays
  Clone ID: MRT4577_9121C.1
ccggccgggatctgctatttgggctttcatgaacggcagcggtacatgggtgggcttccagatccagcggcctcaccatcaccacccgacacgaggacacgcgacgactgactaggcgaggggagcagtcggcgggcgatggtcggcggcggcgcacatggcggcaccacctacaaaggctacaccatcccgcacaacaagcgctggcacaccgtcgccggcaagggcctctgcgctgtgatgtggttctgggtcttctacagggctaagcaggatggtgctacgctcttgggtttgcgtcatccttgggatgggcatgatgaccactctcatggtcatggacatgggaatgagagatcgtgacattaagttgcctactctcggcggacggtgatttgatgctttgcatgtcacaacaactaaagattgagttaataaattctatcacccttcatggtactcatgttgtatgtactcatgttgtatgcaactggtttagcacaaactggtttcgttacgattgtgcttatgtatttgatttgaagcatcggttatgtggaaaagaatctggtttatgttgacaaaaaaaaaaaaaaaaaaaaggcgccgcggcc

SEQ ID NO: 175040 - DNA, 502 bp, Zea mays
  Clone ID: MRT4577_91220C.1
ccacgcgtccgcatcggccgcgctcttggtgctagccctcgcgctagtggcggtcatcgtcccacaggtagcggaggcaaagaggaagagagcggtggagagcggcgaggcggcggatgctaataatatccatgacgtcttctgctcgacgctgtgcgagggcaagaaggggacggacctggtcgtgcgcaaggagtcctgcgcgctttaccagcagtccaacctggttgctgtacggtatgatccagtgctagggcacgtgctccgatcagattggcattactgtgccggccatgaaggtctgtcaggaggagtgcgacaaggccttcctggtgaaggcggccgaggttaccaaggcctgcagcgtctcctgcgccttggagaagaacccgcgccttagttagtaactgtatgaggtcctgcaccccttcttctttttgaagcgaagcccccttgaaatgaatgaaccatgcatgcatgcattttttgcttgccctgggtg

SEQ ID NO: 175041 - DNA, 2938 bp, Zea mays
  unsure (1)..(2938): unsure at all n locations
  Clone ID: MRT4577_91221C.1
cattgggaccctcgaggccggccgggaaaacgtccgcagattgtgcagcaccctggtctccctcccttcccaatcccctatcccgttactttccccggctccaccccaaaccctaatacgtcatggcgctcactacacggggcggcgccggcggcggggatcccgcgaaggcgccgtccgcctccgaccccagcctcggcttcctcaccaagcgcgataccgaggtcaagctaccccgcgcaacgcgggtcaagaacaagacccccgcgccgatccagattacggccgagcagatcctccgggaggccagggagaggcaggagcctgagatccgcccgcccaaacagaagatcacagacccccacgagctctccgattaccgcctccgtaagcggaaggagttcgaggacgtcatccgccgcgtgcgctggagcgtctcggcatgggtcaagtacgcgcggtgggaggagcagcagcgagacttcgcgcgcgcgcgctccgtctacgagcgcgcgctcgacgtcgcccaccgcgaccacacgctctggctcaaatatgctgaattcgagatgcggaaccggtttgtcaaccatgcccggaatgtctgggaccgcgcggtgtcgctcctcccccgggtggatcagctctggtacaagtacatccacatggaggagctgcttggtgcagttgccaatgcgcgccaggtgttcgagcgctggatgtcttggcgacccgacacagccggctggaattcttacatcaagtttgagctgcggtacggggaggtcgagcgtgccagggctatctttgagcggtttgtagctgagcacccaaggccagataccttcatccgctatgctaagtttgagatgaagcgcggcgaggtcgagcgggcacgtcgggtgtatgagcgtgcagcagacctgcttgctgatgatgaggatgctgaagtgttatttgtggcatttgcagagtttgaggagaggtgccgcgaggtcgagcgagcacgtgcaatatacaagtatgctctagacagggtgcccaagggtcgtgctgaggaactgtataggaagtttcttgcatttgagaaacagtttggtgaccgtgagggaatagaagatgccattgtgggcaagaggagatttcagtacgaggatgaggttaggaagaatccactaaactacgactcatggtttgattatatcaggctggaggagagtgttgggaataaggacaggatcagggaggtgtacgagagggccattgccaacgtgccccctgcagaggagaagcgatactggcagaggtacatatacctctggattaactatgcactctatgaggagctagacgcacaagacagagaacggacaagagaggtttacaaggaatgcctgaggttgattcctcacaagaaattcacgtttgcaaagatgtggctcatggcggcccagtttgagatacggcagagaaatctaaaggctgcaagacaaattcttggaaatgcaattggaatggccccaaagggcaagatattcaagaaatatattgaaattgagctttatctgggcaactttgaccgttgtaggactctttatgagaaatatattgaatggtccccagcaaactgttatgcctggaggaagtatgccgaattggagaagaaccttagtgagactgatcgtgctcgatcaatatatgaacttgctattgcacaaccagcccttgatacaccagaggttctatggaaggagtacttgcagtttgaaattgatgaaaatgaatttgagaggacaaggcaactatatgagagactgcttgataggacaaaacatttgaaggtatggatcagttatgctgagtttgaggcctctgctggcttgggcggtgaagacagtgaagacaaggagaaaaagaatgaagttagttatcaggagcagcagatggagcgggttcaaaaatgtagagctgtctttgaaagggcatttgattacttcagaaccagtgccccagagttgaaggaggaaagagctatgcttcttgaagaatggcttaataaggaggtgaactttggtgatcttggagatgtcagcttagtgcaaaagaaggcaccaagaaaagtcaagcggaagagaccaatccctacagaagatggctccactatagcatatgaggagtatatagattacattttccctgatgaagttgctctagcaccaaacctgaagatcctagaagctgcttacaaatggaagaagcaaaaaactggagatggcgatgagtgatcctggcatcttagtatggcattgtcgtggttcgtgagcattttgccacagccaaaatcagatgccctgcaacactctggccagagctatcggaatgagaatagtcattttttcatgtcacaaaggatgttgttgctgttgaaaagaatcctgcgaattacatttaacttgtaactgtatgggctgtagtttggtggccatgagttgcttccatgcgtcggaacaatgagggctacacaagtcgagatggtgtatgggagtttgtcttgcaattgcaaaggtatctctccagtctatgctttttatgaagtcagtaaactgggcgtcttcgacttcaatcgctggccatgccggtcacgctggtgtccagggttcagttggagggcttgcagttgcagaagatcctaccagcaaaacgtcatcttcagtgcctagcagctctgtttattagccagtgaggcttttggttcctaatagtctgttgccaagtttggttcttggcagagctaatttattagaaagaaaaacaagaaaagtacaagacaaccaaaaaaagcaaaaggaaagggaagggggccagctatagtaaagcgaagaaatcatgttcttttaaaaaaaaaaaaaaaaaaaaaaaaaaaaaaaaangaggaaaa

SEQ ID NO: 175042 - DNA, 1624 bp, Zea mays
  Clone ID: MRT4577_91222C.1
tggaatacagaaatgtggccctggccagcgccattcctgggctacaaatcagtaaggataatccagttcagtccattgaactacctggaggcggcatctatgctccgttcctaacgtctgaccagggtaacgggcaagtgaatcacttcttcgccctcattgatgccaatccaggtcaagtggactatgttcgttttgccaatggcacctatagctttgaagatagtgcctttggcgatcgagatttcaatgatctgcgatttgcggtcaatattttgccccagggaggtttcgttcccccagccattggcctcaccgctaacgcgggagttttcaccgccaatgggctcgttgatctcaaaaatggtggagcaacggcgagaagattttcgccggacttatccactcactcaccgaattcaactaggcattgccctatccggccggtttggtgtggactacatcagagatttgtccgagagcgacactaatggggccttaggaatcggattgtgcattgatagcatcctgaaacttgaccccgaaacattccggggccatgacatcatccttgatgaatgcgagcaattgatatgggaattattagatagttcccggggaaacctgggcaaacataaaccagccatcttggcccgcttccaagaaatattgatcgccgccgctgattcggggggcaagattattttgtctgatgctgatttgtccccggtgactatcaagtatgtccaagacttaatcggtggtaaggcagaatgctatattgtcgttaacacgtttaagccagtgcaggataagcgtaatttgattgtttataattccccggaagatttgcttacttccgctattaatactgttgctaatggtaaaaaaatacagatttgcaccggggcacaaaaagcacagtctatctattcaacaactaacctaggggacttattcaaaatgttattccctgataagtcagtaggggtcttagatgcccatacagtaagcgataagactaaccctgcctatggctgtatggataacttagatagatatttagaagacaaggatattgtcatcacgtccccggtaatagagacgggaatcagcattgataagccctattttgatgaagtctatggattcggacagggaacacaaacagtagagcaattctgccaaggattagaaaggtatcgtcccgatgtggatcccaaccggtttaacgataattaccgccgttacattgaaaagcaattccgtaaacaactgggcttttttggctcccccattcgattattctggcggggtaaaaaagtgagggaaatggagggtagtcgcaaccgggctaccaaagtctaaaacttaaaacagttgacaatttacagggatacctaacaattgtcattgttggatcacaggaatctttaagagcgtgtttggaaagttttattccgccccctaaatttcctcactgaagctccgacaatactgggggactttcactcagttttcccttaaatttggggggtcggggggcttttaaaacactctctaatgtcaccgaagaaagtattgacaaaattaggtattgtccccaattagtcctctaaagctc

SEQ ID NO: 175043 - DNA, 202 bp, Zea mays
  Clone ID: MRT4577_91223C.1
ccagcatcagttcctatgctcacctgtccaactgcgacggcgataagcacgtcttccacatgactacgacggtatgacacgaggtcacgaattcctcgtcctccagccagcctatatacctccgttcattctgccacgggctctgctccgcctggcggttctgtttcctgtagctcctcacgttcacctgcagctcgagctc

SEQ ID NO: 175044 - DNA, 310 bp, Zea mays
  unsure (1)..(310): unsure at all n locations
  Clone ID: MRT4577_91224C.1
ctatcacgtcccatgcacgcctacctaagctttgatcctcttacacggccggccgttttgtggttttaaacaaccctcctattattgaaattatgaacacccatttagccaaccctggtttttgttacatatcgcatccacctctatcatgctaaacttcacactcttgacagttaaaacgttggaaacaaatcatatctactggggggctctataccactcannacatctctctactaaaattacaangcttcaatcaactcatcacctatttcttaaccctcatcttcacccttntcttctncatact

SEQ ID NO: 175045 - DNA, 228 bp, Zea mays
  Clone ID: MRT4577_91225C.1
aattcggcacgaggctcgggtccctgccagaaataaaaaaaactgctcggttgctgctcctgctccgccgcgccggcttcatgagtgtgatcttagccgagcttggttgctccgactggactcaggcaaagagggcctcgccatcgctctcctgctgcagaaggttaaaacacaggggccgggagtgggcgggcctctactttcacgagggcaacttcctagtgcagc

SEQ ID NO: 175046 - DNA, 201 bp, Zea mays
  Clone ID: MRT4577_91226C.1
cccacccgtccgccaacccgtccgggggggtcaacccggccggtttcaaccccctcttttgaagaagcggcccggacctttgttaccctagaaggaaggccccggcggccaacaagtccccggggaacgtggcgttccgggggcccggaaacaacttccccccggccttcccaaggttcgaaaaggccaaggccccccaga

SEQ ID NO: 175047 - DNA, 250 bp, Zea mays
  Clone ID: MRT4577_91227C.1
cccacacgtccgaggacgcgtgggcggacgcgcggggcgagccgcaacttgtggtctatggctcgcaaggaaactagtgtgaatctgtagtgcatgccaggactaataacctggatgagactgacatttctaccgtgtcactcgcaactgcagataaccattagctacatcggagggtacagttcatacccgtatatagcgtaaatgtgatgtaaatgcagtgggcatgacttccgcaaagtaatcctga

SEQ ID NO: 175048 - DNA, 332 bp, Zea mays
  Clone ID: MRT4577_91228C.1
tttaagcagtggtaacaacgcagagtacttttttttttttttttttttttttttttaggcggtgaattttaacacattttaaaactttactgttaatacaagagttttggtatttcttattttttgttgcagaaaataggtttcaagggaaaagcaaaagcactgaaacaaccatataaaggggttaagcaagcactattttttgaaggtgtgctaattagggctcaaagaaaggaccttcccagaaaactaaagagttgttaacaatgcataaaggcgtattatggagacatcgatcctcgtggggggtgaaaaagaatgcatttaggggg

SEQ ID NO: 175049 - DNA, 284 bp, Zea mays
  Clone ID: MRT4577_91229C.1
agcacgcgtgggagacgcctgcatcgattgagccattactggaacatataacctttcgtgacgttatgcttgtacatccaaaacgcaacttatgatctgacatcatattggctactaacactcatctacatcatgcgatcctgcgcctactgaagatactgacatcattcaaccgattcagtttaccatcatcaactacctgctgtacgaagagactgaataaaatgaatagatggctaggggcgaacctattgggatgaaacctccttccaaaaaagcggata

SEQ ID NO: 175050 - DNA, 1498 bp, Zea mays
  unsure (1)..(1498): unsure at all n locations
  Clone ID: MRT4577_9122C.1
cccacgcgtccgcccacgcgtccgcccacgcgtccgcccacgcgtccgcccacgcgtccgcggacgcgtgggcccgttgtctgcacctttggtgtcgtgtntgccgatgtgcttggcttgttttttcgtccgggcttcttgcattaataggaacgttgccctgcttattgttgatacctggcctgttcttcattccggaatctccaagatggctggcaaggatgaatatgatggatgagtgcgagacttctctacaagttctgaggggggtggacgctgacatcactgcagaagcgaatgatataaagatagctgtagcatcggcaaacaaaagtggtgcaatgagctttcaagagttgaaccagaagaaataccgcacgcccctaattctaggaatgggcctacttgtgttgcagcagctgagtggaataaacggtataatcttttatgcaggtagcatcttcaaagctgcagggctcaagaacagtaacctggacacatgtatacttggagcgattgcggttcttgccactgctgttacaaccatgatcttggacagagctggacggagaatcctccttattatttcttcttttgggatgaccctaagccttcttgtggttgctgttgtattttacatcaaggacaatatttcacatgactctgacttgggtaacaccttaagtatggtgtccttggttggtgtcttggcttatgtcactgccttctcctttggtatgggtgccattccatggatcataatggctgagatccttccagttagcatcaagagtgtggcaggaagctttgcgacccttgccaactggttgacatcctttggaataacaatgacagcaaatttgcttctgacctggagtgctgcaggtacatttgccttctacatgatggtgagtgctttcactctcgtctttgtcatcctttgggtgccggagacaaagggaagaactctcgaggagatacaatggtccttccagtgagctccagtatttcatctatatatgcataaatagcgtggcaaatcctccaggaatctataaaaagatatagtgaaatatagcagaagctatttcatttagcaatttttatagtttaaatggaatttcgctattgattctgcatgaaaacatgtaaataaggaaatttcatgaacataatactcaaatacatgtacaggcctgtaaaagaagatgtctctagatccattactttaatattcgtggaatcatagccagaagtataagctagtgaggggaattgtagatcaacgggaagatggtgatattctgatacaatgatttttatactgagttttggtggtttgtcaaccacaaaaaaaaaaaaaaaaaaaaagtcgctttagatactcctaccacgccgttgcgacacatcctttcttccccctttattctcgttgaggcaaaaaaaaaaaaaaaaaaaaaaaaaaaaaagggtggcttccggacgcgtgcgtggaccc

SEQ ID NO: 175051 - DNA, 397 bp, Zea mays
  unsure (1)..(397): unsure at all n locations
  Clone ID: MRT4577_91230C.1
ccggccgggatgccgcgcgctcttctgcacagcccacgcgctcgaaaccctacttctctggcctggtctcttccgtccccgcaggggagctacacatgtttatcgcggctcccgtgcccaaccacagtagcgggacaaagattctcgcgagagaagacggttgctaccgcgagctaaatgagatgcgtgacgcgggatcgtgtaagaggatggctactctggcggagctgagcagcgccgcgcatgctcccactgaaagcattataggccatactggcacggagaacctgctggttcaaggacatcgacgtgacgatccgcttacctgcggggggcaagacaggtgcaactctgcgcgattctggcgggnagtctttacaggggcgtagggccgtac

SEQ ID NO: 175052 - DNA, 2531 bp, Zea mays
  Clone ID: MRT4577_91231C.1
gttatcttgctcgaggccggccgggatacttgtgattgtcacggcctggccttcggcgatcccatattccccttcccatcccatcccttccgcatcgtccccgaacgacgcagacggacgcaaggcacggcgccgacatctcccccgaggcccgagggcccagacatgaaggccctgggcgcgcacgccgccgacctgctccgaggcccgcacctactccgcgccgccgtcttcgctttcgccgttgcgctcgccttcttcgttggctaccactggcccaacgcctccccgcgccttgtcttcttctcgtccgacgcctcctcgtcgtctcccaggccgtcctcccgctctccttccgtcgtgctctcccctaactctaacgtctccttcgacccatccctgatccctatccccagcaccccgcctgcttcttctactcccaatgcctggtccccgccctcactaccaccgccgacatcggcgccgccgcctcccctcccccctcctccaccaccagcgcgcctcggcatcgtcggcgaggacggcgctatgcaggacgacttcgacatcggcaacgtcggcgccaacgacactgatctggccaccgacgagaccgcgccgcaggagcctagcgacgtgggcgccagcggtggaccacctagggtgcggattgagaggttcccggtctgccccgagagcatgagggagtacataccctgcctcgacaacgaggatgatatcaagcggctgccctcgacggagcgcggggagcggtttgagcggcactgccctgccaaggacaagggtctcagctgcctcgtgccggcgcccaacgggtacaaggcgcccatcccctggcctcggagcagagacgaggtctggtttagcaacgtgcctcacacaagattgattgatgacaaaggaggacagaattggatcaccaaggtcaaagataaattcagatttcctggaggcggaactcaattcattcatggagcaaatcaatacctagaccagatctcccagatggtaccaaatgttgcatttggatctcatactagagttgtcctggatgttggctgtggagtagcaagttttggtgcatatttactttcacgtgatgtcctgacattgtccatagctccaaaagatgttcatgaaaatcagattcagtttgctcttgaacgtggtgtgcctgcaatggcagcagcatttgcaacgcgccggttgttatatccaagccaagcgtttgatataatacattgctcacgctgccgaataaattggacccgtgatgatggtatcctgctcctggaggttaatagattgcttagagctggaggctactttgcttgggcagcccaacctgtttataagcatgaagaggcccaacaagaggcatggaaagagatggagaacctcactgcccgactttgctgggagtttgtgaagaaagagggatacatcgctatgtggaggaaacccttaaataactcttgctacattaaccgaggtcctgaaggaaaacctccactttgtgatgctgatgataacccggatgatgtctggtatgttggtctgaaagcatgtattagtcggcttccagagaatggcgaagcaccaactcctgttcaatggcctgcacgcttaatggagccaccaaagaggcttcaaggcgtcgaaatggatgcctactcatcaaagaatgagcttttcaaagcagaaacaaaattttgggacgacataattgacggttatatccgtatctttaagtggaggaagttcaaagtccggaatgtaatggacatgagggctggatttggagggtttgcagctgctttgatccgccagaaactggattggtgggtgatgaatgttgttcctattagtgagccaaatacactacctgtaatttttgatcgggggcttcttggagtagctcatgactggtgtgaaccctttgatacataccctaggacgtacgatctacttcatgcatctggtcttttctcaaaggagcagaacaggtgtaatatctctagcatcttgctggagatggaccggatactcagaccaggtggtaaagcatatattcgtgaccggaaagaagttatacaggagatcaaagaaataacgaatgccatggggtggcgtggtactatacgtgacactgccgaaggcgcgtacgccagtaggaaggttttgatgtgcgacaagcctatggcgcgttaggcgatcaggtgaagacaagcaggggtaattttaggtacttttgcaactgaaaagagctgctgtcgggactgacatttgtgctgtagatagggtaggtcaaggactaatttgtaactatttgattgatcatccatttgtaaaatgatgatctgtgtagtttctgacatgtgccaatttcttttgttgaaacattgtcatggaaaccctacaaaagtgggggaaatacgaagagaccgttttaaactcgggatctagtgtagctcagtaagatagttgttagtttgttatcactgcactat

SEQ ID NO: 175053 - DNA, 901 bp, Zea mays
  Clone ID: MRT4577_91232C.1
caagccaagcgtttgatatgattcattgctcacgctgccgaataaattggactcgtgatgatggtatcctgctcctggaggttaatagattacttagagctggaggctactttgcttgggcagcacaacctgtttataagcatgaacaggcccaacaagaggcatggaaagagatggaggacctcactacccgactttgttgggagcttgtgaagaaagagggatatattgctatgtggaggaaacccttaaataactcttgctacatgaaccgtggtcctgcagtcaaaccttcactttgtgatgctgatgataacccagatgttgtctggtatgttagtctcaaagcttgtattagtcggcttccagagaatggcgaagcaccacctcctgttcaatggcctgcacgcttaatggagccaccaaagaggcttcagggtgttgaaatggatgcctacccatcaaagaatgagattatcaaagcagaaacgaaattttgggaggacataattgatggttatatccatgtctttaagtggaggaagttcaaactccgaaatgtaatggacatgagggctggatttggagggtttgcagctgcattaattagtcggaaactagccattgaagtttcgaattgccaagcaggagtaaattttcaggaacttttggaactgtcaagagctgctgtcgagacttttgactaacatttgttctgtagatagggtaggtcaaggtctcatttgtaactatttatgtgatcattcgtacaatgatgatcagtgtaattcctgacagtcatttttttgttgtagtcgttattgaaatcttacaaaagtgtaggagataatttatcggaaaaaaaaaaaaaaaaaaaaaaaaaaaaaaaaaaaaaataaaa

SEQ ID NO: 175054 - DNA, 434 bp, Zea mays
  Clone ID: MRT4577_91233C.1
cggacgcgtgggaatggcgtccattgtagccacgctccgttgcatggcgtggccgtggctggcgtttgcgtgcctcgtcgccctcgcgacgccgcgcgcgtcggctgatcagacgtccccggcggcggaggcggaggcgtacattgtgcacatggacaagtcggccatgccgcgcgcgttctcgagccacgagcgctggtacgagtccgccctggccgccgccgccccgggcgccgacgcgtactacgtctacgaccacgcgatgcacgggttcgccgcgcggctgcgcgccgacgagctggacgcgctcaggcgctcccgcgggttcctgacgtgctaccccgacgaccccaaggtggtgcggcgcgacacgacgcacacgcccgagttccttggcgtcagcgcggcgggggccgggggcgggggcgggctgt

SEQ ID NO: 175055 - DNA, 372 bp, Zea mays
  Clone ID: MRT4577_91234C.1
aaaaaaaaaaaaaaaaaaaaaaaaaaaaaaaaaaaaaaaaaaaaaaaaaaaaaaaaaaagaaaaaaggggaaaaaaaaaaggggggtaaaaaaacaaaaaaatataaatattaccataaaaaggggggggcccttttaaaggtcccaactttcctcccccgttcggccaactcatttgttttttttttgggtcccctaatttaatttccctgcccgcctttttccacctgtgttcttggaaaacccctggtgttccccaccttattccctttgtagcacttcccctttttcccagttggtttatatccgaatgagccccatcttacttccctccccaactttgtccccccctaattggccatttgtcccccc

SEQ ID NO: 175056 - DNA, 366 bp, Zea mays
  unsure (1)..(366): unsure at all n locations
  Clone ID: MRT4577_91235C.1
ccgcccttctctgtcagactgcactgcacaacccgacncggacgcattataagtgttttcgctgctncaccnctctgcctacgcacgccacgccttgaccggttccagttccgtacatggacgcgcccacggcgtcgttcccgtcctcgttctttacacgcacgaagctacatggtcctcttccgctccatcgacggaatcctcgcaacctacttcctgttcttggcaaccaacctcaacctcacccgctgcggcctcctcttttattggcccccggccatccacaacaacaacgacaacgtcgccgccgggccgggccaccgcctcgacattgccgtcaccgtgcacaacaagccaccacgccgg

SEQ ID NO: 175057 - DNA, 317 bp, Zea mays
  Clone ID: MRT4577_91236C.1
ttttgttcggggaaaaccagatcgcggatgtcctatccgtgcctatacattggctggcaacgatttccacaggcccttttgttccattcagttttgagccattgtactcacacacccactctaaaacgctacctttcatacaaggtttttgggacacccacccccccgacaatgttttgtgaggggcaatacacctttgatgtcaacgtctatagcttctaaatctttctaccactgacaccctggtgcttctcgacgacttgctgctaccctcactgctggtgctgcacactcacgtgtccgatgggacgcggctc

SEQ ID NO: 175058 - DNA, 697 bp, Zea mays
  Clone ID: MRT4577_91237C.1
cattgggtacctcgaggccggccgggcaccatctcattccctccacccgctccttccactcccaggcgttgctggctgctgctaccgaaactgctccgcctcccggccaatgcgcagtagcgctcgcgcagacgcgcacggacagcgccacatcggccttgattagcgaactgttcccttgccctacctctccctcccctgttcagacgcggcggccggtgagcacctgcccggtcgctagcttctgccatggctcacgaagctggcgacaacggcggcgaactcccgccgcccgcgaagaagaagtcgcccgccgaggaggaggccgagaagaggaggaagaagcttacacatgggagcttgatgaagggcatcatacggtctgggagtggtgatgccacccctgcagagggcgatcaggttatacttcattgcactactcggacgatggatggtattattgtcaattctacaagaagggagcacggaggtaaaggaatcccactcagatttgtcttagggaagagcaagatgatcctaggctttgctgaaggcttcccaacaatgctgaagggtgaaattgctatgttcaaaatgcagcctaaaattcactacgctgaggatgattgtccaagtgcagctccagatggcttcccgaagatgatgaaccttcatttgagattgaaatggtggattt

SEQ ID NO: 175059 - DNA, 737 bp, Zea mays
  unsure (1)..(737): unsure at all n locations
  Clone ID: MRT4577_91238C.1
ngtaaatctacctaggtttgtcataactcataggtcaatcattctaacttcaattgacattttttataaaaagtatcataagggaaaataatatattatcataaaagtgacgtccatctatatcaaattttagatattgatggtggtcagagttaaaaaacagtttgccttaagacaaaccaagatgaacttgtatttacaatcgaaggaaatattgcacattgcctagacatttaatttattagataaattcttttgttagttgttcaactttgtacgtcttataagtcacaggaacaatgtttatctagaacttcggtctcaaattatacagtagtgttcagccatacctgccatgtcacaagaaagagagataaaaagtatttaatagtagacctaatgatgctcatttgtaattgtagatattcgtatatcctttttctgcaaccttgtgaaacatgtgatggtttgacttggaacaaactttgggtctgatatagtaaaatgcaatgtatgtggagggaagtagtagaacaagacagaacaagtgccaaataaggttatatagtagaatacaatgtgtggagggaaatagtagaacaacacaaaacaagtgccaaataaggttacaaggtttatagtagcgattgcttagctgctacaacgacactcatagattagcctggcatttgcaatgtcgctcttgtatttgccataacctcacttaaggtcacaca

SEQ ID NO: 175060 - DNA, 486 bp, Zea mays
  Clone ID: MRT4577_91239C.1
gtacatacaaagtctctttttttataagggctgaatatatgaatcatttgcttaaacactatatttacaaagggctgatagctagcataacagaccatgcatgcatatataaaccatcgactgaatatgtgccatacccatcctccataaataattggagaagacagcctacctacgtatctagcaaccttgctgacacacaaaaggcccgtcggagactcattcattcatcgtctacactagctaggtgcatcaactgatatctttgccaggctgactggactggggcaatggcttgcgctagctcgatcatcttggcgccggtcacctcctttacgatcttcccacccttgaagatcttgagcgtcggcacaacctttatgccctactccttatcaagcaggttgttgaacatgctgcagtcgaacttcaggaacacaacatccaggcttttatgagacatctactggaattacagacccatga

SEQ ID NO: 175061 - DNA, 358 bp, Zea mays
  Clone ID: MRT4577_9123C.1
gtggcgcgatccgcgggagagcagcaatgacggcgggggggacggcgtgcaacggcgccggcgaggcgctgaaggcggaattcgcgccggagaaggtggtggccgtgtccctggaggagaagccggtcggggagcgcgagggcgaggacgtcggcgggccgttcttgatcgtgaacggcggcgattccgacgggcactccgagcctggctcagatctgggcaaggcgcccgacgaggaccctgcattcgaggaggacgacgtgcccaccttcaatgcagctccggacgcggccgtggccggagatcacgggaccgccgaaaggcaagttggtgctcatggtgcggcactctgtgcttc

SEQ ID NO: 175062 - DNA, 566 bp, Zea mays
  Clone ID: MRT4577_91240C.1
ggggggggggggtgtttttttttttttttttttttgttttttttttttttttttttttaagcccaacgctaagcttttttccccctcaccagatttattaaaactatataagaggggacctttacaatacaaagcgaggattagaacagagggggggggggggtttttttttttatatgtacgggcaagcgatcaaaactaggggccaagagagcggggctacttatactcgcagcttaatcctacgctagcaagggcataattggaccacccatgccgttttgaaacgaaaccttcatccgaaaaccaatctttggggaggggagctctcaccgccctttttatggggaccgggggggtttatggaaacctgccttccgttgggggaactttgcccaggggtctgggcagtaggtgatcttccaggggacagttttggcggaaaagcccccggggcctgaccatggttcaaagccggggaacccaagacaaaactaccatgggggtttggggggaacggagatgccttgggggtccttcgaacccccggggaaggggcccacaac

SEQ ID NO: 175063 - DNA, 490 bp, Zea mays
  Clone ID: MRT4577_91241C.1
ccggccgggccatcgagctggcacccgaattcgagtcatcccatacccgaccgccatgggtggaagtgtgagaatgatgttcgccatggggaagactctggctcgtcgatgtagatccctcggggatgggccgtgcggataaataaggccaccaggatgtctgtcatggccttgcctggtgggattgtggaccggaggctacacagtttctcaccggagggacttcaacgccagcgattcgcccaacaccgtgtccgacctcgtccccaccttcgctcccggtcaagaacaggtaccacaggatgaggcgcatggaggatgccgtgacgagttcgtgagaggtctaggccgtcgtctcccaaacaactttgggttgctagaccgttgtcaccttataatgtaattatttatttattttgtccagaactcttattatatattaaatatgtgacattcgatctttaaaaaaaaaaaaaaaaaaggggcggcc

SEQ ID NO: 175064 - DNA, 1146 bp, Zea mays
  Clone ID: MRT4577_91242C.1
gtcagtttgagtttaagacaataaactccagaaaccaactgtccaaattagatgaagccaatgaagaagaggaagaagaggaagatgatactgaggaggtagaaagtgatgctggaaaatttgcatgtcctaggcctgttaataagtggcttgctaacatttcaaagctgtcgacctcactgaagggtgtcaatctaacaaacaaaacccagcgtcaactgtatgctggtcctaagtttgtggatcctgtgaagagcaacagcaatgacagcggctctcagcattgtaactggggaagtgcaaacgacatgctcccttcaagtgtgagcttcgtcaagctggctgacatgaaacctgagacgtggtgcctgttcctcgagaagttccaggagctccttcctgagacattccgctcacgcaagtgcagtgtcaaagagcaaagggcgaagcagaggcttggcacttcttgccagttttgagttggcacaggagtagagaggtgagcacctgctcggccgttgctgtggctttcatgcaggtgttgagctctgcagttatcgaataaagccatttttcacaggattgtgatttgcaacaggatttgagtgagtgggggcctgaacctgatgtccatgctgatatgatggcctcgctttgtaaatacattttccccctttttcttagctaggctctgctagacatgagttgcttgaaagaagttgggattcaatgtctgcctgtttctggccgcccgactcttccactcatgatatgcactcaaaagtttcattcgaatgaacattcagcagaaagtttctcgtgtcgtaactaacattgtggcagataaacgctaaagatattacaatcgttttgttgtgtgccaaaaaaaaaaaaaaaaaaaaaaaaaaaaaaaaaaaaaaaaaaaaaaaaaaaaaaaaaaaaaaaaaaaaaaaaaccaaaaaaaaaaaaaagggggggccgttttaaaggatcaaagttaactaccctgtgattacaatgtaatattttttttttagggggcccctaaatcaaataaatggccctcggtttaaaaacgtttgaattgaaaaaaccttgcctttccccaattaaatagtttaaaaccaaatccccctttgccctttt

SEQ ID NO: 175065 - DNA, 298 bp, Zea mays
  Clone ID: MRT4577_91243C.1
cccggggcaaggatcttcgaaaaggatgaatcagggcaaatggttccacggagatgatcgtggcgacagctcaaggcatgcttgcttgatgggtcggtttcttgatgctgcttccactctgtttcgagcctattttgaaacttcggaacggtaatgtaagatgagtaggggttagggattagatcatgtatttagggctagtttgacaaccctatttttctatgggatttttaatttcctaagggaaaacgaactaattttctataagaaaatgaaaaacccttggaaaattggggtt

SEQ ID NO: 175066 - DNA, 800 bp, Zea mays
  Clone ID: MRT4577_91244C.1
ccggccgggagtgttcgtcgctggctcgctgcagcggggagaatagaggcagagagcagggatgagcgacgagcgggtgaaggcggaggcgctgcagatcctgggcctattccagcgagtgccggtccaagagggattcgccgagccttttcaggcacgccaggggcatcatgtacgccctcaaggagaaggggatcgacatggcgattgcttctcgctcccccaccccggacatagccaaggtgttcctcgacaagttggagttccagtccatgttcgtcgcccaagtaagaatccttcctcagccggccgtaattttcgtgtgggtcgttgtttccctttctgcatataagaattcattgatgcaacatagttcaggcaaattattcttataaaacaggaccatcgtccatcgataacatatgaaactgaaaatggccctttatgtggctatatgactatatcgctatatgtaagcaaataacgatgcgaacggatggtgtgttacttgtgcaagtttttttagggttactgggttagtttcatcgagcacattgataatggacacattgtagcgaaagaggctctagtcgagttggttaggtggttttggtagcactcttcgagttctcggttccactctatgtgagtgcgaatttcagaatatgcttaaaaaatcccttcgtctatctcatgccaaagtacaggtataaggcttagctccggtcgcggttattttcacataggccttcaataccgttgtgtatggggtggagcaggggtttcagggttttttacct

SEQ ID NO: 175067 - DNA, 332 bp, Zea mays
  Clone ID: MRT4577_91245C.1
ttctgtgtacggaacgtagactccattcgactcgagcgaattctgctcgacacacactcgagaactccattacgatcccatttgaaacgaacccatcctcgtttcctccgtctagcagcctctcaccctcatggccaagatcaagatcgggatcaatgggtttggcaggatcggaaggctggtggccagggtttccctgtagagcgacgacgtcgatctcgtcgtcgtgaacgtgccactcatcagcactgattacatgacgtacttgtacaagtatgacactgtgcacggacagtggaagcaccatgaggtcaaggtgaaggactccaaga

SEQ ID NO: 175068 - DNA, 156 bp, Zea mays
  Clone ID: MRT4577_91246C.1
caggcagggagaccacaactggggcgatggcactgtcggcaggctcacggggaacgaattgagatctgctcctgtccattttcaaaaccatcacggcaaagacaggtcgcgcgcgcttgcttggagcagtacaactacggtcaatcgtgcgacatg

SEQ ID NO: 175069 - DNA, 472 bp, Zea mays
  Clone ID: MRT4577_91247C.1
taaaacgctaggtacctgacgaacatgcacgcccctctgctctgacgctatcgccggaccattccttcgcgagagcgctcgctgcatgcagaggaagcaggaggtcctgcatggtgctcgcgtctctccgcgaggccactaccagcgccgtcggggtcgttgtcggcagcgacctgcttgacgtcaccggcgccatggcccaaaacgagatgactggccatcaggcacagcgagcgactcagatcgttcttgcccaaggcagacagaccagtagaatgtagcactacaccatcacctacgaaattttttttttttcccacaccacgagcgtgttcaactaaaacgagaagcccagagatgacgtacgccatccaaaaaacgtacacgagaaggacatcaacccgccatgtgacacctactccgacaacctcacagagccgttcacctaatacttctactagctgaacctcct

SEQ ID NO: 175070 - DNA, 380 bp, Zea mays
  unsure (1)..(380): unsure at all n locations
  Clone ID: MRT4577_91248C.1
gtacaagagatacaggttgtcttacaagttaatctttttatatttctatgtcaagccagacaagaggagctttgtgaatcctgcataaactttcccctgctccttcacgagagcagacaaccagacaaactagcttctaatgcacgggggcccctgaatcacaaaaaaaagctgttaatgcaacaatctgaacgagctacatttaaataaggccccacatacaaagatgacgacgaggaggagaaccaaaaggagcaaaaacaccactgaaccaatcctgtgcaccccctccgatacttctcaaggatggccctggcactctagtcacatggacgatgggctgcatgccatcacgaacatnctgcctcgtctactccgtg

SEQ ID NO: 175071 - DNA, 351 bp, Zea mays
  Clone ID: MRT4577_91249C.1
gtttttgattttggaacaccgcatgcttgctcacattgggaatacagtaaccatgccctatgaaggtcgaatattccgactattggactgggctgatattgttaatgcgcctattgacactggacctgtaatcgtagatagcttgcagttgaagggtttgactataggaagagggctacttatgctcgctgagactagctctgcccccaatcttgctcactgagataacactgcttctgctgtaaagatcgctgagcaacattctgacaatgggatgggatttatatcaattaatcccacatcttgggcagcaacaccatggagcccggtgcttatccatgccacacctgt

SEQ ID NO: 175072 - DNA, 1661 bp, Zea mays
  Clone ID: MRT4577_9124C.1
ctgtcctctcctctcgaccagctgacctcgctgacggagcacacagccacgccgcagcgccgcgtgggtgtctgtctatagccttgtaggtcgttcgcaggtaggtaaccgtaacctagctagctcgtcgggatgatgatgatgagcggtcgagcggccaccgcggggcggtacccgttcacggcgtcgcagtggcaggagctggagcaccaggcgctcatctacaagtgcctggcgtccggcaagcccatcccctcctacctcatgccaccgctccgacgcatcctcgactccctacggcaaggaggtcggcgagcgcgccttcttctccgacggcgcgggggagagggaccgcgctgcttcgggatgggcttcagcaggaagcccgccgacgaggacccggagcccgggcggtgccggcgcacggacggcaagaagtggcgctgctccaaggaggcgtacccggactccaagtactgcgagaagcacatgcaccggggcaagaaccgttcaagaaagcctgtggaaatgtccttggccacgccggcgccggcctcctccgccacaagcgccgccgccgccgccacctcctcgtcccaggcgccgtcctaccacagcccggcccccgccgtgccgtaccacgcgccctacggcgccgcgtaccatcacacgcagacgcaggtgacgatgagccccttccacctcctccacctcgagaccacccacccgcacccgccgccgccgccgccgccgccctactactacgcggaccagagggactacgcctacggcaaggaggtcggcgagcgcgccttcttctccgacggcgcgggcgagagggaccggcagcagcaggccgcggggcagtggcagttcaagcagctcgggacgatggaggcgacgaagcagccgtgcaccacgccgctgctcgtccccgccgccgggtacggccacggcgcggcgtcgccgtacggcgtcggtcaggccaaggaagacgaggaggaggaggaaacgcggcggcagcagcagcactgcttcgttcttggcgccgacctgcggctggcggagcggccgtcgggggcacatgacgccgccgcgcagaagccgctccggcatttcatcgacgagtggccgcacgagaaggggagcaataaggcggggtcgtggatgggggggctcgacggcgagacgacgcagctctccatgtctatcccgatggcggccgctgccgacctccccgtcacctcccgctaccgtacgtgatggcggcgcgcactatgagtgattgccagcaagaaatgttttgtggttgctgcgacctcgaggtggcgaggccacatgaaaaaaaaatactggagctggaacacgagtggttctttcctgtgccgttttgctcagggccggtcggcacggtttgaagaagttgggaagagaagtaaaataaacctccttgggagtgttacgtttcctgtaattgcttgcttcctttgctgtacctgtgagacgacgcttagtgctagaagtgagggcctttcctgatctcagctctggtctggatttgccttttcccgctgtcggattcctctgcctgtctgtgatggtttgtctgtgatggtttgtgctcagagcctgcagcgaatactaaaccgcagtaattaatc

SEQ ID NO: 175073 - DNA, 258 bp, Zea mays
  Clone ID: MRT4577_91250C.1
aaaagataaaacattggtatgacttatattaggaatggtcattttacgcgcgcgcttatgcgcgtctgttacttttattcattgtttctgcttatgtcaccatttaacgatgaaaaacgaaaaatctcacaacaggttacacataaatcaagatctgcaaaaagttaagctactttatactcagtcttctaacttttcatgaatatatgtatttattacatactactgatctcgtggtcggacgcgtggttttgaccc

SEQ ID NO: 175074 - DNA, 136 bp, Zea mays
  Clone ID: MRT4577_91251C.1
tctgcctcttcactttcaccaccatggcaaccactacccctgctgccacggaaccgcaccacgccgacgcatctcttccatctccgacgcctccacgtccaacaagctcatgtaccaccatcgcccgaccggaaac

SEQ ID NO: 175075 - DNA, 331 bp, Zea mays
  Clone ID: MRT4577_91252C.1
gtaaaacgcaaaaaaacccccatttagatctaaatattaaacccggcacaaaacggacaggatcaacggggggggtctcccccttttgaaacccggggggcgttcaaacaaaccccaggaaacccagggggggggcggggcacctttggttatggggggtgcatttaaaaggtatttatttactggagcgccgttttttttttattataccccctctctggcgtgtccttttgaactttggggggcgtatacaataccgggcccgcttatttgaagctggaagaaggagcgccccagttgggggccggactttgaggggggggggccccat

SEQ ID NO: 175076 - DNA, 756 bp, Zea mays
  Clone ID: MRT4577_91253C.1
ctcgaggccggccgggtcgaaatttctagcaagccagccatctgcgtcgtatgttgttgttggtcccctcgatcctacttccaagctaccaaggacgggcgcagacggaggaccagcgccgtcgtccaatcccctactagcggcaccggcacgaaggtcagtcgtccaatcccctactaggggaacagccggcggcacgaaggaaggatttggaggatgacagaagctgcagttacaaggtactggtgccatggatgtgtgagggttgttgaggaggccatgggggaggagatcaagtgcccattttgtggtggtggattcattgaagagatgattggtgaggaatttgatgggttggccagccagcagtcagagcgggattcatcacaatggggagcgtcgaacaacccctttgagcagccaagggcggaggcggacagtgaggatgaagatgatgatgatgattacgatgatgatataggccgtgcatttgagagtttcatcaggaggcatgggcggccatcagctctccgtcgggcgtttgacagcatccaggacgaccttaaagctgatagggatagtgacttctccattctgatcaatgccttcacccaaaccctcgctttgcaacgctcagtgcttgatgctgatgagggccgagatgaccaggtggatctagcaatgatgatggcttgatggaaaatatgtcctgggggctgggctaaccctgctgcttcatatttgactgaaaatgat

SEQ ID NO: 175077 - DNA, 409 bp, Zea mays
  unsure (1)..(409): unsure at all n locations
  Clone ID: MRT4577_91255C.1
aatttgttgatgaatttaaatttgacccttcctggcattcagttattgaagagtatgggggttgtttgaccaattatatctgagattatagtgacagataacattgcttgagtttggttctattgacagtaggaaaatcatttaacatctttatctctgtgtatggaaattactttattgttattcacttcaaattttttccaagaggaccttatcatcattacaccttgatgttaggaagctttgaaatgggtgacagatcagcctgcttggcaacgttcagaaggcagggatcatgtcattcctgttcatcatccatggtcatttaagtcagtccggagattcgtcaagaaagcaatatggcttctacctgatatggactccaccgngaactggtgtggtattcatt

SEQ ID NO: 175078 - DNA, 259 bp, Zea mays
  Clone ID: MRT4577_91256C.1
gacccacgcgtacacccaccccttctcccactcctcctcctacttcccgacacttaagcaacttgaacatagggggcttttcataaaggacatgcagcacctcatcaccggatccacagcaacatccctcatccagtccttcatcatccacctataacactacctttctctctacaacacctacgacacaactctcctacaatctacattctcgtcattttcctcacctacgtacaacatctacactgctcacgcttac

SEQ ID NO: 175079 - DNA, 376 bp, Zea mays
  Clone ID: MRT4577_91257C.1
aaaaaacaaaaaattttgacaggggtttcccaaaccccttcaaaaagggggattttatcagggggggtcctatctacaagggaattttttcctttttaaaaaaaatagcggaataaaaaatttttaaaaaattcaggggcattaaccttttttttgcctacttgaagcagggggtaggctcatcaagggagggcccccccctggtggaggcatccaaaattttcctggaaaaagggaaacttggggatgctgttggccccggcacaaaaggccgattgggtttttttcttttgggtccctatgggaaaaatttttgaacggggtcgagcccaatttcgatgtttcctacgcggggatggaaagttttaactttttt

SEQ ID NO: 175080 - DNA, 2128 bp, Zea mays
  Clone ID: MRT4577_91258C.1
aatttgttgatgaatttaaatttgacccttcctggcattcagttattgaagagtattggatttgtttgaccaattatatctgagattatagtgacagataacattgcttgagtttggttctattgacagtaggaatattatttaaggagggtatctctgtgtatggaaattactttattgttattcacttcaattttttccaagaggaccttatcatcattacaccttgatgttaggattgggacctcgagccggcggggcgacagcgatcacctctggtggctctccagtgagtcactgctcaccggtcaccgccatggccgggaagcagttcccctccccggcgaactcgcgctccgcctcagcctcctcccgccgactcctcgccgccgtcgccgcctccctcatactcctcacagcttcctacttcctcctcctctccccatcctcgaaccgatccgccccagccatcctcgcgaaccctagcgccaccacatccttcctcgcctccctcgaccgcttcctctccgatccgcatccctctgcctccgccgccgctcccgtagaacttgacgccgcgatccgggtccaggaggatgcccgtctctacggggaccccacatggcccgcgccggccgcggggctgctcagggtctacgtttacgagatgccgagcaagttcacgtacgatcttctgaggttgttcagggattcctaccgggacaccgacaacctcacgtccaatgggagccccgtgcaccgcctcatcgagcagcattctattgactactggctatgggcggatctcatcgcacctgattcacagagacttttgaagagtgttattagggttcagcagcaagaagaagccgacattttctatgtgccattcttcacgacaatcagttatttcttgctggagaaacaagaatgcaaggcactttatagggtctgggagcatctcttaaggaagctttgaaatgggtcacagatcagcctgcttggcaacgttcagaaggcagggatcatgtcattcctgttcatcatccatggtcatttaagtcagtccggagatctgtcaagaaagcaatatggcttctacctgatatggactccaccgggaactggtataaacctggacaagtatatctagaaaaggatgtcatccttccatatgttccaaacgttgatctttgtgatcacaagctgtgtattagaaacttaatccaaaaggagtatattgctgttctttcgaggaagactgaagagaaatgctggaggaaagatccgcagtaaacttgtagaggaacttaaaagtgcaaaagacatagttatagaagaaggttctactggagctcagggaaaagcagcagctcaggatggcatgcgcaagtctctcttttgcttgagtccggctggggataccccatcttctgctcgcctgtttgatgcaatcgttagtggttgtatcccagttataattagtgatgaactggagcttccatttgaaggaatacttgactatagggagatagcattgtttgtttcagcaagtgatgctgtgcaaccgggctggctcttgaaatacctaagaggaatcaatgccaaaagaataagagaaattcagtctaatcttgtgaagtattcaagacattttctgtattcaagtcctgcccaacctctcggaccagaagaccttacatggagaatgattgctggtaagctggtaaatatcaagttgcagattcggcgttctcaacgtttggtcaaagagtcaaggagcatatgtacatgtgaatgtagagttgggaacaccacgagaatgctttgaccaatattttcatttgtgcctttaaacttttgtagcatagccgttttttgttaccaatgaggcgagctttgagtttggcaaaatttgccgatgtatttgtaaatgcaactgagctggaaagagttgtgatactgtactaatcccgatgcttgtgtttgctttactgcccgttaggaacaaaaggaatgtaaaacagagaaatgtaaaaaaaatcaagagcttgaagtagatatttatttcctccatttcatgaatgaaagtaagtcttttcataggaaaagaaaacttcattccact

SEQ ID NO: 175081 - DNA, 317 bp, Zea mays
  Clone ID: MRT4577_91259C.1
aatgcctgagccttgacactgaacctatggatgagattgtgcatgttgccttgctgatcgtcggatgatctgaagcatgcaagcccgaccttgaagacgtaaggatatatatttgttcaacaatgtgaccttgtgttgctgattaatatatgcacacagtgacatgtaaaagcacccatttcatactatactgacgcttactggagattgccatatctgatcttgtgatctgtttatagcaaactaaatgtatttatggtagctggaatctatgtatggattcacctagtttttttaaatactaatcgtccaccgac

SEQ ID NO: 175082 - DNA, 569 bp, Zea mays
  Clone ID: MRT4577_9125C.1
ccggggcatagctagctagctctcaatccatgaactcctccagcgccaccgctatggatcaaataggcaagtactggggcatgtggggagcaaggagaagcagcagcagcagcagcagcacgatccccatctctgcttgggctgcggcgtacggcggcagcagcgagccgtcgtgggaggagcaggccttcgcacgcgacgcggcggaacacctcggcggctgcgtctggccgccgcgctcctactcgtgcaccttctgccagcgcgagttccggtcggcgcaggcactcggtggccacatgaacgtccaccgccgcgaccgagctcttctccggctggggggctcgtcctcccccgaggacgtgcacgccaccaccaacgatcagccacacccgcagcaaggggatggagatgccaacaccaccaccaccactacttacttgccaagaattatcaaggagagcaagaacaagcgctttatgcccatgccagatcactctgtctcgtagatgacacaagatcatgcgtcggccatgagagatcatcctcaccatgaagatgggaacagc

SEQ ID NO: 175083 - DNA, 463 bp, Zea mays
  Clone ID: MRT4577_91260C.1
ttctccttgggggcgagggtgcacgcggttcttactgcggccctggaggaccatgagcacgaggtgtaccgacaggagatccctgttgaccgcgaggacgtagactgtgtccttcggctacgactcgaccaagcttcaagagctcgatgagatgaacctcctgctcagggagatggaggatgaatccgccgcgcttcgcgagatgcatgctaaggtcggcaaggatatgctagatcccaatgcaaccacctctgaaaacagagatgagatggattctctgtctgtattcgtgggaaatgttgactatgcatgcactccagaagaagtgcagccacatttcaattcttgaggaactagctacagagtgacaattctgactgacaagtctgtgcaaccaaaaggttctgcttatgtggaatttgtggaagatgaagctgctcaagaagctattaagctgaatgaa

SEQ ID NO: 175084 - DNA, 301 bp, Zea mays
  Clone ID: MRT4577_91261C.1
tatccaacccgcggaggccactgacgcgggctttcatagaacggttataaggttccttccgcatccctgatccgtccaaatcccacctcaattcatccagacagcgcgatcagggggtgggactcacactccagggggaccttcgaaccctagttcttggccgagccggcttgcgggatctgaccagccgcgcgggagatgtgtctcgaccctgatagtctccgtgcgacaccggttggatgaaaaatggaatgaccacccctcacagcttgagcaagtgcttttatcgggaaaaacatgg

SEQ ID NO: 175085 - DNA, 243 bp, Zea mays
  Clone ID: MRT4577_91262C.1
gtttgttttgtggatagatggagatggatgtcactgattgcccaaccttcatttatataccagtagcatgacatatcatcatcagatgctttctcgcttgatcagcaaagcaaagatgcaggcctttagcttcaaccacgggcaagttacaaaaaggccttgcattgcgcacctgcttctttatgcagacatcagtagaactgaaacgggccagtgtagcttctagccttctgctcactcagc

SEQ ID NO: 175086 - DNA, 517 bp, Zea mays
  Clone ID: MRT4577_91263C.1
cacgtgtagcggcttcgggagctgctgccgctgctgtgccggtcccaggtcacgcgcggacccacgtgcagcggcttcgggagaggatttgggccgtcgcgcggcggcttccgatgcgtctcctcgctgagcccgccgaagcagtgctccacagtgagggcacgtcgcagcagtgccgcggcatgggcatcctcacagtcctcctccggacggccataagatctgatttcttgccgacgccgctgggattgcctgttgcactgatgccgttcgtgacctagctcgggtggaggcggtcgtggtcgtagtgatttgggtgcttgcgtgcttgctgcttgggggaattttatcacaacttggagaagacccctcgccattttgcatttccaatcgtcggttagtttgtgtgcctaagcgcctgccctgttttttatgtgttgtttgttacaaaccaatttttcaccaatgttacgtgatgttcttccatgctatgcgatatatagtgctatgcctgatt

SEQ ID NO: 175087 - DNA, 333 bp, Zea mays
  Clone ID: MRT4577_91264C.1
agcataggcacattatttgtagacacgcgggcgagctgggttcaacatgcttgctttatcacatcgttgtccgtactatgaaacacatcagtttctgatatgagatgatgagttccactgaacgcttgttgttatttccagcaacaactatgaccattcagccagctagctacgtggtactctcatgcacaacaaatggttgcattttaccaattagggcgcactgaaccccgctgattatttggaggagcatttactactaccatttagccagctagctgcagcacaccgtgctttcttcttgtcacagcaacagttgttgtctttctacca

SEQ ID NO: 175088 - DNA, 724 bp, Zea mays
  Clone ID: MRT4577_91265C.1
aaaccttgtcccatttccttccatattatttacatataccctctgtccttgaagcggcgatgctctgttggtaatcttggaggcgatcgatgtcgacaggccgtgacgtcgtccgatgattctccctctccctcgtcgccttcgttgtcatcttcgcacggcttgaaggttgaagcagctgctcccgcagatggcggcggtgtggtctaggatcgggaggggagcgcagctgtcgctgtcgctgtccctgtcgaggaccttctacgacggcgcgtcggcggcttccacgctgcgcagtgctgctgcgctgtcccgcgcccggggccagcacgcgtcgtcgctccacagcctcgcgggaaggtccgccggccagctcctccagccgccgagcaggggcatcgtgaccacgcccgcgaggcttcacccggcgtcgtccgcggcagtggtggcagagctctcggacgcggaggcgagggagtccgaggccgtggcggcgccgcctcgccagatgccgagcctcggcccgacgcggcccggggagaagccccgcgtcgtggtgctgggcaccgggtgggcggcgtgccggctgctcaaggacgtggacacgcgcgcctacgacgtcgtgtgcgtgtccccccagaaccacatggaggacccgcagctgttgctgtccaagaaagaacttgcgctcccatatccttttctggacttgatccagacccat

SEQ ID NO: 175089 - DNA, 213 bp, Zea mays
  Clone ID: MRT4577_91266C.1
tttttagcgttggggacggcgaccgcgccggcggtctaaaccccttctcggacatgaggaccgcccgagtagacttccacctcctcacctaccacagtctaatattcaggttcccgcgcgccgacatagtcacctaggcccgctgtttcctggacgccatgcacggcgagggccagctacacgccttaggaacatacacctcggtcatgaacg

SEQ ID NO: 175090 - DNA, 623 bp, Zea mays
  Clone ID: MRT4577_91267C.1
acatgtagttcctctcagaattacacctcacactatcgaagcttgccttctagcttgtttacaccccagaatgcagctatagtctgcgtggcatacgagtgctacttataagatgaagagcacgagtagcacttggttggtgatcctagtcctccaggcccttctgctctctgcctatgtgtccaaaggatctgcacggccgaaaaagagtgttggcgcggagagtgcaccaactggtccctggagcggacctgctacgacctcctcaccaagtgcgccgcacacctgcaagaactgaattgccgtttcaacggacaaactcgccaccgaggacagatgtcgcgaattcctccccgaaaactgcggttgcgagatccactaaatactcatccaatgcaaccatgtccacaaccgatggacccttcatctcgatatgtgtgctctcctccgtccgtgcagctatcttgctacaggcaggtctctaatcaagctagcaagctgatgatgatgctttgcatgcttgattgtgtgtcccttcccagtagacatgggaatggtccacccgatccccgattcgccgccgcgaattcctctatacgagtacgaggatggggaaatttctt

SEQ ID NO: 175091 - DNA, 436 bp, Zea mays
  Clone ID: MRT4577_91268C.1
gcgaacaaactttgctctgatttttcatttcattcatagccaacggggacggaacaggtaacacggaacggtagcggcgtcacatctaacggtagccagaacatctcggaacctacgcgatggagcgagatctaggggactcgggaggcgtgcgttatcacttttggtagacaggtaaaaaaaggatcggtaactaggataactggccagcgagcggccccaccattcactccctccagttgccgccgccggagccgccgcggctgccgccgtagccgccgccgccgccgccgctgccgtagccgccgccgccctcacggctgccgtagccaccgtcgacggcgctgcggccatcctccgtagccaccgccgccggcgtcgtagtcggcggcgccttctgcttgacgacgctggccggcgtagccgccggcggcgc

SEQ ID NO: 175092 - DNA, 245 bp, Zea mays
  Clone ID: MRT4577_91269C.1
gccttccttttccgtccatggccgcgcaaccctaacggcgcccttcccgtgccgcgcgcatggcggaccccggcggctgcctcgaggtccggctcttctacgtgcgcgtctcgccgcacggcggcgcggcccctcccccgcgcctcgcgctcgacctccgccccgcgggcggcgaggcggcccccgtcccgctgcgcctcgaccgccacgacgccgcctcgggcgaggccacctacgtctccacc

SEQ ID NO: 175093 - DNA, 946 bp, Zea mays
  Clone ID: MRT4577_9126C.1
ccacgcgtccgaaattgctgacctccgtcatcagcatctttctctctctctctctctctctctgctgagctgcttactcattacagctccaattttctttgtccgtgatctagctagcttgcatgtctctctagagtcgatctaaatcgatacaattgagactagctactacgagtttgcagatgcatagctagctagctctcaatcacatgaactcctcaagcgccaccgctatggatcaaataggcaagtactggggcatgtggggagcaaggagaagcagcagcagcagcagcagcacgatccccatctctgcttgggctgcggcgtacggcggcagcagcgagccgtcgtgggaggagcaggccttcgcacgcgacgcggcggaacacctcggcggctgcgtctggccgccgcgctcctactcgtgcaccttctgccagcgcgagttccggtcggcgcaggcactcggtggccacatgaacgtccaccgccgcgaccgagctcttctccggctggggggctcgtcctcccccgaggacgtgcacgccaccaccaacgatcagccacacccgcagcaaggtgctctcctgtacagggcagcagcctctaaccctagcactaccacgccgagtactactgcagctgcaggtactactgctgccggcccagcagcagccataaccatagcaggtgcaggggatggagatgccaacaccaccaccaccactacttacttgtcaagaattatcaaggagagcaagaacaagcgcttcatgcccatgccagatcactctgtcgcggggatgagagaagatcaggcggcggccatagatgatcatcgtcataatgaagatggcgacagctggcggtcagcctcagccgcggaaaagaggaggcgtctggatcatccgttggcaacggcggcggcgcttctgatctttgt

SEQ ID NO: 175094 - DNA, 247 bp, Zea mays
  Clone ID: MRT4577_91270C.1
aaaaaaaaaaaaaaaaaaaaaaaaaatttaaaaaaaaaaaaaaaaaaaaaaaaggaaaggaaagactgccgatctataagcatccaaacttacatatcgcgtccatccaacattcataatatattcaatcgagaaacactaaatcaaatacgattggcacgtcattttacaacgcacgcactggcgaaaaccactggcagtatacccgaacttacattgcctttcaccactattcccctttcgccag

SEQ ID NO: 175095 - DNA, 401 bp, Zea mays
  Clone ID: MRT4577_91271C.1
cgtacgcgtggggtttctttaccctaaccccgacagccgccgccgtttcttcatcttcctcgcagcgccggcgctccatcttccgctccctccccgactcgcgatcggcacgcaggcgacgtcggggcagtctcggactcggcggcggcgtcagcggctccccctcccgccctcgccagtcgcttccggtcctccgcacaccaaccggcgactctgcgtgcgcgcctcctgcttccggtggaccgtcgacggcgcccgggccccggtggccggcgggcagcgagagccagcagccgggcagtgtccctaattggaaaggaaggacaatcagagccaagagtttcttcataaacctgaataaaaggacatgcgagtacggaatacagacagggcaccgcgta

SEQ ID NO: 175096 - DNA, 187 bp, Zea mays
  unsure (1)..(187): unsure at all n locations
  Clone ID: MRT4577_91272C.1
cgaaannccggggcggaccgaggcgtnccaatttcccaaaaccctaaaccagggcccatttttttaagcccacccccttctttccaagggccggtttaaccactttaattgtcgggatacccaacttaatcccttaaaggacccaggacccgttggttttggttttggaccgaaaattgccaggatt

SEQ ID NO: 175097 - DNA, 739 bp, Zea mays
  Clone ID: MRT4577_91273C.1
aattcggcacgaggcacaaaacagcatttcaaacccatgtcggtcattatgagttcagggtaatggcgtttggactcactggagcgccaggaaccttccaacgagccatgaaccacacattagcccctttgctccggaagtgcgtccttgtattttttgatgatatactcatctacagtgcaacactgactgatcatgtccgccatttacaacaagtgtttgaattgttggatcgagcacagtggaaggttaaaatgtctaagtgttcgttcgcccagaacaaggtctcctatttgggccacgtagtcagctcccaaggggttgctacggaccctactaaagtgcaggcagtggctgattggccgacaccaacttgtcttaaggaattgcgcagcttccttggtcttgctggatattaccgaaagttcatccgtcattttggggttatttgtaagcctttgaccgtgttgttgaagaaaggctccttgttcgtgtggacatctgatcatgatctggcatttaacactctgaagcgagcacttatttcagccccagtgttatccttgcctgatttctctacaccgtttgtggtggaaaccgacgctagtgatgatggtgtgggcgcggttttgatgcagaatggtcaccctcttgcgttcctcagtaaagccttgggccccgaggtctcgtggtttgtccacttacgagaaggagtaccttgctgttatcttggctgttc

SEQ ID NO: 175098 - DNA, 276 bp, Zea mays
  unsure (1)..(276): unsure at all n locations
  Clone ID: MRT4577_91274C.1
gtcagaagctcaaatactgatctcatgatccagggtggctatggcaaagcaggcgcgccagggtctcgcggcccactgtgacttggctatcactcttccttcccgcccgcccccgcaaactcgtccaccaaactatctcacaagttggggggtgggcacnaccnacnagtactgcggcgaccggtgccagtcnggcccgtgccgctcgggcggcggcggcagcaatggcggcggtggtgccaacgtggctagcgtcnncaccggctccttcttcaa

SEQ ID NO: 175099 - DNA, 160 bp, Zea mays
  Clone ID: MRT4577_91275C.1
gttcattattttagttcatcatatgtcccaattgttccccacgaacaacaagtgcggactcagctagaagcggttccaggcccgggtagcagactgtgtacaccccatttcatcctccgagaagggagggcaacattcttgaatccctgctatcaaaacc

SEQ ID NO: 175100 - DNA, 415 bp, Zea mays
  Clone ID: MRT4577_91276C.1
tgctctgctgtggagacagagcagtgaccccaaggagctcacggtccctgaaggaggtgctagagaagagacttagcttctgatactgccaatttaatgtgagaacatggggtatactgcatcatttccattttcatcaataacatatgttttatgcaccttctttacctgaaacttactaagaatctaccagtaaacaaacatcctgtctttttgcaagtatgaatcacttaacctgctgatagttgaagaacactttaggagttttgtattcttgtatatagtttattttttccatgtgctagccaggtaaagattacacagttcttctggactgttaaattgtgcatggttttggaccccttctgctctactacagagagtgaagaagaaagtattaaagctcactttacca

SEQ ID NO: 175101 - DNA, 524 bp, Zea mays
  Clone ID: MRT4577_91277C.1
cggacgcgtggggcctggtaatcctcttcgcagtccatgcgattgattttgcgagctaatctgtctattttacatctttcagtggggagttgcttacagaataaaggaggaagataaggagatagctttggaggtatgtttattgcaagccaggcagatgcagatatgttttgttcactagtactgatcgcgcacaaatatcccatgatgatactcagattgtttgatgattgggatattgctgatgttacttgtcattatggagatttagagattggtcgatgtaccaaaactcatatgttctttcctacaaactgattatatctagatactatgacgatttaagtcatgaatgggcttatgaaatttcggtatatatatcaacttatatgtgtttatcgcgatggtatacgtagcagcaaatctctgcacattctgatactccgttgcttacagctttatattgcttctactggcatttatcttcagatttaaatttgcagtatcttgaggtcagggagaag

SEQ ID NO: 175102 - DNA, 572 bp, Zea mays
  Clone ID: MRT4577_91278C.1
caagatcttacaaagttcttgcsttctacgttccaaacgaacatgtatactcctgcgtcaaatccgtatagttacattacatgatggagcaaggcggggggtcctgctcgtacactactctctcctggtacctggggcacggaggccacgacgggacgtggtggacgarcaccgtggccggcgtctcgggcgccttcttctccgcacccgccgccgccgtcttcttctcctccaccttcttcttatcctgctcagcgggcttcttctcctcggccggcttgggcggcgccggagggccgatggtgagcacggacgcgcgcttcccggccttcctcgcctgcacgatcacgtccaccgggkccacggtgcccgtcaccgtcatcgtgctcttctccgagtccacctcgatcttgtcaacaccatggaggccggtgacggctgcaggaccttgcgcttgcatttggcgcaggaggtgtccaccttgagcaccgtcaccttcgacatggacgccggccgcccgggtccctttgcttcgccgccgctttaatttctctggccttgcatgaaacagt

SEQ ID NO: 175103 - DNA, 751 bp, Zea mays
  unsure (1)..(751): unsure at all n locations
  Clone ID: MRT4577_91279C.1
ccggccgagacagcttctcttggcgaagggtttcggaaagggatgcttagggtttcgtgaccaccgacggcgctcttctcatcgacctacggtgacatttgcgaccgcatcaggtccgttcttcgcttagtctgcgatttctccatccttttctcctcctttgtgctctccgatggcgtggccactgtttcttatggccatcagcatcgctggcctctgctccatgcggatatgcctttgcgaacgtgcatctgggcgcgtgtgtatccttctgcaatagctccatccgtacgccgccaaataccacagtcacgtccctatgtacagcactgaatagcgccaccgcgaaggtgtatacaggcatacagcggatgatggcggcatggggaggcgtctcagatctagcccgtgcagatgccggggatcatgggagagccagcgtggatcggcccacggtgacaccgggaacgctcgagagggtgcggataccgcaatctcatggactgcatcagaggttctgccagcagtgcagcaggttcctggaccacttgatcatctccatggtttgttggcattggaagaacttctgtgcaggggctgttatcaagaaggttaatttcgacagaacaatctcacacaagtgtatatcaaatttcatggtcaaatgtttacttccaaattcattggataaacttggttaattgnatgaatattcatatacttttttgggctatgtncacgaattataagc

SEQ ID NO: 175104 - DNA, 857 bp, Zea mays
  Clone ID: MRT4577_9127C.1
gccggccgggtcgggccggtataaaaactctcctccctctcttcctatcccgctcgttccgttgaggtcgctaggcatctttgatgatcccgcccgccacgccatctccttgctcccgctcgactgtgcgtgctccacttcacgcgcctatttcttcaccagcagtccagcacgccctcctgccctcacgctcgctcccctccctggacgcccgtgcagctcccgcgccctgccatcctttgccctgttatcctcgcgccggcgcgccgctcctgtgcctgtcgtcctcaccatccttgcatgagtgctctggggctccctccctctcgtgtcgccatgtacaccatcgcgtccccgttcagcaccggccgcaactcatccctttttctcagtttgccccaggaaggctggatccggaggcacattgcccggagggacagttggatcaatctggtgttgaatcgatgccccgtagggtggttcctcccacaagctcccatggccgggtgcccgggtgctagaggatctgctcaatgttgagcaagtcgacatggaggcctgcaatgtggattcagctacttttaggaggattactacgtggtgaaagcctgtttcctgatgcccttgcttggggacaaacaattgttggtgcccagtgaggtgtcaacactgatgctacagaagctacggatgccttgatggaagcgggaactgagacatgggaggtggcgtaaaggtgtttacgttttctattgtaagcgtgaatctgtgttgggtcggccaaagagacagcctataaaatgtaataatattgggtccaaaaatgagaaggaaaagaaaagaatactgatcccccc

SEQ ID NO: 175105 - DNA, 898 bp, Zea mays
  Clone ID: MRT4577_91280C.1
aacatttgagttttagttcatcatcttatattcaaataggtttagctccatcagatctagcttcaaaaaattaaaataaactcaaaggatatttcaaaaacgttgttttcatatgctcataaagttacacgaaattatctgccataccattattcctttcctattaagccgatgtagctcccttcccgttcaaggcatccacgccgactgcaatatcgtggccacacgttttcatcttcgttgcacgcgtggcaagtccggcatcctaccttcctagggaaaaaaaagctgaaaaatccaactccgcagtactgtcttacttatcttcgctacatctggatgctgcttcttatcttcgctacacaagcatgtctccaactccgcagtgctgtcttggaaaaaaggggtctgtactttctctcaccccgacggcgcttcctacttcctagggcgaccgcggcggcgccacatgcttcgccagcgtcggtcttcccgtcgtcatttctacttcttctgccggcgtcggtctacagataagacgggtcgcagaacttgcgctaccgtgccctctcctcttacgtaggggcctctaagctcgcagcggctaacactaaagagcgctctatacgctgcagctttaggagagggcacgcacgttcccccagatcaaggggaacactgtagcgtctccttgcacagtgctttcatatttaatagttaataaaaatagtaataaaagataaatagtgttagataatgatattttatagttgtagtgggatatatgagataatataggggaaccgttgcggaagatgaaaaaatagggggtgaaatattgattatgtgacgcaaaaagtgatataatgggaaaaatttagagggaaccgttacggat

SEQ ID NO: 175106 - DNA, 369 bp, Zea mays
  Clone ID: MRT4577_91281C.1
atgcggaagacgcaggccgtccaccccattcagacgttctgggctggcgacggggccggctgggcgctggattccaaagctgctatggaagagctggaaggtggaaaaggtgttattttggctgatgattggaatcctggcgaccagacagcacaacagcctcagcttgctgctcctaccaaggatcagctgggtcgacgatgtcagaaaatcacgagcagtcgcgtgaagacgcttcccaaaaaccttattcgccctctcccggtgcaggatctagaagacgaagggttccggagacctgctctcctgatcgtaggagcacctctgcggtcgggacgaagggaactaaaaaggcggctcagcttatga

SEQ ID NO: 175107 - DNA, 518 bp, Zea mays
  unsure (1)..(518): unsure at all n locations
  Clone ID: MRT4577_91283C.1
tcaacaaaatctctatctccacctctnttctctacctctctataactattatatccccccgctctacatcaattctcncacnatctaccttaccatctcaccataccctccaccgcwtctctatcanccctctcacctcytctctctctnccctcnctcaycaatcctctcctcccatcttctctcctncccctncancctathncwcctattatcactactacttccntnctyncttcttcttctccctcctccacctccatcaantataactctacwncctwtctcaccacytctnccctyncttcctctcttntcctcccttacttcacctattcccctcattcctccctctcactccttcnctcaacaacttcctcctcaacatcctctcctgtgttttcctcctcctttgcattctccctccttcatcaccatctccaacttcaaccccttcaagagaacctaatcaaaatccatcatatcgatcatctcacctatatcctatcctatactnt

SEQ ID NO: 175108 - DNA, 433 bp, Zea mays
  Clone ID: MRT4577_91284C.1
cacgaatcattttcgggacgggttaaagaaaatgggtaacgggggccctgggttttcaggggggcccaacatggccgggggggagagcaacaggggttttttcaagccaaagaggggttttttttttgggggggggccccaaaaaagggaactgggggcccgttcccaagggggagaagccggcccaacaccgggggggcaaacttcttttgcctggggggataacagaggcccagggaaggggccgttttcgcgtggttggttccagggataaacccattcacctgggcccagggatcgatagtacttggggaacttatcacacccaggggcatcctcacctttggcggccaccccccggggattttcaacaaagggggggaaacaaagccttgttgggttggggggggggaaacaaaaaattggggggggg

SEQ ID NO: 175109 - DNA, 470 bp, Zea mays
  Clone ID: MRT4577_91285C.1
gtgcaccgaacacctcactgccgttcccttctcgtatatggtcctatcctctcctcgggggatccggaaacaacccaccgcccctgtgctcgatccttccgccggaatcgctgctcactctctgtgagctgtcgatataagcggcgactggtatttcgattcaggcccatccttctgtagaccaatggctgacggtgaggatatccacccactcgtgtgggacaatggcactggaatggacaaggctggctttgctggagatgatgcccccagagcactgttccctaggataggcggacgccctaggcacacagctgtgatggttggaaagggccagaacgacacctatgtacgtgaccaggcacatcaaaaagaggtgtatcgaccttgaagaaccccagtgagcaccgtctctcgaacaactgggatgatatggagaaagcgcggccccacaccttctacaatgaact

SEQ ID NO: 175110 - DNA, 609 bp, Zea mays
  Clone ID: MRT4577_91286C.1
gcgtagtccctcgcctaccccgcccccgaacctggcgtctgccctaccaaccgcagcagcgacactagaatggccgcggcgccgtcatccctcgcgtcctcccacctctccccaatcgcggcggtgtccactcccgccgtcccacatcagcttcgcatcggctgctcccgccgccgcgccgggcgcatcgttgccatggctggatccggcaagttcttcgtcggaggcaactggaagtgcgtaagtgcttgttctgcctctccagctttacgcgccttggggtctagaactgatgatcctggagatgctatgtaactgtatgatcttttggctgctgccgcattgggcatttcaacgggaacgggacgagattttgtcgtcatccatatatacatcgtggtttactctgtccatggccacttctacaaatagaatcgcttgtctgcttcccagcttggcctgacagccaaagccgttttgtttggtatataaaagtgttttctcccccgaaagggtggtaataaagttgctgttgtatcaaaaaaaaaaaaaaaaaaaaaaaaaaaaaaaaaaaaaaaaaaaaagaaaaaaaaaaaaaaaaaagcggcc

SEQ ID NO: 175111 - DNA, 356 bp, Zea mays
  Clone ID: MRT4577_91287C.1
ggctaaatgtgatggtattgtgatgatgtgaactgagagtacaacggcattctccaatggtctccaatccaaaaaatgtaatttgttttcattaaagtttgttaaattgttcttctaatttataaggaattataggatgtaatggcataatgccattctatacggtccatcaagaaatgaatttatgatttcaaattatttcatcaaatcgaattattattttttgtacaaattgttagtggaagtatcaccttgtcgacaatgtatgtcacaagtgatgataatttgtaatcattgaaatttctaatggattgaaaatcaataatgtcttgcagagtacttggacaagtagtttt

SEQ ID NO: 175112 - DNA, 502 bp, Zea mays
  Clone ID: MRT4577_91288C.1
ggccgcttttttttttttttttttccgacatccattcatatcgactttcttaataacccattgtcaaagcggcgcgggcataaccagaaagtcttacaccataaggccgcgcacaccacaacggggacaagagcagcacacacgcctgacgatgacctgttcaggatactcctagtactcatcagcatcatcaccttgctcaccctgatgaaactgagaaccaacctactcgtagtccctatggagcgctgccagattctcacgggcctcaaagaactcgccctcctccataccctcaccgacataccaatgcacgaaggcaacgcttggctaacatctaggtcgatactaaagggcgatgccgtataacacctacacaacactgggggagtaggagatcatgcacacatagcgctgaaccttggccagccaaccaccaggcaccacacttggaggctggtagttaaagccgaacttaaagccccctggacaccagtccaca

SEQ ID NO: 175113 - DNA, 338 bp, Zea mays
  Clone ID: MRT4577_91289C.1
aaaacccaataaaaatttgttcttttttacggccactggggataataaactaaaaacccccccccgcccggggggtaatggggtccataccctcaaggggatacacaaacttgccgccgtaaagaaaaacacgtggaaaaccccctttttttttaactccgcccctttttttttttcccttgggccccgaaaaaactaggctttggaggcccgttagccccaggttttcctcctatgtttacgcagccacagccgtccacactttggatgctaacagtttgtctttgacgggctcggggggggttgcttttttggatgccgggggcccctgggggggg

SEQ ID NO: 175114 - DNA, 262 bp, Zea mays
  unsure (1)..(262): unsure at all n locations
  Clone ID: MRT4577_9128C.1
gattggcacctgaagataggggtctgagtggatcaatgtttcatggacacaaaaaaagcataccacgtcgagcacttatactggtatttatcttcacccaggctcacttcttgaccactcactacacattccctgggggggggggggggcatttncgccccncagggccaccctntccaaggggcgcggaagaaacccgccgccctccatcgtcactcttctggccgggcgctccttccttccgggcgccgggggttgcaac

SEQ ID NO: 175115 - DNA, 303 bp, Zea mays
  Clone ID: MRT4577_91290C.1
gcgtccgcacacaagtctgcccacgcgtccgaaaaaaaaaaaaatacataaaatcaatacctcccatcactctcctactataaaaactcacgtccgcctccatgaaagttttctccttttctatgtgttggggtgggttcccctctccacatctgtttttacgacttcatgacccaggtccaacgtgatctctgctaaccactgtgcctatgcacccttaccccgactacagacttcacatcccactaaccacttgatgcccctatctcatctgcctatccatgcatccattgcattgcttct

SEQ ID NO: 175116 - DNA, 330 bp, Zea mays
  Clone ID: MRT4577_91291C.1
cccccaaaaaaaaaaccggatttaatgggggagtaaaaaagcccgtcccccttttctgcacaggggtttggtggcagaaaccatcaggtttcttttaacagcaaatttccagggttgaagcttgaacttggaagggttaactaaaaaggcccttccccctctcattggttttggaacccttgggcttaccctttttgggcttatgcccaattggtgaattttaagttcccccgggcctcccttttttttaaagaaggttttttgaaaaaaaaacatgatgaccactcttatcttttttcttatcccgggctttggctttatttttggccc

SEQ ID NO: 175117 - DNA, 606 bp, Zea mays
  Clone ID: MRT4577_91292C.1
ggaccaacatgtttggatcactcctttgttatgttatgatcaacaaaaatgttccattacaagatacttttcagatgttatccatccctgattcggctagaaaacaagaaatattctgaacattttgaagccagcatctgcattttctgaagcacaaaactgagcattaccgccctagagaactagacaagatgaaaacatatgtatgcacatcagccgcctgtatgacaaaattgaaacctggaatcatacccagctgctctcaaatgagatatcatcgatccgaaacgacaaattccccacgtactcctcttcagcatctactccgccttctatggtctccacaaggttttgctgtaggtgagggagcagcgttgaaggcatggtgagctttggggaacgcacggccctctctgctgggttgggagcagaaggcttctcccaggcaagtagatgcagctggatggggcgcactgcgaggcggtgcaaggagagtttctggctgagggagatggtgtcgaagcagcggactgcccctgaactggagatcatccaaggtaggaccttctcattggacaccctcgagatgatcagcagtttcgacgc

SEQ ID NO: 175118 - DNA, 391 bp, Zea mays
  Clone ID: MRT4577_91293C.1
tttattaggacatacggagaccacacagttgtgtacaaagaagggacaaaagaaaaaagacaccttgccgcctataaaaaaaacacaactcattgctaaaatggaatctttcaagctaactaaaaagttattttgctccaaactaacagacctaacttaatctggcaccacactcgcatgaatgttgaaacgccacctgattctccttcggaaataacccaatatagatcgctatcaaaatgatggagacaacccctatgtatataaaaaattatcatgccccattgcaaaaaggaaagtgggtagataagacaacctccaccaaaggcaaaaaaaaattccttaaaggaacccacccaccctcacccggggaaaaaaagtaaaccccaag

SEQ ID NO: 175119 - DNA, 640 bp, Zea mays
  Clone ID: MRT4577_91294C.1
ctaaccctaggccacccggccatgcccaggctcccacccgccaggccgccacccaccccactcggccactcccccaggcggcgaggcgcggcgcccatgccccaacccctgttcgcaggtcgcagcagccgctagcacccagatcccagagtcccagaccatgccgccactgtgccttcttattttgtccgccgaacaagccagtagtggctacatcgtgaagggcggcaaggcagatctagggcgatcatggcttacgtcgagagaggtgttggaaggtctcgtttatctgcatgaacaaggtgtcattcatagagatatcaagggcgcaaatatactgagtaccaaagagggtcttggcaaacttgctgattttggagttgccactaaattgactgaagctgacatcaacactcattctgtggtcggcactccatactggatggcgcctgaggtcggctattgactaaccatttgttgaatatgatgtttctactgcagagaatgtaccatgaatcacatgaatttggtggtcatatgttcaacactctcctagaggttagaccattgcatcatttgattttgtatgcgtcttacaactggactggttaattttataatttgtgaataccgtgattag

SEQ ID NO: 175120 - DNA, 535 bp, Zea mays
  Clone ID: MRT4577_91295C.1
caccgaaaagaggaatgccggttcacttaggggtggccaggagccgggattactttgaaccggccgttttttgggggggccaaaaaaattccccccccaaaggtcccccccccccccattttaggttttggggggccccccggcccaaggggggattactttggggagaaagggggccagccagcatggggggcccacttaagatgggcaacaacccgttttgtccccctccttttttttggggccggggcccccctttccggggggggggttcttgtccttgccgccggggccgcccttgtttttccccgggccctggtacattttgggaaagaggggggtgaaaaggctttccaactccttttttttggcctcaaacccgcccccctgggggggggggggggggcccacccactttgtgggcgggttaaaggggcccccgattttttttttgtgatggggggggagtttggacccaatttttctccccttgatcggggggcgcatggtggaggagttgttttccagggagttt

SEQ ID NO: 175121 - DNA, 895 bp, Zea mays
  Clone ID: MRT4577_91296C.1
aattcggcacgaggcaaggacgaaaaacacgaagaattacggaagagcaccccatcttcggtttctttcctccggacttcttcctgcttgcggcgtccgccaattcccttccctacccaaaccctagagcaaagctgaatggccctcgccacgagctcgcgagagactctgcgccgccgccggtgactgctgatccgcccgccgccgccgcgcccggtgctttgtcacgcaggaggcgacggtatggcgtcgaggcagcacaatgcacagttccacaaatccaagacgctcgacaacaaatacatgctcggagatgagatagggaagggggcgtacggccgcgtatacaaggggcttgacctggagaatggcgatttcgtggccatcaaacaggtctcgctggagaacattccgcaggaggatctcaacataataatgcaagagatcgaccttttgaaaaatcttaatcacaaaaatattgtcaagtatctgggatcactgaagacaaagagccacctccatattattttagagtatgtggagaatggctcacttgccaatattatcaagccaaacaaattcggacctattcctgaatctttggtggctctttacattgctcaggtgttggaaggtcttgtttatctgcatgaacaaggtgtcattcatagagatatcaagggcgcaaatatactgagtaccaaagaggttaatggctgtatattatttccctccttttttctttgtttcaatcattgaatttggtaaaagaaatcttggaatgcctagaaatctgaatgttgttaaacttgtcttggaacttggaagtaaccttctaataccataactggaagcataaaaccatgaaaacatgtagtcacatgactgatgcagt

SEQ ID NO: 175122 - DNA, 619 bp, Zea mays
  unsure (1)..(619): unsure at all n locations
  Clone ID: MRT4577_91297C.1
cctcggccctcccccagcggcgaggcgcggcgcccatgccccaacccctgttcgcaggtcgcagcagccgctagcacccagatcccagagtcccagaccatgccgccactgtgccttcttattttgtccgccgaacaagccagtagtggctacatcgtgaagggcggcaaggcagatctagggcgatcatggcttacgtcgagagaggtgttggaaggtctcgtttatctgcatgaacaaggtgtcattcatagagatatcaagggcgcaaatatactgagtaccaaagaggttaatgtttgtatattatttccctctttttttctttttttcaatcattgaatttggtaaaagaaatcttgaaacgcctagaaaactgaatgttgttaaacttgtcttgaaacttggaagtaaccttctaataccataactggaagcataaaaccatgaaaacatgtagtcacatgactgatgcagtaaaaaagaaagaaataaaggggcatcctagagataaaaccatggacaaatagtgtgctagcgtagattttgggaggatgaattgttattatganagtgtgtatcccccttaattctaaacttgcaatagaaacatagcagt

SEQ ID NO: 175123 - DNA, 800 bp, Zea mays
  Clone ID: MRT4577_91298C.1
attgggtacctcgaggccggccgggcataatcagcaagcttctcgaggtgtaccgcggcttcgagggcgtcgacgtgctggtcgacgtcggcggcggcaccggctccacgctgcggatggtcaccgccaagtacaagcacctgagaggcgtcaactacgacctcccccacgtcatcgcgcaggcgccgccggtccaaggtgtggaacatgtaggtggtagcatgtttgagtacattccgagcggaaacgcaattttgctgaagtggattctgcacctgtggcgcgacgaggagtgcatcaagatcctcaagaactgccaccgggcgctcccggcgaacgggaaggtgatcgtggtggagtgcgtgctcccggccagcccggagccgacgcaggttgcgcagggcgcgctgctcctggacgtggtgatgctgaaccgcctcaggggcgccaaggagcaggacggagcgggagttcgccgagctggccgcggaggccggcttctccggcggatgcagggccacctacgtcttcaccggcgcctgggcgctcgagttcaccaagtagagagatacctgctcggtcggctctcccggaggtcggggtctgaatcggaagtggcgccgccacatttggtagagtggcaccgtctatctatcttatctatctatttatctatctgtaacagcctttaatatgtggtgttcttttttcaattcaagaaaatggaacattgatcgatgagggcgttatatgtaacgcagttactttatgtgtgttggccattttgggctgtttggtcc

SEQ ID NO: 175124 - DNA, 187 bp, Zea mays
  Clone ID: MRT4577_91299C.1
gttctttttttttttttttttttttggttatatgcacgtgggttattgcggaaaccaatcgcgttatgtttttccgagagcaatgttattaactgttagctgaagaattgcaacaacctattcaacaaaaaaaaggctaatcgtctccaaaatacttatatgaacgggtacatttattgacaaggat

SEQ ID NO: 175125 - DNA, 378 bp, Zea mays
  Clone ID: MRT4577_9129C.1
ctgggcttcaaccacctatatttttttatgtgccccaggcccaaacgcatgggttaaacatctttttggcaccccccctataaactaaaaaggggactaaatccccataatacaaaagcttaattttttaagcttacttaaacacttaaaactgcataaaacttcttaaacaataaaacaaacattgggagacgggagtaccccttcccggacccaacccatctaaatgctttggggctttaacaggctcttcctaaatttccaactaaaaaagaaaaatgtgcagcccctccttatttttagaattagggggggtcccccccaccaccccggcggaaaatagcattcccaaaattttttttttaaaaacctccagga

SEQ ID NO: 175126 - DNA, 241 bp, Zea mays
  Clone ID: MRT4577_912C.1
gtgaccctccctcagccgcgtcgcgtcgcatcctacgatccacagctctctctgctcgcagccattgcgatgaactacccgaccgtgagcgccgagtacagcgaggctgtggagatggccaggcgctactccgagcgctcatcgtcgagaagagctgcgcctcgctcatgctccgcctcgtgtcggatccgcggggacgttcgacgtgtcgtcgagaaccggcgatccattgggcacgatg

SEQ ID NO: 175127 - DNA, 1374 bp, Zea mays
  Clone ID: MRT4577_91300C.1
ctcgaggccgggccgggacgtccaggaaaatatcgaaacaaggacgaaaaacacgaagaattacggaagagcaccccatcttcggtttctttcctccggacttcgggttcctgcttgcggcgtccgccaattcccttccctacccaaaccctagagcaaagctgaatggccctcgccacgagctcgcgagagactctgcgccgccgccggtgactgctgatccgcccgccgccgccgcgcccggtgctctgtcacgcaggaggcgacggtatggcgtcgaggcagcacaatgcacagttccacaaatccaagacgctcgacaacaaatacatgctcggagatgagatagggaagggggcgtacggccgcgtatacaaggggcttgacctggagaatggcgatttcgtggccatcaaacaggtctcgctggagaacattccgcaggaggatctcaacataataatgcaagagatcgaccttttgaaaaatcttaatcacaaaaatattgtcaagtatctgggatcactgaagacaaagagccacctccatattattttagagtatgtggagaatggctcacttgccaatattatcaagccaaacaaattcggacctattcctgaatctttggtggctctttacattgctcaggtgttggaaggtcttgtttatctgcatgaacaaggtgtcattcatagagatatcaagggcgcaaatatactgagtaccaaagagggtcttgtcaaacttgctgattttggagttgccactaaattgactgaagctgacatcaacactcattctgtggtcggcactccatactggatggcgcctgaggtcattgaaatgtccggcgtttgcgctgcttctgatatctggagtgtgggttgcactgtaattgagttgctgacatgtgccccgccatattatgatctccaacctatgcctgcactgttccgtattgttcaggatgtgcatccaccaataccagaaggactgtcacctgaggttactgattttctccaacagtgtttccaaaaggatgcgatgcaaaggcctgatgcaaaagcattattgatgcatacatggttgcaaaacttaagacgagctttgcctggttctcttcggcaacctactccattgaggaacatcgatggtgatgatgaaggctcaagaggtgataatagcttgggtttttgcgacacaccaggagatattcaaacaactattacttctaatgttgaccaggagaatgggagtaaagaaccaattatggactctactgtacaaagtaattctgaagagcttcatgatggaaatttaaaacttactgagggcagtagttcaaacagtgtggcgcttatgaaagataat

SEQ ID NO: 175128 - DNA, 562 bp, Zea mays
  Clone ID: MRT4577_91301C.1
cattgggtacctcgaggccggccgggcatgaagatcctcaagaactgccaccgggcgctcccggcgaacgggaaggtgatcgtggtggagtgcgtgctcccggccagcccggagccgacgcaggttgcgcagggcgcgctgctcctggacgtggtgatgctgaaccgcctcaggggcgccaaggagcggacggagcgggagttcgccgagctggccgcggaggccggcttctccggcggatgcagggccacctacgtcttcaccggcgcctgggcgctcgagttcaccaagtagagatacctgctcggtcggctctcccggaggtcgaggtctggatcggaagtggcgccaccacatttggtagtgtcaccgtctgtttatctatctactatctatctgtttatctaatatgtcgtgttcttttttcaattcatgaaaatggaacattgatcgataagggcgttatatgtaagagcatcttcgagaaaatggttcactcagccaaattttagctaatcaatattaaaataactcttctaaaaaaaaaaaaaaaaaagcggcc

SEQ ID NO: 175129 - DNA, 646 bp, Zea mays
  Clone ID: MRT4577_91302C.1
ccggccggggcgccatgtgcgacggggatccagcgcaggtaccgcttcttcccatccagcctgatcgcgctctcgacacctccatctatggtgcctgacgcgcacaccacatcgtcgtcgcgtggttcgtccctgagcagcggacacaactcgacgggttctgtcgtggaggccacatggacggggagcaaggctggggtcgtgcccacgccatgccagggttgtacccacgccggtggggagcagctggccatggcgtcagcggtcatcttcgagacaagtgggagatccaatgtcgcatgaccgacgaggcaccagcaaggcagcgatgcggccccgatatttgaccggtatcctggcttcgccttcggggccaacgactcgaagacatcgtctttcttgtgggagtctgcggcttctacaggaaaccttttttctttctttgctcgtgaagagtagatccaatctactgatcaagaaaattatatcgctcatttacgtagaggaatcgaaggctgtcgcgtaggacagtttggctaggccggaggacctgccggcttgacggggagttgatgcagattcgatctcgcagcaacgttgaggtagagcgtgctgataacgttttgagaactacgttaccacggat

SEQ ID NO: 175130 - DNA, 200 bp, Zea mays
  unsure (1)..(200): unsure at all n locations
  Clone ID: MRT4577_91303C.1
gcgggcggggaactgatgaatagacttaatcctacccaagatgaaagagatgagatgatnaaatgtgnaaatcactgagagggggaagggtntgaanngatttgtatagaggannatgatgggaaggaaagnngtgnngnggngagggagaaagtctttcccctgggtgataggaaggcntggaatgggaaaaggaggag

SEQ ID NO: 175131 - DNA, 599 bp, Zea mays
  Clone ID: MRT4577_91304C.1
ccccgcgtccgcggccgcgtgggcaattctcaaaacagtgtgctgctgttgaggcattaaagcattttattccaacatacctggtatcttctggtgaaaagatgctagtgatattatctcaaaatatgtggcacttctagatgacccaaagtggctgcaagacgaggagctgcactggcccttggaatattaccattcaaattcttgatgttgaaatggatgcctgtcatgagtaaactctgtagctcatgcaccattgaggataagcctgatgaccctgatgctgaagcacgtgtgaactctgttagggggctaatttcggtttgcgaaacactaacagcatcttttgatcagctctcaaatggagattctctatatgcatacataaaagattatgtcatgcgagctttatttagagcactcgatgattatgctgtggacaacagaggagatgtgggttcttgggtacgtgaagcagcaatggatgcgctagtacgatgcatgttcatcctctgcaagagagatattgttgctttgagagcagtgtcagccactggccatgactctgaactgggtgatatggaagtaaatgcaagtag

SEQ ID NO: 175132 - DNA, 212 bp, Zea mays
  Clone ID: MRT4577_91305C.1
ggccgacccacgcgaacggtcaaatccaatcacgcatttccatttcctccttttacatagtcaactcaatttagtttgtcctctttcaaatccgacagtgctccttcccctatatcctctatctccttctttctcccttctctttgctctcatcttactattcctttttatacatcatatcgaccaatttctttattattacctacttctat

SEQ ID NO: 175133 - DNA, 400 bp, Zea mays
  Clone ID: MRT4577_91306C.1
aaatgtcctttctggtgcacaagagggaaagaagggctccggggtgggacatagacttgcagcgacgcaactccagcaccatagtgcgctgcatgagcgacagaatgaatatgcatgcatgacgcatgcgaccattcggatggttgctcgcgggcacatgcaggacgaagacaaggcgggagagtggaaccttaaaagttcccggatgcctggtacgtgacgccgaacctgcagtgagcggggagaacgtgccatgaggaggacgtgggggggacgctggtcatgacccggaacgtcagcaactcggatgtgaggtcctgcccgggctgacacactcgcccacagctgcgctagatgtacgtccacttgacgcgcttgctccccttcaccgacaccgacg

SEQ ID NO: 175134 - DNA, 321 bp, Zea mays
  Clone ID: MRT4577_91307C.1
actagggcgctagagcgcgcgagccgcgcggggtgattttacaagacacctcgtggtctccggggctcacagacagctaggtggccgacaggacagaccactcgacgggaaccatcatgccactcaccacacccacaggcggctaccgcgtgcactcatacctagaccccgcctagccaaaccacaggccgaccaagacgctactgttacacctcacgacgcaccggcggctgcacatgatgcctaagttgctcaaggaggacgagagacctcttttgactaatggagaacaagcttgccagggtcggcaaggccaacttt

SEQ ID NO: 175135 - DNA, 608 bp, Zea mays
  unsure (1)..(608): unsure at all n locations
  Clone ID: MRT4577_91308C.1
aaaccagctgccaaaacctactacatgtctggtggccttcagcctgtgcctatagtcttcaggggacccaatggtgcctcagcaggtgtagctgcccagcactcacagtgctttgctgcctggtatgggcactgcccaggcttaaaggtggtcagtccctggaattcagaggatgctaaaggacttattaaatcagccattcgggataacaatccagtggtggtgctagagaatgaattgatgtatgggttccttttgaatttcctccggaagctcagtcaaaagattttctgattcctattggaaaagccaaaatagaaaggcaaggaacacatataactgtggtttcccattcaagacctgtgggccactgcttagaagctgcagcagtgctatctaaagaaggagttgaatgtgaggtgataaatatgcgtaccattagaccaatggacatggaaaccatagaagccagtgtcatgaagacaaatcatcttgtaactgtggaaggaggctggccacagtttggagtaggagctgaaatctgtgccaggatcatggaaggtcctgcgttcaatntcctggatgctcctgctgttcgtgtcactgga

SEQ ID NO: 175136 - DNA, 254 bp, Zea mays
  Clone ID: MRT4577_91309C.1
aattaaaaccaacaggaattaataattgtgcccggttatttttttatattaaaagagggatctgtctggcgcttattctgcctttgggcgaaaaaactttgatgctgttttgagctttgtgctcaaataaaaaaccttggtgttgtttgcttgcaccatgggtgccttttttaattggaaaaggagcttgtgggcttgttcaaaatgaggggtcgggggttttttaaccttgtgcatacagacaaggattcttt

SEQ ID NO: 175137 - DNA, 438 bp, Zea mays
  Clone ID: MRT4577_9130C.1
gttggaacctttgggctgatttatgtgcttggcagacaaaaagaatatttacccattagggccgtctcctcctacttcgtcaacttaaatggagatcgatattcttccgttaccgtcaatgtattactagaagtcgctaataaataaaaatactactactcgatgaccagtagttaaaagtacgcttcgtctgctctccggcgctagatgtggtcccgcctattgcttgctgcggatgtctcgtctagcgggtgacttaggggagaagggtatgaatttgtggttgttaaatacgggttgtacgagtgtgctgctgaatccgtgttagcagcagcgtattgcgcgggccggtccgtccaggagtacttggaggtcggatggttctataactcgcgttgattttgctctgacgcttgagtttcggcctcagactgtgag

SEQ ID NO: 175138 - DNA, 254 bp, Zea mays
  Clone ID: MRT4577_91310C.1
ggaaagcagatcagcgtctgaagaaggcggtattcagggaccgaagtcagtccagccaagcagcaacaaggagcaccggttgtcaaaacgcgtcaggaagcccaatgtccgtgtttcaggcccagaatggagtatgtaaggtgttacgtgtgtgtgcgtgaggctggatacttaagccgcgcaagtggcgtggtgtaatcatcttggacaagaaattcctaaatgaaactctgagccgccggctctctacccta

SEQ ID NO: 175139 - DNA, 590 bp, Zea mays
  Clone ID: MRT4577_91311C.1
cctgggagcagttaatcaatctattcatccacacaaaatgtcgaacaaggctgcatacatcgtcgaggccaaggccaaccctctggaggtcagagatgctcctctcccgtctgcgggtaagggagaggtcgtggtgaagaaccatgctgctgctgtcaaccctgtggactggaagatccaggattatggcgctttcctcaagacataccccatggtgctgggcactgacgtggccggagaagtccacgaggtcggcgagggtgtcactcacgtcaagaagggcgaccgtgtgctcgggcacgccttctcgctcgtgagccagaacccccaaaacggcggcttccagctctacacttcgctcaacgcgctcgtcgtgtctaagatcccggattcgctgtcctacaacgccgccgctgtgctgccccttgccatctccaccgctgcagcctgtctgttcaagaaggaggcgctcgcgctgccgctgcccaagacgtccgacgccaaccccccagcatccggtaaatcggtccttgtctggggcgggtcgagcagcgtcggcgcgactgcaatccagctggcgggcggtgcag

SEQ ID NO: 175140 - DNA, 533 bp, Zea mays
  Clone ID: MRT4577_91312C.1
gggggggcaagccaattttattggggaaactttggttacaaacatccagaaacacaggccccggctttttgacggccccttaaatccccttccatagtattagaaaaaattattcctccattcgcactcatatcctgtaaaaccaaaggatatcgaatttcctttttttgaaatccttgcctgcactgaaaactttttttccctgaatcctgaccaaagggtggcatcccaccccccatggaacaatccgcttttgttttttgagctagttggggggaaaaacatacattttgcagtcgggagggggcaccaaagctgatagctggccttgacccaaaaacgacaagggcccccataaatcgcaagcagggacagcaggggaaaaagcaaccccgatgctcgaccactgggcggggagggttgcctggaatccctgccggttccaaaaaaccacggccttcttgtggttgttgaggggcccaccccaaacctccaagccattggtggactgaactttctttccctgcgcacct

SEQ ID NO: 175141 - DNA, 315 bp, Zea mays
  Clone ID: MRT4577_91313C.1
taaaaaaagcaaaaaaagaagaaaaaaaaaaaaaaaaaaaaaaaaaaaaaaaaaaaaaaaaaaaaaaaaaaaattttttgtccgttaccactttagggggaaattttgggggtttccttcaaaaggggggattttcggccttttttggggggggccaattggcccctatggggggcccaattaaaattaattggggggctttttacaaccctggaacaaaaaaaacctggtttaaccaaattaaaacgcctggcagcaaatcccctttttaaaacttggggtaattaaaaaaaggcccaactcaattgcttttcc

SEQ ID NO: 175142 - DNA, 441 bp, Zea mays
  unsure (1)..(441): unsure at all n locations
  Clone ID: MRT4577_91314C.1
cggacgcgtgggtacaaaaataaggaccctgatcatgtggagtgggcaaaagccctaaaagagctgtacattcccaatttacgtgactacgtgaagaggtattacccattgggtcctgtgtggcaaccgccaggaagcgcagccaacaaggcaccttcagctccgtctgttcctcctccatgtctttccatctcttcagcctcgtcgtcccaaccaaaatctggaatgtcagctgtctttgctgaaatcagctctgggaaaccagtgacacaaggcctcaggaaggtaactgatgacatgaagagcaaaaatagaacagacagaacangtgttgtggctgctgaaggaaaagagactcgcaattcacctccctttatttcaactaaagggcctgctaaactggagctccaaatgggccgcaaatgggtagtcgagcatcat

SEQ ID NO: 175143 - DNA, 393 bp, Zea mays
  Clone ID: MRT4577_91315C.1
ggaccccattattcaagctttatattttatacaaaagccttggacaaaaaaaataactctccttattacattggggacgggaagttcaactcctttttattaaaacagaccaaacccgcaggagggattattaatgcaacgggaaaggatccggggggaaaaaacagggtaaacccatcccccaagtacataaccctccacaacaattattgtttttaagctaaccacacaaagccggggccaccatttaaagggccgggggcaaaattccacttttttatttttggccgctgaagcaccacccccggggggttagaccaggggttttgattcactggcaccctcattgtttttttgagctgcaggcttgtttggacatgccggggggacttt

SEQ ID NO: 175144 - DNA, 629 bp, Zea mays
  Clone ID: MRT4577_91316C.1
aaatgtgcatacctctctgactaacgtgactgttacccccactctcgatttcgactcctcgaatctccccctacctctactactgtcctcctactgcggcccgtaatgcgaagatttgatcaaaaattgtgactacatagcatcacctgtgaaggggatcctcgctgctgcatgagaccaccggaagcatcggataagcgcattaggcaggatatatgctcagaacattgaggactaccgtcctgtgctcagagagttcatcattctgcacacccttgtgcgtgcatcacagacactctcaagaagggtggtgcatacctcctctcagagtgagtacctctcgtactcacgaggcaaccgaatggtaggataagttcgcttcagaccactatcctgcaaggcacaataatgctctccgcggaatcaaggtgacaccatggtaccatgtaggttgctggaaccaaaggagagagcacctcccaccggattagatgaccctgatcagtgctgcgccaagtactatgaggctgatgaccgttgctgaatagacgtgcagaacttatgatcgctgccactggtccatcgccgttctccatcgatgagaatgctcaggctagagcctcgctgtg

SEQ ID NO: 175145 - DNA, 309 bp, Zea mays
  Clone ID: MRT4577_91317C.1
tttaatttatggtatttcatcacatggatatatttttaacagagaggaaggcagatttaataaaatatgtacaataattagagcactaagcagcattaggatctgagtattaattatacaagctaataatatttagtcttgagggctcctttagaaggacaatctaccctacagagaaacgagccagcctatatgaactgattgtagggttgttagcactacaattttagggttataacaggggttgcacagaatttagagattagctattctttgaactaatttcatgcacttgcacatatcattctt

SEQ ID NO: 175146 - DNA, 386 bp, Zea mays
  Clone ID: MRT4577_91318C.1
attttgatcattcagaagcacgccatgcgaagcacattaacaacaacctagcaacagtgggtacgcggacatgatcgcgccgtgcgctacttgcgcgttttgcgagcgcaacaaatgcgttcattattccacactgctgactcgctccaagttccatcattacacagatcctcccaccagttactgcgttgagcttctaacacccagctgtgcaagcgtatacgctacaacaagcaattgtgcttagcgtaatacaacaaccaatttccgagatgcaacaacaattcttggcacatgtaacaatacaaaccattgcaacgcaacagcaacgacaattttctaccatcattgagccacctaaccatggtgaaccctgccggctactt

SEQ ID NO: 175147 - DNA, 1853 bp, Zea mays
  Clone ID: MRT4577_91319C.1
aaaaaattaaaaaaaaaaaaaaaaaaaaaaaaaaaaaaaaaaaaaaaaaaaaaaaaaaaaaaaaaaaaaaaaaaggctgtcttctaactctctctctcgagttcatagtttttgctcttcctctctcatggtcacaatgcttgcagctagttctctagtgaacagcaacctcgcttgctcatcaaggatatcatcctgttcagacttcacatatagccactcctggcgtcccatacatgctatgaaactccatcagatgcgtgctgtgagctcaatacgtataagttgtgctgccactaaacctgcaaagactcctgctgaagaagaatggaaagttaagcggcaactgctatcagaaaagcgggtacgaagtgtcgatgtgaaggaagcactgcgccttcaaaaggaaaacaactttgtcattcttgatgtcaggccagaagcagagtttaaagaggctcatccacctggcgccatcaatgtacaaatatacagattaatcaaggaatggacagcgtgggatattgcgaggcgtgcagcgtttgcgttcttcggcatatttgctggaacagaagagaatcctgagttcatacagagtgttgatacgaaggttgggaaagatgcgaagataattgtggcatgctctacaggagggacactgaagccaacgcaaaatttccctgatgggaagcaatctcggtccctgatagctgcgtacctgttggtcctgaatggctacagcaacgtgtaccatctggaaggaggactttacacatggttcaaagaaggactaccagctgttgcaggagaagagtaagagagacattacgacatagtgttcgcatgctggagagagtggagagtggagactagagttgcgaggacttgtagtgatgtgcttgcttcacagtcacagggttgtcgattgttgtgtacggattgagatgtcgaagatttctcctgccaaaaaaaaaaaaaaaacgacctaccggccggggtggcgcctttgttgctcgaacttgtcagtgcttgagccatgcatcgtcatgagcaagcgcactgcgagctcctcttcatggcgctggtctccatgatggagcccacgtccaccgcggtccccttgagcgacagcacctcgccgccgctgtcgccctggtcgccgcgcatccggcgggcctcgtcgagctccagcgccctgcgcgacacggcggcgaagacctcctcgaggagcgtgaggaaggcgcgctccacgttgtcgcccgtgagcgcggacgcctccgagaagaagaggccctggtcctcggccaggcgcgcggcctcgtcggcgggcacctcgcgccgcgccgcgggcatgtcggccttgttcccgatgagcgccacgacggtggacccgtcggcgtgcgcgcggagctcctccacccaccgcgccacgtgctcgaaggtggcgcgccgcgtcacgtcgtacaccaccatggcgcccagcgcgccgcggtagtacgcgctcgtcaccgccctgtacctgcgctttgcgcgcgcgcgcacgcgccaggaaatgcggtatcagaaccaaaacatgcttgatgtttctctcgcaccatccacgtgttaactgacatttggaatttggaggagaaccaaccagagtgttactatactagtatcattcggaagatcaatttcactgtaatagaggcaattaaaatttcttttctgcttcctgcgaaattcttaggttctcaacctcctctggctacaggggattgaacaaaggaccaatctgacagaaacaacgaggtgccaagtgccaagtggtacgagttgcttcaaattctgaattgctaaactttctgccc

SEQ ID NO: 175148 - DNA, 201 bp, Zea mays
  Clone ID: MRT4577_9131C.1
aacaagaacaaatccggatccctttaaatttttgttccggatgaacgatccgagaaatgcattaatttttttggtgggtttattattcaaacatttgattttgttacagagctaattcttaatgccctatgcttttcccagtttcttggggggcgattgttcccctcccagaaaatttaggggcattttggggaaccccct

SEQ ID NO: 175149 - DNA, 750 bp, Zea mays
  unsure (1)..(750): unsure at all n locations
  Clone ID: MRT4577_91320C.1
gccgacggacgacagcaccgacgcgtagaacgggtccgggaggtgcgtgtacgtcgtcccggtgtccaccagcaccccgccgttgccctgcgcgtcgacgccgccgcctcctagatcgacgccctccangcccacgtagtagaagttcgggtacgtggcgctcgtcagcatcggggtgaagacgaagccgtccgtcgccgacgacgccagcgcgaggtcgcccatcaccagcgggctggtgaagttggggttccgcgcgaaccggaagccgaggaagcagtgcgagaagcccttgcccaggaacccgagctgggacggcagggacagggcgcccctgccgaacccggcgatgccgatcggctccctgacggagctgcccacgcagccgaagcagaggccggggaaggccacggggagagggccgccggcgccgctgctcccgtgcagcgtcaccgagtccctggagagggagccgaggaccagcgcgccgccgccgtacgtgtaggagaagggagggcagggcctggggcacaggccgccggtgaaggccgggatggcgcaccccgcagccgcgcacgggtcgaacctgttgtcggcgctgtggacgtccacgcagaagcggctcccgcagaggtccctcgcgttcgacgaggactcggacggcaggaacgtcgtggtcggcggcggcgtcacggatgaggacccgccacactccgtgcactggtagccgctgctgccacagggaaccca

SEQ ID NO: 175150 - DNA, 2497 bp, Zea mays
  Clone ID: MRT4577_91321C.1
ctgaggctccaaaacttcaatcttctgatgctagtaggttccttagtaatgcacatggctgcgcattgggtggctccaacaagcagactcgcagtgcatagctctggttttacctaccaatgtgtaggcttcaatgaatctattggattctcagaggtcttgcaaggtcaagaaatttctcgggcggttcctaagttccaaggaatgatgtcggaagcttgttcactgaaagacagatatgggctgcatagttatatgcgtgccccagttgctgttaatggattatcagctacaactcaagaatgttctctcgcactatctactccgccaggagcacaagtgccctctctctaccctggtaatgttgttaaccgaactgtggttccacaacttggactggcaaggaagtttggtggtggaggtacaaatggccagcagtctggcccatttgataggccgagggaactttggaccaggccaccgcatgaaacacctgaccaaatgaacttggatcagtttgagactagaagaccttcagcgcctgtagatgctgctaagcttgggtctggtggaggggaggttcgcaaaactagctgcagactttttggtttctccttgactgaaaagatcttgccagcagatgatgatgacgtcaaggaagtgagctatgagacggagtgccagaacccacggatgctggacctgttcgggtacaactgctcaaccccgagtgctgctcttccagctctgtgtgctgccgccccctttggaatgtgatgctgcttcgaatctttcgataactttgctccatgtactcttagaagttttacatcattccctctggtctgcttataagctgctttttgacatcattccctctggtctgcctcaagttaagcagtcatttgcacaagtaaacgaaggttcgttggtgaaccactcctcgacatgcctcaccctgtcacccaaactattgtggttagtctcaggatacccagagacaccacattgtaacttacgtcgatgatccttcagatctagtgctaaaagaaccaagttgtgtcctcagggaaatttggacgttccagcaatgtggaatggttgtactgactccatggaaactggaaagttacccagggtcttgcaaggtcaagaattgatgagttttaggacttgtcatgttccgtgtgctcctcaaactgctgaggctgcaaaacttcaatcttctgatgctagtaggttccttagtaatgcacatggctgcgcattgggtggtccaacaagcagactcgcagtgcatagctctggttttacctaccaatgtgtaggcttcaatgaatctattggattctcagaggtcttgcaaggtcaagaaatttctcgggcggttcctaagttccaaggaatgatgtcggaagcttgttcactgaaagacagatatgggctgcatagttatatgcgtgccccagttgctgttaatggattatcagctacaactcatgaatgttctcttgcactatctactccgccaggagctggggtgccctctctctaccctggtaatgttgttaaccgaactgtggttccacaacttggactggcaaggaagtttggtggtggaggtacaaatggccagcagtctggcccatttgataggccgagggaactttggaccaggccacagcatgaaacacctgaccaaatgaacttggatcagtttgagactagaagaccttcagtgcctgtagatgctgctaagcttgggtctggtggaggggaggttcgcaaaactagctgcagactttttggtttctccttgactgaaaagatcttgccagcagatgatgatgacgtcaaggaagtgagctatgagactgagtgccagaacccacggatgctggacctgttcgggtacaactgctcaacaccgagtgccgctcttccagctctgtgtgctgccgccccctttggaatgtgatgctgcttcgaatctttcgataactttgctccatgtactcttagaagttttactttcccagtaccccagtgtagtcataagctgcttttgacatcattccctttggtctgcctcaagttaagcagtcatttgcacaagtaaacgaaggttcgttggtgaaccactcctcgacatgcctcaccctgtcacccaaactattgtggttagtctcaggatacccagagacaccacattgtaacttatgtcgatgatccttcagaactgttgtgcgatgaagctaacaatttgctctaaaagtactttgcttgctctaaaagtaccggctatgtatatttaaatcagcacctgtatgagtttttttagccctcacaagccctggttgcaagtcgactaggccgtgtgattgtattagtatgctatctttttaaactgtcgcttatgagtctttattcttaagcattgggggggaaaaaaaaaaaaaaaaaaaaaaaaaaaaaaaaaaaaaaaaaaaaatccgtg

SEQ ID NO: 175151 - DNA, 422 bp, Zea mays
  Clone ID: MRT4577_91322C.1
tctcattatcagatctattatgacgtctgctcccccccgtcagctgctaagaattctagcgctagcattcgcgagtggcgggctgacaagttcagttatgatacatccagggatcaactgaaacactgtacctgaggaatgacatggccgagccatacgcattgaatgagcaccatgccaccatgccaaagggtgcagagcattatcgacattcagaacaccaagacttgtatactgcatgtcgtcactaatctcatatggctaggcagggaggcacttatcaagcgaggataagggaaagatagaccctctgcacctacaaggtccttatttgctgggagccaacgcaagggcacaccgtgtacaggatacacccccgggtactgtgatcactggactcccttatcccaatggtattaaat

SEQ ID NO: 175152 - DNA, 447 bp, Zea mays
  unsure (1)..(447): unsure at all n locations
  Clone ID: MRT4577_91323C.1
actgactagtatgttgttatactattcatccaagccattctccatctattttttacaacaggccacaaccatatagcgggcgcgggttctataataccatcgcacaccctatcgcactcctcatccccctctgaaaagcagctatcaaaagcactctaaccttttataactagtgcttcctacacctaccatcaatactcgttggccccaaatgcttacatgcctacaccctcctactacaccaccttacctcttaccacccccaccttctcgcctttctcgcagctatccccactctactcgtcgccttacgccgcttcaaccgcgtcntgcgtggctgggccgaagggcctgaaccacctcgacccgtcccacatccatcagatccaaacccagcttatgttccagcaccagcaacagaagggcctgcacgcagcgttcctgggc

SEQ ID NO: 175153 - DNA, 951 bp, Zea mays
  unsure (1)..(951): unsure at all n locations
  Clone ID: MRT4577_91324C.1
nnnnnnnnnnnnnnnnnnnnnnnnnnnnnnnnnnnnnnnnnnnnnnnnnnnnnnnnnnnnnnnnnnnnnnnnnnnnnnnnnnnnnnnnnnnnnnnnnnnnnnnnngaaaagtacgacacgtccaaaaaaggcgtgccactagacatccattataactggccggtaagtatgtgaatttatgaatacatatcatacatgtacgtacataggacaatgttgcaactaaataaccaatctcccgttatgtagtgtcacaagcaaccacccggatcggtgctatgtggattctacgtgtgcgagttcatgagaatgaacggacgatacatcacgaaccctggcaaggtattattagtaatagtcacgtatgtatttatgtcattaaagatgcaaatgtgttattattgagtataaatagatgatgtttataaacttcctttacagcaatttcaacaaggaagcccggagaacttgactgaaggtgcattgtatggcatagttgaggacctggctgccgcgacaagacaaatcaaattgcactacaaaacgaataggaagatattctgctcaacaacacagattgaatatgaaccttctggaccatataaatagagcgtagttcattcgccattttcacaagtcagaagcaattctgttaatcaacatggaacgttttggtcagattgtaagcaaagatactatacatatggggcacggatatagatagacaaaatgtatacatgaatactcttaaaagcacttgaaggagttgcacctagatcaatttttccccaagctaagtgaaacagagagttgagtcagtgcatcataaaaggagtatgagcaattaaccacatgtgaatataacagtttatcctagtgcatcaagttggtataacaccctcagttgcaagcgatgtccaatccattgctagagcttaagacccaattggt

SEQ ID NO: 175154 - DNA, 413 bp, Zea mays
  Clone ID: MRT4577_91325C.1
ccagccggagctggggccctggcaggccgcgctgcagggcggcctgctcgaggccggggtcgcgccggacaacggcttcacgttcgaccacttcgacgggaccaaggtcggcgggtccatcttcgacgccgacggccggcggcacacggccgcggacctgctgaggtacgcgcgcgccgaggggctcgacgtgctgctacgggccagagtggccaagatcctgttcttcaatgtcagagggaggagatcagggaggcggacagcggcacgcggcgtggtgttccacgactccgaggggcggatgcacaaggcgttcctcagcgcgggccgccggaacgagatcatcctctcggcaggcgccatgggcagcccgcagctactgatgctcagcggcgtcggcccagccgaccacc

SEQ ID NO: 175155 - DNA, 324 bp, Zea mays
  Clone ID: MRT4577_91326C.1
gcgcctgtcctcgctcttggaccaaggccgtggctgcggcgtacggaggtttagcgctggcgggatccgtttcgtgacgctcgagggcgtctgcagtttggactcccgtctggagtcgctggtcacctgccgttgagccaacatgcacgtgacaaagagcggttcgcggcgcgttcgattggaggccgtatcgcgcgggagctttgcggctccgatggcattggactgggatatattcagcgtggcgccgttggaactcctgctggacgtgacgaacgaccgcggtgacacgatggactatcagtcgttctgcatcgaggagct

SEQ ID NO: 175156 - DNA, 270 bp, Zea mays
  Clone ID: MRT4577_91327C.1
aggacgcctgggcgacgatgagctgggctcaagcccaaaggaatccttttaccgtatttcagctgatcggagaaacaaacttatgaagagtggcctatctcactcatcttcatcacacggagacaaaaatattgtgaactcgagtcaactaacagaaacccctaagaagttcgatggaaggcaggcccttgaaccgtctgctatcaaccagggtgaaatcacccagctgtcagaaccgatatcatcattgactgactggatggatgagtg

SEQ ID NO: 175157 - DNA, 299 bp, Zea mays
  Clone ID: MRT4577_91328C.1
gggccggaaatcccgggccgggccgacattggccttgccgttgttaaggtaaaattttaagttgttttttgccgccgccttgaattcggggaggggggccgaccgttgccttgggacattacacctgggcaggttccatgaccacggcctaaggtccggccgttttaagagatccggttaagcgggggggggcgccttcccgtcgttggacggggtgccgttgatggggacaatgggggagcacgtggccatgtcggggaattacttggggaccaagtccatttggcatttaatggacg

SEQ ID NO: 175158 - DNA, 243 bp, Zea mays
  Clone ID: MRT4577_91329C.1
acgcgctcacgtaagctcggatcctgtattacgggcgccctcgacgcgttcgtatttttattcgttcctactacctgaatttcaatagcgacggtagatttgttcctgatggagttaacgcgaaccggcaacacaccacatggtattactcagacaaacaagctcctcgctaacgctctgatcgaggtttttttttaaaaacaaactacaacaggaatgccaatccacaccccgaggcttaac

SEQ ID NO: 175159 - DNA, 852 bp, Zea mays
  Clone ID: MRT4577_9132C.1
agcagtggtaacaacgcagagtactcggtgtgtttttttgttgtatattaattaaggcgatcggtttgaagcatcaggaaagatcactagtataaagacaacagctacaaaaaaactaaattaggtgtacaaactactgggcaagacatgcttttgtggcaacagcataacctaactaaacattgagatgattacgattttgcataaggttggtagagattagaggggtgaatggcagtgcaagtcaaagcaaaactattgggttaggaaatcaaaattaagagtaaacttggtaagcatctgattcaattcaagaagctctggactgagtctagaaacaagaacagaacacagatttattatcatcaaaaggtacccccacaaaaaaggaacacacttgcaaataaaacttatccacatgttgaacacgtcttctgattcctgcagaatattgacaaacaaactgaacagacgtatcccatgtggatagtcttcttatgacagaaacacctgcaaatcagtaaattaaaccgagtgcatgtaagtgccaccaatattagaagaatgcaatctttttttttgaaagaaataaagtggagccagagttgctaatgtggaccggcctttgccttgatcgtaaaattttcacaaaaggaagatatgcgtagtgttgatccttgatagagggcatctagaagcacatacggagcacgaaagtccactccaagagtttttggaaggcgcagaaatgctctagagtgcagatcagttgcaaatacagactgcattatcgtcgaaacgtgtcaatgagcttaagcaagaagcaactaaaagagaaataagcccacacaa

SEQ ID NO: 175160 - DNA, 406 bp, Zea mays
  unsure (1)..(406): unsure at all n locations
  Clone ID: MRT4577_91330C.1
tcgctgcacgcgtcgtaagctggtccttagacggccgcctgtggggggggtttggataaaaaaaagcttgttaagtcaatgtcggaaaaaaatatcattgcatgacatcccgtgtctaagtataatcagagttttaaacagatgactgatgagactgatattgcacaanccagaaccaaggggggggggcacctagctgtatagatcgtaattgttaggcggaggaccagccgaagcaaacggatcggatgcagtagtaccagttgtcgtcgactggtatgagaaggggaacttggtgccgaacccacgggactgttggaacgtatgggcgaacgcctggtacttgcggatataagaattaatgacactgtgccgagcattcttgatagactgctgtaagtgagct

SEQ ID NO: 175161 - DNA, 1677 bp, Zea mays
  Clone ID: MRT4577_91331C.1
cactcctatggctgcacggtacccgtccggcgtgcccgggcggggtcggtttctctctcaatctctcttgtctccaagtttgtaaccctagccgccaagcttgaagctccagccgtgctcgtgtagggctgcaggccatctgggctccggcttccggcatccaccaggcgtcaatacggtgcagcgagcagcgagcagcaagtcaccgagcagccgagcgaccgccgagcacagggcaccaccgagcagccgagccaccgccgagcaccgagtcttctctgttcttctgcggcgaacaaggtcaatccagggccgtggtgcgggtgctggtttttttttccaacaagtttatgttggtcgctcgaccgctgcagcaatgaagatacagaaagcaaatgcaggtgtccttacaaacttcgaagtccttgacttcttgcggtcaagaggtgccaaaattgacccaatgggatgtttgggggctgttgctgtatcagagtgtaaggtgtatgagtatatcttaaaaacccctgcttgcaaccagacaagggaatccatttatgaatttgtgaagagaagtgagggtttcaggcttgcagaggctgataagttaaatgtcatcaactggagaccatcctcagctgccgatgcctatgcgatgatagaagaatgtgggaaacgattttccagggatgaacgaggagaagcatgtgatgaagatgaacgagtccaggagtttcttgatatggtgaaggaggttttgccagcccctccgaaagcagaggtggagacagcagaggcagaggcggtggaggcagaggccgaggtagaggcaatgcaagagtgaatgtggtgtaagttaacatatttgagggccagattgcattagacactagtgctaagtgctgcaaggaaacttagaacactcaggtcggctgttagttctggaagctttccccctaatgcttcgtttgaatattatcgtattcatctcaatccatgtatattgaggtggattgaggcgtaaattaaactattttacactccaatctgcctcaatacacatggattaaggtgaatataatctcaatccatgtatattgaggtggattgaggcgtaaattaaactattttacactccaatctgcctcaatacacatggattaaggtgaatataggagtatccaaacaagccctaaagttttttactcttaaccatattctacactcggctgtgtttattgtgatatgctgtgatctgcattctgggcagtgcttcatcatttaacagaaaccccagctgtgtattgccccgcgaaattataacttgcagagtgttacatcagaggattcaaattttcgaaagaatgtccagtgttctcttgctatggacctgcaaaacctatcattggggttctggaaaaagcagtcatcatattcaaaggagcttcggcaacaaaaagaggttccctttctgttgtcatcagataattagatgcagatcaaatgcttgcccaaccctgagtgacatgcttttgttggcgaataccttttacatgctgcatacctgattgtggtggttctttttatctctgcatatagcatgaggagtgcctatagtaacttatgtcaaatataaaaactcggacggtagaagaaagaccgccacccagtattaag

SEQ ID NO: 175162 - DNA, 685 bp, Zea mays
  Clone ID: MRT4577_91332C.1
tgggaccctcgaagccggccgggaatagtttcctcctaccaaaagcagagctattgggagactctatctctcgcgagtacgcactcacacaccacgagcagtgacagcacgattttcgcacaagataggagtattatgatcacacatatccgactacgtctacattgcatattgcaccaattccaaatggactgccctaaggaactctaaccaaatgaatgacaccgtcaacacacacacagaatatactacgcaccacgacactatacatatggtccacgccccgagccaatcatctgaatacacgactctcgtccgagaggatccactataaacgccatgacctgggaaccaatgtgactttcgagggtccgttcggaatgtcccactactccagactattcggtccctccgatacctcactctccacatgtgccgatctcggtagagctatccatcccaccaaccacggtcgtgtcctccatatcagccaatacccgctaagacactcccatccgtgacgtcgtctcacaaagcactccggatcatagagtgaaatagatcgcactctctgttgctagatagatgaatgagtcaaggaacctatcagagaacctggctgctggctttgatgagcctcacataagaagcgacccccaaggtgacactgcccctacgatcgagg

SEQ ID NO: 175163 - DNA, 525 bp, Zea mays
  Clone ID: MRT4577_91333C.1
gggtacccgcggcccctcctcgagttttttttttttttttttttttttttttttttttttttttttttttttttttttttttttttttttttgggggccatattttttttcctttttccaaggaacaggggtccaaatttacgttgtttgacaacgtccccccatgccatgaatcaccaaaattttcttgaatcaggggttaaggaaccaggcagagcattaacagataacaacccatgcaaaatttcttgtacccaaacatcagccagggattagcctgggttctatcttacccttttttttttagcaaactgggcagaaatacagaaacccagaaaaggggggacccacctccaggtctttttttcagccaggaacccccatttgttttattaacaccttaaacggaattcttgggtggttaggcttgaatcgaacaataaacccgtgcttttggcggaaatgacttttttttattgtccaaggttttcatgtgcactggcctgtatgccaatcgaacctttt

SEQ ID NO: 175164 - DNA, 267 bp, Zea mays
  Clone ID: MRT4577_91334C.1
actccaccggcgtttccgtcgagacatccgcataccaacgaggataggaaggtgcactaagactgcgagaacctgaccgctaggtcactgcatcatagacaaggcaagctctcgacgttccgaagcagacgtcgctatacagcatccaggataagaaccttatcgcaccttactaagcttagtactgctctattccctgtccgctactctgatcaatactaccagcaagcgatcgctaccacggatttctctaggctagcatacttt

SEQ ID NO: 175165 - DNA, 390 bp, Zea mays
  Clone ID: MRT4577_91335C.1
caattttcgtcggctttgggaaagccgacgaaaataagtcattttcgtcggtgccgacgaaaattgtctattattgtcggctaaggtatattctgatggtattttggtctgcttgaatttaagagttttctgttttgattgctagacgcttattatcatatgttgttcttgctcaacgaatatgctgtgttctgaatggattgataagccatgacgggtatattttgtgttttgggttcatttatcttctgcatagagtgtgtttattagctgttatgactgtaagtatcgttatagatactttacttattcagagaacttgaccatgtttgctgtacccgcgttatatataaaagttctattgtacttttttatgtggctgctgctatg

SEQ ID NO: 175166 - DNA, 529 bp, Zea mays
  Clone ID: MRT4577_91336C.1
cgtacgaagctcggattcggctcgagctcgaccgctcgagccgctcgagccgctcgagttccgttaacgctctccaatacaaaataaccactcactgaatattcggtcgaagatgtccgccgccgaagaagctaaagttcccgccgtcgaaaagccggtggaggaggtgaaggcgccgaagcttgccaaggagaagaaacctaaggctccgaaggaaaagaagccgaaacaggccaaaactgcttctcatcctccatatctccagatgattaaggacgctttgattgctctgaacgagaaaggaggatcgagtccatatgcgatacgaagtacatggaggagaagcacaaggcggtgcttcctgcgaatttcaagaagatactaggtctgcaactgaagaaccaagctgcgagagggaaactcgtcaagatcaaggcttcgtacaagttagccgaagccgcgaagaaggtgaaggagagcaccgccaaagcgacgaaggaatcgcgtccgaaacgaaacaaaatcgcaa

SEQ ID NO: 175167 - DNA, 369 bp, Zea mays
  Clone ID: MRT4577_91337C.1
aacacccaagcgacgcacattcaccacagcctaacgactatggatgacctgatatcattggttactgagatatttgcccttcttgcgatcgctgcccatgcagtgatcactacacaaggctcacttgttccaaagtgcataattgctcctagtcgtccaaacagcaacgttaatgggatcagaaaactcaattgggctagaacatacggtccagcaagcctacggggtgagagtattactagcagcaagcgccttactgcaaccacaatgcttggtgcatctaacaatacttggcatatgtaacgctacagaccattgattcgctaccaccactgcgacaactagttatggcgaaacttggccacctat

SEQ ID NO: 175168 - DNA, 123 bp, Zea mays
  Clone ID: MRT4577_91338C.1
tggttcctcatacctgaattgccctaagaggagcggcatccataccagcatgaggatggacacctatctcgaaaaatgcactggctttgacagcatgccactgcctatgcagctgcaaatgcc

SEQ ID NO: 175169 - DNA, 395 bp, Zea mays
  unsure (1)..(395): unsure at all n locations
  Clone ID: MRT4577_91339C.1
aaggnncgacccgagcgacccattctagatgtataaacacacccatggctcattatcttattctattagcactgcttaagcagcgacagagccaactaattgaaaatcatcaaattctcatattcactatatttccttctttttttttgattatctttacctttaattcttaccctttccttctaaaaatgatcaattcacttcatagatacagctctatagtcataggtagtttctaccccccaaatattaacccccatcctcctgcatatgcccattgaaaaatttatctatattaacaacagcatttcttagatcacatcacacataacatttatatcacctctaatccataaaaatgttccctccccacaaataaagtaaaggcttaaaca

SEQ ID NO: 175170 - DNA, 278 bp, Zea mays
  Clone ID: MRT4577_9133C.1
ccagaccctaccctacgctcgttcggcagtagccctaatcgaaccgaggacgcccccgataggaggctcgacgatgctccgcgaccaggacgacagcgactagaccagcgaggagtccccagggtcaggtcttccaggtggaagacgccgaggaggccgccaagcaatcctccggcagccagccgctccggaccggcaccccagtcgacctcggcggcgtgctcgatcctgcctgccatgtctccccctaacagcggcacaggctactcgtaccacac

SEQ ID NO: 175171 - DNA, 643 bp, Zea mays
  unsure (1)..(643): unsure at all n locations
  Clone ID: MRT4577_91340C.1
ccaaatatcctatgtcaattaagttgttgaactattcggtcacttttactagttgagggaacttcctttatgtatttattgtttactgcaggttcttttgctttgcgtcttttcactttcagataacggaggtcgatcttcatttaggaagcttatacgacccttcaacagtgtcacaattgtgctacagggacagtgtctccacagtcagtgccttttgttggcagatgccaagatctgggttctgcactaccagcatgaaaagctgctcaaattgttgaaacccccctatttggcttctcctgcatcaatgcatcatacatcctctctggctctggatttttttttcaagtaatagcatttttacatgttcgagcaaattatctgttattaagagaactttagcagggcaatatgtaaagcaatcatatactgttagctatattttgaaattcctttccattttctctcaagcaattttcctctgtatgtccaggtatttatgtcggnggaagcaaagtggtccattttacacgtaagagagaaactgaaacttcagattcatcagactccacctccagcctgatctcagagatttcatcagagtgccaaacattccctgattgtggatttcagctgtcta

SEQ ID NO: 175172 - DNA, 561 bp, Zea mays
  Clone ID: MRT4577_91341C.1
ccggcccgcccgtggcagaggccccaccgccgctgccacctccgccatgcgccgccccaccttgatgaatggcgaccctctcgatccgcgaccgaggagtacacaccgacccgacattgtccttgaaggccgccttaccactgcagcggcttgcgagatcagtctgcctcgtccagctccagtctagcactggcacagcctcgttcgagacctgatcacgtacatatcacaggtcagatatactctctgttcccctcgacgccagaatccactgcccgaggataatgtaagaccttgatttaggatcgcgtgagacagagagctgcatcgagacgacacaggacatcgctgatgtacctgcaggattccaagcaggggagcaaagggtagatcacaatcgacaccgagatcttcgaggtgacaccgttctataacgtactcaaggtgaagaagactgcaggagacacgctggagacatgagatcgtctgcagcgaggtactaagaccttcactcagcgacatctgctgaagcagccgatctgaggagaacatggctccttc

SEQ ID NO: 175173 - DNA, 400 bp, Zea mays
  unsure (1)..(400): unsure at all n locations
  Clone ID: MRT4577_91342C.1
aaaaaggggcttttgaaaccaaaaaaagcaaggggcaaaattttgggggggggggggccaaagccaaaaaagggggccccgggttctttttttnnnaccaacatgtctttgagcggtaaaaaacctcctctttatatgggtggttggtgccaacccaaattttccccaaaaaataacccgggttggtttgggttcaaattccaacggaaattgcaaaaccccttaataatccttttttccggtaattttttagggggcagcacccattttttttaaaaacacacacatcccggaaaaaaattttttgggggaaaaaccagacccggggggaggggttcttttttgtccaaggggaaccctcccaacttttaagcctatccctttgaaaatttggggggtt

SEQ ID NO: 175174 - DNA, 1580 bp, Zea mays
  Clone ID: MRT4577_91343C.1
cacttccacagtcagtgccttttgttggcagatgccaagatctgggttctgcactaccagcatgaaaagctgctcaaattgttgaccccctccccctatttggtttctcctgcatcaatgcatcatacatactctctggctctggattttttttcgagtaatagcatttttacatgttcgagcaaattatctgttattaagagaacttcagcagggcaatatgtaaagcagtcatatactgttaactatattttgaaattcctttccattgcctctcaagcaattttcctctgtatgtccagattggaaatctcgactccgtccgggcacaaccgctctatatgactccatcctccccccttccccctccccgtgatggctgcaatggatgacgtaattgtagtggagctgtagaggcggcgggggtgcggttgcgacgggctgtgctgcgccgacaagctgggaggaggaggcggcggcggcgggttgggacttgggatgggtcttctgtcgaaccgggtggagcggtcggagatcaggcccggcgaccacatctacacctggcgggccgtctacgcctactcccaccacggtatttatgttgggggaagcaaagtggtccattttacacgtaagaaagaaactgaaacttcagattcatcagactccacctccagcctggtctcagagatttcatcagagtgccaaacattccctgattgtggatttcagctgtctaatagtggtgttgtcctcacttgcttggactgtttcctccgcaacggctccctctattgcttcgagtatggagtgccatctgcagttttccttgcaaagtttcgtggggggacctgcaccattgccgaatcagacccaccagaagttgttgttcatcgagcgatgtacctgcttcaaaatggtttcggaaactacgacatgtttgagaagaactgcgaagacttcgcactctactgcaagactgggcttctacctgttgaggagcctggcattgggactagtgggcaagcttcttctgctattggtgtgccgttggcagctcttctgtccactccgttcaagcttctggctgctggtccgcttggaatggccactgtcacggctgggatgtactgtgctggcagatacattactgacataggagtaaggaaggacgtagcaaaagttgaagtggagaaattatcatcgcaccccggtttccaccttgttgaagatgaagaatcagtcaacaagcgatcagaaaaaccaaagaccttgctccctatgaagaggaaacgagaaaggtgactgcgaagcacagcttaggaggatgaacttctcttcccttcaattggtgtggaattgtggataatttgggatatgataataagactcgatggtatagatatgtgccttgcgaatgtatcataattggattaggcgcacccctcacctgatcaactgtaactgccttataaattcaatcaaattgctatataatgtagattttttttctttgtgagacttcagtcttctgctgcaattaataacagttataattttttttctggtctggggggccc

SEQ ID NO: 175175 - DNA, 681 bp, Zea mays
  Clone ID: MRT4577_91344C.1
accgcactgctccacttcgccttctcctccaagccacgaactccggcgactccaccacaagcccccgagcagcccgccctctccgaccaccgccatgtcgaggcgcggcgactgggtctacgagaacaacggcgggacctgcgtggccatcgccggcgcggactactgcgtggtcgccgccgacacccgcctctccgtcggatacaacatcctcacgcgcgagcactccaagatctgcgagctggccgataaatgtgtaatagcatcttctggcttccaaggtgacatcaaagctctacagaagaacttagctgccagggaactgctataccagcaccagcacaataaaaggatgagctgcccagcaatggcacaattgctctccaacaccctgtactacaagcgattcttcccatactatgctttcaacatgcttggtgggcttgacagtgaagggaaaggatgtgtctactcatatgatgctgttgggtcctacgagaggaccggttacagtgctcagggatcaggatctaccttgatcatgccagtgctggacaaccagctaaaatcacctagtccactattagttcctgcaagagatgctgtcacccctttgtccgagtcagaggcggtcgacctaagttaggatgtctttgcatctgcaactgagagggacatcta

SEQ ID NO: 175176 - DNA, 479 bp, Zea mays
  Clone ID: MRT4577_91345C.1
actgttcgagagaactagtctcgagttttttttttttttttttttttttttttttttttttttttttttttttttttttttttttttttttttttttttttgggaaaaaaacaacgggcactttctcttaacattttcaagacccggtcccccggggtatactaaaacacgttttcacccctgctcagggaaaacaaaaaaatttattggggggggaaaggaaaacccatccaatttttttggtttttccaaaacacaaaagcggggcaaaaaattgaacgggaaaattcaggaggccctgaccctttttgaaatgccatcgggatttgaattcaacctttttttttcacccaacgtggggggaaggggtaatttattcgcaacccgggggaaaacccatccatcaatctcccctatttggcaacctgccaaactttgtttgcctaatggccgaagcaagcgggagcctaacccccttg

SEQ ID NO: 175177 - DNA, 868 bp, Zea mays
  unsure (1)..(868): unsure at all n locations
  Clone ID: MRT4577_91346C.1
ctcgaggccggccggggccgtgttccaatcaccgaaaaccaagccgccatcgcctactgagagcctcgccggtgagagagagagagagattcgcgccgccgccagggatagccgtcgctggggggtctctgctctcggagttggcttttggagtattgtcttcgcctggggaagccgtatgtgccaagcaattgggtcgtgaggctgtggagcaacgtcaatttctcgccgtcgaccggaatcctccgcggatccccttcttccgtgactgggtacttcatcggcatcagtggcggtatgtagtgcatccatgaatccgctttaacctccgcttcgagtagacgctatcagacctaggtatagtcttggtgggtgcggccgtaccatgtcgccggtgtgatccgccgccatgcgggcatggcgcctctgtccgtagcgcgggggagggaagaagtcgtgggtaccataggattgttcatcgacggctgtaattggatcctggcgtaacgattggaggcaagggaatcaggaccgttcaggtcagatcgtgcggatcagggtgatttcggggcaaatatgatctgcactgttgatgttggatcttagggtcggaatcgcgtaccggttcgctgggtaataaatctaatctaggcgctaggcttgcgatccaacagccaggggctgcttatacccatcgccgtgcccctttttactnaagagaccttgngttttangggtaataacccgcagtccacagcagggattattctaagtcttgggatttattgcacccgagaccctggtctctctggtatttggcgccccagtcggagattggaaaatcagagaaagtaattagaatagtttt

SEQ ID NO: 175178 - DNA, 952 bp, Zea mays
  Clone ID: MRT4577_91347C.1
ttccgttgctgtcgggctgctgcggtcacctccattctcgacgacggataccttagtggtatgcgagagatcactcggcgccaaccagggcggcccaagcatgcctctcgtccagccttttgtcaggggcgagatgcttcccagcgggttcttggtccggcctagcgacggcggaggcagcgtcatacacatcgttgatcacatggacctggagccttggagcgtgcccgaagtggttcgcccactgtacgagtcgtctgcgatggttgctcagaagatgtcaatggcggccttgcgctatctcaggcaggttgctcacgaagataccgcccattctgtgataaccgggtggggacggcagcctgctgctctacgggctctgagccagaagctcaccagagggttcaatgaagctctgaatgggctcgctgacgacgggtggtctgtgatcggaagtgacggggtggacgatgtctgcgtctctgtcagttcatccccgagtagagtggtcagctgcaatgcaactttcagtaccggacctgtagtcggcactggcagcagcagtgtgctctgcgcaaaggcatccggctcgagctaggacgtttctccgccagagctcctgcgcttcatgcgggagcagcggtcgcagtgggccgacagcaatctagacgcgttcttcgcttctgcgatgaaaccggatttctgcagcttgcctattcctcctcgccttggagggtttggtggccaggtcatacttcctctagcccacacgtttgaccctgaagaattcctcgaggttataaaagtaggaaatgccggtaactaccaagacgcgctcctgcaccgtgatctgtttctgttgcagatgtacaacggggtagacgagaacatggcaggcacttgttcagagctcatctttgcccctatagacgcatcgttcagcgacgactcg

SEQ ID NO: 175179 - DNA, 310 bp, Zea mays
  Clone ID: MRT4577_91348C.1
ccctctccttatcccgcaaccattataatttcctcttccacactctgcctatagccctagttgactttaacagatgcctaccatcataaccgtctcaataacgctgcagacttcactacccagaacatgccctagtctatagcctatgagcccaataaagtgtacggccaacgacagatctaccgacctgtcaagaataattacactcatacctacaacaaattcataaacaaccacgagagctgcagcacttactacataacatccattctccaaaaattctatactgatcatatccaacactacaaac

SEQ ID NO: 175180 - DNA, 260 bp, Zea mays
  Clone ID: MRT4577_91349C.1
cgcgtcagaaccattcctcccaacaccacctcgccgcgatctccgtagcctccgtcgcgtcgagcatcgatcatgtcggcctactgcggaaagtacaaggatcagctcatcaagaatgctgccgacattggcagccctggcaagggtatcgttgctgctgatgactctactggcttcattggcaggcgcctttccaccgtcgacgtcgataatctacaggacacggtccgctgcccacggtcagtaccaatcaggtagtc

SEQ ID NO: 175181 - DNA, 231 bp, Zea mays
  Clone ID: MRT4577_9134C.1
ggtgtcttcggcaccgtctacaaaggtaggagtagaagtgatctcctaagccctagctccaccatgtgtttggtcgtgaccattccaacccacgtaaaagcagcacctattaacacaagcgccggtcttcttctttcttctttgtgctcggtccgtcaaggtacctcaaagaccggccccttgtggccgttaaaccgctgtacaacaacaacttccggcgcgtggagcaat

SEQ ID NO: 175182 - DNA, 2740 bp, Zea mays
  Clone ID: MRT4577_91350C.1
ggcaacattcaagctcgagtgtgagaactcgctgcgcaagaaaaaaaaacggtttgagagcttcgtgcccgtgccggacaccctgcttgagaaggcccggcaggatcaggagcatgtcacagcacttgaccctaaaagccgtgcggctggtggcacagagacgccatgggcgcagactcctgttactgatttgacagctgtgggcgagggtcgtggcactgtgctctcgctcaagttagataggctgtcagattcagtttctgggctcactgtagttgatcccaaggggtatttgacagacctgaaaagtatgaagattactagtgatgcagaaatttctgacatccagaaggcacggctattgctcaagtcagtgacacagacgaaccctaaacatccacctggttggattgccgctgctaggctcgaagagattgctggcaagcttcaggttgctcggcagctcatccagcgtggttgtgaggagtgccccaagaacgagtgggtttggcttgaggcatgccgtttggccagtccagatgaggcaaaggctgtaattgcccgtggtgtgatgtcaattccaaattctgtgaagctatggttgcaggcagcaaaattggagagtagtgatctgaataagagcagggttttgaggaaagggctggagcacattcctgattcagtccggctatggaaggctgtacttgagcttgcaaatgaagaggatgcaaggctgttgcttcacagggctgtggagtgttgcccgttgcatgtggagctttggcttgcccttgcaaggctggagacctatgaccaagcaaggaaagtacttaacaaggcgagggagaagctccccaaggagcctgccatttggattacagctgcgaagctagaggaggctaatgggaacacacaatctgctaacaaggtgattgagagaggtattaggtctcttcagagagaaggaatggatattgatagggaagcatggttaaaggaagcagaagccgcagaacgtgctgggtctgttttaacttgccaggctattgtgaagaacactataggcattggtgttgatgatgaggatcggaagcgtacatgggttgctgatgctgaggaatgcaagaagcgcggttcaattgagacagcgcgcgccatctatgcacatgcgcttactgtgttccttactaagaagagtatttggctgaaagcagcacaacttgagaagagccatgggactagggagtcacttgatgcgctcctcaagaaggctgttaactacaatccacgagctgaagtattgtggcttatggctgcaaaggagaaatggttggctggggatgtgcctgctgctcgtgccattcttcaggaagcttatgctgctatccccaattcagaagagatctggctggctgcattcaagctcgagtttgagaacaatgagccagagagagcaagaatgctcttggccaaggccagggaaagaggagggacagagagggtctggatgaaatctgccattgttgagagggaattggggaatgttggtgaggaaaggagattgttggaggaaggtttgaagctattcccttcattcttcaaattgtggttaatgcttggacagatggaggaccggcttgataacggagcgaaggccaaggaggtttttgagaatggcctcaagcactgccccagttgcatccctctttggctctctctagctaacctagaggagaagattagtggattgagtaaatcacgtgctgtcctcacaatggctagaaagaagaaccctgctacacctgaactctggctagcggcaattcgagctgagttgaggaatgggaacaaaaaggaagctgatgctctactggccaaggcattacaagagtgtcccacaagtggtattttgtgggctgccgctattgagatggcgccacgcccacagcgcaaaggaaagagtacagatgctattaagcgaagtgatcatgatccacatgtcattgcaactgtggccaaacttttctggcttgacaggaaggtcgataaagctaggagttggttgaacagagctgttactcttgctcctgatgttggtgatttttgggcattgtactacaaatttgaacttcagcatggaaatgtggacacacagaaggatgttctgaaaagatgtgttgcagcagaaccaaagcatggtgaaaaatggcaagcaatatccaagtctgttgaaaactcacacctgcctgttgaggctcttctaaagaaagctgttgtggtgcttgatgtagaagaaaatgccaatccggcaggagcctagactcactctttttacaaggtgtttggtgaatgtgttttgtactaccatccttaatttatgttcacttcaatatgaggtactttaccttttaatatttcatctttattgttgagttaatatttgatcatcagtacttgaacttgcatagcagccatcatttgttctactcttttagctgtttattcttctcaacgggtaataagcagattgtaattcaatatgccagcagcttctcccactcgccttaggtgcgggagcaaggcgagtgcttttgtattcattattccgtctacccttgctacagattgtccctaaacttatgcttaatatatttctgcaatccttcttctctgcaaattgttgaaaaaaaaaaaaaaaaaaaaaaaaaaaaaaaaaaagaaagagaacgaaagaagggag

SEQ ID NO: 175183 - DNA, 1344 bp, Zea mays
  Clone ID: MRT4577_91351C.1
aggccggccgggacgcggccagcggcggaaatctctccgagagccctcgcgaattgaagctgctgggcacggctatctagctgtatcgctcgtcgagtcaactccccgcgcgcgtcgtctcgttcgagttctctcgcatctcgatcgggtgcgctacacgtagacgtagcgtccgctgatacataaaccgcacggcggaagctgctcggtgctgtccctactagttccaaaagggaggaaaggaagatagcatcatcgatcgtcatgagaccggcggaaggcgcggcgcggttggcttgcctgctcctgctcgccgccgtggccgcggggcacgccggcgtgcagccgctggcgcgcatcgccatccaccgcgcccgcttcgcgctcgacgcgtccgccgccgtgcgggcctcgccggagctgctgggaaccaagggcgaagatactgcctgggtgaaggtagaccttgttactccccatccaagtgccgatgattgggtcggcgtgttttctccttcgaagttcaacgcgtccacatgccttggttctcacggatctggcccaggccctgtgatatgctcggctccaataaagtatcagttcgccaactattcgtcgggctacggggagtccgggaaaggcgcgctgcagtttcagctgatcaaccagcggcaggacttctcgttcgcgctgttcactggcggactctcgaatcctaagcttatcgcagtatcgaacgccattgctttcgcgaacccaaaggctccagtctacccacgcctggcgcaagggaaatcctggaacgagatgactgtgacgtggacaagtggctacgagagcgacgaggcgtacccgtttgtggagtggggaatgaaatggagccccccggtgcgcagcgcagctggcaccgtcacttttgaccgtgaaagcgtctgtggagagcctgcccggtctgtcggctggagagatcctgggttcatacacacagccttcctcacagacttgtggccgaacaaagagtactactacaagatcggccatatgctgccagatgggagcgttgtttggggcaagctatcttccttcaaagcgcctccgtttcctggccagaagtcactgcagcgcgtcgccatcttcggagatatggggaaggccgagagggacgggagcaacgagtacagcaactaccagcgccggatcactcaacaccaccgacacccttgtcaaggacctggacaacattgacatggtgttccacatcggtgacatcacctacgccaacgggtacatctcgcagtggggatcagttcacgcagcaagtggaagagatcacctcgcgggtcc

SEQ ID NO: 175184 - DNA, 699 bp, Zea mays
  unsure (1)..(699): unsure at all n locations
  Clone ID: MRT4577_91352C.1
gnggnatgggaacaaaaaggaaccaatgctctactggccaaggcattgcaagagtgtccaacaagtggtattttgtgggctgcagctattgagatggcaccacgcccacagcgtaaaggaaagagcacagatgctattaagcgaagtgatcatgatccacatgtcattgcaactgtggccaaacttttctggcttgacaggaaggttgataaggctaggagttggttaaacagggctgttactcttgctcctgatattggtgatttttgggcattgtactacaaatttgaacttcagcatggaaatgtggacacacaaaaggatgttctgaaaagatgtgttgcagcagaaccaaagcatggcgaaaaatggcaagcaataaccaaggctgttgaaaactcacacctgcctgttgaggctcttctgaagaaagctgttgtcgtgcttgatgtagaagaaaacgccaatccgggaggagcctagactctcttttttataagttgtttggtgaacatattttgtggcttacaatttactccgcaagtctgcatctttaaatctgttgttgattcttgctttttgctccaatttactaaaaagggatggtacatataaaaaaaactgtaaaaaaaaaataaaaaaaaaaaaataaatatattattattataaaaatataaattataataaaatattttattg

SEQ ID NO: 175185 - DNA, 107 bp, Zea mays
  Clone ID: MRT4577_91353C.1
gcgccgccgtgtgtgattctgcgatcgccttagcggggtacaacgcgagtcgcgggtgcgataatcttggttcagccgattcgtgaagtcgctgtctctctgcggtg

SEQ ID NO: 175186 - DNA, 308 bp, Zea mays
  Clone ID: MRT4577_91354C.1
ttccactcctgcactgaacacttgattgattcagtgggtagctagctagctgaatcacaatggatcctaccaagttccgtccgttcagcaggcacgacacgacggtgacgacgacgaacgctgggggctctgtgtggaacgacaacgaggcgctgactgtggggcctagtggtccaattctgctggaggagttcgacttgatttggaacgaggggcgcttcgggcgcgggctcttcatatagcgctggggggtctgcccatgcgtcgtggtcttgggttatttctagtgctcctgacaactgactgca

SEQ ID NO: 175187 - DNA, 770 bp, Zea mays
  Clone ID: MRT4577_91355C.1
ccggccggggagcgctctaccgcccagtcctctgctccttgcttcttccttctctctcgcacttgccgtggaggcctcatcctatttttttcgttcttcagaagtttagagcgtccctatctccttccctctgctctgatttttccagcagctggtttccccggatattcttccacgctgcgccgattagcacctggatatgttctccagcgcacagccttatcctgcagccgccctcgcctgattctttcccagccgccgctctgggcgattaaaaatcctgctcgccagccggatctccagcgtcgtctgcccctgcttcccttggcgttcttcccccagtcgtctccttcctctgctcgtcgctaaaattcgctggccgcgaatgcccatggcgcacccccagtccctgctttctctttgtctctctcttatccatggacgcgcgttgccggagctccctgctcgtcgcgcgccctgctcgctcatggcgctggctgctgctctgaggctcccagccgaacgccctctgccccagccgcgtccggccaggtgtttctgcgtcccgctcgccccagcagcagctcggtcttgtcccctgccatgatgccagcaactgtgcccccagctctctctcacgccgcacttctctgcttcagtcggtcgagctctctcgccaaggccccagccgagctcgtccctgtgcgcccgggttcgcgtgcagctcgcccagctcgggagttcccctgtccatctcgccacgctcagtc

SEQ ID NO: 175188 - DNA, 583 bp, Zea mays
  Clone ID: MRT4577_91356C.1
ttcgtctcctttactcgtcgtgacttctgcacatctcttgccacctccgcctgttgcttgctcatctctcaactcccatcatgagataaacagaactcgccacctcgacatcgaggctatcgcccatcatatatatgggaggctaccaccacacgactccagatcttacaagataggaggtgttgactaccgtgagatcaacaggttggagaaggatcgttttgagatgatcaaacgtgccttcaagtaattgtgggtactcaacaaggtctgagatcatctggaaagatctctcatgattgagatcgctccgctgaatccagacaacacctaaaaactacatgtacagttcacatgcatgctctcagtcataccaccgctcttcaatcatagaacacgcattaccttgaacactcctctacctgactagcgctgtcatgtatccattagcactccatcactgtaggtcttgaagactaccacttcaagtacggtcagatgcttcagcttgctatgattacgatcaccatagtcatgaagcgcatgatctgctgctacgaccacatagatgaaagatctccat

SEQ ID NO: 175189 - DNA, 396 bp, Zea mays
  Clone ID: MRT4577_91357C.1
tgcacacgcgcccacctcccgtccccaccgctatatatcccggcgccccttcctccctcccccgtccttccctccgcctaagattaccaccgcccagcaataatggcgcagaccatgctgactcgagtcgctgcccctggtgcccctgctgctgatgccaacagcaacacaccggcacatagcggccaggcgctacaaggaaagaagatacacgacaacttctgcctcaacgctacgccaggggaaaaaggagacggacccggtcgtgcgcaacgagtcctgcgctctctcccagcactccaacctggtgctgcacggcagcatccagcgcaagcccaagcgcaccgagcataagggcatcccggcgccccccatgaatgtctgccaggaggagtg

SEQ ID NO: 175190 - DNA, 412 bp, Zea mays
  Clone ID: MRT4577_91358C.1
caagttaatatcatttatttagtgccggtttttttcattgggagcaactggcgaagagcagactcacgacaactgtaggaaagggaaaatcagtacatgatggccacagacctgcaagagcaggaaggaaattgcgagcagaggtccaacgtccaaagctctcgatatctggagttcacaacggagcctttttgaaccgcgggcaggagcacaagatgggcatgtgggggcagggaaagcaatggcaccattgatcccgggccccactgatctggtgaggaaccaaaaaaaaggggtgcaaaccatacaaccgaaccaattcgagggaaaagggggaatgccctcgctatgggaacccgcacccctattatacccagttgggccataggctgtagcaattttccttggcata

SEQ ID NO: 175191 - DNA, 660 bp, Zea mays
  Clone ID: MRT4577_91359C.1
ccggccggggcagtcggctgagcgcttcacttcccagtgacgcggagatcctggctcacagaggccatggaagttcgcaaggatgcagctggggttgtcgtcccatatgtgtttccaaacccaggttgccctccaatgcgtcccgagctggctttgtggaatttgtaagttcgtccggttccactcccccttttttcgtttcacatccttcgaccccatcttcctcctttctccagccctcttctcctgtgttgcgagaggaccttgttcccctactgaagaaagcagtggagaaagaggcagctcgcgcgcaggcggagcagcagcgaaaggacaagaaagacagggtggagaagaaacaaagggctgaacgtgagatgtgcagggatacgtataatgagtgacaacttcgaaacagtctcaatttttttatcataagctctacatatgatatcatgacatgtcgacaagtttcatgatttttttgactttgtttgtgttttatacaattttaaaaaaaatgtatgccaagttcacggccatattttgtgagcatggtgatcgaaaattctggtttgttcctgaaataggtcgtaacttgtgctaaataacatggatatcatttttgcatgtaaaaaaaaaaaaaaaaaatttgcggcc

SEQ ID NO: 175192 - DNA, 220 bp, Zea mays
  Clone ID: MRT4577_9135C.1
cgggcaaaatttagggaagggggaagggggatgtcaggggcaactcatatgaaccccatacccgttaaaggggggattcctagataaaaaaaaaaggtttgggggcccggggcccaggggggggggcccggggggtttcggggggaaaaaccacctttgccctggcccggtggggaaggtggaaatgtacgctaggccatctttttgctggtggcgccgc

SEQ ID NO: 175193 - DNA, 463 bp, Zea mays
  Clone ID: MRT4577_91360C.1
atcctgtatagcgggcgcgatttattcgttcgttctacacgagtgttgctctggaggtgacctgtaccaggtgcagcagcgctgtgcgatcatctccagatagacttacgatatcagaggggtgctaaccacatcggcaacaggagcacctcatgtgcgcgacgattacattattacgatgcttttaggactaatgaatatgatgacgcttgagttaccctgatgacactgaggatcttgctgctctggaatacttactagaacgctgcaagatcctgacgggactaagagaactaacgctactatatacactgacagtcataccattgcacaaatgcactcttgacgcacatgaggtcgtacttgtggtctatgcggtagaacacctccacaacactggaggagttggagatcatgcacacagcgcgctgtaccttgttcagaacaccaccatgcaccacac

SEQ ID NO: 175194 - DNA, 492 bp, Zea mays
  Clone ID: MRT4577_91361C.1
tcgagtttttttttttttttttttttttttttttttttttttttttttttttttttttttttttttttttggagggaattcttccctggcacaaacaacaggagcttttaacccggatattcccacttttatgggcggacagccccaggggcgggggacacctatttatattccccccaaaaaaaaaccggccccaaaaaaaagcagggccaaccccccccggggacccgttgggttttaaaccccactaggccctcatcggtggggaaaaaaccctggggttaacgaggaaaaaccgaattctttcccaaattgggaggggaaagggaaaaaggcatttgaggcccggccgttgttgttaaccccggcggccggggccccatttggggggacagggggagaaagggggggcaccccagggggcccaaacccaaaggtcccaaaaaagaggcctggtttggtgttcaaaacctggggggccccatcctgggg

SEQ ID NO: 175195 - DNA, 527 bp, Zea mays
  Clone ID: MRT4577_91362C.1
aaacgtcaagcatggagcacattcactaaaactgcattacgttcgggtacatcctccgtaacatgttacctgttggatattattgctacaagctactcagggcactcacactagcaaatctgttggtcgcttattacacatgcacaggtcttgcactcacatagaagcacttgcctaccggccgtcaaatatggctccacatgcgctcggaattcatcccctccgtaaacagcaatcccaccaatgtcttgttaacccctaacaggctgattttatttaccaacacgctatgatctgcctggtgctacagccttaatttgacccggacacactccaactctgcaaatgaataatgaaagcgtcctcattacccaccacttctctaactattaatcacaccccagtcgtactcttatccatattctcaaactcatatactctcattctcagcatccgatgacaataacaccataacaaactggcgtggggtgaaccatacattttagccataatacacctttgcggct

SEQ ID NO: 175196 - DNA, 743 bp, Zea mays
  Clone ID: MRT4577_91363C.1
agtcaagcaccaagccaccaaccacacaagagccgatcaagccaccagcaatggccggaggaggaagcgacgaagtgaagctgctgggcatgtgggcgagcccgttcgtcctttgcgtccagctcgcgctcagcctcaagggcgtcggctacgagtacgtcgaagaggacctcaagagcaagagcgagctgctcctcaagtccaaccccgtgctccagaaggtgccggtgctgatccacgacggcaagcccgtgtgcgagtcgtcggtcatcctgcagtacatcgacgaggctttcgccggcgtcggcccctcgctcctcccggaggaaccccacggccgcgccgttgctcgcttctgggccgcttacatcgacggcacgctcgtgaaagcgtcgtcccaggcgtccatggccaagacggaggaggagaaggccgaggggaagaagcaggtgaccgccgcggtggagaccttggagggggccctgagggactgctctaacggcaaacccttcttcggcggcgacaccgcggggtacgtcgacgtgatgctcggcggcctcctcgcatgggtgcacgcgggcgataagatgaagggcgtcaagaccttcgatcccgccaccactccgctcttggctgcgtgggcggacaacttcggatcgttggacgcggtggaggcggtcatgccggacgtgggcaagctggtcgagtttggcatggcgatgcacgctcgcgccgcagccgcc

SEQ ID NO: 175197 - DNA, 2163 bp, Zea mays
  Clone ID: MRT4577_91364C.1
gatttcttccacgcttttgggaggcctgtccaccaccgaaccaccaccccgcgcgccgagctcaccccgatccagatccaccagtcgtccctccggtctgcgacgggcgccctcctcctcgtcctcacgcgcctccggaagccagtgcctgcgcagtgaagcatccatctgcctctcctctcgtcggatccggggccggccaggcggcggcagcatgaagcgggtgtcgtcgcacgtctccctcgcctccgaggcggagatcaacctcgatctgtcgcgcctcatcatcgacaagcccaggttcacgctggagcggaagcgctccttcgacgagcagtcgtggagcgagctctctcaccgccagaacgacggcttcgacagcgtgctgcagtcgccggcattcccctctggtgtctttgactcgcccttctccgtgggcacgcatttcggggggccgcacccgctggtcaatgaggcctgggaggcgctcaggaaatcggtcgtctacttccgggaacagcccgtcggtactattgctgccgtagaccatgcgtcggaggaagtgctcaactatgatcaggtttttgtgagggattttgttccgagtgcattggctttcctaatgaataatgagactgacatagtgaagaactttctcttgaaaactcttcaccttcagagctctgagaaaatggtagaccgattcaagcttggagcaggtgcgatgcctgcaagtttcaaggtggaccgtaataaaaacagaaacactgaaaccttagttgctgattttggtgagagtgcaatcggcagggtggcaccggttgactctggattttggtggatcattctccttcgggcatataaaagtacacccggagatgttagtttgtcagaatcacctgaatgccagaagtgcatgaggttgatactgaatctctgcttatctgaaggatttgatacttttccaactctgctctgcacagatggctgctcaatgatagatcttcatgagggtatatatggttatcccattgagattcaagccctattctatatggcattaagatgtgctctccaaatgctcaagccagagggcgaagggaaggatttcatagagaagatagggcaacgactacatgcactaacctaccacatgaggaattacttctggctagattttcaccagctgaataacatatacagatacaaaacagaagagtattcccacactgctgtgaacaagttcaatgtaattccagattccattcctgattgggtgtttgatttcatgccatgtcgaggaggctactttcttggcaacgtcagccctgctatgatggatttccggtggtttgcccttggcaattgcattgccattgtatcatctctagctaccccagaacagtcagttgctataatggatctgatcgaggaaaagtgggatgagctagttggtgagatgcctctgaagatatgctatcctgctctcgagaatcatgagtggagaattattactggatgtgaccccaaaaacacccggtggagttaccacaatggaggatcttggccagttcttctgtggctgctgacagcagcctgcataaagactggtcggccacaaatggcaaaacgtgccattgagctcgcagagtcaaggctgctcaaggacggctggcccgagtattacgatggcaagctaggaagattcgttggcaagcaggccaggaagttccagacctggtccattgccggttacctcgtcgcccgcatgatgctggaggacccatcgacactgatgatgatctccatggaggaggaccgccctgtgaagccgaccatgcggcggtcagcatcatggaatgcctgaatgcgtggatagttgtttctgaaccaaggaaattcagaatcagctgttatacggatttgtgatttgtttggaccacaagagtgcagcctgcagcgttggtgtgatttgttgggaccacaaagttcaacattgattatagttggactctgtcaattaggacagagtttgtataccatagaggatcataggagttgcacaagattttgccatgcccttttggtttgtttcagaacaatactcaggatactgttcagttgaaaccttgattttggaataacaaatcactgtttatgcaa

SEQ ID NO: 175198 - DNA, 871 bp, Zea mays
  Clone ID: MRT4577_91365C.1
gggaccctcgattccggccgggcggccgctgcccaaaattttcgtaggctgtccaccgcaccaccaccctgcgcgccgagcgcaccccgatccagatccacccatcctccctccggtctccggcgggcgccctcctccacgtcctcacgcgcctccggacgccagtgcgcgcgcagtgagcatcaacatcaacccgcctcttctctcgtcggaccggcgcgcgccaggtggcggcggaggcggcaggcatgaagcgggtgtcgtcgcacgtctcgctcgcctccgaggcggagatcaacctcgacctgtcgcgcctcgtcatcgacaagcccaggttcacgctggagcggaagcgctccttcgacgagcagtcgtggagcgagctctcccaccgccagaacgacggcttcgacagcgtgcttcagtcgccggcattcccgtccggcggcttcgactcgcccttctccgtcggcacgcacttcggcggcccgcacccgctcgtcaacgaggcctgggaggcgctcaggaaatcggtcgtctacttccgggaacagcccgtcggcaccattgctgccgtcgatcatgcgtcggaggaagtgctcaactatgatcaggtttttgtgagggatttcgttccgagcgcattggcttttctaatgaacaatgagactgacatagtgaagaattttctcttgaaaactcttcaccttcagagctctgagaaaatggtagaccgattcaagcttggagcaggagcgatgccagcaagtttcaaggtggaccgtaataaaaacagaaacactgaaaccttagtcgctgattttggtgagagtgcaatcggtagggtggcaccggttgactctgggatttg

SEQ ID NO: 175199 - DNA, 574 bp, Zea mays
  Clone ID: MRT4577_91366C.1
aattcggcacgagggtcggtcaggccgtgcgtgtccgtgaagcccgccgtgcgcccggtcaggtacagatccacgagggctgggccggccggcttgggaaggctgcgcgtatgttcctgctccctggcgctcggcggcgacggtggctgcacccgcagcagcgggaggagcgtcgacgtcagtggtgccggtctcggcttgctcggcggcgatggactgaggatccacaggcggggcgggcgggaggtcctcgccatgtgcagcgcaagcttcgacggggtccgccccgccgccgtggcgagcgccgttcagcccgtgccggcgttccccgaacgggccaaggtggtgtcgctggtggcggctatcatgctgctctgcaacgccgaccgggtcgtcatgtccgtcgccgtcgtgccgttcgccgcgcagtatggatggtccagctccttcgtcggcatcgtccagtcatcatttttatggggatatgttttgtcatccatggttggaggagctttggcagacaaatacggcgggaagaaggtgatggcaggtgctgctgcactctgaacctggg

SEQ ID NO: 175200 - DNA, 588 bp, Zea mays
  Clone ID: MRT4577_91367C.1
gaaggaacaggtaaatattttccattatacagtgtctcctgttttttgcatttgatcatagattcatagtacaagaggtccttgtcatgcaatactactacaacgtagcctgggcttactacaaattaaggcattaaaaatccagtgccgggcaaatagaaaccatgtgattggcctgtctcctgtgaaatagctgatgggtggaacagaacaccaaaccagatccctctccagtgagtagtgaaacgacacctgttctaatttgtaaagctgggccgaatgctcccactaaagccttgacactcgtcaattgccaagaaccaggcgagagttttatgggatttggggacacaaggcacctcgagttccaccaaaagggagcgataatcatatcaaatttccaaatggcaggcacctagccttaaattaaggccccccagcacacaagcatccaaaaagcaaagaaaggtcgagagttgatgagcttaccatccagatagcagcgcactgcgctgggcaggtgtcgatcagtgcttgcccttctccttcatgtctgcgtgctggaacccgttccagagctggaacgcg

SEQ ID NO: 175201 - DNA, 206 bp, Zea mays
  Clone ID: MRT4577_91368C.1
cgtgggtggtttttttttaaaaaggggccccaatactcatgcaacatgttttacaacactagaaccgttttgacaaaaaacgtcacgggccctatcttttaaggtgttttctaccaactggtaaatctatgtatttcatttattgctgattggggagataacccaactttggacaacatcccgcattttcatgcctgaagcctttc

SEQ ID NO: 175202 - DNA, 170 bp, Zea mays
  Clone ID: MRT4577_91369C.1
ctttttcttaggcatgagccatgctgagcaacagcgatcttttttgagcgatcggggagtactacattcgtgttatgttggtgccagtcaaagaatgtgatataagacggacaatgcatagattgtgtcaatgtgaatataagaaacattcaaaccttactccatttaca

SEQ ID NO: 175203 - DNA, 149 bp, Zea mays
  Clone ID: MRT4577_9136C.1
cgtacattcccctcctctctacccaagagctacctagggaatgcaaggcataatctgaggcgtcttctgacgtatccgggttagatgaagagggacttcctggccgtgatcggcaatgatcagcagtaaccgagtgatgagaaggcagg

SEQ ID NO: 175204 - DNA, 438 bp, Zea mays
  Clone ID: MRT4577_91370C.1
ctcgagttttttttttttttttttttttttttttttttttttatgttttttttttttttttgtgtggttttttggttttttctttcttactttccgatgtttagtttcctcttattttcttgaattgttctattgcaccccaccgaacatttgttcgcacaaaaccacagggctggcgggatctacgagcataccagacgggaactaccggactaccgggggggggggaacaatggaccgggcgcagagaggaagataaggagtactgcaggggggaaaaaaagaaatcccatccttgtatacaaaaaaaagatgttgcaaagttggtaacttaaaatctcaaatttggggaggacgttttttagaaaatcgccggcaacatccccggctttctaacccggaaaaacggcctttgtaactttcccaaaaaacccaccc

SEQ ID NO: 175205 - DNA, 251 bp, Zea mays
  Clone ID: MRT4577_91371C.1
tcccgtcacccacctccgcggaccgtcgtcacccattcgtcagtactcccttttagctgacatatcaaatccagggtggctgatactcctaaccttacctgtcaaatactatccactggtattgcttccacaagatcctgattgctacatgtttagcttatccatagagcctacacaccttagcctctttccatgtcatgcttcatgtaagtgaccttgaacattctatcaatttttatgataatgcccta

SEQ ID NO: 175206 - DNA, 364 bp, Zea mays
  Clone ID: MRT4577_91372C.1
gaagcgatgcacgcgtcacgtagagcccggatccggaagagctgccgcgctccacgcgttcggttttctttgtagtgcagacaccgtaaggtgttcatgttgcaacacagggaacctcgacagagaaacgaaaatggagcccccgaaactgcggcacccaagtccaacggagccgaatggaaacgaacaaaagaacgttttttcggccggcgaccagggtggaagagggagggcccgacaaatttttcgccggggctcactgtgccccgaaggaaggacaagccccccaccagagggggccacagaggggggaccaacgggcgggagagaaaaaccaagcggggggcgcgaagggggcgaaaaa

SEQ ID NO: 175207 - DNA, 235 bp, Zea mays
  Clone ID: MRT4577_91373C.1
atttcagcaataataagctagggaagaaggaatttgagatgagagataatggtataggttccgtggagggagatggtggccaaggtgaggacaaggttcttattttaacatctcttcaggtttaggctcgtgctcccgcggcaactattcctcttgctcactcctatgaacctgattcctactgcataccccatcctgtatcgttggcatctttattgtgccagtttccactaca

SEQ ID NO: 175208 - DNA, 875 bp, Zea mays
  unsure (1)..(875): unsure at all n locations
  Clone ID: MRT4577_91374C.1
ggccgctttttttttttttttttntagtggtttaaaaaaactttgttcccaaacagggccttagtgttgtcaatttgctaanctgggtgtactgagaaaaccaattgaaccatttgccgttaacaaaacctgaaaattttattgctcactctgtcagcctcgctctgtggttattggcttcactaaactaactttgaatgttctgtccctatcctccaccaatggcggggtctaactatcgatgagcccctctcactggcttccccctcttgaccttggtgagcgcagtggtcagcagcaatgggaggccactccatgaggcttggtcggtggctggtgtctagaaaagacacccttcttccacggcgtgatgtgatgtccgttgagcatttcggtcgagattgggcagcggcgcacctgcaattgaaagatgttcaaccaatttctctttccccttctaagcaacagtacacctttgcttgaaaaactctctgcgacttcaatttttggttccgcttctgcgcctagaaactcttgcctaggatcttttgtattggactaggttgatttcctctagagctgatcttgtagaagttgatctaggtacatgttcgagatttacgttggcctaggatggagtggtcgaatcaagtcgaacctgagctggcacagcaactgccgcctcacccgcacaactgaccttggcgcatggtgacatcggattcttccgcctattaaagatgttgactgctaccggagagaagcaagggggtcgacgggagaggcctgctgatgtctaggttattaggagatgcttgacttgatctgtgggtggggcttgcgtggattgtgcggctgggttttgtgcccggccc

SEQ ID NO: 175209 - DNA, 688 bp, Zea mays
  unsure (1)..(688): unsure at all n locations
  Clone ID: MRT4577_91375C.1
ccggccgggaggaaatcgatatgattttgatgcagcagtctagactaggtgcaattaattataaaacacttgcgtttaagatgtgggcgctgaaaaattaggaaatctgtccagtgaagacactataatttgagtaaatgattagatccactcttgtgtgaaatttgctattctatttgattcttttcgatcagaggatacattgatttctatgtatctcatttcacctttttaacagaaaaattttgccctatactccctccattgcatatagtttactttggctttgtcctaactcaaatttctaggactaccattgttttcaaaattaatgttaacacttacaagctcgcttaaatgccttgtaaaaatatatttaatgaaaaatctgatgagactaatttgatgttctagatgattgtgcttttttattctccttaaacactcgtttgtgatccctgagatgaattattcacatttttttctttcttttttattgattaactatctatgatgtatcaggcatttactagttatttccaatgtcctttttgcagcttgttcaccacattttgccggaaacttangatcatgagaggctctgatgctgctggcatgggtacgtgtacgagcactagaatgtctatcttcgattgttgaaagactttgttcgatattaaaaattatg

SEQ ID NO: 175210 - DNA, 2397 bp, Zea mays
  Clone ID: MRT4577_91376C.1
ggaaaaccccggacggtgaattaatgttaagtaacactaagaaaaggtctcaccttgccagtcgactagaacaagcgtagcgatttgatcatataaatttggattagggcaaccccaatgctgcgacatagcaaagaagcagagcggattgctcagttagcacgtgtgagccattaaaaattgtagaggccgcggcctcctaccctctggcctcgccctggacgtcgataactcctcctttattcgcagcaggcgggcagtggcagggcaggacatcgcgtccagcacgagctacgcctgtgagcgcgcttgtgcagtacctactttggtggatgggtaagtagatactgcggctgagttactatcgcgcggtactctcagacccatccgtcgagagatcgaccggacgggaaccgagatgggggggccgggggggagcctcttgcgcggcgcccgtgctggtgcagaacctggcgtagacccaccctcggagaaagtcctcctcggccatacattccatgacgtggatggcggatctggaacctgctgtgagcccggggcgttgccccttgcacttcccctgcgctggcagcggcgggcactacaacaatgtactagtgtttaagcactgtggtgctgcacaccagcaacctcgagacctgaatgtcgctcaaagaacagaagacatcgggctctacgctggttttgtaggtgcctcattcatgtttggtagatgcttgacttcaacagtatggggcatagcggcagaccgcgttgggaggaaacctgttgtcgtgttcggcatttcctctgtagttgtgttcaacacattgtttggtctgagtgtcaactactggatggcaatagctacccggtttctgcttggtgccttgaatggtttgcttggaccgataaaggcttatgccattgaagtttgccgacctgaacatgaagccctagcactatcacttgtcagcacagcatggggaataggtctcattattggtcctgctcttggaggctaccttgcactgcctgcagaaaattttccaactgtcttttcacctgactcaatctttggaaggttcccatatttcttaccatgcttatgcacgtcaatcttcgctgcggttgttctcataagctgcatatggatgccggagactttgcacaagcacaaagtccatgaaaatagaagtcggaacattgaagctttggaggcccgtctgattgattcaaatgaaaaggttgaagaaagtggtagtttagatagtaagaagagcctattcaggaattggccattgatgtcatcaataattgtctattgtgtcttctccttccatgacatggcttacacagaggtgttctctctatgggctgaaagcgacaagaagtatggtgggctgagtttatcatctgaggatgttggtcaagtgcttgcagtcacaggggccagtcttcttgtatatcaactctttctataccccagtatcaataaggttcttggacctatcaaatcttctcgagttgcagctatcctgtgcataccgatcctctttgcctacccctacatgacgtacctgtcggaacctggattgtcaatcgttttgaatattgcgtcagtgataaagaataatctcggtgtcaccatcattacaggcactttcatccttcaaaacaatgccgtgcctcaggaccagcgaggcgctgcgaatggactgtccatgactgggatgtcctttttcaaggcacttgctccagcaggagcaggcattgtgttctcatgggcgcagaaacgccagcatgcgtttttcttcccaggtgaccagatggtattcttcctcctgaacgccgtcgagctggtcgggcttctcctcacgttcaagcccttcctggcagtaccagagcagtacgatacgagatagttagacgatctatctatctatacaagttctggaacgttcaagacgattcatcgtgtgcggctgtaccagtgaaggagaagcgccaaagcgtgtgccctttacgccgcggaaggtctacagggacatactcctatataggaagatgcaatgcaagagctgtggtgtacttttaattgtaggtgatgtagtagtgtatggtagtatcagcattttctgcattcaggaaatgcacacgcaggtggtgggaaatgtgggcatggatcgagagtcgctgcgctgttaagtagcaataaatgttaaggttcagtgactcgctgttatttgttgggaatgaaattactgggcatctgtaccctcgttgttttatataaagaaatagaaaaatattgttttttccgggggaaaaaaaaaaaaaaaaaaaaaaaaaaaaaaaaaaaaaaaaaaaaaaaaaagaaaaaaaaaaaactcgcag

SEQ ID NO: 175211 - DNA, 639 bp, Zea mays
  unsure (1)..(639): unsure at all n locations
  Clone ID: MRT4577_91377C.1
ngatgcagnaactcttggtgcattggcctcagccttgatgatatatgacacaaatgcggaatctatcagtgcttctgatcctgttgacattgagaagacactgttgaagcagtttaagcctaaggttcctttccttgtgcaggagcgcataattgaagctttggctagcttgtatagtaacccggttctctgcaagacactagcagattctgatgcaaaacgcttgcttgttggtttaataaccatggcagctactgaggtgcaagatgacctcacaaaatcactgtttgctctctgcaaaaaggattgtgacctatggcaagctctgcaaggccgtgaaggtgtccagctattgatttctttacttggtctttcatcagaacagcagcaggaatgtgctgttgctctgcttgcgcttctttcaaaggagaatgatgagagcaaatgggctatcactgctgctggtggcatacccccacttgttcaaattttggaaactggatctcccaaagccaaagaagattcagcaaccatccttggcaatttatgcaatcacagtgaagacataagagcatgtgttgaaagtgctgatgctgttcctgctttactatggcttctgaaaaaggaagtgataatggg

SEQ ID NO: 175212 - DNA, 549 bp, Zea mays
  unsure (1)..(549): unsure at all n locations
  Clone ID: MRT4577_91379C.1
gcggccgcttttttttttttttttttattttttttttttttttttttttttttaaccaaagaagacgacccataccatacccaaactgccctgcgtgagattagattgacggaaagaacaggaactcatccatcccatgacacatcaagctgcngccgcggctggcttggggcaccgcgcgcgcgtagacggggccccaccacctttaccacccggcgcccccttttttttgcccacgttncttgcggcccgcgccggacacgtcnccgcggcggtccctgcttgcttcgtaccgggctacgtgcggccccccccccccccccccctggggggcgcccgttaccgtgccggtctggtccgccttttcccgtggtttcctgcgctgttcccgcgcgggggttttccccggtccgcgcgcccggcggtttccctggggcctgggccctggccgcccccgctgtgtgcgcccgggccttcctcgttggtcttcttgggctccctttggggcgttgcctccgcctcggggggccggttcctgggggccctccc

SEQ ID NO: 175213 - DNA, 603 bp, Zea mays
  Clone ID: MRT4577_9137C.1
gacagcgaggcagtaactgcagccagccgtgcccccatctgatcttgggggtagggacctgattaccccaatccggttcctcaccaaatacaccacggaggctgcggcggcgctcgctacccacaatggaactcaccacgcgccttcacagtctatctctcacctccaaaatcatccgccggactctcttcttctcaagactctagacccccttcctcgatcctacatctcgccccgagccgaggaaccggaaattccccgcgcacctgaagctgacaccggatagcagtgcgccgaatgggctgggcggcacgagcgctcctctatggataatctggaaccggcaccagcgagagcgacgaggaggagaaccacgccctacaagtggggaatcgaaagggcgaaatcgacgacaccataaatctctacgcgacaggaaccgggccacagagatgggacgcgctgggcctcctacactagatagcagacttctcgaggatggaggaagacaagttccttgacagattggacatagagaagggcacgagagagggcataaaccatgatgagaggggaccgatcttgcgtgccatggatgggtgc

SEQ ID NO: 175214 - DNA, 533 bp, Zea mays
  Clone ID: MRT4577_91380C.1
aagccttattcactcatcattttatttttatagcacacatgcgcacagagtcttactgacagtacacatttaacctttgggcaagaaagaaacgctaccacaacaggatggctgactcggaccatttctctttcggcacccacacaactatattatatatctataggcaggcattgcaagcacaaacacattattctttcttatatatacaatacattggcttaaacacgacaaaatgcttatatcccaaaagaaaggcaagaccctggtggaaccaccaagcgtccggttaaccacagccaaagtaccatgacccccatgcctaggacaggtgacctatggctactcttccataatctgcaacgactactcaggctaagccgctatgaacccattgcacttaacaaactaacggaacatgccttggtacttctgccctaactatgtgactcacttctccccatcatggaagcaacctgtccaatcccccaatgcaaccctcctccccttgggggctggtggaatcataccca

SEQ ID NO: 175215 - DNA, 362 bp, Zea mays
  Clone ID: MRT4577_91381C.1
aacaaaaaaacccctggaaaaaggtttaccaccggtactatagagcttatttgggggggcagcctctcgggggggggagctgggggggggggggcccgcccacaatatataaagaccaccgggggattatgttactggtcctggaatcctattcctacggaaacacccctcgaggcccccgaatatggggacagggtcttttttttttttttttgataaaaagggggtggcggttggggcagcaacccatgacacagtttaacaaaggggcatgaagcatgttgtttgcaccaacctaaaacgttttcgttttttttgaaaaaacatctgaacggggtaaaacaaaaaaggactagttttaa

SEQ ID NO: 175216 - DNA, 1373 bp, Zea mays
  Clone ID: MRT4577_91382C.1
gaaaaaaaaaaaggaagactggaaaagcatcggcacgggcggtaggataaagtagcatagcataccacaaaaggtgctgcttgacagatggcaagcttcccacacctcacgcagatggagcatggcctagccagtggtgcctcccatggcacgccgagcttcttcttctgccatggcacagccacggcggattcagcctcgctggagacctcgtctggtgttctcgacacctccccacgaggcacttcttctgacgacaacaaggcctgcaggaagcacaaggaagatagtggtgccagcttcagctctgctcgctccaaggactcaaactcaaaggaaagcagcaaaaggagcggaggaaaaagagacagaagcagcaagaaggtggacgaggaggagcccaaggggtacatacatgtcagggcgaggagaggacaagcaacggacaaccacagccttgcagagagggtgaggagggagagaatcagtgagaggatgcgggtgttgcaggccctggtccctggctgtgataaggtcactggaaaagccctcattttggacgagatcatcaattatgtgcagtccttgcagaaccaagttgagttcctttccatgaggattgcttccctgagccctgtgctgtatggttttggcatggacagtagtgatgctttcagtgaccttataactcagaagatcgaagggatggcccaccatgaggcgttcgcgatgcctagcagctctgtcctgaacggcactccgtcggaagctctcgtggacacgcacacctccagctcctccccgtcctacgaggtccacggcgacggcggcaccgccagcgtctctttccctcaggacagtggcagctacatggtgcaaacagtaggtgagccaaggcaagagctgttcagccaagtggtgttcagtaaccacatgtgccctttccagtagggagagagcgagaggatggaaggacgacaggaagcaataatgttgagatcctatggaggtggaggccaccaccagacgagtttgtgatgttggacgcaatccatcccctcgtcggtggccgtaacgggaacccctgcggtagctagcattagcagtagtaataatagtaggctgttggttacatcatcctgttagatctcaaggtctctgtcggtaccgcatcatctagtaggcattgttgctgcttagcttttgggctctcttattaccaagggttgcatgcatgccattgtattgtactctccaattggaaaaaaaagaaaaaaaatatcatttgttcataaaaaaaaaaaaaaaaaaaaaagaaaggccgctctcttattatcaagttggtggcatgcatgccaggtatttagcaccaa

SEQ ID NO: 175217 - DNA, 240 bp, Zea mays
  unsure (1)..(240): unsure at all n locations
  Clone ID: MRT4577_91383C.1
gtttagtcccaacaaangccggaccagnaaccttttggcctttttttagaggacctattctgcagtcactcacaccttctcaataaaatttatatagctctttcctgtactaaacacagtttccggtcacagtgcctctcaacatactctccgaaggcccagaactgaacttcttcgagaccctattaacgcactaactctcattaataggtgtgctctaactttcacctttgaacacat

SEQ ID NO: 175218 - DNA, 562 bp, Zea mays
  Clone ID: MRT4577_91384C.1
agatctcgccgtctcgccgtctcccctctccgagaaccctagtttccctcttcgtgcggcggcggcaaccatggacaagagcatgctcggcgacctcgacaacctccccgacgaggacaagatgcgcatgtccgccatgatcgaacagctccagatgcgtgacagtctacggatgtacaatgcgctggtggagacatgcttcaaggactgtgttgacacattccggaggaagactctggacaagcaagaggagtcatgtgtccgccgctgcgctgagaagttcctgaagcactccatgagggtcggcatgcgatttgctgagcttaaccaaggcgttgccacacccgactaatcaaatgatgtgttcctgccccttccaagtttctaacattgcccatctggtcaggatcagtttgtaatccttgaaagttttcagtacttaatgaacccactgctgcttatcatgttaaataaaattacttgaactattgtatcgagcccttcctcccgttaagcgccacattgtgctacttaatagatcgaaatatatccttcctttgac

SEQ ID NO: 175219 - DNA, 555 bp, Zea mays
  Clone ID: MRT4577_91385C.1
ctggactctcgattattttcttgggatgcctattgttccagcagtaactgagcttattgctgctcaatttctatggctagactatgacgaccgcacaaaacccatttatctgtatataaactccactggaactatgcgaagtaaatccaaggtttacacaatcaatcttagcatggcatatggtcaggctgcgatgcttctttcccttggtgtcaagggcaaaagaggagtgctgccgaattcaatcactaaattgcacctgcctaaggtgcacaaatctggtggagctgccattgatatgtggattaaggcaaaagagttagatacaaacacagattactacctcgaactcttgtctaaaggagttggtaaaccaaaggaagagcttgctgaattccttaggggcccgaggtacttccgagcacaagaggctcttgattatggacttgccgatacgatattacactcgctggatggttctttcaaaccaaaggacctgaccgcgcagctagccaaggcacaggcgatgcgccagtcaggcaagcgtgcagctgc

SEQ ID NO: 175220 - DNA, 842 bp, Zea mays
  Clone ID: MRT4577_91386C.1
cgggaaatacacaaggttgaaacaaaacgcacaaagagaaccaagatggccccagcacgaaaatcgcccaatacacctaccagcccctccaatttataagtgcgcccgcctcgtggaaggcggggaatacgcatccaaggcactaggcagcaccaactttcctagctaatttgcaaatcgcgtggaagagggagaaagagagatcagcgaccgagcatggacaagagggcgtcgtccacctccttgctcgtgctcatcagcatcctactcgctctggcagaccccgtcgcagcggggatgaaggccacgttcgcggcgggggtgggcgtcgccgccgacacggcggtgctgcggcatctgatgacgacgaggctggaggacggcgtggcgccggagctcacggtggatgtggagcttcaccgccgcgtcctggccggcggcttcgtgaaatcaaacgtgctgaatccagacaaggcggcctgcataaagtcgtgcccagcgcgcgggcggccgtacaccggccggggctgcagtaacatataccagtgcccccactgagctagcagctccacaagtgattgctctgcccacgggtactacacgcatgcgtgattgttgatcggttgtgttgtgcatttgctggttggttcgaccatcgagatcttggttgctagctagtagcatgtcttgaaataattatgggattatttacttgattgtgtcagctaattgattctgttattgaagtatatggcatcttgcgaagaccttgcaaagctgatatataaactgaatgatttctcttgcttcgaaaaaaaaaaaaaaaaaaggcccctaggccg

SEQ ID NO: 175221 - DNA, 1702 bp, Zea mays
  Clone ID: MRT4577_91387C.1
aattctcttcagccccggtgggtgaattcgcacaaaaaagagttcaagggaaatgatctctcttttaatccccactttacccttgtccactctatccatcccgtcccgactccaatccaatcccccgcaagcgcgaagagaggagacgagaagggggagggatccacagttcacacacaccccgcttcccatggcgctcgcgctgcgctgccctcccgccgccacctcgtcccggagccccttcctaccgtcgacctccccagcccctgcggggaaggtcccgaggaggccgcccgccagctggaggtgcctcgcctactacggcgacggcggattccgcaagaactacgaccacatccccaagcagttccgcgaggagaacctcaaggatggactgatggataattacaagcatgttcctcaattcctttatggattaagtgctgctcagatggaaatgtttatgaatgacgataacccttataatcggcaatcccagaaagttacagaggaaagcgtttctgctgcgaggagctacgatgagtttggtatgtacaccttgccaggcatgcatgagggccctgcaagttacagcatgggtatgggcatggggggcagcatgagcatgagcatgggcagaggagggagaggatatagaagaatgagaagctctgctccagatcttccgtcattgctactggactctcgaattatatttcttgggatgcctattgttccagcagtaactgagcttattgctgctcaatttctatggctagactatgacgaccgcacaaaacccatttatctgtatataaactccactggaactatggacgaaaataacgagcttgttgcatctgaaactgatgcttatgcaattgctgattttatcaatcgaagtaaatccaaggtttacacaatcaatcttagcatggcatatggtcaggctgcgatgcttctttcccttggtgtcaagggcaaaagaggagtgctgccgaattcaatcactaaattgcacctgcataaggtgcacaaatctggtggagctgccattgatatgtggattaaggcaaaagagttagatacaaacacagattactacctcgaactcttgtctaaaggagttggtaaaccaaaggaagagcttgctgaattccttaggggcccgaggtacttccgagcacaagaggctcttgattatggacttgccgatacgatattacactcgctggatggttctttcaaaccaaaggacctgaccgcgcagctagccaaggcacaggcgatgcgccagtcaggcaagcgtgcagctgctggagctgggagatggtcaactccaaccgcacccaggtagagactagaatggtagagcaggacaatatatgttcatctggatggtcttgtggctctgctatacaaagaggccagccttttgtatacttgtgttggaaatccatggagcttggaattagacgcacggctggatagtgaaatgttgtgtactgtagtgtagtgtcagttgtgacgtacgtgtatcatctgtgtgcaatctttgctacactcgacccacatacattgcattcagatagattaatttcaccagtgaaaacgatagcctgtatggcaacagatgttctgccctgaaaaaaaaaaaaaaaaaaaaaaaaaaaaaggagggcggccgccgacaaatcagctc

SEQ ID NO: 175222 - DNA, 870 bp, Zea mays
  Clone ID: MRT4577_91388C.1
cgaggccggccgggccgggatagacggctcgaacctgatcctttcctcttcctcagctcctcacacgacgtggcgtggcgttgcctccccttcgcttcactccgatcccctatcgcggccatgacgggagccaagcaatctcgccgatgcaacctcctgacgtttttctccaccatattggccaccgttctgcttttgatcttccagcgattctcgccgacggcagctgcagtgccgcagtggagaaggggaggaactcaggaacatatcgacgttgcgcggggagccgaggcagtgggccacgggcaaggacgatgcgaagattctctccgaggcggaagctcgcgctggcggcggaggagagggtttgctgacggcggacgagggacgcgagttcgcctcgctctacagcatgctgcagtgggcaattgggaactctgatccggataagttgagagaaaaggctgcagaattggtgaaactatcggcagaggaattactcaagagacagatggagattaaggtgaagagattcctgcagagctcatggaaattttcatccaattttagagctcgctttaagttgaatttccttaacaagaactcctatttctgatggtcataaaagttgatatattcagagctcagaccaacgtttggatgatgtaaaatgcaaaactttacgtgattgccttaccttcgtccaaataattttcctgcaggagttgatggagaagttcaaggcgccatcagatgctgagttgataaagattgctattgctgacttaataattcctctctggaggaccgccacgtgcactgcaagagctcttaattctcgttgagcccatcgacaatgctaatgacgaa

SEQ ID NO: 175223 - DNA, 561 bp, Zea mays
  Clone ID: MRT4577_91389C.1
cccggggaggctgctcccgccgcctggccaagtggaggagccagctggcccggctgataccgagccagctgccgacgttgagcccgatgcggcccccgtggcggtggatgaagagactccaaaggaggaagagacggcaaagggatgctgagccggcatccgtcggcgcgtttgatagaggcgaagcgaggaagcgggagcgctccgttgcactagacagtaatcattaaccggcatgacgcggaagccctgtaggcttgttaccttgccgaggtagcccagtggcgagctgagctccgaagctgcctggtgccgaggagcccctataaggtcgatccggtcgctgaggtggacgagaaggccaaggagtgaggccgtgcgccgtacgcgcactgagggggctgacagcggattgggagatcgatttttcagcgtgtgctcgtgacttgccagtcacatcgcgcgctctggcgcctactgatcagtacaacgcgaacgcgacggctactctccatctcttcgagtgtgacagggaacagtgtctatactataggattgccc

SEQ ID NO: 175224 - DNA, 365 bp, Zea mays
  Clone ID: MRT4577_9138C.1
gtggggggtggttttttttaaaatattctttgacctgcataacttatcacaactttactgcttgacatcaaatccagagtcaccaccctctacaccctaataaaaactttcctaatgcagtgccactcaaacaacaagactcgctactattcaaaaaagcgggggggggggcaaaatccctataaaatcttgataattgccaactacaccatatatgctcattcatacataaaaacctcgcctataaaactgggactcaaatgcctgaacctggttaccaacttccataacatgcttattgctcattttgcctattagaaactccttttccactttggcatgttctttcagaacattgctttcaa

SEQ ID NO: 175225 - DNA, 442 bp, Zea mays
  unsure (1)..(442): unsure at all n locations
  Clone ID: MRT4577_91390C.1
ccggaccggagatcccgggacgacccaccgcgaatanaaacaccagcacaaaaccagcccaaattgttaagaataggggaaacaccggcggaccccccacaacgggggcaccaacaccaggaaagaggagcaacaaaaaaagccgaaaaacccggcggaagccacacacgagacgcaaaccaaaagacagagccacaccccgaaggaagagggacaacaccccgcagagaaaaggcaccagccgaagcaggggaagcaagggaagaaaccaaccacgagaatgcccatgcaacttccacacaagcaggcgaccagaaggagaacgaggcaaaagagcgcaggaaccgccagaacccccaactgagggagaacccgaccaaaacaatgaccgggcaccccaaaggagcagccggcggaacagaagcagcagcccccacacaag

SEQ ID NO: 175226 - DNA, 340 bp, Zea mays
  Clone ID: MRT4577_91391C.1
aaaaggcgccagtaaccgtttccagattaacgaaattgttaccgggacatcctgatggaacatgtaaccaaaaaggctaatcctaaatgcttacaggggcatctaattttccccagatccaagattctcctgcaagggctggcatacagtttttttttggatttgcccttaaatccccaaaacaggcttttaacaattttgggtgggcaaaggatacagcagccgccattcgagtaatgaaactctggcggacaatgcttggtaaaaggacttgagctgagtattccacttgctgatggcaatggacttccccaacccctaggacctttctccacgcttt

SEQ ID NO: 175227 - DNA, 518 bp, Zea mays
  Clone ID: MRT4577_91392C.1
aaaagccaagcgcggggaagaaaaaaaaaaaaaaaaagaacacaaaaaaaaaaaaaaaaaaaaaaaaaaaaaaaaacaaacatttttttttttcccaaaaaaacacaaaacacgggggccgggattcaagggaccaaccgggcaccacagcgcgggcagagaaaaaagccggccccccaaaacggcccggcgggaagggaaacaaacccaaccgggggggccaaaaaaaaaccccccatggcccggcccaaaaaaagaaaaccaggggggccgccccccccccgacccccagggtcccaaccaaaacccggggcccaacccgggggaacctccccccggggggagggaccgccccccccagggggcaaaacaccggggcccccaaacccctgggccccctctaaaaagcccccacgacccggggggccccaagaacgcccggggcccccccaaagaacccaaaaaggggcccccgccccggggggggggggcccccaaaaccggccggggggggcccc

SEQ ID NO: 175228 - DNA, 892 bp, Zea mays
  Clone ID: MRT4577_91393C.1
ttagcgacgaattcggcacgaggaaatggtggcttaaaattagaagtccagcgcaataattgagcaggcggcggcaggcccctcctaatcactgccctaaacacatgtgtgccgggccgaggtcacaatcgatgcacggaggaggatgccgccgtagctgcggagattgataatataaagcgggcggagaccgccggcccctctggcctcgctgctcctccccccttcctccccccacatgcgctgcccccgcccggccctgccctgccctgccctgctgcgcccaagctgaatctccgcacagacaattagagtagctgcattggcggggaaagcgcaagaagctcagcagaaatggcggagcaggcaggcgccggaaggtactggtgccacatgtgcgccgcggtcgtgagccccgcggagggcgaggcggaggtgaagtgcccgcattgccacagcggcttccttgaggagatggagaccgtccgcggcacgcccgcggccgatgatcggcgacggtgacggcgcggtggctcaagtgtaccccggcgccgaccgcccgagctccatctgggcgcacgctatcctcagcacggtcgacagctccgtccgccgccgccgcaaccggcggcagacggaggccgccggcgacgtctacgacgggaacgaccccgagttcgccctgcgccggcgtcgcgtcaccgcgttcctgcggctcctgcacgagctccgggaccgccagctgcagcggctggaggctgctgccggggtcgccctcgaaggcgaccagctgacccctttcggccggagcctcttcatcggcgcagctggcggcggcgagcatggcgtgggcgctgggcgactacttcctccgccccagcctcgacgcact

SEQ ID NO: 175229 - DNA, 345 bp, Zea mays
  Clone ID: MRT4577_91394C.1
cccaatagtgagtcgtattaagtggatacataggatatctcgatcagtagcatctagccatcctctaatcagcgtgaattctcgggatcttgtggcattcaggtcgtccatgttcatattgagctaggtcacgtgtcattttggttttcagccgacaggtctcgttcctttggacttgctcctgatgctttcgttggttcttttgggttgatctgttgagtgatactttctccaattgccttcgatagccctgtgctcagtcaagcgtgcctctgttcttctgctagtgctggattgcgtgtgtctgtttgttgggttgccggcgctgtcggatatggatcgctt

SEQ ID NO: 175230 - DNA, 269 bp, Zea mays
  Clone ID: MRT4577_91395C.1
cccacgcgtccgccaacgcatggacatactcgtctgcgcacttggaccagggataataggtttcattgtcgtaccggggttgaacatttatactttgtaaactccgcaacttccaacacccttagagctatatccactcttacgactactacttacggtgctaccatcgagactattcatataaggggataggcgtccgacgtctagcttgttctaagtttctcaactgcaagggtgctactgcttacgcgcttggaatgctatcgttc

SEQ ID NO: 175231 - DNA, 464 bp, Zea mays
  unsure (1)..(464): unsure at all n locations
  Clone ID: MRT4577_91396C.1
agaggggcaaaaaggaggaaaactttgangcagaggaggcaaaggacgcnggagaaganggngcngcggcggaagggaaagggaccgangnggagangaaagangcngaattttctgaagtctagaagaaaggggggggggagccccagaagacagaggaaggtgacaataagaaagatgcggaaaagggggagatgaaagatgctgcagagaaaactgaggaagntgaagaaaagaaagaggaagcccctactggagaagcagaagagaaaaccggggaagggggtgataagaaagagggagcccctgcagagaagactgatgagaaaagagaagccccagctggagaagcagcagaaaagaatgaggaagggggngaaaagaaagggaggagcccccngcaaagaagaaaaacggggagaaagagggggccccggcngggaatgcacagagaaaccgaacaa

SEQ ID NO: 175232 - DNA, 2300 bp, Zea mays
  Clone ID: MRT4577_91397C.1
gctatgcatctacagcgatgctgggacacggacgtgcagccagaatttcgtgcctgacgcctgcagtagtaaattagcctagtgcttatcttgaaggcttattaatcatttatcttctttaagatgattgctgggcggagtctgacagggacttggaggtaagccggatcaagtttgcccctgcagacgcagcacgctaacccgctaaccaccgccgcaatcgttttcagcactaataatggggagagaggaacttgtagaaagcacaatcgtaaatggagaggaactcgtcattatctggctcctagagaactctaaaacctttttttagatgcatatatgctaatcaggattttaaaaacagaaagaactagtatgtggactgttttggagttataatgagtgattgaagtcatttccccccctcttattcttacaggatgactacatttcactttagtactgccggtccgtcgctgctgagtactgacgaaatgctgcgttgctattttctcaaattctgcacgagtctgacaacgcgccccaaccccaaccccaacccagcggtcccagtcccccctccgttctctctgcactctgcagctgccggtgccggccatggcgcgcgccccgagctcgtggacgccgtccctcgccatggtgctcctcgtcgtggccgccgcggccgtggtcgcgtcgtcggaggcggccagggtgcccgccgccgtcggcaactggacgggggaggagctgcgcggggccgcggcgaggcggggcggccggcgctcccggcgccgcgcgttcgagaacggcctcggccggacgccgcagatggggtggaatagctggaaccacttcggctgcgggatcaacgagaacctcatcaagcagacagctgatgcgctggtcaacaccggtctggcgaagctgggctacgagtatgtcaacatagatgattgctgggcggagtctgacagggactaccagggaagcttcgttgcaaacagacaaaccttcccctctggcatcaaggcgctcgcggactacgtgcacgccaaggggctcaagcttggcatctacagcgatgctgggacacggacgtgcagccagaaaatgccagggtcacttgaccacgaggagcaggacgtgaagacattctcgtcctggggtatcgattatctgaaatacgacaactgcaacgacgccggcaggagcgtcatggagaggtatacgaagatgagcaacgctatgaagacgtatgggaagggcatcttcttctcgctgtgcgaatgggggaggcaaaaccctgctacctgggcaggcggcatggggaacagctggagaacgaccgatgatatcgccgacaactggggcagcatgacgtctcgtgcagaccagaacgacaggtgggcttcctacgccggacctggcgggtggaacgatcctgacatgcttgaggtgggcaacggcggcatgtccgaggcggagtaccgctctcacttcagcatctgggcactcgccaaggctccgcttctgatcgggtgcgacgtgcgggcgatgagccagcagacgatgggcatactcagcaactcggaagtcatcgccgtgaaccaagatagccaaggtgcgcagggaaagaaagtgcagtccagcaatggcttggaggtttgggctgggccgctcagcaacaacaggaaggccgtggttctctggaaccggcagggataccaggcaaccatcaccgcacagtggtcgagcatcgggctcgcttcttccactgctgtcactgctcgcgatctatgggcgcactcgtcgttctcggctcaaggccagctatcagcttcggtgccacctcacgactgcaagatgtatgtcttgacgccgaactagctcagaagacaagagcggattgttccatggcgcgtgggatgcaaccattcggtcaggattcagggaagaagagtatgcagtgcaggcaaggatttcaagagaaggaaattcgatatcatttggttatacaggatatgagtgcgaatggaggaataatttatactaatactatggaagtgtatctaaggcgccgtcaaaatgccggtgcctgtgttactggatgtttgtaacgagagttgcagcaataaaattggcttgcccaccaccctttttacgagcatgtggacggatttcagagaacaagagaatatagaaaatgtgcgttctctgtgaagtgatgttactaatgttatatcccatgaattcttaataaggtcatcggcactcatgctactctgctacctgtgcct

SEQ ID NO: 175233 - DNA, 1674 bp, Zea mays
  Clone ID: MRT4577_91398C.1
aattcggcccgagtctgacaacgcgccccaaccccaacccagtcgagtccccctccgctctctctgcagttctgcactctgcagctgccggccatggcgcgcgccccgagctcgtggacgccgtccctcgccatggtgctcctcgtcgtggccgccgccgccgtggccgtgtcgtcggaggcggccagggtgcccgccgccgtcggcaactggacgggggaggagctgcgcggggccgcggcgaggcggggcggccggcgctcccggcgccgcgcgttcgagaacggcctcggccggacgccgcagatggggtggaatagctggaaccacttcggctgcgggatcaacgagaacctcatcaagcagacagctgatgcgctggtcaacaccggtctggcgaagctgggctacgagtatgttaacatagatgattgctgggcggagtctgacagggactaccagggaagcttcgttgcaaacagacaaaccttcccctctggcatcaaggcgctcgcggactacgtgcacgccaaggggctcaagcttggcatctacagcgatgctgggacacggacgtgtagccagaaaatgccagggtcacttgaccacgaggagcaggacgtgaagacattctcgtcctggggtatcgattatctgaaatacgacaactgcaacgacgccggcaggagcgtcatggagaggtatacgaagatgagcaacgctatgaagacgtatgggaagggcatcttcttctcgctgtgcgaatgggggaggcaaaaccctgctacctgggcaggcggcatggggaacagctggagaacgaccgatgatatcgccgacaactggggcagcatgacgtctcgtgcagaccagaacgacaggtgggcttcctacgccggacctggcgggtggaacgatcctgacatgcttgaggtgggcaacggcggcatgtccgaggcggagtaccgctctcacttcagcatctgggcgctcgccaaggctccgcttctgatcgggtgcgacgtgcgggcgatgagccagcagacgatgggcatactcagcaactcggaagtcatcgccgtgaaccaagatagccaaggtgcgcagggaaagaaagtgcagtccagcaatggcttggaggtttgggctgggccgctcagcaacaacaggaaggccgtggttctctggaaccggcagggataccaggcaaccatcaccgcacagtggtcgagcatcgggctcgcttcttccactgctgtcactgctcgcgatctatgggcgcactcgtcgttctcggctcaaggccagctatcagcttcggtgccacctcacgactgcaagatgtatgtcttgacgccgaactagctcagaagacaagagcggattgttccatggcgcgtgggatgcaaccattcggtcaggattcagggaagaagagtatgcagtgcaggcaaggatttcaagagaaggaaattcgatatcatttggttatacaggatatgagtgcgaatggaggaataatttatactaatactatggaagtgtatctaaggcgccgtcaaaatgccggtgcctgtgttactggatgtttgtaacgagagttgcagcaataaaattggcttgcccaccaaaaaaaaaaaaaaaaaaaaaaaaaaaaaaaagggcgccggtacc

SEQ ID NO: 175234 - DNA, 951 bp, Zea mays
  unsure (1)..(951): unsure at all n locations
  Clone ID: MRT4577_91399C.1
gtgcccagtctgacatcgcgccccaaccccaacccagtcgagtccccctccgctctctctgcagttctgcccgcctgccggtgccggccatggcgcgcgccccgagctcgtggacgccgtccctcgccatggtgctcctcgtcgtggccgccgtggtcgcgtcgtcggaggcggccagggtgcccgccgacgtcggcaactgcacgggggaggagctgcgcgaggccgcggtatagcaattaagatgacgccgcttggatgaaaacatgctatgtgatgcatagtattgcaataccatggtggtttgtggcttgaaaaaaagaaccacttcggctgcgggatcaacgagaacctcatcaagcagacagctgatgcgctggtcaacaccggtctggcgaagctgggctacgagtatgtcaacatagatgattgctgggcggagtctgacagggactaccagggaagcttcgttgcaaacagacaaaccttcccctctggcatcaaggcgctcgcggactacgtgcacgccaaggggctcaagcttggcatctacagcgatgctgggacacggacgtgtagccagaaaatgccagggtcacttgaccacgaggagcaggacgtgaagacattctcgtcctggggtatcgattatctgaaatacgacaactgcaacgacgccggcaggagcgtcatggagaggtatacgaagatgagcaacgctatgaagacgtatgggaagggcatcttcttctcgctgtgcgaaatgggggaggcaaaaccctgctacctgngcaggcggcatggggaacagctggagaacgaccgatgatatcgccgacaactggggcagcatgacgtctcgtgcagaccagaacgacaggtgggcttcctacgcgggacctggcgggntggaacgatcctgacatgctttgaggtgggcaacggcggcat

SEQ ID NO: 175235 - DNA, 427 bp, Zea mays
  Clone ID: MRT4577_9139C.1
tgcacacacgttcctgctgtccctcacgcacgccatggtgttgaattcatcccttccctcacgcgcgtctggttcccttgcccatggtcgcgcccctgctatgctcgtgcctacgccagggatgctagcaagtttgccttctcttccattccacgcgacgccctgtgctcacccatctcatgtctaactcccctgttgctgacgaacgcgtgctctgctagcaggatccaaggtcgtcctcgtctccttgctcgccggcgaccttccctctgtcctccagtgccgcgccggcttggagctttcatggccgccgtcctgccctgtcttccatggcgcgcggtggtggtgggttggtgttggtggcagtgactcactgatgggcacgcgtcctgctcgtggaatccacgacttgtgcgccctgctcagt

SEQ ID NO: 175236 - DNA, 479 bp, Zea mays
  Clone ID: MRT4577_913C.1
ttttttttttttttttttttttttttttttttttttttttgaatcaaataaatcatctcattgataaccagaaaacggggcaggcatacctggagccctggagagcggccgacggcgtctggcggctcctggcggctggagcgtctgcgcgcgatggccggagcgcgcaaggcctctggctgctcttgggcgcggtggatagcaggccggctgggtgggtaaaggcggcccattaaggcccactggtatacaggcgcgtagaacgtccacaaaacagcaaaaacgtccagaacggacgttctggcgttttaacgccgtttaaacgtctaaaacggacgttctacgcggtttttgaaaaacgtgcagacgttccagccactaatcacgttttagtgtttaaacgacgcttaatcgtcgtttaaacgacgttttaataaccatgatttggttgctgatggattagcttggatgattaaaaa

SEQ ID NO: 175237 - DNA, 1088 bp, Zea mays
  Clone ID: MRT4577_91400C.1
cattgggtacctcgagtgcggccggggtgcccagtctggcaacgcgccccaaccccaagtccccaacccagtccccctccgctctctgcactagtgcactctgcagctgccgcctgccggtgccggccatggcgcgcgccccgagttcgtggacgccgtcgctcgccctggtgctcctcgtcgtggccgccgccgccgccgcgtcgtcggaggcggccagggtgcccgccgccgtcggcaactggacgggggaggagctgcgcggggccgcggcgaggcggggcggccggcacgggtggcgctcccggcgccgcgcgttcgagaacggcctcggccggacgccgcagatggggtggaatagctggaaccacttcggctgcgggatcaacgagaacctcatcaagcagacagctgatgcgctggtcaacaccggtctggcgaagctgggctacgagtatgttaacatagatgattgctgggcggagtctgacagggactaccagggaagcttcgttgcaaacagacaaaccttcccctctggcatcaaggcgctcgcggactacgtgcacgccaaggggctcaagcttggcatctacagcgatgctgggacacggacgtgcagccagaaaatgccagggtcacttgaccacgaggagcaggacgtgaagacattctcgtcctggggtatcgattatctgaaatacgacaactgcaacgacgccggcaggagcgtcatggagaggtagtaaagcacaagaacggtgcctagcttgaaaccgcactgtggtcgatgcgtcgggcatcgcgcgcgtgccggattgctcggtgacttgtggttgtggccgttgctgttgcaggtatacgaagatgagcaacgctatgaagacgtatgggaagggcatcttcttctcgctgtgcgaatgggggaggcaaaaccctgctacctgggcaggcggcatggggaacagctggagaacgaccgatgatatcgccgacaactggggcagcatgacgtctcgtgcagaccagaacgacaggtgggcttcctacgccggacctggcgggtggaacgatcctgacatgcttga

SEQ ID NO: 175238 - DNA, 817 bp, Zea mays
  unsure (1)..(817): unsure at all n locations
  Clone ID: MRT4577_91401C.1
ccccccctctccgacccgaaacccccatccgtccgtccgtcccggggagaagaccgccggcggaggagaggagacgcgggcgaggcaagaggagagtcaaatccccatcttgctcccccccccgcgccgccgaccccacccgcggcattctctccggcgtccctcctccggccagggggaaaagcagcagcaggatggtgctgtgggtcttcgggtatgggtccctgatctggaaccccggattcgacttcgacgagaagatcctgggattcatcaagggatacaagcgaacgtttaatcttgcttgcattgaccatagaggcacaccacagcatccggccaggacctgcacccttgaatccgaagatgaagccatatgctggggaattgcttattgtgtcaaaggtggtctagaaaaagagcgagaagcaatgcagtacttggagagaagagaatgcgagtatgaccagaagatctctgtggatttctacaaggatggaaattctctggaaccagctgtgacggatgtattagttttcgtatccactcctgatccagttggcaacaaatactatcttggccctgctgctttggaggatatggcaaggcaaattgctacagccagtggccctaatggatataatagggactacctgttctcaatggagaaggcactgtccaatataagccatgaagacgactcgatcattgtgcttgcggatgaggtgagngaggtgctgagcaggtcgacgggagaagaggttaccgggctcgactaccattaaatcgcatacccctgttgggcacatctctgctc

SEQ ID NO: 175239 - DNA, 768 bp, Zea mays
  unsure (1)..(768): unsure at all n locations
  Clone ID: MRT4577_91402C.1
ttctccaacgggatccgccaaacattataaattcagcgcccgagcgcctccccctcccaggattgaatcttgttcgcgaactacagcccaagaaagaaaagaagaccatatatacggctcacgggagttgatcagcggccttcttttcctgcccctgggagtggaacctcgcttggttctcggttgatcttacgagtttcttccgccgggttctgttcgatcgtcggcgtcgggatcatggtggcggcggtggatgcggtggcggagaaggtggtagcgcagctccgggaggagtgcgcgaccccggcgacgcgactggatggcgtggcgacggccatggaggaggagatgagggctgggctgcaccaggagggcggcagcaagatcaagatgatcatctcctacgtcgacaacctccccaacgggagtgaagaaggcttgttctacgcactggaccttggaggaacaaacttccgcgtgcttcgtgtgcagctcgctggcaaggacaagcgcgtcgtcaagcgtgaatccagggaggtctctattcctcctcacctcatgtcaggcagcgctgcggagttgtttggcttcattgcgtccgcactagccaagtntgttgcagatgaaggagataacaaagtgctggacggcaagcagagggagctgggcttcacgttctctttccccgtgaggcagtcgtccatcgcatcgggcaccctgatcaagtggacaaaggcgtttgccatcgatgacgctgtcggggaagat

SEQ ID NO: 175240 - DNA, 163 bp, Zea mays
  Clone ID: MRT4577_91403C.1
aataacaaaacaaaaaaatgggccctggccttgtaacttttgttctcaacttttattggcgaaatggtctcacttaccttttcaagggtttcaaattgttccaccccgtttggttgttttacgaactggcctttcccttgggcacagtacaaaacattgcaaa

SEQ ID NO: 175241 - DNA, 1855 bp, Zea mays
  Clone ID: MRT4577_91404C.1
gacaacgcgccccaaccccaaccccaacccagcggtcccagtcccccctccgttctctctgcactctgcagctgccggtgccggccatggcgcgcgccccgagctcgtggacgccgtccctcgccatggtgctcctcgtcgtggccgccgcggccgtggtcgcgtcgtcggaggcggccagggtgcccgccgccgtcggcaactggacgggggaggagctgcgcggggccgcggcgaggcggggcggccggcgctcccggcgccgcgcgttcgagaacggcctcggccggacgccgcagatggggtggaatagctggaaccacttcggctgcgggatcaacgagaacctcatcaagcagacagctgatgcgctggtcaacaccggtctggcgaagctgggctacgagtatgtcaacatagatgattgctgggcggagtctgacagggactaccagggaagcttcgttgcaaacagacaaaccttcccctctggcatcaaggcgctcgcggactacgtgcacgccaaggggctcaagcttggcatctacagcgatgctgggacacggacgtgcagccagaaaatgccagggtcacttgaccacgaggagcaggacgtgaagacattctcgtcctggggtatcgattatctgaaatacgacaactgcaacgacgccggcaggagcgtcatggagaggtatacgaagatgagcaacgctatgaagacgtatgggaagggcatcttcttctcgctgtgcgaatgggggaggcaaaaccctgctacctgggcaggcggcatggggaacagctggagaacgaccgatgatatcgccgacaactggggcagcatgacgtctcgtgcagaccagaacgacaggtgggcttcctacgccggacctggcgggtggaacggtaagagcgctccggcacaggaagattctgagttcgtgcctaaacgctcgtgggagtttaccatttcatactagatttgtacgccattcagatcctgacatgcttgaggtgggcaacggcggcatgtccgaggcggagtaccgctctcacttcagcatctgggcgctcgccaaggtgtgctgtgctatataagaacgtttctgcgcgttgacagctagcgctacgtactactgcgacgtaaaacatgtcctgcggtttcggtttcctcactggatacgtacttggtctgccttgcccttgcgtttgtgctgttgtgcaggctccgcttctgatcgggtgcgacgtgcgggcgatgagccagcagacgatgggcatactcagcaactcggaagtcatcgccgtgaaccaagatagccaaggtgcgcagggaaagaaagtgcagtccagcaatggcttggaggtttgggctgggccgctcagcaacaacaggaaggccgtggttctctggaaccggcagggataccaggcaaccatcaccgcacagtggtcgagcatcgggctcgcttcttccactgctgtcactgctcgcgatctatgggcgcactcgtcgttctcggctcaaggccagctatcagcttcggtgccacctcacgactgcaagatgtatgtcttgacgccgaactagctcagaagacaagagcggattgttccatggcgcgtgggatgcaaccattcggtcaggattcagggaagaagagtatgcagtgcaggcaaggatttcaagagaaggaaattcgatatcatttggttatacaggatatgagtgcgaatggaggaataatttatactaatactatggaagtgtatctaaggcgccgtcaaaatgccggtgcctgtgttactggatgtttgtaacgagagttgcagcaataaaattggcttgccc

SEQ ID NO: 175242 - DNA, 703 bp, Zea mays
  Clone ID: MRT4577_91405C.1
cccccctctccgacccgaaacccctatccatccgtccgtcccggggagaagaccgccggcggaggagacgcgcgtgaggcaagaggagtcaaatcctcctcccgcgccgccgaccccacccgcggcattctctccggcgcccctcgtcaggccagttaaaaaaacagcagcaagatggtgctgtgggtcttcgggtatgggtccctgatctggaaacccggattcgacttcgacgagaagatcctgggattcatcaagggctacaagcgaacgtttaatctcgcttgcattgaccatagaggcacaccacagcatccagccaggacctgcacccttgaatccgaagatgaagccatatgctggggaattgcttattgtgtcaaaggtggtctagaaaaagagcgagaagcaatgcagtacttggagagaagagaatgcgagtatgaccagaagatctctgtggatttctacagggatggaaattctctggaaccagctgtgacggatgtattagttttcgtatccactcctgatccagttggcaacaaatactatcttggccctgctgctttggaggatatggcaaagcagattgctacagccagtggccctaatggatataatagggactacctgttctcaatggagaaggcactgtccaatataagccatgaagatgactcgatcattgtgcttgcggatg

SEQ ID NO: 175243 - DNA, 722 bp, Zea mays
  Clone ID: MRT4577_91406C.1
atcgtgcccatatccccgtgcccgcccgctgacgcgacgtacaccgcaccaagaacccgtcggaccctccgccggccacggcgggagcgactgccacgcgcgcgcggcctcacgtgccgcccaccgcccctgaccctaatccccaaaccagcccacgactatcctctcccctcctctctcggtataagtgctcccccaccaccgccaccgtcttctcccccctctccgacccgaaacccccatcccgtccgtccgggggagaagaccgccggcggaggagaggagacgcgggcgaggcaagaggagcgtcaaatccccatcttgctcctcctcccgcgccgccgacccacccgcggcattctctccggcgcccctcctccggccagcagatggtgctgtgggtattcgggtatgggtccctgatctggaaccccggattcgacttcgacgacaagatcctgggattcatcaagggctacaagcgaacgttcaatctcgcttgcattgaccatagaggcacaccacagcatccggccaggacctgcacccttgaatccgaagatggagccatatgctggggaattgcttattgtgtcaaaggtggtctagaaaaagaacgagaagcaatgcagtacttggagagaagagaatgcgagtatgaccagaagatctctgtggattttctacaggatggaaattctctggaaccagctgtgacggat

SEQ ID NO: 175244 - DNA, 453 bp, Zea mays
  Clone ID: MRT4577_91407C.1
ggggggggacaaaacaattaacgggctttggggggaaacccccttatgtggccccgaaaagccgaaaacccgtataacacccgggcccccaaccggaaccaaaaaatttttaccagggggaaccaaacgggacccccacatgaaacataaaagttctaaggcggggggccccaagcaggggcaaaaaagaccggacggaccccataatggcccccaaccccggaagccttggggaagggaaaaaacctttttgagtcaaccaaaccccccggtttttttttatttccccatgacccaacccggtggaccccgtaatgggttaaagaacaaaaccccccccggccgttttttttcccccaccccgggaaacggggggggggggggttcccccgggtgggcctaaatttcccgcgcaacccgggcgggctccgggcttggaaacaaattcccctt

SEQ ID NO: 175245 - DNA, 385 bp, Zea mays
  Clone ID: MRT4577_91408C.1
atgtaatcatttgttaagtaataaaaaagaggagaaggcagtatctcataaggttaaattatgtgtcttgcctttacatttatgcacaatttatcttagatgttgtttacatttccttcactcatttcttacatcttcatacttttaaccaaccttatcttcgaagaggaggaactaaaggatgaagattaagcttgatctaattgtgttgccttgttttttatatcctgaatgaatcaaaaatgagtgaccaacattggcgcccacatccagtgaactcaaaaccttaatgaagaacatgataagtttcaacactttgtcaccaatcttgaagaagattattctcccaattacagggggatcaagcgtcgaaccaaccaataag

SEQ ID NO: 175246 - DNA, 160 bp, Zea mays
  Clone ID: MRT4577_91409C.1
caaatctacccctggacgggtccgtggagttctacagccctcacatctacaagtgtcttagcttgttgcgagatagagatccggctggggacagagtgacagaggagggccatctgcgggaccgaggagagacccataggtgaccgtagatggatcttca

SEQ ID NO: 175247 - DNA, 256 bp, Zea mays
  Clone ID: MRT4577_9140C.1
ccggccgggccggtagctaacctgatgcacaaggtgccatatagcctcctactgacctgcgaactcctaatagccaaacagccggagcgagccagctagtagagccacggcgaactccgtggcacttcacgcaggtgcgcgcctcgccgccgctccgtactccgaccacctcccgctaagtaccgtttgaaaaattacataccatcaagctgctacggtctccttgcttcctgagaacgcctcttcctaggacaaa

SEQ ID NO: 175248 - DNA, 330 bp, Zea mays
  Clone ID: MRT4577_91410C.1
attgtgtgtctatataaaaaaaacaggggttacaatatgcttagtggcataactgacccgtaacggacgtgaaatagagcattctttgtgctatgacacaattaaaatccaaagtcgtgaagctattacaaataaaggtcattccaacactgggtttattttcccttattcacagtcacagaagaacgaagctcctgtgtatcagcagctgggatacacacacacacacactattcgggcaggtaagaaaaagttccattcaagcagctttaggcaccgaatgcgtctggaaacagcatgtgcaaaggaaatccttctggggatcagctt

SEQ ID NO: 175249 - DNA, 377 bp, Zea mays
  unsure (1)..(377): unsure at all n locations
  Clone ID: MRT4577_91411C.1
gccggcgaagggcccgatggccccggcttatttcggcgatcgatgcttcggcgaccgaccgtacttcnnttgcgtgncggcggtgtggcggagcaccgacgcgnncgtcgagaatcaattgcctaacgtactctagggtaaccccgcaccatcgccggtggggggcggggngcgcttcacnncgactccnnagccgccgctcatcggnagaatgccggccaagaaaccannggtcgccattgaacccccatnncaacaccnngtctttgagtgcccaagcgtgctnncatcggcaggaggtgtcaagtgagtgcgtgctgtgcccagaagtgatatnnncaagtgtgtggcccctttcaaggtgcatttggttgggc

SEQ ID NO: 175250 - DNA, 1815 bp, Zea mays
  Clone ID: MRT4577_91412C.1
ccctcctcacggctccgggagtgcagggctcctggcttccctccctcccctccacggcttcgcgggctcacccgccctcctgctctaagcccaaagctcccgtcccgagggcttcaggtctgttggcccctactcctcgtccgcttcccgggccgccgcttttaggtgtgacttcctcatcatctgccctgacggggatcgctggtttcttcctccagagatcgcatctctggtccgcgggatccgatgagatgcgggggtgctctcgcagtccgacctcgtagcaggcatggctgaagcggccacttcttcgtcttcgtccggatccttcgccccgcgccgcctccatgacgccggtgtcgtcagggaatcgctcccgtacagtgttctcgctgcacccccgccgccgcctctgcctccggtgcaggtgcaggttgcgggttccggcggcggcggtggagggaagattagccccgcggtgcttttcatcatcgtgattctcgcgttagtgttcttcatctccggcctgctccaccttctcgtgcgcgtcctgttgaagaagcagcaccgccgcggcggccgaaggggcacggcgtcggcggcggcgccgaggactggagtggaggcaggcggggtggacgtggcgttgcagcgccagctgcagcagctgttccacctccacgactccgggctggaccaggccttcatcgacgcgctgccggtcttcgcgtaccgggatatcgtcgtgggcggcggcggcgacggggacaaggagccgttcgactgcgcggtgtgtctgtgcgagttcgatgccgaggaccggctccgtctgctgccgctgtgcgggcacgccttccacctcaattgcatcgacacgtggctgctctccaactcgacctgcccgctctgccgcggggttctcttcgtcccggggctcatgggcgatggcaaccccatgttcgatttcgaggagagactggaggaagggcggttgtccgaggactgtgacgttggatttggattgcctgggctgaaggcttcagggttggcacagacaccggtggttgagaagaaggtattccctgtgaggttgggaaagttcaagaatgtcggaacccagggtgcggtggaaggtggccatgccaatgccaatgccaatgccaatgctaatcccagggtgttgagtagggatgaaggggagagtagcagcagcagcttggatggaaggagatgcttctccatgggcacctatcagtatgttcttggcacttctgagctccgagtagctctccagcctggccgtattagaaatggcactggtggtgcaatgatgggaagacctcctggtttaagttcgatcaatgctgatattatggaggggaagaagatctgtacacgcaacaaaggggagagtttctctgtgtcgaaaatttggcaatggtctcatattaagggcaagctacctgctggttcggatgaatgttcggatgccgggagccttccttggatgaagagaggaggtgctgcggatacatcaaacttatgactctgcactagtgtaatgagcctttctttagttagtgatacccacctaattttcacctgtagtcatttttcttatctaattttcatgtgctcattttgattggagtgccaacctcattggggggcttagcttttggtgatcttgccatgttagtatgtttcaccacgtagaattgtagattgtgatgatttatttgatctgattctggtctgcctaaaattttgtaaaaaaaatgaaaaaaaaaaaagggcggccgccaccgcggtgga

SEQ ID NO: 175251 - DNA, 375 bp, Zea mays
  Clone ID: MRT4577_91413C.1
tcgtttaggctgccgcatacaaaatgttcgagacgatcaacagaacgccagagatggacgcgtacagcaccacggggaggaagctggaggacgttcgaggggacatcgagttcagggatgtctatttctcctacccgacaaggcccaacgaacagatattcaagggtttctccctcgccatacctagtggcacgacgatcgcgttggtaggccagagcgggagcggtaaatccacggtcatcagcctgatcgaacggttttatgaccctcagcttggcgatgttctgatagatggtgtgaatctcaaggagtttcagttgaggtggatcagaagtaaaatcggtcttgtcagccaggagccggtcctttttgctg

SEQ ID NO: 175252 - DNA, 344 bp, Zea mays
  Clone ID: MRT4577_91414C.1
ataggagacccgctttcatacgtggaaactgtgttagcttgggcattggtgatacacttttctgcctgataaaggcatggcgttttgacccttttttctgacgcaggtaatgggttcatgtggatccaactgctggtaatgatcttgaacctatttacgcggatgagtgtgctactagctccgacgatgagccgatgctataaatgtgcttggtgatttgggctgtcattttcttacaactgattcaggtggcattttacagatttatgtgtgaactttatgaagcttgattgtagctcgattttttctttgttattataacttctttgaataatataatttat

SEQ ID NO: 175253 - DNA, 290 bp, Zea mays
  Clone ID: MRT4577_91415C.1
ggtgttcggttagggcccgggggggagcctgaccagctcaacacagcccaaaaagccctggtctaaggggggggggagaaaacaaggaaaccttacacctcaaaacaaaaggggacgggttcaacaaaacgggaagttgaaacccgaaaaaagcatccctttgtaagaagaaccccaaacctcaacagagggattgaaaaactaaaaagaaaaagggagggaaaccaaacagcaattgttcttgaaaggacacttgtttccccaagagccaaagaatccaaaccctgggc

SEQ ID NO: 175254 - DNA, 288 bp, Zea mays
  Clone ID: MRT4577_91416C.1
cgtgagtaaaatgtgtactatgcttagctcgccgagcaggcggagagggtcgaggagatggttgagttcatggagaaggtattcaagactgttgacttggaggagctcactgtggaggagcgaaaccttcttgttgttgcatacaataactttattggagcccgccgctccttatggcgcatcattttcttcatcgagcataaggaggatggccaaggtcttgatgtcctagtttcactcattaaggattattttggcaagattgatactgagctgatcatagatctg

SEQ ID NO: 175255 - DNA, 762 bp, Zea mays
  Clone ID: MRT4577_91417C.1
tcgggtccttcctctcagtctcaggccccacgacgtctcctctcctgcgtgcttccgttgcaaatccgcagtccccaccacactaccgagtactgacctgacgctcgccctgcctgcgtctgcccaggtaccaaggactcaacgaaaggagagacctttccgcggtctcttgcgatcctcctcctcgccatcgccatgctaaggaggtcccgccacggcggggtccgtctcggccggaagctgctcggcctgtggcagcgggcgctatgcggcgggcggcggcgccggggaggctacggccccctgaagcagcaccagcagcagccctgcgccggcacgcccgagcgcgccgcgaggaagctcgcgccggcgctgctgcggtggggcagatcgctggcgcggcgtctgcgcctcgggtggcgggccggcggcgggcgccggatgctggccggcggcgaggccgaggtggccacgacgcccaaggggcaggttgccgtgtacgtcggcggcggggaggcggcgcagtcgctgcggtacgtggtgccggtggtgtacctgaaccacccgacgttcggcgagctgctcagggaggccgaggaggagttcggcttccagcaccccggcgtcatcaccatcccctgccccgccgcgcggttcgagcaggccgccgccctggccggcgcggggaagaagggcttcgccaggtggtagtggtaggcaggcactagtcgtcgttatagccttataggagggagagggaag

SEQ ID NO: 175256 - DNA, 688 bp, Zea mays
  Clone ID: MRT4577_91418C.1
agataatgagtccattggcaaagtggcataggtctcgacctggattgactgagaggtttgagctatttgttaacaaacatgaggtgtgcaatgcatacacagagttaaacgatccctgtgtgcagagacaacggtttgaggagcaactaaaggatcgtcaatctggtgatgatgaagctatggatttggacgaagtgctgcccttgagtatggtctaccaccaacaggtggttggggcttgggaattgatcgcctcacgatgttgcttacagattctcagaacattaaggaagttcttctatttccggctatgaagcctcaagagtagctatccgcatagccaaaagcaacaaaatggcctcagccaaaggccacaaaaggttcaaagcaaacatgatgctgcataggcgctggagggtatatcttagctcttggatctgtattgaacgatacatccttttgcccctgtgctcgggagctttccatttttttcattattttttgtaaactaccgcgtatttgctggcagcaggttattaaccagaaactgtaacgtcacagaaagttcagtttaacttcgaatggagttttttggaggttgcaaaaaataaactataacaataacacaagatacatcagctcctaaaagaaagaatacaaggagcccatgactttttgaaggaagagg

SEQ ID NO: 175257 - DNA, 596 bp, Zea mays
  unsure (1)..(596): unsure at all n locations
  Clone ID: MRT4577_91419C.1
gtactatccagcctgatgctatcaatctcataaggatctattgccattttagtgctacagtttttgctcatctcagttattgtttgatgaggtttctttgaagataaactgtttcctgactgttttgtcaaaattttcggattaactgcaagagatttttagttcagaggccaagtattccatgttacgtttttggttttgctagtggaatgagttttgggtttaccggagtgactttttttttgttttgcttctcagagtaacagattgtgtggtctctcaggatatggtttgtgttcatttcaattattgttcaatgtaaattttgcttgaagatgcatcatttttatgtatgaattgaaacgttcaattgcctgcaagaactcgagttcagacgtatctcttgttgagctgtcctcagactctttttttttagataacgtgtccttccactcttaagcaagcataaatgctttttactactgatttgaacaaccatcttgtcatgaccattgcgccanagccaggcaggcgctaaggtcgtgggcttgggtcgacctggtatattngttagtggtagataattctagttacga

SEQ ID NO: 175258 - DNA, 334 bp, Zea mays
  Clone ID: MRT4577_9141C.1
attcggctcgagcaaggactgaaattttttttttagacgggtgctattgcagagaaagcggactctagcgctgccagggacgtacggagcttcctaccacacacatgcggaacgcacggccctccggccggcgccaaatcagggcaagctttacatgacactgcaacctgaaagcacggaccagtctcacgagccagacacgatgcacgccatatagcatatagggcggtggaacttatctagctgactgacattactggcatcctatgattgccacaacctgagagatctctgaccggattagacggctagagagcacctgattacaccggcc

SEQ ID NO: 175259 - DNA, 289 bp, Zea mays
  Clone ID: MRT4577_91420C.1
cggttgaaggtcggctgcacaccaaacaagctacaattcattttaagggcaccaccggggctgttaaaaggcaaatccgccttaaagctgcaaggggcctaaaaaaagatatggacactgcaaaatgggtttgcgccctaacaagcattgtgatcgatctattgaaaaggggggataaattttgctcgcatccaaacggatgaaaagggaaaataaaatgacttattaaaccattaacagccgcccaaaaaaacccaggatttttggaaccgtatcggacggggggcca

SEQ ID NO: 175260 - DNA, 655 bp, Zea mays
  Clone ID: MRT4577_91421C.1
cgaaaaacaagcagctaacattacaacagcacctcgagggacggcgatgggcaaggcatcatggaggacgccgtccttggtcgcattggcgctgctggtggcgctcctggcggcagcaacggtggctgccgcggccgaggaggaggggtcgtcagcggcgccggcgccggcggttgcggatgctgatgcgccggcggcggcagacgaggacacggcaggcggcggcggtgacggagctccggcaccagcgccggtgagcgaggaacccagccacaagacgataggcgccaaggccaaggcagggctgcacaccgtcatggcgagcatctccaagggcaagaacaagttcgagtgcaaagtcctgggccgccattgccccgcctctgaagctccctccgcccagtgattaattaataattaattaaaacaacaacaacaaaaagccatccatcagatgatcatatccatccacaccacaccacacattcttcatttgttcaatgcagtgatctgcaatcttatctgtatgaatgtatgaattattatgatcactcccctgccctcttggtctcacaatgcgagaagagagcagatgagatacctaataatgcagccaaacatgggtacattaagaatttattgtcatttatattct

SEQ ID NO: 175261 - DNA, 810 bp, Zea mays
  unsure (1)..(810): unsure at all n locations
  Clone ID: MRT4577_91422C.1
tgaatacatagcctgcgcttaaaggtataacaacaaccacgcctctaatataagataatttatagttatctatacgtataaagttctttttagaaaaaaattctttgttttttaactcatatttttcctactagcatcatatcaaggtcgatcattccatggaacactagattatgaatgtcaatactgtcatgctttattctggtatggtgaaaaatcttctataaattgccaaaccgaaaggcctcggtaccatacttgatgtaagagtgggaagattgatataccttcgtttaaagatcggcctgaaccactggcttccttggcaatcttcaatggtgactctagatctaggaaattcatgcgtagtatcaggcaatataactgtcgctttgctttcacatcaatgggtgcacaaattgacaactctattaataatgatggtcgtagaccgccgctattcaaaatatgtggccaagtacatcatcgtgttggttctcttttaccccttgatgattctgcctcacaatttcttcaactttatgtgtatgacactgctaatgaagttagcaatagaatgaaatgtacgttttgatgaaaatggctntgttctctacagaagaagaaataatggacgttttgttttgaaaaataagattgcactagataataggtacattgtgccaacaaatttgttgttgctganaaaatttggtgcacatacaaatgttgaatggtgcaataaaaccatctttataagtatctttttaaatatgtgaccaaaggacagaccgtagcaaatgttccttc

SEQ ID NO: 175262 - DNA, 703 bp, Zea mays
  Clone ID: MRT4577_91423C.1
gttgtgcggcgggccatgaaccacgcgccgcctcgtgaccggggggctcggaccagcccccaatcgggaaagttttagatcagaaccgtcagagtaactcctagcatggttctgtacagagcaggagaggaggggcctcgcatggcgatgagagcactgctctggtagccaaggatgacttgcctgtggcctccatcagtcgcagaggacgctgttcttctgcttgtggttgtcgatcgcaggcagtctccttggctagcccgagcggctctcatccaccatgccaggctcgtctcttctatttcttcaacccgactcgttcacgccggtaatcaaagaacatctagtttttttttgtctatgggcttgtttggaagcactgagaaactgatttatgaaaattaagttggttctaaatataatagtttaaactccattttataaaaaccagattcccaatttcttagaaacaaagaattagaaacaaagaagctagccattcctaactaaaaccaatttatgaaaaataaggtggttccaaacatcataaactatgtatttttataacccagtttctagaaattagagatataaaactagatctttaaaaaactaaaattgcttcaaacatgaccctaaataccctacaaatatttttcttttggaaaacacgggttccgttcccgtctatggtcctctcctc

SEQ ID NO: 175263 - DNA, 336 bp, Zea mays
  Clone ID: MRT4577_91424C.1
attcggctcgagctcaagtattccggcagattattttttctcaatgctgggatatgtcaacggtgtttaggagatcctattgccattacaaattcattggggcgtttcctggaaaattgacccctttttctgtgggtcacgtgatttcacgctttaagactgtcttgcttgatctatggacgaaggggatgttgccaaatttactgatgcaagaaaaaaatatgatagtactgactacgttggattcttggaaaaccacccttctgctcacggctaatatcgagcttcagaaaaaggtggatcgatgaggtcgatcttaacataagtttcgtagta

SEQ ID NO: 175264 - DNA, 586 bp, Zea mays
  Clone ID: MRT4577_91425C.1
aacactttgtgtggcattcacctcctgtatcctacgatgcattccacatgattatgtatgaactgtggctgcggcataatgtaataaagtactaagcttctcagcctctgagttttgatttctaacctaaatgactgatccatcggaaagatactacaaagtctgatagcctgctgttactgccttgaaaatgggcttctggttctttgttctttgaatcaccagatggatgattattgaatataatgttagctatgcatggtgcaatggagagcatttccatcgaagagttgaccgttgttcagcatatatggcaaaactgtagtcctggttaattgatggattacttgattcttttaacaatagttagctttcccatattgcaatctttccctctagatattacttatattccgtggatctgcttggttgattgcatgtattttctcgcgtaatttttttctgttcaatggtttcaggcatgtaagtaatgtacaatattattgatgtgaaacatagtccattttcttctgacagaacatgtaactgtgagttgtgacaaaaaacaatcatttgattttcggtc

SEQ ID NO: 175265 - DNA, 955 bp, Zea mays
  unsure (1)..(955): unsure at all n locations
  Clone ID: MRT4577_91426C.1
ccccgggnctgcttgtatattcggcacgccggccgggggtccgtcctttactgtcggccaccgtgttctttctgaccgcaaatccaagctcgacggctagtcccgctaacactctccggcaacttacgccggcttccacctccggaaagctccacttcgcggcgttcccgctccgcctcccccgccatgcctgcgcaaggacctatcgctccgccgcattcgggaggggatcgcctgtggccgggcgtagagagaaggactactacgccacgctgaacatccgccgcgactccacgctccaggagatcaagtctgcctaccggattcttgcccgcaagtaccatcctgatatgaataagagtcctgaagcagaagaaaagttcaaggagatcagtgctgcatatgaggttctatctgatcaagacaaaagatcattatatgatcgctttggagaagaggggctcagcggtgactacagaaatggagatattggcacacatgggattgatccatatgaactcttcaatgctttctttggtagttccgacaaactttttggggatagtatggggtctgggggatttcattatagtgcagaagcaaaggacaatagggcacttaacatcagctataatctgctcctttcttttgaagagtccatcctcggaggcaaacgtgaaatcaatgtttttcgccatgaaacatgtggcacctgccatggaactggagctaaatgtagcaatgacattacagaatgcacccgatgcagaggtcaaggcaggttgatgaaaactcaaaggaccccttctggtatagtttcccagatatcctcatgcttaaattgtgaaggcagcggnnnnnnnnnnnnnnnnnnnnnnnnnnnnnnnnnnnnnnnnnnnnnnnnnnnnnnnnnnnnnnnnnnnnnnnnnnnnnnnnnnnnnnnnnnnnnnnnnnn

SEQ ID NO: 175266 - DNA, 356 bp, Zea mays
  Clone ID: MRT4577_91427C.1
acgccaaaagcaagagcaaaaaaagaaaggtctcgatgactatggggaactcaagcttctagtacagcgctgggcaccacctcaagttacataagcagaaaccgttaactagacacacacatggacaggatagttctcatgcctacctgacaccagttcaactgcatacatgactctcatactcatgatatggactcgctaaagaatgacgctcctgagaaatggacactagcgaaggctcatggaacaactctcaccctaccatctgatgatcacataggcatcagtgaagttggacacattgcacttgatgctggtcaaatactcgcccatagtgctaagcttgtcgaacaaac

SEQ ID NO: 175267 - DNA, 1668 bp, Zea mays
  Clone ID: MRT4577_91428C.1
tgttttttccctttttaaagttcatcacgattcacgcaacagctgttctgacgttttttttttttttgttccggctcctcctagtccccttctctaacataaaacccctgcgaggtttgggtgtttcaaatacaagaggagccacgtggcaactcccagctggccttaggattgatgaaattttttctccttccgggaataaaacccatagttcctccccgctccagcaccttgcacaccaaaggttccatttggtctcttccttcctccccagattccgcatcttctccttaaaatgcctgcagagaggaaccttgcaggtgtccgggaggaagcacatgcgggaatgcagctcgaggagctgccacatccgcctgcagttggcacagccgccgggcacccggactccgcaggccgagaagtggcgcacgagcagctcaatgcccttgcaggcgcgaaacttgcaggcggctgctaggctgcccttgagcgcttgatctcgaggcccgatcgtcctgcatccgtcccggcagatgtggaccagcgcctccattgcttcgtacagttgcagatacactttcttttcttccatccttttagctctttcctgccttctcgtatcagcttcgacaagagactcgagcagctcctgttccatacttggattggcccgtctcatcactttccacccatccgtcagagagatggtcttgaaatccccgatgaccatccggacacaggcgagcgcgaggcggggcgcgtcacacagcctggcaagctgcagcatgtctaccacgttgtcaggagcgaggaagcccctctcgagttggtcgacgcagaccgtcttcagagacggcaccgagaagacgtgggagagcacaagcaaatgcagagcgtgctccttcatctgttcctgctcaaaccgtgaagagtagagaaatctgatgaagacacggactgcttccgaaggcgcgccagagacacggatacaccgaaacccatcatctctcagtctagcttcctccagcatagctctcaggacaggggatttgacgccaagaacgcaggaatgcgacggaatctcagcgccgccgtctgtggagacacggaggtcagactggtatccctccaagaacaacctgtcccaggaatccaggacgccgccttcggggacacgggcacggcgacaggccttcgccttcctccgcgcgccataataagaggttccaggcagcggcggtggaacaggcgcgttactcccatgaagctgagcacgccggctatgactatgactatgacccggcgcagctttggctttggcacctgccgagctacttgactcgagatggttctccagtgagaagtcggtcgcatgcgcatcgccgccgtccaggaagaagagatcgggagaatccagcagctccacgcattccatcaactgcctcctgctctgggctgaagtgaaatcagtctggagtgcaaactgcaaagcctctgagacgagagcgaggcggagaacgaaaagggggagctcgttcaccactcactcactcaccacggcgtcctcgtcctcgtcgctccaccaaaattttggaggcctccccttcctatggcgactcaagccaaggcgcctgtcctgacaagtgttccctacaaaatcccggcagg

SEQ ID NO: 175268 - DNA, 246 bp, Zea mays
  unsure (1)..(246): unsure at all n locations
  Clone ID: MRT4577_91429C.1
aaaaacccctactgggtcttgaacatgggggggatcaggtcgacgacgcggttgctgtagccccactcgttggcgtaccacgagacgagcttgacgaagggggcgttcagagcgatcccggccttggcgtcgaagatgctcgacctgttgtcaccaaggaagtgggtagaaaccagatccttttccatataacccatgatacccttgaggggaccctnggaagcagccttaatagttccctcgggc

SEQ ID NO: 175269 - DNA, 205 bp, Zea mays
  Clone ID: MRT4577_9142C.1
ccggccggggtcgcatcgcacgccatcagctagcagctagcgcgctcctcgagcccagcagagaaggccggagcgctaatcgtaatagctggctccaccgcgcacgggcggggggacaggagggcatgaccatgcgtgcgtgcgtctctgcatgacgctgagacgctcactggctgtgagtctgagagagcgcgcgcagcgcctg

SEQ ID NO: 175270 - DNA, 477 bp, Zea mays
  Clone ID: MRT4577_91430C.1
ggaattacctaccttctacccttcttttacgagaaacacgtaaaatagctacgaatcaaaaatgccttccgcaaagttcgacgaagtctacaagaaagtcagcgccatgggcgagaagctcaaggcttctggcgcgcaaggtcccagcaacgatgagcagctcaagctctatgcgaatgccaaaattgcacagggtgcggatatcaacgcggcaaagaagccgggcatgttcgatcttactggcaaggccaagtacaacaagtggaaggaggttgccgatgctggaaccactcaggagcaggctgagcaggagtacatcaagactggtgaggaggtactggccaagtatgacaagtaagagagatgaaaagatggggaatgccatgattccacaaggcgtaatcaatggttgaatgaataaaagaatgaaaaaaagggcttttgagccatgaaaaaaaaaaaaaaaaaaggccccta

SEQ ID NO: 175271 - DNA, 201 bp, Zea mays
  Clone ID: MRT4577_91431C.1
cggggtcattacaacactactaaggggtcataaaccagaacacaatgtaaggaacattatcgtcaatactacacaccgaaacaccattcacactatggtctatatgcagtgcctcactcagcaaaacttattctacccttcccaaatatacatcacgtcgccataattcctcttttacgcaaagcacaacaatcacctgcc

SEQ ID NO: 175272 - DNA, 697 bp, Zea mays
  Clone ID: MRT4577_91432C.1
attggtacctcgagccggcgggcgggatcgctctcccacgatcgagccgctccggtcatcttccctctcgcctctgccaccacttccactcccctatcgtcctgtcgtgataaggaatgttgccactcgcaccagtgattgttgctggcggctctaagaatgcgaatcccaggtgctctctcggttgctttgctgattcccgtgctgaggatcgctcggctcctcaagggcggcaagtactaccgagcgcgtgggatccggcgcccctgtgtacctcaccgctggactccagtacctcgacgctgaagtcctgtagcttgctgggaacgcatcgaggatatacacaaaaagacccgcgtcgtgccgcgacacatccacatcaccgagagctacgacaaggagtctcgacctacctgctgtgtcgatgcacaccatcgctgcagaagttcctgcttatgcccacacatctctgcagcacctcctccccaagaatgctggctcgtctcgaggcttccaccgtcgatgacgatgacaactcgtgaactggcccactggataataagattcgctaccgacgtgtatcctatgtatatgacgtgagtactacaacatggctttgaaagctcgatgcgtttgccaatgataatacatcctttcttggatccctaacatcggtgattcatatgtgaatacgggt

SEQ ID NO: 175273 - DNA, 809 bp, Zea mays
  Clone ID: MRT4577_91433C.1
ccgtttatgtccgttaccaaatcgactgtggtgcccaagtggtgcaattattcgattcttgggccggccaattaagcccccaagattacgacacctttgccctgccctaccagcaaaaagtggtcaaactggtcaaagaaatccatcccgatacaccgttaattctttacatcagcggcagtgccggaattttggaacgcatgggtaaatccggggtggacattgtcagtgtggactggacggtggacatggccgacgcccgccaacgcctgggcaaagagatgaaagtccaaggcaatatggaccccggcgtactatttggttcccaggacttcatcaaagaacggattttagacacggtgcggaaagcagggcagggggggcatattttcaacctcggccacggtgttttggtgggcaccccggaagataacgtccgcttcttctttgaaacagctaagcaagtggatcgtaagttttcccaagaatccaagcatattgaatatgcagctgtccgctttaaagatgattacagaatattatgtaattcgaaagaaaatgcaaaaaaattgcttgacattctttcccatcaactctctcaatataatctctcattgaacgaaagtaaaacatcgtttctcaatcttcccgatgggctttatcgagaacataatcgagcatattttcctcatgtattgcgaagaaagaaatatatttcttttagaaaatttgaacataccttgctaattgcattagatattcatcgaaagcaccctggtactagcattattgaaaaatttattgcagag

SEQ ID NO: 175274 - DNA, 597 bp, Zea mays
  Clone ID: MRT4577_91434C.1
acttcgatggacgatcggcgatccattccacaaaccaccactgctcttgccccaacccgactgaggagttaccagatctgctccgcgcacaggagctccgactccgagccctctccaatggctgctagcgcccaccctctgcactattgcttgcatgcacatggtgcttgactatctgaagagatacataaagtgcctctcccgctgaaggcgtcgtagataaaacatgacaacgcatcctcgaaagcctcgtccctgacagaacgtgacttggataagatagctctgcaccacctcataagcattgacgcgccaatcatcacacctcgaaaactcacagagagccagcacgaatagcctcattcaatgtcccatggaggatcttatatcgatgatcactgcagatgtacgagtacttcgatgcctactgtctggcattctgccagggtagcagagccttgccgacatacctgcactgcaggcttctgctgcactgtgtcccactgtggtggccatgaaacgactgcagtaacagcgatcgaccccgccgacgcaccacgatatgacgttcatgcctgggccttacgccttcctggc

SEQ ID NO: 175275 - DNA, 267 bp, Zea mays
  Clone ID: MRT4577_91435C.1
tttggggaccctcgggccggccggggtgagctccctgctttgtagacttagagcccttcctttggtccggcaaattgggtcttgaacgggatcttcttagtggcggatgtataatcctccaggggcgacatgcttcatatgtgcacgccatgaggagaagggctgctatatgcatgcctgttcactgcgtgctgtgttctgctgtcagacctggagtgctgcctcgaggcttctgctgctgctgctagttctgcttggagggctggc

SEQ ID NO: 175276 - DNA, 252 bp, Zea mays
  Clone ID: MRT4577_91436C.1
ctcttgtgttggggggggatttaaacagacgcttccctctcatttatttaaagggggaggggtggacccatttcaagaagtttttcgaggtaattctacaaatttaaccaaaaaataccgtccaaaaactcggaatttttaaaaattatgtgaacccaccaaacctttgctgcaccccccaggattgcttcggctactatggcggacctcccacttcccaagggggctgaacacaaaacataacatttttgg

SEQ ID NO: 175277 - DNA, 248 bp, Zea mays
  Clone ID: MRT4577_91437C.1
gtccgcctctttcctgttgtccaccgcggccacggcggcgctcgtcggagggttctacttctggtcggaggtctcgccattccggctccccgactcgggcgccatcgggtgccgacccgacagcgaggggtcgcgggcggccgcatgttctacggtagtagcctactagcgctccgtaccatcgagctggaagggaggagcaatggcaacagctctctatggccggtggctaaccccatccctgacct

SEQ ID NO: 175278 - DNA, 411 bp, Zea mays
  Clone ID: MRT4577_91438C.1
ggctaggtagggcgactacgcagcacgacgcagaaaacagagcaaacacatgggaactctcctctatacatgtccaaacgggccgggtcggcagtgggcccgtgacccggcatggtcgtagcccggcacgaacacggcccggcccgactagaggcgtgcccgggccggtccaatagtcgtgctgggcttgggctggccgtcgggcccgcggtgcatgtacggggccgacacggttaattggtaggcacggtaacgactcgtttgagggactaattttgtaacggccagtctatttttagctataatacttatgatatgttattatatacgagtattctgacttatgatatgtgtttatatgtgtatctgaaattctttatctaaatatgtatctaaaattataaataaaaa

SEQ ID NO: 175279 - DNA, 115 bp, Zea mays
  Clone ID: MRT4577_91439C.1
aatcacaagtataactccattcccactccgtcctcccgcatcaactcgaaccgaaagggacgacggagcggagtctagactcgagaggaagctcgagctgccggatgcctctcac

SEQ ID NO: 175280 - DNA, 795 bp, Zea mays
  unsure (1)..(795): unsure at all n locations
  Clone ID: MRT4577_9143C.1
cctcgaggccggccgggctcccttccttccgcgagcagcccccctcgcggccccagcaccaccggaggcactggcagcggcggcggaagcggaagcgggtgcacgaaccaggcgtgcgcggcgtgcaagtaccaacggcgcaagtgcaacacggactgcccactcgcgccctacttccctgcggaccagcaggagcgcttcctcaacgcgcaccgtctcttcggcgtccgaaagatcctcaagacgctggagaacatcagtccggagctctccgccgatgctatggcgaccctcattttccagtcggacatgcgcgcacaggaccccgtcggcggctgctaccacctcatcctcagcctcgagcgccagctccagatcgagatggccgagcactccgccatggtccaaagactggcgctcttccgccaggctgctaccacgatgccaccggatcaaggcggcggcacggttggcctcgactacaccgcgtcatccaagcagccgctcttccacaacgctcagcaagaggtggtttacgcactctacaagaacaaccacggtggaggccacggccccaacaaggatgatcacggcgggcaacaacaccaggtctttgactattacataaacctcgacaacatgcaacagttccattttaatgatagctgtgccgccgtcgacaaagtggatctgactctggcggnggctgacgaaatgagacatcatcagcacttcgacgagaactgccagattgacaacaaggattatttcgagattgaagcggccctcgnagct

SEQ ID NO: 175281 - DNA, 749 bp, Zea mays
  unsure (1)..(749): unsure at all n locations
  Clone ID: MRT4577_91440C.1
ttcaggccaaggcatccgtcgcacatggacactaagctgtcccatgctgagctgacacaccctgatgagcttgacgaggagttcgacacattcccttcctccagaccagctgaaatcgtaaggatgcgctacgacaggctgaggagcgtcggagnccgtgtgcagaccgtggttggggacctggcgacgcaaggcgagagagcccatgctttgctgagctggagggaccctcgggcctccgccatcttcgttttcttgtccctggtggtcgccgttgttctgtacgtgacgccgttccaggttctgatggtgataggcatgctttacctgcttcgacatccccggttccgcagcaggatgccctccgtgcctttcaacttctacagaagactgcctgccaggtccgatatgctcctttgagatcacagtattcggcgtgagagaatcgggtgcaagtctttacttatttatgtctgttctgctcggttccttctgattagtatcagatcagatgtgaatataccagatgagttcgtatattagaggtcatttagtgtcccaggaataaggtgttggtttaatggttcatttccttttgagtttttgggatagtgaggggaggtttttgggtgcagaaatgtaatgttaactccgggctattagcatagaactaaaggcaggaacaatattatcccccgtgtattatgtttgtactatttgtgtcaattttgtttgtgtttcagtgatct

SEQ ID NO: 175282 - DNA, 968 bp, Zea mays
  Clone ID: MRT4577_91441C.1
ctcatactcagccagtccgctgcctccgcgctcccccaaaacccaccaccgccacgccggaatcctagccctcgccaaccagtcgccatgagagagatcctccaccaattggcctgaagatgtcctccacattcgttggcaactcaacctccatccaagagatgttccgccgcgtcagcgagcagttcacggccatgttcaggaggaaggctttcttgcactggtacacaggcgagggtatggatgagatggagttcaccgaggcagagagtaacatgaacgacctggtggccgagtatcagcagtaccaggatgccactgccgaggatgaggagtacgaggaggaggaggaagaagaggaagagacctaagtcattctccgcagtgcttggtacagatatgatattccttgtatcgctgttagtactcgtcagtttgaggttcgtgtggtgatgcttgctaggtactagatgggtggtattccaccaattggcctgaagatgtcctccacattcgttggcaactcaacctccatccaagagatgttccgccgcgtcagcgagcagttcacggccatgttcaggaggaaggctttcttgcactggtacacaggcgagggtatggatgagatggagttcaccgaggcagagagtaacatgaacgacctggtggccgagtatcagcagtaccaggacgccactgccgaggatgaggagtacgaggaggaggaggaagaagaggaagagacctaagtcattctccgcagtgcttggtacagatatgatattccttgtatcgctgttagtactcgtcagtttgaggttcgtgtggtgatgcttgctaggtactagatgggtggtattgcttatgttgtcgtgacagaactgcatttcattttgtattatggttgttcaagatgttatattaccatgaggcgaggtagcttgactgattgttgctacttttat

SEQ ID NO: 175283 - DNA, 1948 bp, Zea mays
  unsure (1)..(1948): unsure at all n locations
  Clone ID: MRT4577_91442C.1
aattcggcacgaggcacacactcagccagtccgctgcctccgcgctcccccaaaacccaccaccgccacgccggaatcctagccttcgccaaccagtcgccatgagagagatcctccacatccagggcgggcagtgcggtaaccagatcggggccaagttctgggaggtgatatgcgacgagcacggcatcgatcacaccggaaagtacgccggcgactccgacctccagctggagcgcatcaacgtctactacaacgaggccagcggcggccgtttcgtcccgcgcgccgtcctcatggacctcgagcccggcaccatggactccgtgcgctcgggccccttcggccagatcttccgccccgacaatttcgtcttcggccagtccggcgccggcaacaactgggccaagggccactacaccgagggcgccgagctcatcgactccgtgctcgacgtcgtgcgcaaggaggccgagaactgcgactgcctccaagggttccaggtctgccactcgctgggaggaggtactggttcaggaatgggcaccctgctcatctccaagatcagggaggagtacccggaccggatgatgttgacattctctgtcttcccgtcgcccaaggtgtctgatactgttgtggagccctacaacgccacgctctccgttcaccagctcgttgagaacgcagacgagtgcatggtgctcgacaacgaggctctctatgacatctgcttccgcacgctcaagcttgccacaccaacctttggtgatctcaaccaccttatctctgcaaccatgagtggtgttacgtgctgccttcgcttccctggtcagctgaattctgacctccggaagcttgcagtgaacctgatccccttcccacgtctgcacttcttcatggttggatttgctccactgacctcgcggggctcccagcagtaccgcgctctcaccgtgccagagctgacccagcagatgtgggactccaagaacatgatgtgtgctgctgaccctcgtcatggccgctacctcacggcatctgctatgttccgtgggaagatgagcaccaaggaagtggatgaacagatgctgaacgtgcagaacaagaactcttcctacttcgtggagtggatccccaacaacgtgaagtcgagtgtgtgtgacattccaccaattggcctgaagatgtcctccacattcgttggcaactcaacctccatccaagagatgttccgccgcgtcagcgagcagttcacggccatgttcaggaggaaggctttcttgcactggtacacaggcgagggtatggatgagatggagttcaccgaggcagagagtaacatgaacgacctggtggccgagtatcagcagtaccaggatgccactgccgaggatgaggagtacgaggaggaggaggaagaagaggaagagacctaagtcattctccgcagtgcttggtacagatatgatattccttgtatcgctgttagtactcgtcagtttgaggttcgtgtggtgatgcttgctaggtactagatgggtggtattgcttatgaatgcgatgttgtcgtgacagaactgcatttcattttgtattatggttgttcaagatgttatattaccatgaggcgaggtagcttgactgattgttgctaaaaaaaaaaaaaaaaaagcggccgccgctggcctcgttgtagtagacgttgatgcgctcgagctggaggtcggagtcgccggcgtacttgccggtgtggtcgatgccgtgctcgtcgcatatcacctcccagaacttggccccgatctggttaccgcactgcccgccctggatgtggaggatctctctcatggcgactggttggcgaaggctaggattccggcgaggcggtgggttttgggggagcgcggaggcagcggactggctgagtgtgtgtacgactnagagggag

SEQ ID NO: 175284 - DNA, 255 bp, Zea mays
  Clone ID: MRT4577_91443C.1
ttatccccgacctccctcgccttcgacttcgccggcaggacgattccaccaccaccgccgagccgcatcgactctcctctcctctcgggctaatggcccagactgttcgtgctcaaggttggcatgttctgtgagggctgtggtggagctgtcaagcgggtcctcggcaagatggaaggcgtcgagtcctacgacgtagacatcttggaacagaaggtcaccgtgaagggcaatgtgacacctgacgccgtcctg

SEQ ID NO: 175285 - DNA, 1664 bp, Zea mays
  Clone ID: MRT4577_91444C.1
cattgggaccctcgaggtcggccgggaaaaaaagacttgcagtcctgtcaataccaaaaccatcctattcctcccaagccaagaaaccaagaccatggctggcacggccaagacccccgtcctcggcttcctccttgctcttgtggccacctcgacgccggctgcggccaccacgctgacgctccacaacctgtgtccgtaccccgtatggccgctggtgagcccgaacaccgggttccccgccatctccgagaacacgggccgcctcgacggcggcgggcgcgggctggtctccttccgcttcccggacagcttctgggcgggccgcgtggtggcgcgcacgggatgcagctccgggcattcccggtgcgagacgggaagcgttgcgccggcgacggtggtgcagctggtggtgcacgcggaggggcaagacctggcgtcgtacagcgtgagcctggtggacgggttcaacgtgcccgctgtggtgagcccgcaggcggtgggcggcgggcagtgcccggccctggggtgcgcggcggacctcaacgccgggtgcccgccctcgcagcgcgtgctgggggccgggggcggcgtggtggcgtgcaagggccccgcgggctacttcaaggagcggtgcccgctgacgcgcaccacgcccaccgacgtggagcccgtgccgcagcggtgcttggcgcccggcgagctcaaggtcgtcttctgccagtccgccatggtgaacgccgccgccgccgccgccgccgagaccgagcgcatccgcaccgtcgtcgcggacaactagagctactagctgtctagctgcctgtggtaacgccggccggtggtcactggtcagttgaacggaggagatgccggctctctgattagtgcgtaataaaggtacgtacgttaactaggcaattaagcgcgtgtgttactgttgaacttgaacggggccgctattaaagctgtgtgtgtgtgtgtggtactagtagttgtcattggcttcgttgccatgtgttcggccggcagtgccaagtgaatagttgcgtccatccaggagaatgtatgtttttgagttgcgcaaaaaaaaaaaaaaaaaaaaaatctgtcggcggcgtccgcgcctccatctacaatgccatgccgctcgccggcgtggagaagctcgtcgccttcatgaaggacttccaagccaggaacccttgattgccttgtgcttatggtcatttggtattgctactcagtctttcttcctagcataagtgagctcgtgcaagagctgtctcgcgttgcgcactgggatctatctgtagtattagtaccataacgtaacggctactgtattttgcaatgtttttttttctctctcgcttttgttaggtgttcatggaatttcatttctatggatcaccattgcagttgtaatgtgtttttgctggaaataaggaataaggtagatggccggttgcactaaaaaaaaaaaaaaaaaaaaaaaaaaaaaaaaaaaaaaaaaaaaaaaaaaaaaaaaaaaaaaaaaaaaaaaaaaaaaaaaaaaaaaaaaaaaaaaaaaaaagggggggggccgttttaaaaggacccaagtttcacttacccgtgcttgccaacgtaatagtttttttatagggccccctaaaattaaattc

SEQ ID NO: 175286 - DNA, 1953 bp, Zea mays
  Clone ID: MRT4577_91445C.1
ggatgcgatcataccagcactaaagcaccggatcccatcagaactccgaagttaagcgtgcttgggcgagagtagtactaggatgggtgacctcctgggaagtcctcgtgttgcccgcggccgccgcaccacgcccagtcgcccacgcagccggcccaagcccaaaaacctttctccatcctctactctcatccccacgatggccgccgccgccaccacgccgcactccctcctcctccagcgcgccgcgatcccggccgcgccgtcgagggcgtccgccgccgcctctcccgtccgcctcccggtccgcgccgccaggatctcgtgcgcggcggtggcggcgccgtccccggccgcagccgccgcggcggacgaggtggagcgcggcgtctacaacttcgcggcgggtcccgcgacgctccctctctccgtgctcaagcgggcgcaggcggagctggtggactaccacggctccgggatgagcatcatggagatgagccaccgcgggaaggagttcgacgccgccatcaagaaggccgagtccgacctgcgcgcgctcctcgcggtgcccgacacccacgccgtgctcttcctccagggcggcgccaccacgcagttcgccgccgtcccgctcaacctctgcacggggccctccgacccggccgacttcgtcgtgtccggatcctggagcgacaaggccttcaaggaggccaagaagttctccgccgcctccgtcgcctggtcgggtaaagacggcaagtacacggccctcccaccgttcgacgccatcgcccagaaccccgaggccaggttcctccacatctgctccaacgagaccatccacggcgtggagttcaaggactacccggagccccgcaacaggtcgggcatcctcgtcgccgacatgtcctccaacttctgctccaagcccgtcgacgtctcccgcttcggcgtcatctacgccggcgcacagaagaacgtcgggccctccggcgtcaccatcgccatcgtgcgcaaggacctcattggcgccgctcagcccatcacgcccgtcatgctcgacttcaagacgcacgccgacaacgcctccctctataacaccccgccctgcttcgccatctacgtctgcggcctcgtcttcgaggacctgctcgcgcagggcggccttgccgaggtcgagaagaagaacgcgcgcaaggccggcgccctctacgacaccatcgacgccagcggagggtactacgtctgccccgtcgacaagtccgtgcgctcgcacatgaacgtgcccttcaccctggccaagggcccggacttcgagaagcagttcatcgccgaggcggccaaggagggcatggtgcagctcaaggggcacaggtctgtcggcggcgtccgcgcctccatctacaatgccatgccgctcgccggcgtcgagaagctcgtcgccttcatgaaggacttccaagccaggaacccttgattgcctcgtgcttatgatcatttggtattgctactcagtctttcttcctagcataagtgagctcgtgcaagagctgtctcgcgttgcgcactgggatctatctgtagtattagtaccataacgtaacggctactgtattttgcaatgtttttttttctctctcgcttttgttaggtgttcatggaatttcatttctatgtatcaccattgcagttgtaatgtgtttttgctggaaataaggaataaggtagatggccggttgcctcgcctcgatggagatcagctatccgggcggcgctgctatatcattcaggagtgacttgtcgaagcttatataaaacattaatacgaaggttgcttggtttttgcctcttcaaaataaaaggagcaaattttgttggtttctaattttctatcatcttcagagatagaattcactttgctaagattctcatggaaattctttatgtcgggtg

SEQ ID NO: 175287 - DNA, 342 bp, Zea mays
  Clone ID: MRT4577_91446C.1
cttctttttttttgctcggaacgcacacaccgcccgtgcccgatctccgatcctctcggggatccaaagatgcatatcttcgataagactctgactggaaagactatgactcctcgaggtggagtactctgacaccatcgacaacgacgaggccaagctccaggacagggatggtattgccccggaccagcagtggctcatgttccctggcgagcaccttgaggacgggcgcacacttgccgactacaacattcagaaggagagtgccctgcaccttgttctccgccccacgggaggcatgcagatcttaggtaagaccctgactggacagactatcaccct

SEQ ID NO: 175288 - DNA, 374 bp, Zea mays
  Clone ID: MRT4577_91447C.1
cccgcaacattttggtccattcttcgatgagctctggtcaccagatgtcgggcggcgtcgccttagtgcgctgtagggagtggattccggccgcgccgccactcgacttggtctggcagcgggtgggaagaagacagtgttttgatcgttgatacgtgatggatggcccagatcaattcaagcgtaccgctttaggcgcttggatcgtggccgttgactgcaaatgtgcggacgggattggaccaagggaataccgattagatcctttaatcctcgccgttggttcatgatccgtgggttgggagctgcgtgtgtcgtggacgaatttcggaccactgatataacatcctacgatcacgaccgtctaccgcttc

SEQ ID NO: 175289 - DNA, 301 bp, Zea mays
  Clone ID: MRT4577_91448C.1
cgtaagctcggaattcggctcgagcaccacggtcccaactggtgttggaccaacctggtggtgttccaccagctgacgtttgactgaatgaacgctctcacccggcatgggactgatgtggtctgccacaggtgtagcacgaactgggctagatactattgtggttatgtctggctcgccaagactgagacaatatcatgaggacatgaatcagcagcacgacgatgacctgcatgagctgtgggtcaccacagcgctcatcttcgctgctactagaagaatctattgatcctagcatcaa

SEQ ID NO: 175290 - DNA, 573 bp, Zea mays
  Clone ID: MRT4577_91449C.1
agaaaggggaggaggcaagctcctacggagatgcagaaggatagggccccgccgctgccccaaccaccccgacgccgatccactccctctggctcccttcgactgtccgacctccagtgcgccgccttcttgcctagatcccttcgcctctcgccccactacggactcagcggctcaaccaggcacctaggcaccagcaataggcaccaccactaccaccacgcccatgtccaaagcaccggaggtcgtccacatcggtgtttagactcagttcctgccaaaaagtcgcatccttggagggctttgagcccgtagacgatccaagagggagctggccagttttttgcgcactactgcgcgcgcgtaagttcaagatttgttccttccttccttgctatcagcatgcgtgggttgttgagtttggctcatgggtcccgaatcgaactcttgtttcagggcagggagtcggaggaggaggaggaggggagctggcgagccgggcgaaggcggcggcgcgcgcgtggccgtgttgtgatagctgcggcgggtgcaccaggccggagccaccgtggt

SEQ ID NO: 175291 - DNA, 400 bp, Zea mays
  unsure (1)..(400): unsure at all n locations
  Clone ID: MRT4577_9144C.1
gtgacactatagaagagctatgacgtcgcatgcacgcgtacgtaagctcggaattcggctcgagcttgcctacaggaaaagattgtctgtgcattgtccttgaaaacaccatcatcagagctcgagggatactgcctcatgtggaatttacgcccgtacatcgatgacgatgtgatgcgtcttgcgtggaaaatgtgtccttagtaggcgcaaggttcgtcattctagcaacaagtaccagaagccggtacggattaaagccaagcttgtttaagctgtttgtcttcaaaaactcacagcagttcacgattacccaaaacattggttgtattgtacatttcactgtttgcatatgtatacactatattaaagccccctcaaattttcttagatcnaanna

SEQ ID NO: 175292 - DNA, 306 bp, Zea mays
  Clone ID: MRT4577_91450C.1
cgctctttttttttttttttggtggttttttttttttttttttgttgtttaccccccaccaagaaaaaaaaattgggacatacattattgggggggacaatttaagtggtgaaaacaaacaggaatatttttggcgcacagtccactctcctatttaacattgtttttggccggcaccattgatcgaatgaaacctacaaggggtttggggagcatggggaggcccctccctggggggagggggataaaggccatgggtgcggggaaccatttcggggaaaggatggggggaaaactttttaggat

SEQ ID NO: 175293 - DNA, 279 bp, Zea mays
  Clone ID: MRT4577_91451C.1
gggagctgggcgtgttttccagggctgataacattgaaaactggttcatcttctagtactcgagtggttttcaatggcatggctagtcaaattcatgatttttaagtataggtgtagattggagcatttattacatattttactgttcaatgtcttaatgtggaccttttattttgtaaataattatggaaatgattgtggggcttggaaaaaaatacctttgaagttttaaaagacagtccactttttagcatgtgttgtgtccagctgtggtcgtct

SEQ ID NO: 175294 - DNA, 313 bp, Zea mays
  Clone ID: MRT4577_91452C.1
aaaaaaaaggcccaagctaaatgcgttggtttttacaaactttaatacaattccaaaacgcttgaaaaagggattaattttttctttaatcaggggcgagggggtaatccggagaaaaaagcgggctgcccaaaaaccgaatttcctcaccaccaccgtttgggggccggtcccttcggaaccttaaaggggggggagcgccccttttgtgccttggggggggggggggccttatgggttttcgcccgcccacccaccggggggtggaatttggggacccataatctgagcggggggcgcatatagggggttt

SEQ ID NO: 175295 - DNA, 349 bp, Zea mays
  Clone ID: MRT4577_91453C.1
aggcccgcctgcgggagccggtacggagtatagaggtggttcgaccagcttatttatcggcggccgccctccgtcggcagtgaaaatgtcaatgaagcggctcggggacactgggtgagtgtccattgcaacattgtctcggagtatgagtcgcattttggacacgatgtctaaataagccagatcaggattgacgttgaggccagctacctggcaaggtgacaaatgcattacatgcgaggatatctgactgaggtaccaacagacattaatagggtgcaacagacaactacactggttaaggaagttgttgactaatgggaccaacgctcgtgatctaatacaacat

SEQ ID NO: 175296 - DNA, 340 bp, Zea mays
  Clone ID: MRT4577_91454C.1
ggtgaaagaaaagggatttttattaaaaaaaaaaagtgcaatcaatttccaaaatactaggaaccatgccagggtttccaaaaaacgtttaaacaaggaaaaaaaacgagaaggaaccaaattttttggaaaccaattacaaataatttcaataaacgactaaaaatgcgaattggggttaaaaaaatcgaaatgcaagcgatggtttttcggcctgggcttcttcttctttttttttccccgtactaattaaaggaaaagggaacctggtttgtaaggctacggtacttaaaggcgtaaaacatttttatttaacggcggtttttgcgccttttaaagt

SEQ ID NO: 175297 - DNA, 500 bp, Zea mays
  unsure (1)..(500): unsure at all n locations
  Clone ID: MRT4577_91455C.1
cattgggtacctcgaggccggccgggatcaactaacacatcaatcactctaccaaaacacctcccaacacgccacatcaacacttcacaatggccaccctttcttacctccctcctgttaagccctccgcggtcgccctcggcaccgtctacagccacgccatctcccttgctgtgctcggccccgtcttcggtgacacctaccgtcaggcccaggcctccaactccaaggaggagttcttcaagtccaaggaggctgcctccgccgcctctgcctggggtacttccctcgtcggctccgccgtccagtcctacggtgtcggtgccctcatcaacgccactggtactctctcctacaagggcgccgcctacctcggcagcttgatcttcttcgccagctctgctccttccttcattgcccagatcaccaccgagaagcgccctcttgagcangtcgnncatgnngcccttgccccgcccttctagaccgccgacctttcc

SEQ ID NO: 175298 - DNA, 167 bp, Zea mays
  Clone ID: MRT4577_91456C.1
gagaaataatgtgggtatatacgctagtatcatcaggagcaactatgttccattgggcacatgggcctgggttgcaccatcaggtctttttctcacacaaaaagaggacaaacaaacccaaactattttactcaggtatttacaattgagcatcggacttggactat

SEQ ID NO: 175299 - DNA, 340 bp, Zea mays
  Clone ID: MRT4577_91457C.1
gtgttgcaacaagatatattggatagagtaaataataacaggggttaggcaaatcaaaaaaagatattacacggagagcggagacaataaacaaaaaatattgaaatttttttggtggatagtttacatgggtattgttgtaagccgtcgcaacgcacggggcagtcatttaaaagtcttatcgtctgcgctgccacctctgatttctctgagctgttggcgtgatcttttccgaaggggcacaaggaagcatagtttttgtgtttttggtttatacctaggctttaagcttttttagaatatactatttggcctaaaatttttttgaagaatgtccttt

SEQ ID NO: 175300 - DNA, 364 bp, Zea mays
  Clone ID: MRT4577_91458C.1
ctccccccccctttttcctttttcccccccccccccccccctggggccccgggagcccttctgctggcataacccccccaatatatagttcatcccttccacaacaaattttgacaaaacctccacccgtcaagggcatgaccgaatgaaccatctaacttgccaacaaatggccctttaagcccaaaaaaaaagtaaaaaatacccatggcatttctagtccatctttaccccaacaaaaccctaaatgctgctaggggacatgaacaccctgaccctgccccccatggacccaggcgggaggttccacttgaacctggcgcggacaacgccggaattgccctgccggcgggtgaccctaccc

SEQ ID NO: 175301 - DNA, 511 bp, Zea mays
  Clone ID: MRT4577_9145C.1
gggccgggaatgactacagaggggcgcgcccatggcgtcttcccccgcgcgccccgccgccgcgtccgtctccggcgccttcggcctcccgcccgacgcccgctgctccttcgaccagacgcgccgccgcgccgaggtacgtcctgcctgactatctctctgtctgtctgtcggcctccatctccctactactaccaccaccacgcgaggtccctcgatctcgggcgtttctgaggcgggggttgatgcgtgtgtgagcggggaaagcaggattcgcaggacaagaggcagctggtgcggacgttcgtcaacgtgtacggccaggagggctaccccaaggaggccgtcatggcggccgtcgaggagtgcatgaggaagcaggccgagggcctgctgcattcgctcgagggcatcggcgggaggctctcgcaactcgagctctactgctacaagctcgagcgctccatcggtgagctgcgcagcgacgtcatggactaccacagcgaggtca

SEQ ID NO: 175302 - DNA, 587 bp, Zea mays
  Clone ID: MRT4577_91460C.1
aagtatagatatgacatccactgtattggatctagcatatgactacatgtgcttaataaacatgggctttggaaactacggtttaatgcaaagttagatagttatgctctaccacatggataaacgccttcacactgcattccaacgcgaagtgcacacctaggtactacccacattaacgccagcacaacatatgattattagatatcgccgctaagattgtgggttactttatacatacctattgtacattaatgactgctgattctattggcctaatttgaattacctccttcatgatgaagggctgatcttactggcttggaacccgaggatctcgtggccactggggctaccttatgtagcggccacctttcaggtaaaggctgaacagctcgtcatattcatgatatgtgccagcttaaaagatgctaaaaagctgggcctgtatactcttgaccaaagaattcactcaattgttggcgagcttaatgtatgcctttagacctttgcgtgaaagcgtaccaagcctgatgtatgctgccctaccggccacaacattggatgagaccacatgtacatgcttg

SEQ ID NO: 175303 - DNA, 787 bp, Zea mays
  Clone ID: MRT4577_91461C.1
gccggccgggtcgcggagctttcaccccactcccatagtccctctccctccagggcgccgcgcctccctccctttccctaatcccccgctaccgcggcgcttccccctcccccgctccctccacaattaggccagtagcccgcttgcagctgcggcgtcggtcgggaagaggccttgctccagtcccgcagatcgggggaggcgctcccccccgcccccgcctcgtcagctcggccgcttccccgccgccggtccctcccggaggcgccagcgtcgccgatgagctgcttcgtctgcttcgggtcggcggcgcacgacggggagtccaggaagccccccgccgcgggcgccggcaaagacgtcccgccggatcgcgcggtggtccgcgtcggatcagacaaatcaagatcacagggtggaccagaatctaagaaggacctgattatacatagggatgggaatagtcaaaatattgcagcacatactttcacttttcgtgaacttgctgcagccactaagaatttcaggcaagattgccttttaggggagggaggttttggtcgtgtatataaaggacgcttggagaatggacaggctgttgctgtgaagcaacttgatcgtaatggcctccaaggaaatagggaatttctggttgaggttctcatgctcagtctcttacatcacactaacctggtcatctaattggctactgtgctgacggtgaccaacgccttcttgtttatgagtttatgccattggggtcactagaagaacatctgcatgatct

SEQ ID NO: 175304 - DNA, 431 bp, Zea mays
  unsure (1)..(431): unsure at all n locations
  Clone ID: MRT4577_91462C.1
cgggggggggggctgggggatatttacattgtcacgggtagggtacttttggtatctttacatcgtgaggggagtagcacgggtgggatgtgctctatgactgggcctgcgacccaacggtttgtaacaccgctcgggtgtcacttatacgcactcacattgggggggggggcctccgaagtctgaagctataacctcatagcgccgaggagtatttgcactggaacccgaggaataagatgggggtgttcatggctagaacgggcaatgcggttgctcttggatcagattggcatttaggcgtaggcagtgccgacctggctctggctcttgaccatcagatctctacacaagccgtccctgtctctcgaatgcggcccgcntgcgtatgactgcctggacgatcctagcctattcggtgcccaacattg

SEQ ID NO: 175305 - DNA, 258 bp, Zea mays
  unsure (1)..(258): unsure at all n locations
  Clone ID: MRT4577_91463C.1
cgtccgnnaaatcccccaaagaaaggagaccctgattctagcaagagcgccaggacagggcaagggccgcgtcccagatcgttcgggcactgcccngagcacaaagcgcacacccggtaccccagacgacaccgccgacccacaacaagaacagcagggcaacgaaccccgcacccacgaacctaacaacgccagatgacaagcgcgccaaacagaccgcgaaagagcaacaaacggtcccagatcccacaggacacg

SEQ ID NO: 175306 - DNA, 712 bp, Zea mays
  unsure (1)..(712): unsure at all n locations
  Clone ID: MRT4577_91464C.1
gggcaccagacctactattcttcttataattctctttgcatcagaaatgcgcttctgcttgagcaaccgagatttttctgtgtataattaggataagtgcaaaattatttattgtcagaatatcaaactgaacagcagcatgtgcattaaaaccagaacaaatgaacactagactatatcaaatcacatctgtacaaaatttacaggaggcaagtattatttattgtcagaatatcaaaccgaacagcagcatgtgcattgaagcgagaacaaatgcttgactatatcaaatcaaatgtgtacaaaaataaatttaaagtatggcaagtagtaattagtactgcaggtctagttaatgagaggctattaattttatacaagaaaaatggccagtacgtactaagtagcaggaagaacaggcacattttttcttcatttttgctcatacaatctgcatcctgatttctagacttactacaattagaaaggtaaaatccatttcctaatgaggttccctcagactcctggcccagcgaggggattnntttttaaccaatccggngtaagagataaaatgaccagagaaccctctgcaagcaaaataaccaagctattccattctatctacgcacttccacttacaaaatttagtactagtatttatttgatagtttgtcacttgttacatttacaagatacatcatccttgcaa

SEQ ID NO: 175307 - DNA, 447 bp, Zea mays
  Clone ID: MRT4577_91465C.1
aattctcggagcgctgttagaatatgaatatatcggctgatgcacatatgtgagcactctatggtcatggttgatgagactgtggaggccatatgctccactcaatgagagtacaggaaatactgcggttaccatcggagtggttgaggagacagctgaatgttcaactgaggaggacgcgccataggagatggggaaaatttctttaatgagtatgcgtgcaaattcggtggagagatctcgtcaggagaacttacaggtgacgcgccagaagagaaaacagagattaactctgatgctgacacagcagctggagatactccaggatgtgcagttactggagaggcgccagatgagaaaatagcttacataggtattgatgagccaataatcacggagatgactgaacagcaaactgtagctggataacccgatgaagaatctact

SEQ ID NO: 175308 - DNA, 160 bp, Zea mays
  Clone ID: MRT4577_91466C.1
ccccgacacagaacctaggaagcggacagtctccgggggggggtagaggaccaagtcagccaccaggctcgcacagagaaaagcccgaacccgaggaagcgcacagaacagcaaaaacccaccaccaacattgcaaaagggcagacagcaccacaccacc

SEQ ID NO: 175309 - DNA, 375 bp, Zea mays
  Clone ID: MRT4577_91467C.1
gccacacgatcctagattaaccgatggtcctgctcatgactagaaccaagctgatcgtgggggctggatgcgcccacaaacactaaggcgacctagacagcatgacgatgaccatgttccagaaactgctaaggcacctgaaccacatcataagcctaagcaactatctacacctacgacgccataatggacatcggaaggacactgacgacgatcagcaccaccatggactagcagacgctcaagcactagctttgcagataatacgtgctgacttacaagcaaacgctcagaggatgtgcaactgatatgcgaagaccagctactagagatactgaccaatgagagacacttgacagacagaaccaacctact

SEQ ID NO: 175310 - DNA, 127 bp, Zea mays
  unsure (1)..(127): unsure at all n locations
  Clone ID: MRT4577_91468C.1
ctcattgctattgcagtacacttaatgatttggttgcctgattgnntaatcngtannatggaatttggttctaaaatgtttcaaaaagctcntgggcgttttnnttccgcatccaacaggtctactc

SEQ ID NO: 175311 - DNA, 237 bp, Zea mays
  unsure (1)..(237): unsure at all n locations
  Clone ID: MRT4577_91469C.1
attcacccggcgccctgggccgnagnacgcntaccctagcggctgctccagtgctcccccgtgccccgtttccgcttccgccgccggccgctcgcccgcaggccggagcgcgctccgtgccttccttcgggccgtccggggaccggggtaccctgcagccctgctttgtcgtccgcccccagccccctggtccggtgcgggttgcggcgctgcctggtccctggctcttattttttt

SEQ ID NO: 175312 - DNA, 143 bp, Zea mays
  unsure (1)..(143): unsure at all n locations
  Clone ID: MRT4577_9146C.1
gacttgaaattgcaggtaccaacatngctcttcaggtgactcgtgtcctcactgcgtgaactgggcgcgcagaagcaccgcccgtacttgggcgcgacatcgnggccaagaccggcaccggtcagaaattgccaggataccgg

SEQ ID NO: 175313 - DNA, 402 bp, Zea mays
  Clone ID: MRT4577_91470C.1
gatcttctgagcctctactgtgggctctgtctcttggaagttccctctaacctccaccatgtgctatgagaagtgccatatcaacattgcggatattgtacatgtatgactctgttaagcttaccaccacaggacaccttatctacaagcttgaaagcgttggcagcttgttgatctataagcttgataaggagggtggggaaatgaataaccggtccttcaagtacacgatggtgctcgactagctcaaaggtgaccgtgcgagatgtatcaccattgatattgctctggggaagtttgagaccaccaagtactactggacggggattgatgcccctggacaccgtgaatttatcaagaacatgatcactggtgcctcccaggctgggtgtgctgtcctta

SEQ ID NO: 175314 - DNA, 726 bp, Zea mays
  unsure (1)..(726): unsure at all n locations
  Clone ID: MRT4577_91471C.1
cggccgctcgaggcggccgggacggaaaaagcacacgaccctccctccctcagacgtaggtcactagctaaggtctgcaagaagctagaagctcagcttcagcgatggcgtccagagcagcagcggccatcgccgtcctggccttggtctgcgccgccgtccactcgtcggagggccagctctcacccaacttccacgccgcgacgtgcccggacctggagcacatcgtggagttccacgtcgccgagacgttccgccgcgacgtgggcgtggcgccggcgctcatccgcatcctcttccacgactgcttcccgcagggctgcgacgcgtccgtgctgctcaagggcgccggcagcgagctcaatgaggtccccaaccagaccctccgccccgtggcgctggacctcatcgagcgcatccgcgccgccgtgcacagcgcctgcgggcccaccgtctcctgcgccgacatcaccgtgctcgccacccgcgactccctcgtcgaggccggcgggcgncgcttcgacgtctccctcggccgccgcgacgccctcgccccggcgtcgtccgctctcgtcggnctcctgccggcgcccttcttcgacgtgccgaccctcatctcctccttcagcaaccgcagcctggacgtgggccgacctggtgtccctcttccgcgcgcacaccttcggngtcncccactggcccggcctttgaggaccgctttaagcc

SEQ ID NO: 175315 - DNA, 631 bp, Zea mays
  Clone ID: MRT4577_91472C.1
gcaagccacacgaccctccctccctccctcagtcgtacgtagctaagctagctagctaggtgcaagaagctagaagctcagcctcagcgatggcgtccagagcagcagcggccgtcgccgtcctggccttgctctgcgccgccgtccactcctcggagggccagctgtcgccgaccttccacgccgcgacgtgcccggacctggagcacatcgtggagttccacgtcgccgagaccttccgccgcgacgtcggcgtggcgccggcgctcatccgcatcctcttccacgactgcttcccgcagggctgcgacgcgtccgtgctgctcaagggcgccggcagcgagctcaacgagctccccaaccagaccctccgccccgtggcgctcgacctcatcgagcgcatccgcgccgccgtgcaccgcgcctgcgggcccaccgtctcctgcgccgacatcaccgtgctcgccacccgcgactccctcgtcgaggccggcggaccgcgcttcgacgtagctctcggtcgccgcgacgccctcgcccccgcgaccaaggaccaggtcggactcctgacggcgcccttcttcaatgtgtcgaccctcgactcctccttcggcgaccgcgagcctcgacg

SEQ ID NO: 175316 - DNA, 337 bp, Zea mays
  Clone ID: MRT4577_91473C.1
cccggcgggacgcacgcgtccgcggacgcgtccggcgcgcgccatcgattgtgtggggaggagggtggggcggaccctcggccatttgggatttgtgcgcgccattgacggcgtggggaggagggtggggcacagcagatggggaggagggcgcgatggggtggaacctcggcgacctaccatcgacagcgtgggcgttgatggcaacctcggatgatggggatcgtagagctgaggggtaggggatccttgacacctgcctttgatggtggggtaggagatccttgtcacattacgacgatggtggcgcggatgacaggcgttggtgcctgcacgc

SEQ ID NO: 175317 - DNA, 727 bp, Zea mays
  Clone ID: MRT4577_91474C.1
attgggtacctcgaggccggccgggacacgccctagagtagaggctgagctgcatatatcaccgagcaccctctctctctctgttcccctccctcgctcgacatggaggtcgccgccgccacttgtacgctccttgctgccgtcgccctaccagtttcgtcctcagcagcagcagcacgctctgcgacgaaacagagctactcgaggaggaagacgacggccgtgcgagccgtcatggcgaggccgcatcaggtgccgccgcctgccactgccaccgccaccgccaccacgtaccgcgacaactggttcgacaagctggccatcgggtacctgtcccggaaccttcaagaagcttctgggatgaagaacggaaaggacggctacgagggcctgatagaggcggccctggccatctccgcgctgttcagggttgaccagcagtgggacactgtggccagcgctctccaacgggccttccccagctacatcctcaccatgatcaaggtgatgatgccaccctctcgattctcgcgggagtatttcgccgccttcaccacggtgttcttcccttggctcgtcggaccatgtgagatttctggaaagcaccaactgtgtcggaatgtgcacgaacctctgcaaaatcccatgccagaggttcatccaggattcacttgggacggctgtctacatgtctcccaattttgaggacatgagctgcgagatgatc

SEQ ID NO: 175318 - DNA, 631 bp, Zea mays
  unsure (1)..(631): unsure at all n locations
  Clone ID: MRT4577_91475C.1
caggccggccgggccgggtttctgcaagcgagctccgccgcgccccctgtccccacgcccgcaatccccgccgccatcctcgcggctgccgcgcccgcaaatctctacagcagctgcagcttcgtaagccgccccgccatcatcgcaggaatcatcgcgtcgtaagccgccccgccatcatcgcacctcgcaccttccttcgccaacaatcacagatcgccccgcatccgtgctcccctcgcgcaatcctaggaaaccttcatcgccccgcgtctgtgctcctgccccgggccaccttcctacagcagctgcagctccctccggccttcggtggtctggcacgccgcctcctcgctcagatccgtccgtggtccgcccctcctgtcctcgacgcccctcgccttcgtactctcgtcctcgacccgcaccctcgcgcaaggatccccttccgcttcttccaccgcccgcttggagtccaacacccgcacacggtggtgctgggcactgcctcgccggttctcggtcgcacagggaccccacgacccgccgnccgcgcaaggcggatactcgctgagcgtgctcggaaatatcctcgcgccggtggggagctccggctccgggaacagcattg

SEQ ID NO: 175319 - DNA, 397 bp, Zea mays
  Clone ID: MRT4577_91476C.1
ccccaaaaaggaatggggggaataatataagttgggtacggaaaaacgttccatctttagacacagaaatttttcagacaattgccgggcttgggaagggggggaaaacaaaaagggggcctccccccaataggggtcctgaaaataaaaaacatcatgaggggggcctagggcaaattttgaaaaaacccaaacaaaggggtttggggagatgtcatgttaaacccaaagaggggacatttaatcacgagggggctttttgcacctaagaagtaacttccttggggggtttttttgggggggggttaaccactaagcccttttgggagaaaaaataaatcacaggttcggtttgtctggggaaagcttaaagccttgacttaaagacctaaggggg

SEQ ID NO: 175320 - DNA, 996 bp, Zea mays
  Clone ID: MRT4577_91477C.1
aagtacaacgccctagagtagaggctgagctgcatatatcaccgagcaccctctctctctctgttcccctccctcgctcgacatggaggtcgccgccgccacttgtacgctccttgctgccgtcgccctaccagtttcgtcctcagcagcagcagcacgctctgcgacgaaacagagctactcgaggaggaagacgacggccgtgcgagccgtcatggcgaggccgcatcaggtgccgccgcctgccaccgccaccgccaccacgtaccgcgacaactggttcgacaagctggccatcgggtacctgtcccggaaccttcaagaagcttctgggatgaagaacagaaaggacggctacgagggcctgatagaggcggccctggccatctccgcgctgttcagggttgaccagcagtgggacactgtggccagcgctctccaacgggccttccccagctacatcctcaccatgatcaaggtgatgatgccaccctctcgattctcgcgggagtatttcgccgccttcaccacggtgttcttcccttggctcgtcggaccatgtgaggtcagggaatcccaagtggatggaagggaagagaggaacgtggtctacatacccaaatgcagatttctggaaagcaccaactgtgtcggaatgtgcacgaacctctgcaaaatcccatgccagaggttcatccaggattcacttggcacggctgtctacatgtctcccaattttgaggacatgagctgcgagatgatctttggacagcaaccacctgaagatgatccagcactgaagcagccctgcttccggacaaaatgcatcgcaaagcagaatcatcaagtgaattgctctatttgatttgagaggaagtggatatgtaaattactatactactatcagtggaaattcccaaaattacatgctttcatgtttaaagacaagggcgagtgagcacgagtaagcgggtcttactctgcggttcggtccgg

SEQ ID NO: 175321 - DNA, 408 bp, Zea mays
  Clone ID: MRT4577_91478C.1
caaaaaaacaaacctccttgggcacacgggaaggccaataatgccgggagggcccttccccccacccctttaaccccggggccccccggaggctacaacattcgatggaattcggggccagggacccccgtgaaaaaacccccccaaacccctgggagcctattgcccaaggggggccccgaccaaccccaggggggcaagggaggcctattggttcaaaaaaaaaccccgggattccgggcccgtgcccggagggctacccgctgttcctaaagggggggggcctacagcctggcgggaacaaggggcaaaccgtctcccgggggaaaaagttattcgcccacaaattcccacaaaaaacccggcgcgaacctaaaagggaaaacccggggggcccaacaggggggc

SEQ ID NO: 175322 - DNA, 360 bp, Zea mays
  Clone ID: MRT4577_91479C.1
gaaaggcaggaaaagcatgtatctgactcgatccgatgtttctcacgggcaccatgggaatgggaattgctgttgccctcgttttaaactcatctagaggatattgcccacgcccagatcagtatgctctgtctctccatctccatgcttcacctccggcattgatgcagccagctgtatcaattctgcaaaagaaaagttcctatctggtaaactgctgatgaactaggagcctaggacaacatgaatttttgtttcgcttcagtgcttggtcagtgaacccgtccaccaccctcgaagctgctgcttctggttgccagttttcatgtttggttaagctttttttttctaacatacttt

SEQ ID NO: 175323 - DNA, 296 bp, Zea mays
  Clone ID: MRT4577_9147C.1
taatggtgctgagctagccaggactgatggagcccctgggggtgtgggatggaggagggtctgcagccagttcattcgcagggccccatcttgatgggccaagggctaaacatgcatgtgtcagtggctttggagcaggttaggctggtgctcatcgagggtctcaggccgaggccactgcggtgccagtgcccccctgaggactagggcaggcagctgggggcacttggttccatggagcctggataaacagtgctttggaggctctggacagctgtgtggtgtttgtgtcttaa

SEQ ID NO: 175324 - DNA, 241 bp, Zea mays
  Clone ID: MRT4577_91480C.1
aagacctccgactgtctaactctgggggccgaggctctgatactcaccagcctccttgtgcttactggcacgccgcgccaagccctatgttgctgcagccacagatccagattcagggcaggatggccttgaatgatcggaacgtagagagatgctgggggttggttggtggaggacaatagcgggctgtatacaagagggagggggaagggaaaaatggaccacagataaccgagaagta

SEQ ID NO: 175325 - DNA, 208 bp, Zea mays
  Clone ID: MRT4577_91481C.1
ggacaaaaaaaaaaccctgggattaaaaaaaaaaaaaaccgccgggcggggcactttattttcacagaaaaaaatggggtaacaggcaggggaaaggggaagccaacagctttacgcattccaaaggcttcaccggaacccataatggccccccccatccacaaggaaatcattttatagccgagccggaactttttttgggggggcc

SEQ ID NO: 175326 - DNA, 502 bp, Zea mays
  Clone ID: MRT4577_91482C.1
gggtaccggcgcccctccctcggttttttttttttttttttttttttttttttttttttttttttttttttttttttttttttttttttgggggctggacatgtccgggttttgctcaaaattcgaaaagggaaaaaacaagggccggaaaccaaccatgcttaacgctataaataacaaccggccagccggtgatacccacactccgccgcccccggggttgttgccagctagcaggtaagtcggactttatgcggttgatctggttgacccccggctggaggatgttaaaaaacccccacccgagggggggcgggacaacaatgaacaacaggaccccccggttgtcgtcggggggcgcggccgcagccccaaaaggggggaaaggggggaggtcctgccccggggggggggaggccttgggcgcggccgccatcccgggggggggggggccgaggcccaggccggaaaccacggcctggttgggcatgcggttgaactg

SEQ ID NO: 175327 - DNA, 337 bp, Zea mays
  Clone ID: MRT4577_91483C.1
ccggagggaccgtcccgggatgaccgacgcgtccgacgcctcctacctcgcacagggatttaatagtctttttacaaagacaaacaggcgaacaggaaacacacacggtcgaaccgagacacctcaatataataatggcgagcgcctaccgtgctgcgagaagattgggctaaataaggggccatggacgcacgatgaggacaaggtcctggtcggccacatacagagcttctgacacacgaactggagcacgctcgccaaacaagcactgctatttcggtgcaccaagagttctcagctccggtagatcaactacctgagccatgacatcaagcgc

SEQ ID NO: 175328 - DNA, 605 bp, Zea mays
  Clone ID: MRT4577_91484C.1
caccaccttccacagatggcggtgacggcggctttgaacggtgtcgggctggcgctgcagatccccgcgatctacgccttcgttgccgattccgtggacggcgccagcaggggcatggcattcgggtggctcgccgtggctggcaaggccggcaccgtggctggcacctccctcggcctgctcatggcgccgacctcattcctggggctaccgggctggcggctcgccttcctcttgcttggcgtcttgggggccgcggtcggcgtgtccattcgcgcgttcgccgcgagcgacggcgcagcaagaggccgcgtggtggtgagcccggccacttccaagccagtgaggcaggaagtgcaggagttcgtcagggaggccaaggccgtgatgcggatcccgtcgttccaggtcatcatcgcgcagggcctaaccgggtcgttcccctggtcggcgctgttgttcacggcgatgtggctggagctggtggggttttcccacggcgagacggcagcgctcatgacgctgttcaaggtcgccacgtcgctgggagctctcttcggtggcaaggtgggggacgtcctcgcccggcggttcaagaactcggg

SEQ ID NO: 175329 - DNA, 510 bp, Zea mays
  Clone ID: MRT4577_91485C.1
ggtgaaaatttcccattgagctttcagagagagaaaaaggggaatcacaggcatgcacaaacacagagctatacttactccaatagaaacgaggagcctcaaacataatatggggcactttactccaacaggatacagatctgcgaaaaccacattcctgttatcttgtttcaaacgcatgcaggtgacagacggggacactaggctggcgatcaggcgattagaccacgattctgcatggtcttagtgaccaggcgtcgaaaccctgagagtatatgatgcatgctcaaaagtcataactaatactctcttaatatctgtaagctgaccgttccctgaggccttttaagatcaaataaagaccttccttcttaatgtccaatttcttcaatgcctcacacaagaacaatggggaccatgatctgacaacacgtctatttacaaatttgacaacactgggatccatagtccgattatctactatgctggcagcaactagccccttgctgt

SEQ ID NO: 175330 - DNA, 244 bp, Zea mays
  Clone ID: MRT4577_91486C.1
acgaagagctcaatggagatattgtcctacatgctacatggcgcataccagactcacagagtctggacttgtcagccgcatgcgtctgagactgaccgggtatgagacctcgaggctgaagcataatctcggacgtctgatcctagcgtataggctctgggtgatgttgcctccccgatgactttaacacctgttgcattgatggaggcaacttgcttcgctagaactgtgttaggtggccagc

SEQ ID NO: 175331 - DNA, 551 bp, Zea mays
  unsure (1)..(551): unsure at all n locations
  Clone ID: MRT4577_91487C.1
aaagcagctaacaaaggctaaaaatgttataaatatacagcaaatcactctgaatcctctattctactgggtgangaaaaaaggtacgaagaaagagtattttttgtccaaaagctattttttagctaagaatctaaacatgcaagagatatcgttagctagtttttagccatgactaacaactagtcctagtatttccaaacatgctctaattaaccacatagagcgagcgagagagggagagagagaggtggtctaaaggccttgtttcctcttgcggagatagtctactggttgtccgacgctatgcacaaaccacccaatgtcgaaccaacaaaaaaaaaaggaaggaagacgccggctaccattcattcggaagttcttttctttcatgtttcccccctgaatccaccttcgtttttttggcttccttgaacccagtgatgtacaagagcgcgccgcgcgtggctgttcactcggactcctcgtgttccgtcactgtagccaacccttcttcctcttccgccgacaccgcgccttgggcaggcaac

SEQ ID NO: 175332 - DNA, 467 bp, Zea mays
  Clone ID: MRT4577_91488C.1
tgagacagggaaacccatcactgtattaatggggtgcatgcacatggtctaaatgacttggaccaatgccttattatccacggcgctgcagagtatgcctcccaaacctctcgtggcggaagaaaacaaaaaattttatgtaccaaaccactcaccacttttttatggtctgcaccctcattatgaggcccccgatttctaagctgccgtacgaatcttcttgctgcgtgtccttgcggagcatgaactgtttcatccacttgggccactccttcttggtgctcgtgcaattattgctgcggtcgacgtacacgatgccttattcgttcgttgacaccggctaaccttgcagggatggccattttagaccaatcgaagaacccttgcccattggatcggacccctattggctcctatcgactacccatgtgccgctggaggtgatgcaatgcttttgaaacatgttt

SEQ ID NO: 175333 - DNA, 344 bp, Zea mays
  unsure (1)..(344): unsure at all n locations
  Clone ID: MRT4577_91489C.1
caccatactcaccctmcaccaacaacacactcmatayaaaccacaacaaggacagaaacaggaaaamtataaggmagactatcttaaaaaggcgccgcttcttctcacagccaacttgattaaatatctccctcacaacaaacatatntygamgmmgctggtatagcgctaaaawtataggacaccattaraaaacaaaataacaacatacgcccaataagcacataaaaaatgaacatcacactgagaaaacaaataacacaaawwcttcgcatcactacmttgttwtattcgacatgatgaatcgratcgggtcgatataatcgaactckagatccgccaag

SEQ ID NO: 175334 - DNA, 431 bp, Zea mays
  Clone ID: MRT4577_9148C.1
aacccttctaacaaatccataacctaacttttttccaattttcacaaaggaaaacgggtccttttagtctcaccttactttacgggacaaccaaattttacatttttttgggttaaggcttatgattaaacagagcctcctgaaaatgggggggctgggaaaaaaaaacaacccccctaaaatacaaaatagatggtgtcaatgggtaacagtttgtcttttacgggaaaattacaagggcattaaacatttggagagaaaacattaagggggacaaacaatatgggggggatttttggattccacacacacaggtgttaagtttggacaacaccaaactacacaaggtgggggggcccgttcaaaaaaaccattatgacgtaggacgtcatgaaaaattttttacattataggggattgacttctttttt

SEQ ID NO: 175335 - DNA, 696 bp, Zea mays
  unsure (1)..(696): unsure at all n locations
  Clone ID: MRT4577_91490C.1
tgaatgtattctatttttcacacacactgttatgagttaggggttatgcccaattgagaaattcatttaaatcccaggaaaatctcaaaagcccacactactgtgtatggttatgggatattggtggaaccatatagtaccattctttgctatgtccaatgtggatgtggaagtatgtttaaatatggagaccacactcattcaccaagtcatggatgatatgagagatcgtggagatccacacgcgcgcgctctcgctcgcctggcggggcgaaggacgcgggtgcatgacatgcgcgtgaatggtccgccgaaattccggcccctcgccttgcgggggcgcgacattcttttgccgttttaatttttttggtttttttggcttattaagtttcagaattcttaaacgatttgctattaaaattcttaaacttgaacgcgagatttttcgcgggcagattcggattcgaagatagcttttttgtttcgcggacttcggcccttattaaaaggcgccttggcagnccagcattccagatcattcccagattttcgctttttgtcttttgttcacagcttgcgccgcctttcagttctttttcttcccaaccgcccgacgtgcatanggcgattcgggagagcaggttcttcggaaacctttgcctttcgagatcctgcaccgggagagggcgaata

SEQ ID NO: 175336 - DNA, 684 bp, Zea mays
  unsure (1)..(684): unsure at all n locations
  Clone ID: MRT4577_91491C.1
cgacaccccgtgcagccgtgctcttccgcttgaactagcgggtgatccgcctccgcgcccgcgccgccgccggctgtagccatgtccgacgaatacgtggacttgcccgtctcggacattgatgaagaagagctcgaagatgagatggatgatggtgatggggagagtggtggtggaagctcgaagaaaaaggccaagcagcacgtggagcagctcaagcggctgcagcaaaaggatcctgatttctataaatatttagaagagtttgataaagatttgttgggatttgatgatgatgatgatgaaatcgagaacgaccgggagactggggttgaggagaaagagcaatatgtatctaaagaggaactgaagcatgtgaaaccgattacaatggaaatggttgattcctggtgcaacggagtagagaatgaaaagataggttctatccgttctattcttcaagcttttcgcagagcctgccattatggntgaagatcatggggacaattcaactccgaagctcagtgtcatgtctggcagcgtacttgataaagttatgcactttgttttgaaacacatggataaagtcctccgtcaattacttggtgccccaagctatggagggaagaaagaggtaatcagtgagctgatgctgagtaagtcatggaagaggcatggtaatct

SEQ ID NO: 175337 - DNA, 641 bp, Zea mays
  Clone ID: MRT4577_91492C.1
atccggaggatcacggacttggcggcggcggctcctgagctactttcctctttccttcctaccagattcagctcgttgagcgtgtaaccagactcaatttgtgtaaacagatagtgagaatcctagtagttcctatcaattggtatctagagccatttcctaccaccttccaccgcaaatctggccccaaccttttgttctatcatcgagacacggcgcgagaagcagaagaggctcgccatggacaacgaaaataaaaaagttcatgtgcgagctcatgggagagttctccgacatcaaggagtcgattggcgacctctgcgccgaggtggaggcgatccaggagtggaagccggatctggaggctcgcatctccgagctgcaggaggcggtgggcgcgcttcagcggggggcgccagcgtaccagcccatgtggtcatcgacatacttgagggtgtgagcaaggaggcggagaaggccaagggcgtcgcgccatggcagccgtcctcgaggccagtgagccacggcgaacaatttcaatcccgggggcagttccaaggaactacccagggcacaggtcaacaacagttcccatccgttcctccgcaacagctagtcgcactgtcatctccgttcccttt

SEQ ID NO: 175338 - DNA, 337 bp, Zea mays
  Clone ID: MRT4577_91493C.1
gcaccttctgcttgctctgcggggaaggagagagagagagagccagcgagagatctagtaaagtggctagtacgtatgctcttgaacgaagatgttggcggtgtttaccggcctactggtggatgatactgatgagctgctatagctgcgcttcatttcgcctaccttcaatatatgaccgtttcagtttgtgagaacctatctgttcatctctacacgctccaacacgtgatagcatcaagccactgaccacgatcactactgttatatcaacaatggactgctctatcttaggtgcatacattgctacaaaccatgatggtacatcagctggagc

SEQ ID NO: 175339 - DNA, 366 bp, Zea mays
  unsure (1)..(366): unsure at all n locations
  Clone ID: MRT4577_91494C.1
gccctgttttttttttttttttttttttttttttttttttttttgcgtaactgttaactctgcattgagttgcactgaataattacatgtatccgctacgtagcacaaaactttacacgtttttaatcaaaaaagcaaggagccagaacaggggggatagttgggggctgatccatcaccttctaccgtttctggaagttcaaagccttggtgccctccccgaagaggaagaccaacagaaggatgtagccgaaatgccccagcacgacgtagccgaggaagtcgtgcttcatgcccaggttttgttccaaaaattccttcaccacgagtgggccgggggtgcccgtngccttttttttttggcct

SEQ ID NO: 175340 - DNA, 346 bp, Zea mays
  Clone ID: MRT4577_91495C.1
aagacccgggccgacgcgcacgcgtccgaccgcctttttgcactactctttaccctattttcctcccgatcgcgaactcgcgatataggcaagattaccagggagaaggagatggccaataataaagataaggcgttgaacgtttctggcaagccgcggcactcgaacgacgtcgaccgccccaatgacaatacaggcgcgtgcacgccgctccaattgctggagcacttccgaaagtaccgttccgcggatctagatgtacaagacgcatgccatgatggacccctccgagaaggtgctcaggaacgataaagagtctaaacagctatctaacacccgcatcgag

SEQ ID NO: 175341 - DNA, 191 bp, Zea mays
  Clone ID: MRT4577_91496C.1
ggtatagaaaaagtaccggtacgaagtacctcttcatgacagactatacatcccacccgggggggggatactggaagctgacaagctaaagcctagttatctgggcagagtcaataaaaagagacagctaagaccagacacaatcacaccacagtacgcctcaacagtgatggcagcggagtcccataaag

SEQ ID NO: 175342 - DNA, 633 bp, Zea mays
  unsure (1)..(633): unsure at all n locations
  Clone ID: MRT4577_91497C.1
tgggaccctcgaggccggccggggtcagatatccgccacgccgctgacgccaaaggaacagcaacaagcctgcagtgcaggttggttgcagtcttgcagacatggcggcgccaccaacatcggcaccacggcggaccgccctgccgctgccgctggtgctggtgtctgctgtcctcctcctcctcctcctcctctccgtcgtcgccggccacgcgacgagagctgtggcggcggcgagctcgacgagaagccaagaggagcagcaaagagatgtgagtaaggtaggcgccgaggagaggtcgtcgatgagcatgagcttcgcggcgggcgacgacgagcggtgcggcagcgaaggggtaggaggaggaggagaggacgaggagtgcctcatgaggaggacgctggcggcgcacaccgactacatctacacccagggccagggaggaggccacagctaggccggctagcgcacctcctcagatcgatcgatgcatgccccacgccccagtcgtcggccggcttcgtcgtctgcattgcgtgtggttctgtcgtcgtacgtgttttgtgcgtgtgtgtattattatgtgagcttttctttgaactctactagctggnttcggntgattattatta

SEQ ID NO: 175343 - DNA, 564 bp, Zea mays
  unsure (1)..(564): unsure at all n locations
  Clone ID: MRT4577_91498C.1
cgccgcccttttttaattatatttatattaacggaggccgncaatcagtggatgggggggattaaaaaccccacaccgaaacaaaacccaaaaagggccatcagggcggaaaaaacaacaaacacggagcttttcttccctgggcaccaaacccaaagagccaactgagattttctgagctcccccaccggatttccgccccccacccaacgcaacaaaaaaagggcagaaaaaagcctgcctacttacaaagcgccccctacccccccgggaaaaacaaccccacgggtgggccccccagaaaaagccgccccccgcccggacgccccacactctttctctttgaggcggcataaaaacccggggcaaaaaaagaaaaaccccttcctcgccgaaaaaaaattttcccgcaaaaaatccccaaaacaaccgccgcgaaaaaaaaaaggaaaacccccgggccccccgagggaccgacccccccaaaatgggggggcgctccacccccccttttacaaagaaaaacccccccccccacccaaaaaaaaaaaccccccccccggg

SEQ ID NO: 175344 - DNA, 578 bp, Zea mays
  Clone ID: MRT4577_91499C.1
aaattcggcacgaggcttccttcccttcccttcccttcccgggcactcgcgcgttttccacctcccatcgcgacctcttcctgacgtttccccaattcctccgcgctaagcagagcattagcgatggcgacgaagtacgctgccgccgcggctgatctggtcacgggccgtccgcggaagcgggcgaggtttggctgggacgtggcgtcggctgccgaggtaaacgcccctcaccgactcctctcctctccgatatgttgtaattcaggatactgttcgcctctccatgcggcgattccgcatagaactatcatctatcccgttagatatcagtaccttgttatggtattcgtggatacattgatcttttagatctaggtcgtttatgtgttgtatttagagcccagatccacagaaattctattctatactggtcttgcaaaattattatgacaatgttctcgatggtgctgtctacctttttagcctgattaatctgaccaggtttatataattatatttgacttagagcatgcatgcatgcttgttttttttttcccgagagcacgattagagct

SEQ ID NO: 175345 - DNA, 528 bp, Zea mays
  Clone ID: MRT4577_9149C.1
ccggccagagaaaaacacctgacacaacacactcatcggtgaaagaaacaacacatataaacaaatacatcgctacgtcgccaccaagaatggcctcaaggaactctatcctggttgccacaacggcactggctatgttgtacgcattccgttcgtgcaccaccccactcaccttccaagccggcaagggctccaagcctggaacaccagggtctcacccctaacattggcaacatctctgacgtggagatcactgagcatggcggcgacgatctctcctttacactcaaggagggaccagttggtacttgcatgctcgacaccaatggccctcatcaagtaccccctctgcatacggtttgctaccaaggtggcaactaccggatcaccgatgatgtcatccccgacgacttcaacgatgtcaccacctacaagaccactctcagcatgtaatcagactctgataagagacgacgaataatattgcgaaccagctcacctagcgcatgcgccacaagacaatattat

SEQ ID NO: 175346 - DNA, 359 bp, Zea mays
  unsure (1)..(359): unsure at all n locations
  Clone ID: MRT4577_914C.1
tttaaaattttttacttttttgttttngtggtgggtttttgggggtttttccccntggggggtttttaatacaaaaacttaaacccggcgtgggaagacacaacaaaagcccatttggttggcttacatttaatcaaatcatatttcatgcatggggacattgacacaaacacccatggaaaacggtcaggtcccgggtgggaacaagaccggaagggttcactgcctggccggtggaaacgcaattacgctaattaaggtccggaccgttgtcaacctgattaaacaagagggcttactcattttaattcatcggagcgggtcgggcggggtaaggttcccatgccgcctgtgtggaa

SEQ ID NO: 175347 - DNA, 538 bp, Zea mays
  Clone ID: MRT4577_91501C.1
ttgggtacctcgaggccggccgggatttccatgtcgcttcctttcctccgccgtgctctccccagtccccttcgcctccggtatccataacctagtcgcccctctcctcggtgcggcggtgtccggacgctggagcgacctcaagtgctcgacaggcgtcacaggacacgatgctcaccgcttgctatcgctggcggacttcagacgactggaactggattgctgtggagaactggattgctgactgctgtggagaatttggactttgaagcctaaagtctgaaccatctgtgaagttcgaactatattttcttgtgaatttgggatgcaatgcaatggcacttggcggctgtcactggcaggcagcaccgcagcaggcttaatgccttgcagccttgcacttttgtatcttgtcgtcgtcgagtactcagtacattagtattagtaggtagtacctgtcggttgtattggttcttgaattcttgctcctctgcataaggtttattctctatacaaaaaaaaaaaaaaaaaagcggcc

SEQ ID NO: 175348 - DNA, 407 bp, Zea mays
  Clone ID: MRT4577_91502C.1
gggatcagtctatcatcctacatactgccagcagcagcagttggagcaatgggtccttgctacatgcggcggaaggggtggcctctctcagatgtcatgtttgccacaaaacacaacatggcaaacgctggtcagagcatgtcaaagcagccggagcaagtttgatcatgactagccgccccaaaaagacatataactcaaccagttgagaatacggatgccagctcggatgaacaagaagagggctccacagctattacaaatgagggtcaaagatgtgaaagatgacctgtctcaactagaatgggaggtgcgatcaatggacatgatgggcgctggattggagggaaagatcgagttacttgagaacaaacaggacgcgactgatactggcatctggcatctct

SEQ ID NO: 175349 - DNA, 491 bp, Zea mays
  unsure (1)..(491): unsure at all n locations
  Clone ID: MRT4577_91503C.1
caaaacgcagacccacgccccacgcgagacagcgaggcgancccncaccaacgccgccgaggagcccaggcgcgggcgccaccgagccgccgcagagaaggcgccagaggacgaggaggaagagancggggagcccgacgcggaggcggaggaggagcccgcggaaccggagcccgaagaggcgcagcncgccgacgcgggggccgggaaggacgccgacagcaacgcagcgggcaagagaggggcaagacaacacaangagaagccgggcaggcaaaaacacacacagagacggaaaggngccaaagacaaagaccaggaaaggaagacaggaagaagacncggaaccggggnacgncacaaaggacacaggaaaacagaaaagagaagaacagacgaagcagcaagccgcgcacaaacggcaggggccagcgaagaagaagcaaagaaccaacgaaaaaaggcgacaccggggccaaccagagaaaaag

SEQ ID NO: 175350 - DNA, 404 bp, Zea mays
  Clone ID: MRT4577_91504C.1
agcccggaagggggcccccaaaaagggaaaaaaaaggggaacagggtacaacccaaaccacccatgggcaaaggaaaggaattacatttaaacccggggctgatcaccgggggggggaaaagaaaaaagggccaccccccctacataccatgcagttagaaaggaggaacggccggaactaaaaaaaaacccaccttggaagatttccacctaaaaaaaaggggagggccaccccctaaaggaaaaaaaggcccaaaacaccccggaaaacccccaaaaaaaaaaccccgggaaacctggcccaacccgcggagggctgaaatttggcggccccctttttcctgcccgaaaacctaaacaaaggccccctggacgggccccccttgttgaaagaggccaccccc

SEQ ID NO: 175351 - DNA, 647 bp, Zea mays
  unsure (1)..(647): unsure at all n locations
  Clone ID: MRT4577_91505C.1
ccggccgggagattccatgccgcttcctttcctccgtcgtgctctccccagtcccctccgcctccggtctccataacctagccgtccctctcctcggtgcagcggtgcccggacgctggagcgacctcaagtgctcgacaggcgtcacgggacacgacgctcaccgctcgctgtcgctggtggactacggacgactggaactggattgctgtggagaactggattgctgactgctgtggagaatttggactttgaagcctgaagtctaaaccatctgtgaagttcgaactatattttcttgtgaatttgtgatgcaatgcaatggcancttggcggctgtcactgacaggcagcaccgaagcaggcttaatgccttgcagccttgcacttttgtatcatgttgtcatcgagtactcagtacattagtattagcagaggcatactagagtggagaactgcaggaaactctagagaaagcaatgtgttcgtagaaaaaaaatgaacaataagcagatggcatacaattaatcacaatgttaaagtatttgctgtacaattcaggcttgtcatcaactggagatgcaagttgtggataattcatgtccaaatgttcagtgcactttcgactggaaatactcttttctgca

SEQ ID NO: 175352 - DNA, 340 bp, Zea mays
  Clone ID: MRT4577_91506C.1
ggggggggtcgctttccaaaccaaaacaaaaggggttcccaggcctaaaacaatgccccggacagggaaagtaaacaccaacctgcttttatttgggaggccaaaagccaagggtttgccattcattttccaaaaaattctgcaattgttcagcccccggggcccttatttttgttgaagcaaaaaccttttatttttttggaccctaagacccaaaacaaagggggaaacaacccccccggagggccccatcacattaacaggggggccctgctcccctgggagggggttcttggctttttggggggcgggcttcctttgcggtacacggggggaaact

SEQ ID NO: 175353 - DNA, 580 bp, Zea mays
  unsure (1)..(580): unsure at all n locations
  Clone ID: MRT4577_91507C.1
gtgtcatgaatgtaatcaattgtaaagggtataaatataatttcacacaggctgcgccctgtgcctataaatagatgaacagtacccccgtactgtggacactgatttgtactcgctcgtgcatcacgcttgtactatctccttctgtcaagccgaaggtacaaatgtaattctgcattattcctgtttattcacgatatataatagaagatgagttaataatgttatgtaatcattcatgtttccttttatgtttcatatgcttcttctttcattactatatattgcgatgatgaaggtatgtcctttgtgaccttcttctgaagatcattatatcctaagggaaataatgcttcgatggatgaagggcctttaacctttaacattttgtgttgccttgttcttaattcatagcatttgagaataagtccccaacaacaatcatcataaatcaacctaaaaacataaaaagaacgtttactttttgaaaacatcatagacgagggttataatgaaaagtattctttttgaaaaggtctgatctatattttataaaacangacatantattaaaatatct

SEQ ID NO: 175354 - DNA, 591 bp, Zea mays
  Clone ID: MRT4577_91508C.1
tttctcgagtttttttttttttttttttttttttttttttttttttttttttttttttttttttttttttttttttttttttaaacaaaaagtttgatcccctggggaaacggggggactgaaacaaaagtttttaaccttttaaccacatttttggccacccatttttaaagaccccgtataaaacaaaaggttgccttggcccatggaaaaaaagcaagtgacagaaaccgggtaaattcccgaaccaccacctttgttccgggctaaaaacccgcccaagggggttccttataacctaaaaagggtttttttcccgcacggggtttgtttttgactaaggctggtaatcaccgccccccccccttggggggacccgcgaaagtaaagcgtaacactggagggctgtcttgattttttggggggggcaaaatatggggttgttcagggtttttactgactccacggggggtttgggggccggttggttgttgacaaggatctggaaggcgacgggaaacaaggagccgcctgttttgggctcggcgcccacattgtttgggccattaggcaggggggcgaacccaaacg

SEQ ID NO: 175355 - DNA, 386 bp, Zea mays
  Clone ID: MRT4577_91509C.1
tcgttcgaacggacgacggccataaaagaggggcttgtctttaacgctgatgaagcagatcatgcggctgcactggaaagatagaaggagtgtgcaggaatgcctgctaatatttggaagcttgctaaaagggagatgaggcgcgtacgaaagattcagccttaccaaccgggttatagtaccttttcgagcctacttggaactttttgctgacacttccttgacaaaaggccagcgaacaaagggagcttgaccttatagctgctaaagagagccttggccagtctttatttatgggctaaccaaagtttagctataggattattgagttctttggatggtcaataggctaaaaccctgttgccatggggtccagggctgtgttt

SEQ ID NO: 175356 - DNA, 626 bp, Zea mays
  Clone ID: MRT4577_9150C.1
cttactctttagacattatgtttctggatattggacaaaataataaagacaggggcgtggtccatacaagccagagccaacactagatggggatatattattctacagcttctttcgaacatggaagatccacgagagccttgagaaagcatccatcctcatgtgctcagatccatgggcatccatgaataaggcaagcacacccaccctttttatttatgacatgatgacgcctacccagccagggcacccacacacatacatatatgtatgtaaatatatatatatatctcacggatagactttgaaggcaacacgatctccaaattgcttgacgatctgtggttcgctgaaccctgctttggagaatagctccctccattcttgttcatctctatgacgaccttttgggatggttatcatgcctgatggccatcaagaggtgaggttacagcatatagcccagagtggacaatcatattctcaccgatcgtatctgtcccgccgtccttccgggaaggaatcgccttttggcattgagccgggagcttgacccactcctgatcgggcagtgatggaatccaaactttatcgcgagagtttgagcacttggactgaaactgaac

SEQ ID NO: 175357 - DNA, 881 bp, Zea mays
  Clone ID: MRT4577_91510C.1
ccggccgggaatcactattcccagccatactattctttcacccagtgcccactgggtaaatcttatgacaattaatgaagtcatttttttacataaattcacttaaagcatcctgctacaggcagttgtttagacgggccgagatgtattcttgctggagaccatcttcaacttcctccaacaattcaaagtgttgaggctgaaaagaaggggatgggaaagacactctttgaacgccttactgaagcttatggagaggaaatcacatccatgctcactgtgcagtacagaatgcacgagcacattatgagctggtcatctaaagaactttacaataataagatcagggcacattctagtgttgctgggcatatgctctatgatctagaagaagtcactagatcttcttcaacagaaccaactattgtactcattgacactacagggtgattactatctgatgtttcttgctgtttcagaacactattgtaattatatttgttgagctgttcatacatagagattttgctacccccctgctttatatgctaagtacacctttacaaaaagaaaataaaaatattattttctttgtagaaatcgtatttgaagaagataattaggaagtgtgtggcgactcttttgttgttcgaaaaagatgcttgcttttttccttgagagatgaaccctctggatgcttttcacataatgtttctaacattttcaaatactcttaggtgtgatatggaagaagtaaaagatgaagaggagagcaccatgaatgagggcgaggcagcagtatccattgctcatgccaagttgcttgttgagagtggcgttaatgcttctgatattggaaataatacgccttacgctgcaca

SEQ ID NO: 175358 - DNA, 342 bp, Zea mays
  unsure (1)..(342): unsure at all n locations
  Clone ID: MRT4577_91511C.1
aaaaaatctgaaaatgtaacttcttatttctagttgaccacatacatcatccaaaaaactttattattcaattacaactaataatcaatctaaaagagggcaccaccaatgatttcttttatttatcaacacctctggggggggcaaatcaanttcgacaaatggcaacaattattgtanttataagagggttcccaggttagccacaaactgctcttaaaaaggcaacaactgttgctatctcaacaaggaagcactgtttgctgcaactatctggctaaatggtagtagtatttgctgctgcaaataaccatcggggttcagtgcttccaattggttaaa

SEQ ID NO: 175359 - DNA, 2259 bp, Zea mays
  Clone ID: MRT4577_91512C.1
gccacagcacattctccttttcccttttttttttttttgttaaatatctcattcccatggcattggcaacgtcacaacaatacatcatttatgcgttcaccaagagaaaagaaaagaaaagaaaagctgagatatctaggaaccaaagcttgatattgtgttctccaagactccatgcggatcctatccacttgctccacggacatgccagccagatgccaccacgagccactagaagaagagctgaatggatctgatcgacgccagtcagctgctctggtattctgaagcactcaagtactccccgttctcctcgaagtattcgaccaagcgtttcaggaacctgtcgctgctcacggtctccacgtcgcacaccaggcagcactgcctcctggctcgcgtcaccgccacgttcatccgcctgtgatcgctcaagaaccccacctctttctttgagttagaccggaccatagaaatgatgatggcttctttctcccggccttgaaacccatcaactgtagatatctctaaatctttcaacttggcatctttgtttctcatcatcttcaagcaggttacctgtgcagcgtaaggcgtaattattccaatatcagaagcattaacgccactctcaacaagcaacttggcatgagcaatggatactgctgcctcgccctcattcatggtgctctcctcttcatcttttacttcttccatatcacaccctgtagtgtcaatgagtacaatagttggttctgttgaagaagatctagtgacttcttctagatcatagagcatatgcccagcaacactagaatgtgctttgatcttattattgtaaagttctttagatgaccagctcataatgtgctcgtgcattctgtactgcacagtgagcatggatgtgatttcctctccataagcttcagtaaggcgttcaaagagtgtctttcccatccccttcttttcagcctcaacactttgaattgttggaggaagttgaagatggtctccagcaagaatacatctcggccctttcaacaaggctatccagcatgccacctcaagtgcctgggcagcttcatcaataacaaccaaatcaaatgtaattccgtttaactttttcgaagatgcaccagtcagagtggtcagcacaacatctgcatttttcagtacatcagtgactgcaagctgctgtcgttttctctcctcttttgcaagcgttttgagctctttcctgatgtcccgtttagtgttcctatctttagccttcagcaatttgctattgagcaccttcatttccttgcgaatgtctcctgccaagctactattatcagctcgtaaaacctgtgcatcaagagcgctgtcgagcacttgaggcagtaaacgagcagggtgccctaacctcaccaattttgttctgtatcgtgcaagtcgctcaacaatattatccacagcaatattggaagcagcacaggcaagaatctttgatccacgcttgacctcctgcaatattatctcaataatagttgttgttttcccaggttccaggaggtccgtgaagcaagaaaacatcccttgatccaagagccttcgaaatagcctctttctgtgaatcatccaagttcttgttgaatggactgaatttcatagcatccttggagcgcatgggtgccttctctccaaataaaacaggaacaaggtttgcacaaggtcctgtttggacagccttgctaagttcaattagtgcatccttcatcctgcgataagtgacctcatttgcaagcttctcaagacgcagagggctgtttaagccatcttcaggaatatcatcaaaagcaacagtaatggaagaatcctttaagcgataaactacaccttgaccaagtgaagcagatccagcatctgccttatttggcttcagggcaaccacatcatgtgttccaaacttgtgagacgggagaacgtcgcctttgttgggttggaactccaggagcgtcttccccatcagtcccgtctgggcatcagtgcacttgaggttggcaatgacgcaccccctcctctccaggctcttagcgctcgtctcggactccgccgatatctccgccgccttctcgagatcgatgagcggctgcatgcaggacacgaattcctgcagcgacatcatcctccctgcggcgcctttgccgccgccgcctctccccgccatgccttgtccactggagtcggacacgaacacgaatacttccctttcggctt

SEQ ID NO: 175360 - DNA, 124 bp, Zea mays
  unsure (1)..(124): unsure at all n locations
  Clone ID: MRT4577_91513C.1
tcatcatcctcgaggaactgtattgngagccgtggtcaaagcagcacgacttctgctgccagagcagcggataagatggacgctactcacttatatgctccgtggtgcccttttacgagagtat

SEQ ID NO: 175361 - DNA, 278 bp, Zea mays
  Clone ID: MRT4577_91514C.1
caagttgctaagtagcttgtaatgtactaatgcctatgctacatgaacagctcagtcacaacagcctaagcataggcattagtacattacaagttgctaagtagcttgagccaaggattcctctgtatgttgcttttagggagaaaataatatttattacatgtaattcaaactgcattgggtccaaaagttcagtaaaaaaaaaaaaaaaaaaaaaaaaaaaaaaaaaaaaaaaaaaaaaaagaaaaaaaaaaaaaagaaaaaaaagatgaggagtt

SEQ ID NO: 175362 - DNA, 585 bp, Zea mays
  Clone ID: MRT4577_91515C.1
ggccgccctttttttttttttttttttttttttttttttttttttttttttttttttttttttttttttttagaaatgttcttttttttttttgggaagccacaaacattagacaaaaaacttttttttttaacttttactcataaaaaattttaaagagggggccaccaattattggttgttggtaaaacccttcttggtttttcaaaacaagttggtttaattgcaacaatttttgcaattttaaaagggtgccaacgttaggcccaccgttcttgttgaaccgcaacaactttggtttttttaaaaaggtagcagggcttacaccacctagcttgcttaatggtagtagttgttgcttcttttaataagccggaaagttcaattcttccagtttgttgaatggaaaaaattgcttggggttggccacaagttccttgcttaatgggattttttgttgttgcaaattaaaaccaagtttaatgcaccttttttggtttattggaaaaaacttttttttctttagaattggccacaatgttttcttccccaaatttttttttttttttttttcccctttttttt

SEQ ID NO: 175363 - DNA, 905 bp, Zea mays
  Clone ID: MRT4577_91516C.1
ccgagccctgcaggaacagccacctgaggctgctcatcctgccgagctcccgcggcagctcggagtcgaggaactggttcctggacaggtccaggaggtgcaggctggtgaggttgccgaacagcgccgggtggagcacgccggagagcaggttctccccgaggtcgagcacctggaggccgccgagcgcggcgaggccggcgggcacctggccctcgaagctgttgcggctgaggtcgagcgacacgagcgaggtgagcatggccagctgctcggggagcgggccccagaaggcgccggcgctgaggttgagcgacgcgagcgaggcgcagcgcgacagctccagcgggatggtctggttgaagccgttggacgcgaggctcagcgcgatcaggccccgcacgcggcagagggaggaggcggcgaggtcgcccgagaggccgaggccctggagcgagatggagaccgagacggtcgcgttcgcggcggcgctgatggcgcaggcgacgtgcggccagttgcagtagggcgtggagctcgaccaggcggagagagcgcccgacgggtcctgcagggacgccttgaagtcgagcagcagctcctgcggcgtctctgccgccgaagacggcgaggtcgaggcggccatcagtactgaaacgaggacgaagagagggaggcaggtggcggcggccatggacgacggatgggagctggtgagtggagtgtagaccagtggaagtggagccgagtgtcggcggcgtcaacttactagcgacttagcgagcgagctgccgtcgactgcgcaggagtgcaggacaacaagaacgcagtcttcggctcttcgctcactcgtcgttcgctttcgattaacaaatggaaagaaaccatcccgacccggccggcct

SEQ ID NO: 175364 - DNA, 622 bp, Zea mays
  Clone ID: MRT4577_91517C.1
tttttttctagaagactctcgagttttttttttttttttttatagatttacttatgtatatatatatagtctaaaacaaatgagagagtacttcttaacatgagactgagcttgatcatcagttgctcaaaagctctcacccaacagcaactctcaggcaccagcagggtcatgtcatgtacaatgccactttacctttggtaggccattggcaggacgatgttcatcacgctgaatcattaggcttcactttactctacagactatcttctcctccaggtacaaaatatttagtagtagtatattacggtcctactacgtctgatcctgccctgccctgctgttcttctagacaacaagacgcagatccctgtcagacaaacaaatcagcgctgcatcccaacggctaggacgacgccgacgagccggcgggtcgcgcagcgtcaaacaccggaggagcgtgcgcgttcctcgcccgccgccacgacccggacccaccggccgcagccgccgcccgcccatcattcatcttcgcaacgtcgttgcaggcgcgatcgagggccgcgaggaagtcaccctcctccccgaagatccgcagcgggtggccttcctccttggccga

SEQ ID NO: 175365 - DNA, 199 bp, Zea mays
  Clone ID: MRT4577_91518C.1
atccctactctccagctccttttctttctcctactctcgctctcaagcgcgtcgtcactccggcctagctcggacggatcgacatcgaggggaaagggaataagtgggggcgccagcagatggaccgaaaatgtagaccaactcgagggccaactccagggctgcgcgacagcctgctgccactcagcctcaaccaggc

SEQ ID NO: 175366 - DNA, 618 bp, Zea mays
  Clone ID: MRT4577_91519C.1
ctgatacttgatcagtctatccatcttcaggttgatccaccagcttgtggagtagcccacctgttacatcatcttggggtcgacttggatgtctttcacaccacgtgatcaactagcgtaccatgtcataaaccaaatcgatatgtgtaaggacgatgacgatttccgatttaagctttttgccaaacaccaagaacacgccgaatggactttcctcttccacgataaaccggcagcaagatgagggagatcgacgctagggtttgagggctgaaaccagagaggggacagcgctagacttcgggaccgagagagcagcatcgagcagtagctggaggggcatcagccatcagcagagaggagggctgggcgaccttggctagggaagaagaccagtcgagccatagaaggggatcctgtaggggggagctcgaccatggagatccagggcggccatggctggtgaaggctctgcgtggctgtcagcatgggggaaactcgcgagcaaccaccagggagcgactcggcgagcatcagagggcagcgccggcatggagagggatgagggagggactggcgcaggaagggaggaccaaaggcaagggagggcgcgaacga

SEQ ID NO: 175367 - DNA, 748 bp, Zea mays
  Clone ID: MRT4577_9151C.1
ctactacttgctactcttgctactagctaggtgaggagtaggatcgtggatcgtacgagtagctcaagaaggaaacaaaacggcaggcttgcagttccaatccatcccgctggcatcgtctgttcttcgtccttccatgctctagactagctagcgttgcagtgcagagcatgacacaggcaggcatggagtagtgacatatagatggagctggcctggagctgctgctgcttcttgctcgccgcctgcgcgcgctctctccgtcgtctgctccagctccccgcgctcctctgctgcgaggccatggcgtgggcggtcaccttccttgccttcccgctccgcatgctcaccgccgtcgagagggagcgcaagttggggtggctggttgcggagatgcaggcgcagatggacgacctggcgttggagaacgcggcgctggaggacaggctgcgggcggcgctccgggagcgggaagccgtggaggcggtccttgacgacgtggaggacgagcacgaggacgccctcgccaggatccatgtcctcgacgcccagctcaaggcgctgaggcaggagaacgtgcggctgaacgagcacaagggcaagtccaggtgggacgacaagcccgcggcgcaggcgcaggcggcgtcccaccagtccgacgacaagctgaagccggcgggcaagagggatcgggaagacgcggcggtggcgacgacagcccagtcagccaatcatgccggcggcggcc

SEQ ID NO: 175368 - DNA, 267 bp, Zea mays
  Clone ID: MRT4577_91520C.1
gacaccaattattacacaggatgcgttacaatgtacaaagatgggtgagtttcatgcccagatgaacgccatggcacaaaacctttcttttacgccctggtttgatgtacagaccacactgctatgcctacacatcctcaatagcttgattgcaaagtcacatattattaacaggtacattattctatcctattacaaaaataaacacaaccaccagccgacaaagtgtactgttatcaagtctaaactcgtgattaaccaacaaat

SEQ ID NO: 175369 - DNA, 983 bp, Zea mays
  Clone ID: MRT4577_91521C.1
accagatcacgacattattaattttaaaaaaaatgcttgcaagcaactacggtacaacgggatactccacagtgaacccagcacctctgtcagtcagtttggacgcttgtctgtgccattatcgttcttgcaaatccagctaacataaagaaaaagcgagaaaacaggcaaacagctcctgcaaagcaagttgcttgtagaacggcactacaaaaggaactctccatagagcagagcagccggagccatatgcagcagggagaacccagccggtgctaggcagccaagcacgacatggcagaagaaagcgtcgtaaaagcttccgctggcgatgcagtgaagggtgggaaagtggaggagagtggcgagaagatggtgacaatggctaaggttccgttccacagcatgtttaagtgtgccgacagaacggacgttctgctgatgctggccggcatggttggggcgctgggcaacggcatgtcgatggtggtcatgacgatcatcttcgggcagatggtcgatgcctttgggggcgccaccccggacaccattgttccccgagtcagcaaggtactgccccctatgcaagctatatatagtctgcaagtccagagatatcatgttggacaatgactggggagaggcaggctactcgtattcgatcattgtatctcaagtcggtcctcagacaggatatgccattctttgatgtagaaatgactactggacaagtagtctccagcatatctgccgacatgaccctaatccagggtgctattggtgaaaaggtaagcacatgaaccttgcatcttcttcaatgattttatatcgcaggtagcgtacttgcgctcccggaaggagacgaggaggtgtacaggtcggccattccggatgcgcggtacaggcaggaccgaggggaagggaagagccttgccgaaagcgccggacgcgaggatcgccgcggtcggagaacccgaggggac

SEQ ID NO: 175370 - DNA, 470 bp, Zea mays
  Clone ID: MRT4577_91522C.1
atgttgactgcttctatggaattacagatgggggattcacaaattacagggaattacaacgattcagcattggctgaactatctccagctattacagaatacagagacttttctcaaccagcactagaagaaacaagtaaaactatttcagaggacgatggggtgggaagaactgaaaagagcaaaatattaggaggtgaagccttcctggaaagcatcattgcccttcagctgcagcaatcattagatggaaaggaattcagcgttatcctagctgaatctgatctagaacagaaactaccagagcataatattgttcatagtcaagcttcaaaggattatgatagccaaacagattatgcagctttttgtcaattaccagaacaagtaacaactgtggaaactgcagatgtgtatgactttatggcaactcaaagtaattcaaaaactgaagatgatcaaagtaaagt

SEQ ID NO: 175371 - DNA, 276 bp, Zea mays
  Clone ID: MRT4577_91523C.1
cgcgaattttcgggccttatttcaccttgcccggtggtgccaggcccttgggggtggcgggtgaacctctgctctcggcaataatccaaaaaacaaaaacttggtctttttcctatgcgagagattccatggtgagggagctcacttcttataacaatcttagcctcgagcattaattgtttctccccccgagaaagctaacccacacccccaatgatgctttctatacaaggacaggcagctcgctttttccagcaaaaacaccttaagtttttt

SEQ ID NO: 175372 - DNA, 2452 bp, Zea mays
  Clone ID: MRT4577_91524C.1
cccacgcgtccgcccacgcgtccgacccatcgtccgctcgcgtgtcctttgcgctcgcgaactccgtcgccggacacgagccagggacaccgagtgtggtgaggttgccccttcccttcccccacccccatcgtcgtcttggaccagctctgtacgtaccgtccgtcgatcgtcctttcccgtcccctctagcatcgatcgcagcctcctctgctactgccacgtctctgtgcctgccgagacaagcaagggggtcgtcggtcggggctaggttgttcccttaattcattctaggggcagatcagatcgaaagaaatcaaactaacgtagccatggaagaagctccacgtcattccatgtagttacttcttcagagcgcgcggtggcggccggctagaagctttgttcgttgcatttgaattcaccaccaaaggagaaggcgcctgttggcgttccaccaattccatcccatcgccacaaggtcgtcgatcacgcggatcgtcgcgactgaccggccggcctcctcagccgtccttgttgtgctacaagatcgaggcgacaggatccagccagccacgatgtcggcggccggcgccaccgccgtctgcacgagggacggcggcctcctcccgctgcgtccgcactgcgcgaggtcgtcctcctccttcgccgccgccgccgccgccatcgtgatctacctgacggcgccgggcctggccgtgttgccgatgcgggtgatggcgtccgactccatcgcctcggtgaagctccgcgtgcagacgtcccggggcgtgagggcgcgcaagcagaagctcgtcttcggcgggcgcgagctggcgcgcgacgacgggcgcatcctggactacggcgtggcggacggcaacgtggtgcacctggtcatccgcgtcccggacgtgcgcctcatcaccgtggagaccgtgcagggcggcaagttcaggttccgcgtggagcccgggcgcaccgtcgggtacgtgaagcagcagatcgccaaggaccaccccgcggcggcgcgccccggcgagcagcggctcgtgctcgagggcgaggacctcgacgaccgccacctcatccacgacgtgtgcagggccgacggcgccgtgatccacctgctggtgcggcgctccgtcgtcgcgcgcgacgccgggtccgggcggccgtcgccaccgccacggcgtgacgacgtcaggatcgagcccgtaggcggcgaccataaggcggcggtgcgtggcatggtcgacgcggcgctcgccgggatggagagcgggaacgcgcccatcatgtcgtcggagggcacggggggagcctacttcatgcgggacgcgacggggcagcggcacgtggccgtgttcaagccggcggacgaggagcccatggccgccaacaacccgcgcggcctccccgtgtcgtccaccggcgaaggcctgaagaaagggacgcgcgtcggggagggggcgctgagggaggtcgcggcctacatcctcgaccacccacccaggagcgggaccgcggatgatgggttcgccggtgtgccgccgaccgcgctcgtccggtgcacgcacggagccttcaggcagggcggagccggagccggagcgagggcgccggtgcccaagctggggtccatgcaggccttcgttagtaactgcggcagctgcgaggacatgggacccagcgcgttcccggtgcaggaggtccacaagatctgcgtgctggacatacggctcgccaacgccgatcgccacgccggaaacatactcgtccgcaagcacgacggcggcggaggcggaggcatgtcgctggttcccatcgaccatggatactgtctgccggagagcttcgaggactgcactttcgagtggctctactggcctcagtgccgggagcccttcagcgacgagacggtggagtacgtgcggtccctggacgcggaggaggacgtgactatgctgaggctccacgggtgggaggtgtcgcgcgagtgcgcgcgcacgctgcgcgtcgccaccatgctgctgaagaagggtgtggagaggggcctcaccgccttccacatcgggagcatcatgtgcagagagaccctgaccaaggagtccgccatcgaagagatcgtccgtgaggcggcggaacggggaggaggatgcgagactgtcttcttgcaggctgtctcggagatcatggaccgccgtctcgacgacatatcaaaggacatgttagcctctagatatgcacatggctgacaaaataacgatgtaatcaactcaatggctaatgcaaagaatggtgtactatttcctcccaaaaaaagtccaaaaaaaaaagaaaaaaaatttgggagccggtcagcgtcggagaaaagcacgtcactgtggtgcatccagactacagtagtctagacatctaaccggggcgcgcccttttatgggttccaaat

SEQ ID NO: 175373 - DNA, 660 bp, Zea mays
  Clone ID: MRT4577_91525C.1
ccacgcgtccgccagaagtgaacagcctcaaacacaaactagagaagataggtgctagcttagtgaggttaacccgtaggatgtcgctggaagacagtttcaaggagagggtagccatgtggcgcagggaacatgacattatttacaaccagctcccagtgctgctagagaagatggacatcctatttcctgcggagaacatggaaaactcggagcccgagaacaaatctgaaacaaagaatctggtcgccccgctgccagccgtgacgccggaggaaataggggagcgctacaaggatctggaggagagcatcaggggattcatcaaggatctggacgaggccgagaaggaggaggaggaggacggaggcacgagcgaggcggcatcgccgtcttcagtggacgatgagtaataatcaagagctgcaggagcatcacaagctaggacgacggaggcccctggggatcggcaggaggaatggatgatgatcgtcccatctaacaataattattattagttcctttcgttcatgtttctcggttgtctaatacagtattcgagtcctgcgtaatgcgtgtcgatctgtcgtttatcctttgctgttgctggcaagattaattgatgagatcaaccgggcgaacaaaaaataaaaaaaaaaa

SEQ ID NO: 175374 - DNA, 1644 bp, Zea mays
  Clone ID: MRT4577_91526C.1
atgtctggagatcacgctaagagggagatagtcaccggcgataaggctaaaagctcgggaaggaagaatgaatggactccatcaagagagtctagcgacaaatacaaggaggaatctgcttcctccatcaagtcacataggaagggcaaaccaccatattttgatggtaaagattactgtatgtggagtgataaaatgaggcaccatctaacctcactccacgaaagcatttgggatattgttgagtttgaagtgcaggcaccacaggtgggcgacgaggactacgactcggatgaggccatccaaattaggcactttaattcccaggaaacttctatactcctcgcctccttgtgtcgagaggagtataataagatgcaagggttgaaaaatgctaaagaaatttgggatgtcctcaaaatggcgcacgaaggggacaaggtgaccaaggtccccaagcgcgagacgatcgagggagaactcagtcgattcatcctcaacaaaggagaggagccgcaagcgaagtacaaccggctcaaaacaatggtcaaccaagtgcgcaacctcgggagcaccaaatgggacgactatgaaatggtcaaggttattctaagatctcttgtttttctcaatcctactcaagttcaattaatctatggagatcctagatataaacagatgtcccccgaggaggtaattggcaggtttgtgagctttgaacttatgatcaaagactccaaacatattgtcaacttggagcaaggcgccacctccacacttgaggtgcaacccgttgcattcaaagcaacagaagagaataaggaagagtctacacgaagtagactcccaatcgacgcctccaagctcgataacgaggagataactcttatcattaagtgctttcgaccaatcctcaaacaaaagaaggggaaggactacaagccccgttccaaaaggttgtgttataggtgtggtaagtccggtcacttcattgctaaatgtccatatactactgacagtgacagggacgatgacaagaaagggaagaagaagatggagaagaagagatactacaagaagaagggtggcgaggcacacattgggcgggaatgggactctgacgagagctccaccgactcctccgacgacaaggacgccaccaacatcgccatcaacaagggccttctcttcccaaacatcagccacaagtgcttaatggctaagaacgacaaaaggaaaaaggtagaaaaatgtgagaatttatctaaagagcttaacatttgcaatgattcaatttcctgtcttagagatgaaaatgctagtttaaatgctaagatagaagaattgaatgcttgcaatatttctacatctactgttgagcatatcaccatttgcactagatgtagagatgttaatattgatgctatagatgatcaccttaccataattaaagaacaaaatgatcacatagcaaaattaaatgctaaaattgccgagcatgagcttgagaatgaaaattttaaatttgattgtagcatgctctataatgggagacaccctggcattaaggatggcattagcttccaacaagggagccaaagcaacaccaaacttaatgcccccaagaatagactgtctaattga

SEQ ID NO: 175375 - DNA, 908 bp, Zea mays
  Clone ID: MRT4577_91527C.1
cccacgcgtccgcgacgactcgagctcgacacacgaaacagacatggccgccgtcgccgctctttcctggcccgcgcctccgcgtgtgttccgctgcgccaagacgctgcctgctccctccgccgccacatccagtcgcggaagggtaggctacggctcctcctacgcccgtcggtggcagtgccgccgctgggcccaccggccggacgctgcgacgacgcggatcaggcgggcaacgccgcgccgcacggcggtggtgagggtgaactgcgcctactctccccgcgctgaaacaatcactgcatgctcttggaatgaatatgtgatctgcagtgatgtacctgtgcttattgagttttgggcctcctggtgtggaccttgcagaatggtcacacggattgtcgatgagatagcacaagaatattctgggagaataaaatgctacaagcttgacactgatgattacccacaggttgctacagcttacagcatcgagaggattccaactgttttactctttaaggatggagagaaaatacatagtattaccgggacactgccaaaggctgtttatgtgaaagccattgagaaatctatttcagaacaatgacatatttggttaatattctttggtccatagatattaaactgtacactccattttataccagatagtgcagagagctcaaggtaaaatttgagtttacagcacaagcatcttatctagaagtatggaactgatggtgatccttttgctatcaatagcagtgtaaatatatgtatttcttaaaagccagagtgttccctttttttaaccaaaaaatttcctcaaaggctgtaatgtattacagggcagaatatttgaggccctcagcgataccttatttaatgaaaataaaggtttggtg

SEQ ID NO: 175376 - DNA, 735 bp, Zea mays
  unsure (1)..(735): unsure at all n locations
  Clone ID: MRT4577_91528C.1
ggaaacgcgcggagatgctctccgctgccttcgctgtccaccccgccgccgtcgcgccgcggctgcattcggtccgccagcgccagcaattctgcgctccaatcggcacggcgacgccaaggcggcggttgccagtggcgatgctttcggtcactaacgccgtcaccacccagagccgcgagagcgcccccgcagcgcctcgcaagctctctttcccgatactggtgaacagttgcaccgggaaaatggggaagtctgttgctgaagcagctgtgtctgctggtcttcagttagttccggtgtcattcagtgcaatagaggttcctgatggaaagctcaacatctgtgacagagatattcatattcatgatccatctgaaagtgaacgtattctccgttccattgctaaggactacccagatatgatagttgttgactacactgtgcctgatgctgttaatgccaatgctgaactttactgcaaacttggcttgccatttgtaatgggcacaactggtggaaataggcaactgttgaacacaactgtgcaggatgcgaatgtttatgctgtgatatctccacagatggggaagcaggttgttgctttccttgctgccatggaaatcatggcagagaaattccctggtgcatttgcaggttacaaactagaggtaatggagtctcatcaagcgacnanattggacgtttctggcactgcncaagctgtaatctctt

SEQ ID NO: 175377 - DNA, 815 bp, Zea mays
  Clone ID: MRT4577_91529C.1
acgtgttccaatgcaagacatgcagtctcagtatgtgttctatcaaaaagaaacaatccagcggtgttttttttttctttttctctagactagatagagttgtgactttccaaggcaagaagacatcatatccagcggttagctgggacacagatcctggaagacgcaaagaaattctaagtttaggaacccccaccccacacctagtctattcttagctcagcaaatcctcctccgcgcaaaggcatgaagcaaatgctcatcccgtctgaccacatttccccccacagagatcacatttaccgcgcacaaagcaccaacaacgatcgatagactgtatgcgagatcatcagcacagggagggagggaggaaggaggatgcggcatatagactctacccaccaccggtgctcccatcgtcaacacgacgaggtctgcagattggtctgtgcgttctagagagagccgttgggagaagatgagttgctttggatgcttcaagaaagagaacaagatgccgcccaggaggattgaatccagggaggttgcggttgtgaagacggccccgagccagaatgaagcgcctcccagggaatctggtaagacgttcctcccaggaattagcatgttttgcactgttcaaactttgcagggtccatcaggccatcactggtcacttcaaagcacaagcacaagccatcatctgaaacggcagcaagcattgagcctcctaaaggaagctgttccgttgccaaaaccgcaaaagcgttcacattccgtgagctagccacggccacaaagaacttccgttccgc

SEQ ID NO: 175378 - DNA, 602 bp, Zea mays
  unsure (1)..(602): unsure at all n locations
  Clone ID: MRT4577_9152C.1
aattcggcacgaggcgcccgccgcgtccgattcccctgaccccgcctcgccctcaatctccgccgccgcgcccgcgacatccatcacccccgcccgcgacatcccgcctcgcacgccatcaactcacagcggcccttctccgaacgtggtttgttttttcgtttgctcgagcagccagccgactcgtctccagcaatgcggccggggtcggctcgctggaggtgggcgccgccgccgacacctccaacgcctccaagcagggattaggtgagccgtcggctaatcactcgtcattgggaggatctcctcctcccgttcagatttgggcaagaaaggcccgggcgcgatgtccatggccgaggaggggagtgaggccgaggcgctcgagaaagacggcagcaaggcttcttcaccttcggggccagttaggcgttcctgccgctcttcttcctcccgtgtcgtcagaggaagccgcgaanagcacgcaggaatcaggcggtcttgaggacgaggagctacaggtgcaggatgcagttgccagtggttccaagaggagcanagactncgccgccgncgncacacgcagngccaatgtcagctcg

SEQ ID NO: 175379 - DNA, 366 bp, Zea mays
  Clone ID: MRT4577_91530C.1
gattcattatatttttctattacttattatgtgtcaacgggttttttttaaaattttggcgcaccccaaacaaagaccgttattgatagggtccaactctacttcgtcccggacaaattagaagtactagcgctggtcagcattgtcctaaaccaaaccacccaaatgctacaaaacgtaagtccacccgactgcgttttattattgaaaaagaaagggaaatgaagaaattggatactttacacgggcacaaattgtagtttgacctgtaacagaatccggagttaaaaacaaaaggccttgctaagtatttacgagggccaatgtgaacaagttccaaaaagtgaaaacgctaggcgttgccat

SEQ ID NO: 175380 - DNA, 369 bp, Zea mays
  Clone ID: MRT4577_91531C.1
ggggggctgaaaatataattgctatcacagagccaatatactcatcgttccctgttccattacaatcgttccctaactacgttcctaaatcggtgggaacatgttccacttatcgaatgaacgtggatcagctgtatacccatctccgttccatgttgctttaacagacataccgggttcctcgttcccgttcctcattcccaacgttccgggaaccttgtgactaagggctgccctttctgccatgttgcatcagttacacatgggtcattgtaacagaagtgttcaaactcaccgataaccataattaatccttttgccaataggcttggggttcagaacaaagatattgtaagccttttgtatttg

SEQ ID NO: 175381 - DNA, 254 bp, Zea mays
  Clone ID: MRT4577_91532C.1
cagagaccatgctttgatgaaaaacagtcaccgcgagctgggaatacataacatgggagaccatggccacgaacctcggtaggataatggaacacatggactgacactgaacactagctccaacattttgagagcgcgcgacgccatcggtggcaagcgacgcgaacatctacttcttgtggcccaagacggcccaccgcgtggccactgtgaaagcgcgttgactcggggaggtgctcacatcccgagggggg

SEQ ID NO: 175382 - DNA, 3167 bp, Zea mays
  Clone ID: MRT4577_91533C.1
cccccccggcatcccgccactccaagtcgacaaccggcagcgagaccacggtcgtgacaccaatcgaaattaagatctacacacgtgcatccagaacatccagcggtcccactaatttatagagagtcatacccttgagaccggggcgctgggggaggccacggtgaacctggcggactacgccgacgcgttgaagccgtcggcggtgacgctcccgctcaagggcagccccggcacgctgctgcacgtgaccatccagcgggtggtgggtggcgccggtgggtacggagacgacgcgagtgagagcggcgacgcctcgccggtggcaaagacgccacagagaagaacgacactgcagaaccagctgagccggtttgaggacgaggacggcgagaaggctagagcggccacggatgcgatgagtcctgtgcaagatggattgttgataacaaaacctccaggcatgaggtttccatcaagaagaaatgtgcctatgtctgttgacccagtgggccatctccacaatggcagcagtttcgatgctgtctcggtgtcaggttcagatgcaagttctgggagatatacccccaaaattagtgcgaccatgcacaactcatatcttcaggatagtagcaatgctctctcaccatttgccaacaatggcactgggaggaacccattgaccagttcgggtgactggtcaggaagctcgctcctgatgctagtacagggggcaaagaggatgatccatgattcaaatggctcagagaaacggctctcagatggggatgacccatggtcacagattgaagaactgaagcaagatctgaatcatgagaagaatctaaatgcagatcttcgtctacaactgcaaaagatgcaggaatccaactctgagctgcttctggctgtgaaagatcttgatgagtcgttggataaaaaaaacagagagatttccattttgcaagaggatacacaggaggatccacaggaggcagaatatgagcatgcactgtcaaatgtgcacaattccggacagaaattagccttatctgaaacgagttcataccaagagaaggaagatgagcttatgctggatgcactggcaaagaagcgtgatgacatctctacctctgagcttgaaaagaaagtccttgagttgagcaatgaaatcgagttgtacaagaaagatcgtgaggatatcgagatgcaaatggagcaacttgcacttgattatgagattctaaagcaagagaaccatgacgtgtcttcgaggctggagcaaacacaactgagggagcagctaaggatgcaatatgagtgttcagctcatttggctattataagtgatcttgaggccaatgttgagagcttggataatgaactccatacacaggctaaaaagtttgaggccgacatagcagaaataatgagtgcaaaggtggaacaagagcagcgggccattaaggctgaggattctctgaggaagataagatggaataatgcaactaccgcagaacgacttcaggaggaattcaaggtgttgtcttcacaagtatcttctgctttcagtgcaaacgaacaacagcttgtgcaagcaagaaaagaggttgcggagctgcagctgcagaagagccagttagaagagttacttcagaaggcccaaggagatcttggatcagttcaggatcagcaccgggtgaaggtccagcagttaataaccctagtggatttcaagtcaaaggagatagacaggctactgatggagctcaaaagcaagagtgatgagttccataaccaaaaaagatgtgatgaggcaaagctgaatgctctgtcagaagaaatcgacctactcaattccaagatcgacaagctatccagtgagagaaatgagctattcgaaaagaatgagcagaaagaaaaggaattagctggaattagcgaaaaggacatgcaattgcaagacaaaactgctgagattacttcactaaataaagagcttgtattcctcaaggaccaagtgaagatgcatttggacgaactgcacagtttaaaacgtttgaagaacgagagggaggaaacaattggaaaactgcaaatagatattgggtcactgaaactccagtgtgacaacttgaaaacttcgctgtccaagaaagagtctgagaaagacagccttgcctctcaggttctgaagctgagaagatccgttgaaacccgggaaagggcgaaggcaaatggtcaaatttcagatgtgaaggacaatcagcatgctaataacaagcgcaccaagcacaataccggctccactgggagcattgctgcgctgccaggcaccaacagacaaggcgaagacggtgactgcaatggtcctgacatgaggaactccactgaccagtcagcaaaggagctggcctcactgaaggagaagaacagggcgatcgaggaggagctgaaggagctgcacgaacggtactcggagatcagcctgaggttcgcggaggtggaaggcgagcggcagcagctcgtgatgaccgttcggtcgctgaagaactccttgcggtgactgactcgtgctgctccactcacactgtagctacaaagattttagacgataccggtgggcgttgtacaggtgggcgagcgactggatgggctttttctctccgaagagaggctccagaccagaggctcggggaggccaggccaggcgagacgggcaccccgggtatgtaccaagggggtgcctgcggtgtggtttgtccgtatccccaagagttacagtacacagcatgtagatctcgtcacaataacattctttcgttttcttcgttccgcattggcgtgtgtgcagtaatatgagttgtaatagttctttcttaccctctctggagtgtgttgtgctgtataatttccatggtgtcattgtgttgtggagaaaggaaaatgagaagaaaagagtggcctgtcagctttatctcgctgaaggagctgcacgagcggtactcggcgattagcctgaggctcgcggaagtggagggcgagcggcagcagctcgtgatgaccgttcggtcgctgaagaactccctccttgcggtgactgatgcagctccacccaaattgttgtagctaaaaggattagacgataggttgtccgtgacgtggtt

SEQ ID NO: 175383 - DNA, 674 bp, Zea mays
  Clone ID: MRT4577_91534C.1
gggctggtcggattcttgttgtcactgtgtgttctcctttgaagcatgagccgcctcgatgcctaaactatttaacatcacctcatgttcttatctggagtgcagtaacagcttcctgcgcttttcctggactttttgaggcccaagaattgatggcaaaagatagatttggtcaaaccattcctttccatgctccattcttattaggcatggaggaacgaactgttgctccaacttttcgctggagagatgggagcttagaaagcgatttacccatgaagcaattgaaggaactattcaatgtgaatcatttcatagtaagtcaagccaatcctcacatagctccactattgagactaaaggaaatcatcagggcttatggaggcagctttgctgccaagcttgctgaacttgccgagatggaagttaaacataggtgtaatcaagttctggaacttggatttcctttaggaggattagctaaactatttgctcaagattgggaaggtgatgttacagttgttatgccagccactcttgcgcagtattccaagatgatacaaaacccgtcttatgctgagcttcagaaggccgcgaatcaaggctaaagaggagtgcagaaagagcatccgcatctcaaggatatggtccagtaatcaggttctgcccatcta

SEQ ID NO: 175384 - DNA, 579 bp, Zea mays
  Clone ID: MRT4577_91535C.1
cgggaaaaagcctggcctccccgagcctctggtctggagtctctcttcggagagaaaaagcccatccagtcgctcgcccacctgtacaacgcccaccggtatcgtctaaaatctttgtagctacagtgtgagtggagcagcacgagtcagtcaccgcaaggagttcttcagcgaccgaacggtcatcacgagctgctgccgctcgccttccacctccgcgaacctcaggctgatctccgagtaccgttcgtgcagctccttcagctcctcctcgatcgccctgttcttctccttcagtgaggccagctcctttgctgactggtcagtggagttcctgacgacacagacgagtcgttgcaagcagaaggaaatatcagtcagattagtcgtggttcatgggtttctgaacttaaaaggtgtctgtgtcagctacgttcaaatgagttgatgtacctcatgtcaggaccattgcagtcaccgtcttcgccttgtctgttggtgcctggcagcgcagcaatgctcccagtggagccggtattgtgcttggtgcgcttgttattagcatgctgattgtcctgc

SEQ ID NO: 175385 - DNA, 1542 bp, Zea mays
  Clone ID: MRT4577_91536C.1
atggcgcgcgaggccagggccggggacgggcgcagcagacgcgcagatattactgcctgtttcatggcgaggattgcgcacacccaacaagagattgcccggaaacaaaggctaccagagacaggatgtctcgggcacaaccagccgacaaccagagagttgtcgcgcacacatatcatcaccaccacccacaaccatacaacaacggccaagtccagcacccacccaaccacgcatatccacaccatcaggaaagggtccagcgtcgacttcgggacgaagcgacaaaagatggatcactaccagagtgtcaaccacgtcgcccttaccggcccagtggtacaaacaaggtggtcacatgtgccactaactttcgacgccagagatgttgatctgcgcagcgcaccccacgtcgacgccatggtaatcaactgcagtgtagcaggctgggacctgcacaaagtcctagtcgacaacggcagccaagcggacatcatgttcctgcacgccttcgaccgcatgggcatcagccacagcttactcaagccttcggacaaccccctatatggcttcggtggcaagggcactttccctcagaatgcgcgcaacattgagagagacttcgttctaggtcaacagaacgtacactgccttacaacacagcgcgaagtctccgaagcgacccgcccagcaacggacgaaaaagtaaaggcgcagctgcagagcaacgatggaacgaagacagttcccctcgacctggcgacgcccaagcaaacggttgtaataagcgaagacctaacttcgcaagacgaggagaaactcatctcctgtccctccagaaacaaggacgtcttcgcctggtccgccctcgacctggtcggagtcagccgcaccgtcatcgagcacggtctgggcatcgacccttcagtgcgcccaaaaaagcagcggctgcgcaaaatgtccaacgaaaagatggaagccaccaaagtcgaagtgcaccacctgctggaggccaatttcatcgaaccaatcgcctaccctacgtggctcgccaacgtagtcatggtacaaaagaaaagcggcaagtggcgcatgtgcatctacttcaccagcctcaataaggcctgtcccaaggacaatttcccgcttgaaagtcgcctagaggggggtaaatagcgacgtccaccatcggagcgccgcacagtcttagccctagccgccaggcaccagcggccagccagaggcccggacgactggactgccaaagccgtcgtcgccacagggaagcgccggtacgccgctcggcccttctacagttttctgagattaagatggctattgcaagatggtgtgagagcagtgatgtcataatttgtacaatgattttctctatgaaataataagcctttattctatttctctattatctttttatctttttttatttaatctttttctttttttcctctttttttttttatctctctcacccaccaaacacaatataaattttttttttcccccccccccctcccttttttt

SEQ ID NO: 175386 - DNA, 3346 bp, Zea mays
  Clone ID: MRT4577_91537C.1
atggatgacatcgccagcgaggcgcccgtgggggcgttcgccatcggcccatccacggcgctgggcggcgccgtcgcgctccgggtgctgctctgcggctccgcggcgcgcctgcgtcatcgtctagccgcggcactgcgcgccgcgctgcccgtcgcggcggcgtggctgcacccgcgcgacaacacgcgcgggatcctgctcgccgtctgcgccgtcgcgctcctgctgcggggccgacgcggcagggcggggctgcgggcgagggtgcagtccgcctaccgctgcaagttctggcggaacatgatgcgcgccgcgctcacctacgaggagtgggcgcacgcggcgcggatgctggagctcgaggccgcgccgcgccgcgccagcgacgccgacctctacgacgaggagctcgtccgcaataagctccgcgagctcaggcaccggcgccaggagggatcgctcagggacatcgtcttctgcatgcgtgctgacctgctcaggaacctcggcaatatgtgccacactgaactgcacaaggggatgctgcaggtgcctagactcataaaggaatacattgaggaagtatctactcaactgaaaatggtctgtgattctgattcagatgagttgcctctcgaagagaaactcgcatttatgcatgagacaagacatgcctttggtagaacagccttgctgctaagtggaggtgcttcattaggatcctttaatgtgggtgttgttaaaacattggtagaacataaacttttgccaaggatagtttcaggatcaagtgttagctaaataatgtgttctatagtagcaacaagatcatggcctgagctggagagcttttttgaagagtggcattccctgaaattttttgaccagatgggtggaatctttcctgtggttaaaagaattttgacgcatggcgctcttcatgatataaggcacttgcaggtgcttttgagaaaccttaccagcaatctgacatttcaagaagcttatgacattactggtcggattcttgttgtcactgtgtgttctccaaggaagcatgagccgcctcgatgcctaaactatttaacatcacctcatgttcttatctggagtgcagtaacagcttcctgcgcttttcctggactttttgaggcccaagaattgatggcaaaagatagatttggtcaaaccattcctttccatgctccattcttattaggcatggaggaacgaactgttgctccaacccgccgctggagagatgggagcttagaaagcgatttacccatgaagcaattgaaggaactattcaatgtgaatcatttcatagtaagtcaagccaatcctcacatagctccactattgagactaaaggaaatcatcagggcttatggaggcagctttgctgccaagcttgctgaacttgccgagatggaagttaaacataggtgtaatcaagttctggaacttggatttcctttaggaggattagctaaactatttgctcaagattgggaaggtgatgttacagttgttatgccagccactcttgcgcagtattccaagatgatacaaaacccgtcttatgctgagcttcagaaggctgcgaatcaaggtaggagatgcacttgggaaaagttatcagccatcagggcaaattgtgctattgagcttgcactggatgaatgtgttgccctcctgaaccacttgcgtaggctaaagaggagtgcagaaagagcatccgcatcgcaaggatatggtccagtaatcaggttctgcccatctaggaggattccatcctggaatctcatagcgagagaaaattcaactggttctcttgatgaagaaatgctcgcatctcctcatacaaatcatcaaggacctggaggagttgctggaacatctaccagaaatcagtatcttcagagaaatgcacacgagagcagtgacagtgaatctgagagtattgatttacactcttggacaagaaatggtggccctcttatgaggacagcctcagccaataaattcatcagctttgttcagaatcttgagatcgacacagaattcagaacaattccatcgagggaaaacctaactgatcttgtgacaccaaatgctggtaccttggcagctcatgcagtgagtagagaagcaaccgataggagcttggacatttcagctttagatatccatgataccgctacccctagatcgacatttggccgttcaacaagcatcgttgtttctgaaggtgacttgttgcagcctgaaaagattgaaaatggtattttgtttaatgttgtaaggagggatactctgctggggtctagtagcggagttgagtctcaaggatctcctcgggaaccagatgttgaaacagtgcagacagagtgccttgatggcatttcagcttccgatgacgacgacaaggaactaaatgtcattgttgatgaagcaaccgatcccatgagcagcaataatctacaagatcaggggtcctcactggaagaaaattccgcgggtcatttccccttaaattctgcagacgagacaagcacaaacaaaccagaaactgcatctatttttgatatatgtacagagatgcatccggcgtccattagcctacctgaaggatcttcagaaaaggcagaactctgaaacagcaaagatcgctgacgacgattcagctgctatgactgatgaagttgcctcatgtgctggtaactaaagagttgtcctcctccctctagctttgaggcatcagatgtaagtgatgtactataatctaagcatcatgaattggatggtgaagctttatgttgttcaagtttcagaagaaggagatccaatggctttggttcttcgaatgtactgtagttgttttggggaaataaagcgcttcttagaaaaaccagggagaagttttgcgcttgggagctctcgagcttctttttttttttttggccgagaaattgcccaaagccgtagtctctcgtcagtcgtcacggcttcggccttagccttggcatttcaggcaggcaggaagcaagctccatttgaattgattgaaggcgaacgtttgccagccactgctccgtgcttgagagttgagacgaggcgggcagccggtcgtcgtcgtacaacacaaaaccggcgcgcaggacttatgtgtggtgtgcgcgtgagcatcgccgccgtgtaatggcacctggccaccggcgtcgatcaacgctttcaagcaacttttttttacaagctcctaaatctaatttttttatagactatcttttttcattgtaaaggtattttggttattatatatagtcatatgtcatttatc

SEQ ID NO: 175387 - DNA, 266 bp, Zea mays
  Clone ID: MRT4577_91538C.1
tcgagccggccgggacaccatcacacaccactccgcgctagctgaggacggtacagcggcacagagcgacgacgacgacacaggcgccacacatggcatcccagctctccgccgccgtgccccggttccacggcctccggggctacgccgcgcccaggtccgcagtgccgcatctcttttcagcgtaagcacccgggaggccgcgataaccgccgggggcatgtacccccaccgcatcctcttccacgagtaccaccctgggctac

SEQ ID NO: 175388 - DNA, 414 bp, Zea mays
  Clone ID: MRT4577_91539C.1
aaaacaaatcagggtcgggggggaccatttcatcagacaagaaacagcccacaggggggcgtttccctcctggacatatgcccaagggatccacccccgaggctttttatacccggccgggggaacaccataccggacccctactacatttgcttggccatggggttgataaaagcgagccccatggccgggaggggcatggccccggcaactttcctcccaacgggctccctaaaaaaggggggctggcccttgaacccctccatgcacatgccggggttcgtaaacgcggggctcccccacgtttgcaccctgttaacctggaacctgaccctccccccggcctgccccttggccctggccctggccctggccggttttttgcccaggggctccattgcctccacccactgc

SEQ ID NO: 175389 - DNA, 608 bp, Zea mays
  Clone ID: MRT4577_9153C.1
tttctcatactatgttctgcctccgcaccctccgatcgcccgccgcgtccgattcccctgaccccgcctcgcccgcaatctccgccgccgcgcccgcgacatccatcacccccacccgcgacatcccgcctcgcacgccatcaactcgcagcggcccttctccgaacgtggtttgttttttcgtttgctcgagcagccagccgactcgtctccagcaatgcggccggggtcggctcgctggaggtgggcgtcgccgccgacacctccaacgcctccaggcagggattaggtgagccgtcggctaatcactcgtcattgggaggatctcctcctcccgttcagatttgggcaagaaaggcccgggcgcgatgtccatggccgaggaggggagtgaggccgaggaggggagtgaggccgaggcgctcgagaaagacggcagcaaggcttctttacctttggtgccaggtaaacaccacgggcaagggcgcaaagcatcgcgtgttgttgtttcgagatgcgtgggcatggacgtgctttcccttccgatggggtcaagctgaccggcctcgtgtgccccgtactaccaccgccgtactgcacgcatatcc

SEQ ID NO: 175390 - DNA, 545 bp, Zea mays
  unsure (1)..(545): unsure at all n locations
  Clone ID: MRT4577_91540C.1
gtaataacaagggagtnctaacggcaatgccaagctggcccaccaacaaggactgccatgtaacattcactgcaagaggctgcatgtacacattcatgtggaccacaacagaagtgaatggccgggagcatgccgaggctcagcatacaaacacagatgagaacctgtgcttgcctcatttgacgaagtgaactgcctcatgactagcaaccaaaggcatggtaattgaggttaggaaatgaatgtgaacactatgctggttggccacagttaattcaggatataagctataactgatgctggggcgttaactccgtgtttgatatcgtaaataatgcgtactagactatgcttacctacccataataaagtgatgtgatcattgtcagataaacctattgtcttacggtaacaccactacttggcattaaagaacacatgtatctcttcaatgtaactaaacataatagcatgtgtccgctgagaattgtgccagtttgcatgttctaaatatgtctcctggccatggcgagagttcttttgga

SEQ ID NO: 175391 - DNA, 439 bp, Zea mays
  Clone ID: MRT4577_91541C.1
aaaaaaaaccccgcttcatgaaaaaaaaaaaacggggggctaattaaaaaaaacaccccggggctttgggaaaaaacaccctaacgtttaaaaaaaaaaaattggccggcgcccctggcgggcccccccctgggggcaaactccgcccaacggggggcctatctttgggctgcccgaaatggtcccccgctggcaattacaaacaacaaacgatgcccccggggaaaaagtgaagcccggggaacctaaacaaaaaactaacccccaataaataagggggaaaccctgggggccctacaggggggaaaccccccaatccaggggggtgaacgaaccgccccactcccagggagaaaacctttgggcccagggcgctaattaaactccccacccccggggaggggggcttgggcttttgggccccccccccccccccccc

SEQ ID NO: 175392 - DNA, 1255 bp, Zea mays
  Clone ID: MRT4577_91542C.1
agggtcaccgggtccccggctcgaggccagctcggaacagagcatccagcttcccccaacaaaggaatctccctccccttcctcagcagggtagccatgtttggtcttcgtgcccgcgcagcggcgcagctccagcgcccaaccccgtctccctcctccgcttcctcggcgtcgttctcgctcgcgaggctcgggtgcgcctccccgctcgccgccctcgcgcctctggcttccgcaccgccgtcgccgtcggccagggagacacagccgacctccctctccgccaggtggcctgccgcgcccatgcgtccctggggaacccgtggccactccaggccgaccacgcgcgttctctgcactgctgccggcagcgtccaaagagaggggaaagaactgctagttcagcatttgcttgttggtgaaaaggatgtcaggcttctggttgatctcgaaaagaatatcattgcagaaggagcagacttgagtgatttagccgtggagcactccttatgtccatccaaagaaaatggtggtatgcttgggtgggttcgaaggggacagatggtaccagaatttgaggaggcagcatttagtgctcctttgaacaaagttgtacgatgtaagacaaaatttggatggcatctagtgcaagttcttgctgagagggatcaatgcgtactgcaagacattgacccagaagagcttcacgcaaaattgcaagaccctagttttctcgaagaagctcaattgattgatgttcgggagcctgatgaagtggagaaagcttcgcttccaggcttcaaggttctaccgctccgccaatttgggacctggggaccagttatgacagacgagtttaatcctcaaaaggacacttatgttctgtgccaccatggcatgcgctcaatgcaggtggctaaatggttgcagtcacagggtttcaaaaaagtttacaatgttgcgggtggaattcatgcctatgcggttaaagccgactcctccatcccaacgtattagaggatcctcatggtgacactttagcacggctgggaacttctcatatatcttaggcattggcgttgatcaatgcttgaattcagagctcaattttatttctcatactgtgtatcagaaagttttgggagtcctagggaggaaaaatatacagctatttttgtaaaaaaaagatacttgagaaattgctttattgaacgaaccgtttcatcaggaaaaaaagaaaggggaagccgccacc

SEQ ID NO: 175393 - DNA, 259 bp, Zea mays
  Clone ID: MRT4577_91543C.1
gttggattctcctacagctgcagatatgcgtcacactggaaaggttgtaaactgaactgtaagatgggatgagcagatctttaccgtgaggaaaaatggtacatgccgatgcttgccgagcaggcatagatgtaccacgaaatggcagcttttatggagaaggcttcgaaaactgttgacatggctgagctcactgaggatgaccgcaacctacagtctgatgcatacaagaacgtcattggagcaccttctgcctgat

SEQ ID NO: 175394 - DNA, 278 bp, Zea mays
  Clone ID: MRT4577_91544C.1
gtgggtctgaccggggcaggaaacgggaagttttgcgattcgcgtaccatttgcccaaaaacaatggacaaacacattttttaacgctgtaaccccactcggttaacaagaacgcacaccggtggcacgcttgaattaaaccatcgcgcgggggggctgaatcataggctaatgtcccttgccctgccccttgggcatgggctcggcgatgcccttggagaggcaaaaggcgatggactggttggtgatcatggggtagacccccacccccgtgggca

SEQ ID NO: 175395 - DNA, 195 bp, Zea mays
  Clone ID: MRT4577_91545C.1
ctgggggggttttttttttttagtgttttttaagcaaaagttaatgggtcctttagcacacttaataaaaagagggtcaacacttggagtccatcgattcaaggggatacaaatagtaaattatatccaaactggttctggaaaaagaaattggtgggactataaacagaggacaaatgttaataaaagaagagc

SEQ ID NO: 175396 - DNA, 420 bp, Zea mays
  Clone ID: MRT4577_91546C.1
aaagacgaactatgaccccgcccccacgcctacgcaacctctaaattcttctctagctctatcctttttacattaaaacaccttgttaccagaaaatcttttcagttttctgggcaacaacacacacatacttctaccctttttccttactctgctagaaataaatattgctctaacctgatcctaaatatctattcactacaaccacggacacaacatcatatttccaaatctcactcactctcatttctcaaattgaccattccaccataaatccgatcaatgaagaatattcaagaattaccgatttacttgatcaccatgggaacatcccattcatacaacatatgcaaatattgagaccatttatcactgtcttccaatacaactaccccaatcgtcacacggtattttgtttca

SEQ ID NO: 175397 - DNA, 778 bp, Zea mays
  Clone ID: MRT4577_91547C.1
ctgccttccccgcagtgcattgctcttccttccttccttcccgtctcttcttcccacttccttccacttcttgtccctgctcctgttggttttagcatcctgctcggccgaatgctggatcagaggctgcagcaaaggtagtaagtcgcttctcgtatttcccgtcgagagagggacagggggggagaacccccaaccgaggcgctgcaagttccccacggccggggcgggcttctcttgcgggaacatgaggaagctgttgttcatctccttcgtcctctcgctgtccgctgcagcagttcacggtgaagacggcgcgtacattggcgtgaacattggcacggccatgtcgtcggtgccagcgccgacgcagatcaccacgctgctccggtcgcagaacatccgccacgtgcgcctctacgacgcggacccggcgatgctggcggcgctgtccaacaccggcatccgcgtcatcgtgtccgtgcccaacgagcagctgctgtcggcgcagccgaacgccgcgccgctgctcatgcccgccatgcgctacctccagaacgcgctggtggccgcggcgctggaccggtacatcaaggtctcgacgccgcactcgtcgtccatcatcctcgactcgttcccgccgtcccaggccttcttcaaccggtcgctggacggcgtgctggtgccgatgctcaggttcctgcagtccacggggtcgccgctcatgctcaacgtgtacccttactacgactacatgcggtccaacggcgtcattccg

SEQ ID NO: 175398 - DNA, 743 bp, Zea mays
  Clone ID: MRT4577_9154C.1
gccgggcatgtttcacttagatcaagcggtgttgatgtgcttagattggattttgatttacttttgcttgtccttggtacatatgctcagtgttttagggttgaaattcatttgacgggagggccgcgagggtctctagcttttgctggagcagaagtcgataatgtctgcatattccaaagcaaacgtcatagattaagccttctgatgttgaggatttccattgaaagtttgctctttcgtggatattatccattagagggcagcctcatattccatcgccatgtgtagcagcgtcgctgccatgaaaattttggactggccatgaggctcatattcatagcagttgtgtggttactgaaataaagctgttacacattttgatttgtggattgaacatttcgtagacaccaaacacagattttttatttgatggttggacgtccatgtccttcagccttatcgtggagcaaacaatgcatgtttgtatattcccaggcaaacgtcatatattaagcctttgggtgttgagattttcccttggaatttctccatctgaaggcgatctcatattccattgcccttggtagcggcgttgctgcaatgaaactttgggactggccatgaggcagacattaccacaatattaaaaaaaaaaaaaaaaaaggccattaaaaataaaaaaaaacgatttcaccgaaaagaaaaaaaaaaaaaaaaaaaaaaaacaaaaaaggccccta

SEQ ID NO: 175399 - DNA, 205 bp, Zea mays
  unsure (1)..(205): unsure at all n locations
  Clone ID: MRT4577_91550C.1
atnataatgcaaacctgccaaggggnnaanntttaacaaattanccgggggtaaaaagccaagggaacaacaatggcctacattttaagtttgcggtgcatgtgttatttgcggaatccctttaggatgccctagatgactcatgtgagactggttttaccccatggtgaactcaataattgttgcaaggaatttttcttttacc

SEQ ID NO: 175400 - DNA, 231 bp, Zea mays
  Clone ID: MRT4577_91551C.1
tatttgggcacaatcttaagcgacagcggaggagttaggcacataggatcagtcaatggccaaatagcacgtattaatgaagcagcgttcgagccacggttgtaaagaagaggagcgtgggaagacaaaagggtaggaactcggacgcgccaacagacaaggcggcgatcggccaaatgtcaaaaggggtagcaggcgtgtaagaaaaaaacttcccggcagtggcggagc

SEQ ID NO: 175401 - DNA, 535 bp, Zea mays
  Clone ID: MRT4577_91552C.1
gggatgcaaaccaatttttgttccataccataccaataccagacggggagaatagagcatcagaacattcccggcccgccacttgacagcaaaaagaacatccctccctctcgaatgcctaactctgcaaagactgcatgattccagggtgccttctacctctagtactaactactgcctacaacaggaggaggaggacgctgaagagcagcgcggtggagacgatgcggacgagtgacgagacgccgccgaacgcccggtgcgcgccggagcctccctccgtggagttggacgacggcgccagggaggtgccgttcatcaacgacgtcccgttcttcccagcataaacacaagatccgtgacctgaagaaagaagcacccgagacagccagtcatgcttccaacaaaacaagcgcagatggcgagtgtgagatgatgataagcgtgagtgatctttactcgggtcggacgtcgtgaccaccgcgacgccgctgaagtagcacgtcccggagcccattcccatgccgtggtagta

SEQ ID NO: 175402 - DNA, 282 bp, Zea mays
  Clone ID: MRT4577_91554C.1
cccacccggggaaaaaaaaaaattttttggcccccaacagaattaccccctgggtttttttcccccgggggggaaaacctccccatttataaaaaaaattaaaataatttccccaccttgtttgaacgggtgaaggaacaaaatttttttttaatacccccccttgaaaccgttgcccacttcataaggattaggagggtctgtttcgagggaacccccctaaacaataaacccaggttggggcccccaaggttgcctttgggggctaaacacctaaccggg

SEQ ID NO: 175403 - DNA, 531 bp, Zea mays
  unsure (1)..(531): unsure at all n locations
  Clone ID: MRT4577_91555C.1
tgctcgnacggccgcccgggcaggtacaagctttttttttttttttttttttttctttttttttttttttttttttttttttttttttttatttgtcatatgttatttttgggttttctgggggggcagacacaaacctcaaacttgaacttttacctataacaaaaacaaaaaagggaccggcggcggcccccagcggggggggggcggagggcgaacgcgaatggggtaggaaaaggggggggaggggggggcagtggtagggggggcagggggagggcgccaggggcaggcggaacggggaccaccaacgacagcggatgagggcagaaggaaacacaccccacacccacaccaggggggtgagtgaatggtgctggttattgccagtaaaaataagagagctagggccctgcccccggccgggccaatgccaagggccagggccccgtcactgggggctcctagctccggacccagggtcgggaccaaggggggaaaaatgatagccgtggccaattggtaagcgga

SEQ ID NO: 175404 - DNA, 282 bp, Zea mays
  Clone ID: MRT4577_91556C.1
tcctgtagccgtttccccagaccctggacgctcggatcgatccatccctcctccaccacccgatctcctctattcatactcctcaccagtcaccaggtgtcagttcgccggttgtgctccccgttaggtgtcagtgtgataccatcgttcgacgcagaaacacaggagctgctcgccctcaccactcgccatgccccgcctcttcttcaatccattcatcatcagctctccagtcctccaccagttaccgaatctatactgcaacgtgcctattctctatat

SEQ ID NO: 175405 - DNA, 322 bp, Zea mays
  unsure (1)..(322): unsure at all n locations
  Clone ID: MRT4577_91557C.1
cgggncggccggcgcgtccgccgncctatccatccggcacgcccagcttccattcactcctcccctgctccggctccggcgtgggctccttcatcnacctttcaacactttactccccnnccccaccnctcctcntgccggcccctctcggtcgctgccgctctgcccagccccgccgcccgcgccgagccccgctcgccaccgtccggtgctccgtcgacgccaccaagcangcgcaggatggcgtggcgacggtggtcnttgcggnagcgccagcgtcgcggaaggagtgcttcggtggcttctgcaccacctacgacct

SEQ ID NO: 175406 - DNA, 231 bp, Zea mays
  Clone ID: MRT4577_91558C.1
aaacagacgggggcaccacaactcgaacgctcatatttctagcactttcttaagcgccttggttttcggttcactctatttatcacaaagaagaaagacttagcgaaaagataactaataaacgctgctactgaagcaacacaagactaagctccctgctaacgacccctgaacatagcctttctgcgggaaaaagatgtcgcgctgtaatgaaagctaaagacaattaca

SEQ ID NO: 175407 - DNA, 631 bp, Zea mays
  Clone ID: MRT4577_91559C.1
gaccccgtctcctcctcctcctccccctcctctctcgccgccgggagcccagatctccttccccgccgcgccgcgacgacgagttccgccccctcgtgaatggtgggaacccacacgatctccgcctccccctcctcgccgctgcagacggagagggactcctccgcctccttccgctgcttcggcgcttgcatgcagggctggtaccaccgctgcatcggcctcgacccctgagcggccctccctccgtcagcgtcccggcgcgccggaccttctttcgattcccccctcaaccgtccctggttatttcgatctcgagtttttccctgccaagaagagaattcatcagaaaagaaaagagaggaacacgcaagcgattttgattgataggtttcgtttgatttcattgattgaccgtcgctatggctgttgctgtgccgtcgacgctgccgatgaagcttaggaaggttgagccccgtggcaaggcggcggcggcgggggttgccggccgggcgcgcgtgctggtgacggtcaccgtcctcggcagcgccggcccgctacggttcctggtcgacgagggcgagtccgtcaacggactaatccgcgccgccctccgctgctatgcccgcga

SEQ ID NO: 175408 - DNA, 683 bp, Zea mays
  Clone ID: MRT4577_9155C.1
ccggccgggtactcacacattcatgcacctcctcctcccccgccggtcaacgactcaaccgtgggaaccgccacgtcagccatgggtgcctgggcaagcgaggccaagacgcttgaggagcagggcccggctgaggcctgccgactccacacccaaggatgagatcgaggccactcatgtctccgattaggtggaggctgatgaacagtgagatgagaaggcgacggtggacgagccggatgataacggccggacgttgagcatcacaaggataatgacgaggccgctccagatagcgtgcgtcgccgagcccgattcaacgtatacgaagacgtgtagaagagcgtcttctagtacgagataacaggggaagacgccgatgaatagtaaaaggacgccaccgccgccgagatcacgacaatgaagtatgagaatatcaaggacgtaccagtatgacagtaaagagaacgaggcgcagcaaagttgaccgaatgtccgagcatgagaatgtcaactaatataattattgcctgatgatacctgaagatcagagtgggatcgaccaatgagacgacacttgaattctctacaagtggcatagcgccatatacctggagagacagtctcgactggtcacagcatgtaacaacctaaccttcttcgatgtctcccattattttcct

SEQ ID NO: 175409 - DNA, 284 bp, Zea mays
  Clone ID: MRT4577_91560C.1
gtcttatttcgttgatacataacatcatttcccacactccaccccatgaatttgagatagacttatatctgagctttggaaagtgctggaatgtcaaattccaaaccaaatagactacgttattaagtaattaccaattcctccaaaatgaatagatccaaacgtcccgttagttcatttgatgtctatgcatacagcagcaaggtctacttgggtttatagttgtgtaggtaacttaattggttatagtgaatcaggtattggtctcaaggtgttttccgttt

SEQ ID NO: 175410 - DNA, 492 bp, Zea mays
  Clone ID: MRT4577_91561C.1
aaaaaggaaacaaaacccccatgtccatttttcaaaaaatttaactgacctcaaaaatgggcataaaaccgggccattatgggggaaaggggtgtttccaaaacctactttccgaataaaatataactaaatttttttcagggggttaatttttgactttgacccgatttgggtccccaaaaccagaaaacttcaagcttcaaattttttcagggggccaaattttggggggctgacaaaaaaatcgttctttcagggaatccaagcgcatggttttctttcgaaccatcgagttttgctttgggagaccttttttaatccagcactgactatttttgaaatttgaaatcaggccattttttttttacggaaaatgttcatcgcgtcactgtttagggcgacaaattttgacgggacagcaagcccgatcttggttacagccaaaattttgtcgcgcttgctcgcaattccgaaaaaatccctaagtttgac

SEQ ID NO: 175411 - DNA, 213 bp, Zea mays
  Clone ID: MRT4577_91562C.1
gggccctagcccttgcgtaagtatagcactgtggctctcgcaaactcttctacatcaattgcttgatggcttcatgaagtgggtcggattaaaaaggcgtgggcttcattcagagcatgaatgcttgcctagacttctcccaacatttttagcccgacgctcgcttaagaaaaccatggtttctgcatgatcacatcattatggctgatcctt

SEQ ID NO: 175412 - DNA, 238 bp, Zea mays
  Clone ID: MRT4577_91563C.1
ccgcagtgtgatgatatctgcagattcgctcttagaaggggtaacaacgcaaagatactttttttttttttttttttatttacagggtggtcttaattgtcgctgtcatcgtatcaatcacggcgttctccgctatgatggttgccggccttgtgataatcagagcacgacgacgaaaaggcgccgcgaaaaactccccccggggggggggccggtcctctgcgttgttcccgccgct

SEQ ID NO: 175413 - DNA, 261 bp, Zea mays
  Clone ID: MRT4577_91564C.1
gttactgctcaaggcgctgccgcaccatgtaaataagcaagggacggtacattatatcccagctaggctttgttcgtttcatccctaatccatggggattgagggggattagagtggattgagggggattttgacttataggggatttaatccctctcaatccccatggatttgataaaaacgaacagggccctagtgtggccgaggaatgcggcctgctcatcacacgggagggtggcaggttcgaggtcagggcgggca

SEQ ID NO: 175414 - DNA, 852 bp, Zea mays
  unsure (1)..(852): unsure at all n locations
  Clone ID: MRT4577_91565C.1
aattcggcacgagcgcgcctcctcctccccctcctccccagaaatttccccacttgcgccgctcgcgatcggcgcccgagctcccggaatcccggcccggtttcgcgaccgttcgccgcgagccttgggccggtccgggctctgattcgcgggcgccgcggccgtggttcgcgcggggaatgctctacctcaagcagccgggcggcgcggacttagggttccggcgggcggcggtggcggctgctgctgctgctgctgcggggctgtgatctgccgctgtggtggatgcgaggttgagccagcacgcgccggggattctgctggcaatggcggaggcggacagctgcctcgagagcttcgagctctacgagtccgagtcgaaattctatattcttggaactaactgtaacaagacaatatggagattactcaagattgatagaatggagccatcagaggtcaatgtacatgaggattctactgtgctctcacagagtgattaccttgatatgctaaaaaatctagacgaacaacacaggtcaactggtggagtcaaatttgtcaccaactgttttggaatcatcggtttcattaagttccttgggccctattacatgttaattattactgagcagagaaagattggggatatatttggtcatatggtgtaccaagtttctaagactgcgatgattgagttatcaaattccactacgagaccaaaattaattaattccaaggatgagaacaggtacangaagctcttgccgacaattgaccttagaaaagatttctcttttagccactcatatcatataatgagaagtcttctaaagaactttaatgatccac

SEQ ID NO: 175415 - DNA, 1074 bp, Zea mays
  Clone ID: MRT4577_91566C.1
aattcggcacgagggcctccccaggacagcgggcagccagcagcctccacgcctcacggatttcgcacacgagaaaaaaaaggaaagcgaaatcaaccaatctccccaccattcacggcctcgccagtcgccagcgcgcgcctcctcctcgtcctcgccagaaatttccccatttccgcccccccgctcgcgatcggcgaccgcgctccacgaatcccgccccggattcgcgaccgagccttgggccggcccgggctctggttcgcgggcgccgagggagggccgtggtgggtcgcgcggggaatgctctacctcaagcagccgggcggcgcggacgtagagttccggcaggcggcggcggggctgtgatctgccgctggggtatatgcgagattgagccaccacgcgccggggattctgccggccatggcggcggcggcggccgaggcggaggtggatagctgcctccagagcttcgagctctacgaggccgagtcgaaattttatattcttggaactaactctaacaagacaatatggagattactcaagattgatagaatggagccatcagagcttaatgtagatgaggattctactgtgcactcacagagtgattaccttgatatgctaaaaaatcttgacgaagaacacaggtcaactggtggagtcaaatttgtcaccaactgttttggaatcatcggtttcattaagttccttgggccctattacatgttaattattactgagcagagaaagattggggatatatttggccatccggtgtaccaagttactaagactgcgatgattgagttgtcaaattccaaatcgaggccaaagttaattaattccaaggatgagaacaggtacaagaagctcttgcagataatcgatcttagaaaagacttcttttttagtcactcatatcatataatgagaagtctccaaaagaactttaatgatccacaagaagggtgggaactatatgacacaatgttcgtgtggaatgaattcctaactcgaggggttcgtgacattctgaaaactacactctggacagttgcattagtc

SEQ ID NO: 175416 - DNA, 299 bp, Zea mays
  Clone ID: MRT4577_91567C.1
tccgcagcaggtaccatgacaagattaatttgaaaatgaggacggccctgacgaactgcagagtcaaatggagcatgatcatgacattgggaccaccataagggataatgattatgcctcatgcagctacctggattactggtgaggctgagcaaggagaggattctggtgagtcgggcgacgatgatgaagatgatgatgatgaagacgatgacgaagatgatgaggatgaagaagacgatgatgatgatgaagaggatcatgaggaagaaagcaagccagcatggaagtcaggatct

SEQ ID NO: 175417 - DNA, 152 bp, Zea mays
  Clone ID: MRT4577_91568C.1
cacatctccaactaggatcagccaagataagtggacatgttcctggtaggaaagttggctcagctcattaacattatctttttaccccctatatgagtaggccatggtgtttatagcaagctttgagaacttccaatgtatgagcaagttgt

SEQ ID NO: 175418 - DNA, 1264 bp, Zea mays
  Clone ID: MRT4577_91569C.1
cggccgctcgaggcggccggccggggagtgccgcagagcggctggctgacatcaaggttgccgcggggattccgaaggacctcgacggagacgtggtcaccgtacccaaggagcgaaacagcggtgagatgcaggtgtggaaggacctcatcttgtccccgaccccggcgatccgacgcatactgctatcggccgtcggcctgcacttcttccagcaggcttctggctgcgattccgtcgtcctgtacagccctagcgtgttcaggggcgcgggaatcaccggcgacaacaagctcctgggcgtcacctgcgccgtgggcgtcaccaagacgctcttcatccttgtggccacgttcctgctggaccgcgtggggcgtcggcctctgctactgaccagcacgggtggaatggtcatctcgctcatcagcctcgggacggcgctcaccgtcgtggggcatcacccggacgccaagatcccgtcggtcgtcgctctgtgcatcgcgtccaccctggccttcgtcgccttcttctctatcggcctcgggcccatcacgggagtgtacaactcggagatattcccactgcagctgcgcgcgctgggctttgcggtcggcgtggcgtgcaaccgcgtaaccagcgccgttatctccatgaccttcctgtccctctccaaggctattaccatcggcggcagcttctttctctactccggcatcgccgcggtcgggtgggtttttttcttcacgtgccttccggagacccgtggtcgtacgctggaggagatgggcaagctgttcggcatgccagacacggacatggctgaagcagacgacaccgcagccaaggagaaggtggtggaaatgtccaccaagtaggcaagtagatggaacgaaaatacaatattcggcggtgctcgggcagataggcaatgattggtgcagcgtcgcttacaagagcagagctcaacccaacacaaacaaaataaggaaaaaaaaactgaagcagcgtggcaagattggcctctgagaatcagagatgtcgtggtgcactagtgctgcaggacagagacggcgtggtccagcaagagacttccgcgagacaggctgccaagtgacagctattagtcattgttgtcagagtcgcgtgtgctttgtcatgatcgatgatgttttcgtccttattttacaagaaaattccctctcaacgaatgtaaccaataaaccattctaagtttttttggcgcaaaaaaaaaaaaaaagcggcc

SEQ ID NO: 175419 - DNA, 130 bp, Zea mays
  Clone ID: MRT4577_9156C.1
ccaagatgccaacttgttctagcaactactacattacattttcacagatacatgatatatgattgtttttttttatttttatcttctggttgtctctgtggggttatgaaatatcacagcttttctttct

SEQ ID NO: 175420 - DNA, 445 bp, Zea mays
  unsure (1)..(445): unsure at all n locations
  Clone ID: MRT4577_91570C.1
tcgttgttggctcnccccgccgtcgcccggggggggggggggtgtcggcttttgccccgagcgctcggtgccgccttcgtcccatggtggctcggctccgccgtctggcttccagccgccgccgtggtccctgtgggcaccgtcgggtcatctctttttttttccaccncccacagagggggggggtggcgtctggccttcgctcacgccaacggcttccggctcacctggatcgccgtccacaccgactactcctggcgcgccaggtttgtcattcccgccgtcttccccctgcgcgccagggtcgttgcctttcacgccgactactccgggctcgccaggttcgacgttcccgccgtcgacccccggtgtccctgggtgcgttggcccctcgccgttgtcttcagggtcgacgtttccgtcgtcgacttccggtgcgcctggg

SEQ ID NO: 175421 - DNA, 349 bp, Zea mays
  unsure (1)..(349): unsure at all n locations
  Clone ID: MRT4577_91571C.1
acggagtcaagatcatagccatgctaatttcgatatggggntttcctttcatatctctatcgaaactatctcgacgataagaaggttaggaatgcttagggagattacttgggtctacaattttctttcatagatgtttagtttgtttcctgcgagatgatagatgttcattacttatgttaatttaagtacattttaccaggaggaaactatagcttttcagcatagctagaaaaatttccctgagttattattggtctctcttttttttttgcatatgcggcatatgtgtaagggtgtgggacaaggaaataaacatgatatatagntttataggtgttttttttct

SEQ ID NO: 175422 - DNA, 309 bp, Zea mays
  Clone ID: MRT4577_91572C.1
aatcatggggatgctttattttgagcgctcacgtgacaccacacctataattaggttggatagaaactggggagacgcacatttactttttaaaaaaaaaaaaaacgactagcaaatcggggacggtgacgaagcattaaaagtctccatgcaaagttttttggaggcccaattggaacccaatcttgatgcggagctaaggagcaacggggtggataaaccccccggggtaaaggaaagggcttttgggggggggggaattccaaaaaaatgaagggctttaaacccagacacgtgggtggaccccgg

SEQ ID NO: 175423 - DNA, 336 bp, Zea mays
  Clone ID: MRT4577_91573C.1
acgcggacgcgtggccaaagccgtcgccttctaatccatcctttcttagcaacgtcagttggctgggatcacttaaacattggtaaaggctgttgctgtgctgggtagcagcagatcgtggtcaagggcaccatctttttcacccaagtgggagatggccctaccactgtcaccggaagtgtctctggcctcaagcctggcctgcatgggtatcatgtgcatgctcttggtgacactaccaatggctgcatgtcaactggaccacactacaatcctgctagcacggaacatggagcaccagaagatgataaccgccatgccggtgatcttggaaat

SEQ ID NO: 175424 - DNA, 721 bp, Zea mays
  Clone ID: MRT4577_91574C.1
gggtacctcgaggccggccgggattcgggctccgattttttccgccgccccagccatcgttatctccaggctccagcagccgagcttcttcttcccctgcatgcctcgccctctctctgctcgtcgcgcccagccccggcgctggtcccagctcggccgaccgcccctgctcgcccatgccgcgcacgccccatctccctccggatcccctgtaagctccttgcgcgggccgcgttcctctgcttggccatggccgtgcgccggtgctcttctctaccgtgcccttcctctctctctccctcgcggcttcccttccccgcgagctccttcccgcgcgccccgagcctctgctcctcgttcctccctctgcgcgcgccctgcctcccaaggtggccgttcggttgctcggccctaccatctccatggcgctcggtcgcccctcctctctctatttgcaattctagctcgcggcattcctctccctggtgttttcctgagccgcgccccttagctcgtcttcctccagctcgccggcgcttggaccgcgtcctcgacctggctccctgcgctcgcctgaccgcgtgttcttcttcccctgtgagattctctagtgccttgccgagatccgtggtgagcttccccagccgcgcttagctcctgctgctcgccatggtcggctccctgctgcgctcgcctaagtcgccgccgtcgagttccctcg

SEQ ID NO: 175425 - DNA, 1036 bp, Zea mays
  Clone ID: MRT4577_91575C.1
tggctctagactcatgctacagacagttctgcaacaagtatgagaagattgcgggtaaacaattctcaatttgtgatgcagaatattttgtgttccattctccatacaacaagctcgtgcagaagagtttcgctcgactttattacaatgactttttgcgcaactgcagctctgttgatgatgatgctaaagagaagctccagtctttttcaaatttgactggtgaagagagctaccagagtcgcgacttggaaaaggcctcacaacaggtcgcgaagcacctccatgacatcaaagttcagccatcgactctgcttccgaaacaaattgaatgggcaaagaattgtgatgttctcttacggcagtggtttgacatccactatgttttcattgaggctaaacaatggccagcatcccttcagcctatcaaacattgcttcagttcttgatgtcaccgagaagcttcagtcaagacatgagactttgcctgagaaattcgttgagacactgaagctgatggaacaccgatacggcgcaaaggacttcgagacgagcagagacacgagcctactgcagccgggcacattctacctcaccaaggtcgactccatgtaccggaggttctattcccagaagctgtccgaggaaacaggcggcgggaaaaccaagtgctgcaacggcctcgcaaatggccactagtggtcgcccagcactgttgctcatcattctcagtattttgataatgctcatggttagcgtttagtctagcgtgtttctgaaataatataattgttctttgaagctgtcccaccccccctagatcagctagttttttattttaatattttattcttctgaacattgaaattcatcagtctctacattgtttctctttgtttcttcttttagtactctcttcgttccaaattttaaattatgtcatgttttgacttttctacgtacataatgtttgctatgtctaatagtaaaaaaaaaaaaaaaaaaaaaaaaaaaaaaaaaaaaaaaaaaactcgag

SEQ ID NO: 175426 - DNA, 173 bp, Zea mays
  Clone ID: MRT4577_91576C.1
atcacacacgaacaaccccactaccggcagggaggccctcttgtctatcgggccatggttcgctcagccgagaagaggctagccgcgggagctcttaacagtggcaaggagacggcgtggttcgaccccacctaggtctacctgatctcgacggccaactcgagtcagaacat

SEQ ID NO: 175427 - DNA, 513 bp, Zea mays
  Clone ID: MRT4577_91577C.1
gtgagccctgacctttaaactatttatctatggagtcgttctaccatcgttcttgaaagctgataattacttgtgtgtttccttacagaatgggcaaagaattgtgatgttctcttacggcagtggtttgacatccactatgttttcattgaggctaaacaatggccagcatcccttgagcctatcaaacattgcttcagttcttgatgtcaccgagaagcttcagtcaagacatgagactttgcctgagaaattcgttgagacactgaagctgatggaacaccgatacggcgcaaaggacttcgagacgagcagagacacgagcctactgcagccgggcacattctacctcaccaaggtcgactccatgtaccggaggttctattcccagaagctgtccgaggaaacaggcggcgggaaaaccaagtgctgcaacggcctcgcaaatggccactagtggtcgcccagcactggtgctcatcattctcagtattttgataatgctcatgggta

SEQ ID NO: 175428 - DNA, 1981 bp, Zea mays
  Clone ID: MRT4577_91578C.1
aattcggcacgaggcgatccggcaagagatgtgacaaccaccgcgccgagcgcgagctgagctgacgacgctgacgcggctgaaaatttccacgaacacatagatccgcatcgtcgatccatccgtcctcctcccgacggtacgccagcctgccagagtccgacgcacgcctagggctcctggacacagcagagcccacgccttgagcccttgacgcgctccgttcgagtggagcgcacaggcaccggccggcgaccagagagggagcggatcgagggggctcggcttgagtggaggagatggaccgcaaggatgtcgggatcctcgccatggacatctacttcccgccctcctgcgtgcagcaggaagcacttgaggcccatgatggggcgagcaaagggaagtacaccattgggcttgggcaagattgcatggccttttgcagcgaggtggaggatgtcatctcaatgagtttgacggttgtcaattctctgctgaaaaaatacaagattgatcccaagctaattggtcgcttggaggtgggaagtgaaacagttatagacaaaagcaaatccatcaaaacttggctgatgcagatttttgaggaaagtgataatactgacattgaaggtgttgactccagcaatgcatgttatggtgggacagcagccctactgaattgtgtgaattgggtcgaaagtaactcctgggatggccgttatggtcttgtcgtttgcacggacagcgcggtttatgcggaaggaccagctcgtccaacaggaggtgctgctgctatagcaatgctcattggtcctaatgctccgatttccttcgagagcaaatatagagcttctcatatggctcatgtttatgatttctacaaacctgatcttgcaagtgaatatccggttgttgatggtaaattatcccaaacatgctacctgatggctcttgactcatgctacagacagttctgcaacaagtatgagaagattgcgggtaaacaattctcaatttcagatgcagaatattttgtgttccattctccatacaacaagctcgtgcagaagagttttgctcgactttactacaatgacttcatgcgcaactgcagctatgttgatgatgatgctaaagagaagctccagtccttttcaaatttgactggtgaagagagctaccagagtcgcgacttggaaaaggcctcacaacaggtcgcaaagcacctgtatggcatcaaagttcagccaacgactctgcttccgaaacagatcggcaacatgtatacggcatccctttatgctgcattggcatctgtgctatataacaagcatgatagtctgaatggacaaagaattgtgatgttctcttacggcagcggcttgacatccactatgttttcgttgaggctaaacaatggccagcatcccttcagtctatcaaacataggttcagttcttggtgtcaccgagaagcttcagtcaagacatgagaccttgcctgagaaattcgttgagacgctgaagctgatggaacaccgatacggcgcaaaagacttcgagacgagcagcgacacgagtctcctgcagccgggcacattctacctcaccaaggtggactccatgtaccggaggttctattcccagaagccggccgaggaaacaggcggcggtaaaaccaagtgctgcaacggcttcgcaaatggccactagtgggagtccgcgtgccgtttgaattgctacgtcgcccttctgtactgttgatcatcattctctgtgttttgatcatgcttgtggttagcgttttcaccctagggtgtttctgaaataatatattactagatatatccccatctgttacatcggggtcacgaattttgccatttaggccttctctatttttctttagttatttattgactctctaatctttttttatctacaaagccaacatatcttcaagtttaaaaaaaaaaaaaaaa

SEQ ID NO: 175429 - DNA, 524 bp, Zea mays
  unsure (1)..(524): unsure at all n locations
  Clone ID: MRT4577_91579C.1
agccgccaagcacactcaccactctctcttcattacctccatataggccccctacattctttgatcagtgatcactctcgctgggtctcaccccctcccgcagacggccaaacagaacccacgcgtgcgcgcgcgcccacgagcgagcgatgcctcccctccgccgcgcgcgctccatcctgctcctcctccactacgtggccgcctcccacctcctgctgcgcgccgccgcggccacattgccggaccccgcgccgctcgacccggcactggtcgcgaccccggtgcagcccgccgccgccgttccggggggcacgatcccggcgttccccgcgcagtcggactcgctggcgggttcctcgtccacgtgcccgctcgccccttccccggcgctcctcccggccgtgcgggcctcctgcgccgncgncgcggcgctgccgccgaggctgcgctgctgccccgcgctggccgcgtggctgttcgcgggctacgcgcccgncgngctcgcggagcggccgctctag

SEQ ID NO: 175430 - DNA, 392 bp, Zea mays
  Clone ID: MRT4577_9157C.1
ttttgtctgtcttttttgccttttgaagcgttcggaaaaggatgtcgtgcgattctccttgtattgattcttttccgatcgataagtatggatccatgtgactacagtacctagattgtgtgcatggcttaacgaaatgtgcatgacctctattggcctctgccagaatatgagtctcttgctttttgacaatggctccccaactcccttggccagcttctactacttgagaacttaattcgaaagacttatttagacccggacgctatgctggatgcttgtaatagccaacgaagggcaagtgctcttgcttgtttagatcctattgtaatagaaactttacctgtatatcctttgatattacgcatggccagtactcccataccgggagc

SEQ ID NO: 175431 - DNA, 249 bp, Zea mays
  Clone ID: MRT4577_91580C.1
tctttttggaggctacccttttactccacaagcatatttaaaaactgcgctggtgccaatcataaatacacgcaggaccttaacatttgtctgaccacactaggacgcatatgaacttcacacagagacgtgacttgtcaaccccatacggtggatctgtctacttatgctatcactccagtgcactcacgacttcagacctgtgatctgcctactataccactatgtaacgcgggttattcctatcaa

SEQ ID NO: 175432 - DNA, 239 bp, Zea mays
  Clone ID: MRT4577_91581C.1
cacgctctgctcctccttttccactgctctgcgtctgcgtctgcgtctgcgtctgcactgcttctcgtctccctccccccgcctccgccatcggccccgggggggggcataacacggccatcgaaggctacggccgcgagttctaccacttcaacgaccagctgcgcctggagacggccgccttctcgggcctctccctcagcgactccatctggtcgcccgccggctggcgcagcaac

SEQ ID NO: 175433 - DNA, 1835 bp, Zea mays
  Clone ID: MRT4577_91582C.1
gcttcatttcagaagagaaaagattatttagatgctgtggcttcagatggttgtttgactcagagttcacaggggttggctgcaggggagatgatttacagtttgagagactacttgaaagattctgtcagcaataacatctcaaaccttaactggagtgcatctaaaaggcggtctgggagacggtttagacaaggagacactgggacttcaactccaacctttagcggaagcccaggcaaagggggttttggccactctactgacacctcagagaagaaaggcactgaagaaactcacagtgagaacacaggagaccctctcagcatcgatggtgttaagtctgattctccattacctactgcagtaaccactaaccactctaaacacgattcaacaaatttagggctttctttatcaagtcctgtaaaaatcacgcaaaggccactccgaaactgcagcatagactcaaagtcaaaagaatcaaaaacaagggataccactttgcatccactgattttcaaggaggatggccttgcagataatactttgttgacttacaagttaaagaatggagaggctctaaagcaagggtataaacggggaacatgtatcatctgtaactgttgcaatcaagagttttctccttcccactttgaagaacatgctggcatggggagaagacggcaaccgtatcacaacatttatacattagaaggattatcacttcataagctagctctgcaactgcaagatcatttgaatccaaatggattcgacaatgctagtgtttccagcgtcagtgactaccataaccttacttcttcaggttgtggcagagaaccttccactaccagtggacctattgttcctctgaaacggactttacaagaaagagtggtagaaacagagagttgctatttctgtgggtatggccacacaacgattggaaatatcaatccagacacgattattttctgtaaccagtgcgagagaccatgccacatcaaatgttacaacaatagagttgtaaaaaagaaggtgtctctggaaattttgaaagaatacatgtgttttcgcttcttgtgctgccaagaatgtcaatcactccgtgcccgtctagaagaaggactggaaaagtgtgtagggattactgtccttagacggataagatctaatatttgttggcgacttttaagtggaatggatgcaagtagggatgtcaaactctacatgcctcaggtcattgatatcttcaaagatgcatttatggattctactgatgagcacagtgacatcatctcagacatggttaatggcaaaaatggagaccaagagaaggattttcgaggaatgtattgtgcactgttaactgcaagcacacatgttgtctctgctgcgattctgaaagtgcgcatcgaacaaatcgcagaacttgtcctcattgctactcgtagcgagtgcagaaaaaagggttacttcatacttctcctaaagtcgatcgaggcaaatttgagagcctggaatgtaagccttcttactgcgcctgttgaccctgaaatgacacaaatctggtcagagaagctcgggttcaccattttatcagctgaagagaaggagtcaatgctggagtcgcaccccttggtgatgttcaagaacctagtcttggtgcagaaatcacttgcttgagcaaatctgatctatgtttgcttgtactactttagaaatgaaaacccggtttcgagagcttagacagtacggggttaggccgtgttaagtcattttgtttattatttagatttaaaatattttaaactatttaaatatatattata

SEQ ID NO: 175434 - DNA, 4483 bp, Zea mays
  Clone ID: MRT4577_91583C.1
acggcggctacgcccgttgcggctgccacgacagggtcagtcagcgctatcgagtacctatatgttttcggaatacttcgtcctctctgtggttttgctcagatgttcatctagtcaggggtttattcttcccgcctcgcaggtgctgtcgtctgtcggcgccaagggcatgggcaagtggctttatgcctctaagtttgtctgttgatgttggtcatcgttcatattctacttcagtatcttgaaacaaccttgtcctgtgtccgccactggtccgcgctgcagtttgagaagcacgtgggggcggagtcgaagaaccagaacggtaacatcctcctcaccaacgacaagttgctctacgacctgttccacgagctcagaaattggcccccttgtgcggaggagtttcgggcgaccgccggggtactcatgactgtgcctgccaccgaagcctcatctgcgccgcaggggcagcaagcaggcgcgcccgctagctgggaacccaacggggttcaggttgacggcgtgacggtggatccccctttgcctggacggggagccatggtgatgctgaccgaggaggagaaagccagcttgtgtctgctgggtttgaagcaaagcagttccacggctgagttggacactatatgcggcattgaagggcctgctgcggaacagatcaaagatgaagcaggtggtgaccatgtgatgcacgatgctctagtgggagtgacagaaacagagtatcagctagacagtgaccttagagatgttagaggactgctgtccactggacttcttgaaggtttcagggtgacctacatgaaggatgaggtggaggaggttggacggataaatggacagggttattcttgtggctgctcaaagtgtaattacaatagtaatattatgaatgcgtgcgagtttgaggagcattatggtcagtcatttgacaaccagattgatcacatcttcttggataccgggatttctctattcagggtggtggaagcactgaaaccttgtaagcttaacatgcttggggatttcattgaagagaagattggtttccctcctaatttggatgagtataacaagtggaaagcttcatttcagaagagaaaagattatttagatgctgtggcttcagatggttgtttgactcagagttcacaggggttggctgcaggggagatgatttacagtttgagagactacttgaaagattctgtcagcaataacatctcaaaccttaactggagtgcatctaaaaggcggtctgggagacggtttagacaaggagacactgggacttcaactccaacctttagcggaagcccaggcaaagggggttttggccactctactgacacctcagagaagaaaggcactgaagaaactcacagtgagaacacaggagaccctctcagcatcgatggtgttaagtctgattctccattacctactgcagtaaccactaaccactctaaacacgattcaacaaatttagggctttctttatcaagtcctgtaaaaatcacgcaaaggccactccgaaactgcagcatagactcaaagtcaaaagaatcaaaaacaagggataccactttgcatccactgattttcaaggaggatggccttgcagataatactttgttgacttacaagttaaagaatggagagttttctccttcccactttgaagaacatgctggcatggggagaagacggcaaccgtatcacaacatttatacattagaaggattatcacttcataagctagctctgcaactgcaagatcatttgaatccaaatggattcgacaatgctagtgtttccagcgtcagtgactaccataaccttacttcttcagccacgacgcaccaacgccatgatcttggccggccacctatgccctatccttactctctaccccacgaccttggtaggatccacaatcctatcaacctggtatcagagatgctacgcgatcctcccaccactaccctaccgccaaccacctccacatctccaccgctgtcgatttccgccgtcgcgccgctccctgccccaacgagcctcatgctcacgtcatctccatccgcgatcgtgacactgctgaccctggagggcctcaacgccaagttcgatgccagcctcacctccatcagcaacaccgtcgccactcgccaccctcgcgcactccgaggcgtcgccttttcgtcccaactcccaaccaccgtcgggggcaactccgccggcgaccacgcacctgctacttcctccaccggtgatcgcgccaccgcccctgccaccagtgcaccgtcagcatgcccgattggggccagtacatccacaccagcaggactgccacttcacctcatctccatgccaccatcactgttcccggtttcgtcgtatgtcctctcgtcgacgacgacgccggagttcacgatggcaatgcctccaacactgaccgtgtcctccgtccctagccacaaggttctctacgggggagtggacgataccctattcttgggcgcgccgactagcggcgacgtccagggcgacacacccaggccatacgacgttgtgccacccgctggccacaccctgacctggcacctccgcggttctacaagcttgacttccccacgtatgacggcgcccgggatcctctcaattgtctcaaccaatgtgcacagttcttcggcggccagcgcaccctggcctcggactgcacgtggctggcctcctaccacctcaccggagccgcgcagacgtggtactatgccctcgagtaggacgagggcatgccctcgtgagagcgcttctgcgagttgtgtaccctccgcttcggcccaacagttcatggcacctgcctattcgagctcgcacgtctaccattcacatcttctgtgcaggagtatgctgatcgcttcaatgccgtgttgtgccatgcccgtggtctctcaggcccctagaaggccaagttgttcgtgggcgggctctcggaccacattcacatcgacgtcgagcttctcgagccgcgggatctcaagtcggccatgtacttggcccgggccttcgaggcctgcgcagctgcgtcgccaccggccccgacggcgcggggcgccaattccccgccgtgcgggacagcctgcgccaactcgagccccgctgtgtgcgccgctgcagcaacaacctccaacacctagggggcacgccaaccccagcagaaaacgacagcccttctcaccagtttcgtcatctctcccctaccgtacaacaacccgaggccacgtctgtaaacgcctcttctacttggagttggccgacttcattgacgatgatatcccggccaacatctctgccacaacaggttgtggcagagaaccttccactaccagtggacctattgttcctctgaaacggactttacaagaaagagtggtagaaacagagagttgctatttctgtgggtatggccacacaacgattggaaatatcaatccagacacgattattttctgtaaccaggtgtctctggaaattttgaaagaatacatgtgttttcgcttcttgtgctgccaagaatgtcaatcactccgtgcccgtctagaagaaggactggaaaagtgtgtagggattaccttccttagacggataagatctaatatttgttggcgacttttaagtggaatggatgcaagtagggatgtcaaactctacatgcctcaggtcattgatatcttcaaagatgcatttatggattctactgatgagcacagtgacatcatctcagacatggttaatggcaaaaatggagaccaagagaaggattttcgaggaatgtattgtgcactgttaactgcaagcacacatgttgtctctgctgcgattctgaaagtgcgcatcgaacaaatcgcagaacttgtcctcattgctactcgtagcgagtgcagaaaaaagggttacttcatacttctcctaaagtcgatccaggcaaatttgagagcctggaatgtaagccttcttactgcgcctgttgaccctgaaatggcacaaatctggtcagagaagctcgggttcaccattttatcagctgaagagaaggagtcaatgctggagtcgcaccccttggtgatgttcaagaacctagtcttggtgcagaaatcacttgcttgagcaaatctgatctatgtttgcttgtactactttagaaatgaaaacccggtttcgagagcttagacagtacggggttaggccgtgttaagtcattttgtttattatttagatttaaaatattttaaactatttaaatatatattataaattatatctccacgcttgagctggaaactggaacagtcccaaacactcccatagagtttagactagtcacatgttcgtgtattgttacggttttatgtcacatggacacagatagattttgttttaataaataaaatatatgtgctct

SEQ ID NO: 175435 - DNA, 363 bp, Zea mays
  Clone ID: MRT4577_91584C.1
atgatcatctcaatcgaaagtccggaacggttacagaatcttggaccgcggtgggtttcaggcttgggccaactctggcagcagtacagccccacacgcatgggtgacaaggatgcgcctgtttgtcaatatatggaatggaaccggggccatggaaaggcgccgatgcttgacgagcttgttgatgccaccgagctcgacgacaaagacacggacggcgatgcgacctgtgactgcacaggctccaggctccagagtctatctcgatggcacgcccgctcagtgctggaggtgttaccccatcggaatcaccccgctggagctcccatggcatcgtacagacgcacacgcaggggcttttga

SEQ ID NO: 175436 - DNA, 593 bp, Zea mays
  Clone ID: MRT4577_91586C.1
aaacacgattcaacaaatttagggctttctttatcaagtccagtaaaaatcacgcaaaggccactccgaaactgcagcatagactcaaagtcaaaagaatcaaaaacaagggataccactttgcatccactgattttcaaggaggatggccttgcagataatactttgttgacttacaagttaaagaatggagaggtgctctggatatttatgtgaactatattggcccccttttccgcaatcacctgaatatgtagcactcttaagaggactcacgcttcactgtttttaggctctaaagcaagggtataaacggggaacatgcatcatctgtaactgttgcaatcaagagttttctccttcccactttgaagaacatgctggcatggggagaagacggcaaccgtatcacaacatttatacattagaaggattatcacttcataagctagctctgcaactgcaagatcatttgaatccaaatggattcgacaatgctagtgtttccagcgtcagtgactaccataaccttacttcttcaggttgtggcagagaaccttctactaccagtggacctattgttcctctgaaac

SEQ ID NO: 175437 - DNA, 264 bp, Zea mays
  Clone ID: MRT4577_91587C.1
ggactcacaacagggactttttatttgccagtgggggcaatttggccattggaggaaaaaaatctttgggggggccagggattttacctaaacccttacttttgcccctggtcaccttaggaatcaaatttcttattttagcacgatcgggtcaaaaggcaccgcagaggggcaggtatcccttctagctagagggggttgaaagggggaaccaatgcaatttgaaacaagaaaaatgcttatgaacattgcttaactttcctt

SEQ ID NO: 175438 - DNA, 143 bp, Zea mays
  unsure (1)..(143): unsure at all n locations
  Clone ID: MRT4577_91588C.1
actcgtttgggggggtttttnaaaaaanattacgggtggggccttaccttatgaaacacgacacatatntcatacatatattggtttattgcctccacatagcgtacgtgaacatcacagagtgcaaatattatttgtaaaat

SEQ ID NO: 175439 - DNA, 667 bp, Zea mays
  unsure (1)..(667): unsure at all n locations
  Clone ID: MRT4577_91589C.1
gcaccaagcactattcgtaagaatacaaagatccaacaaaataaagtgaaaacacatacatccttagaaaacttcatgatcttccagtatacttgattttgaattaaatgtgcacgcctaatttaatccagcacaacacacgcattctccatcttgaaagggatgccatgataaatcatttagttgtgcaactacatggtatgttctataaagtacttgatcagttgaagctcttgaagtacaaactattgaggtcatgcatgtaatagtatgatttgatttctttacaaataggatgttgacacatattaaggccacatatatatatatatatgtttttagcttgcacagattatatatgcagcttccagctttgttaaaatctacaagttgactttaagaattcccagattgtaaccaatataagttttgacaatccgcgggctagattgttacattccaacaattgcttccccaacatgtaaacggtaacaattcgaaaaaaggaccttaatgtgtaatacaaaataaacacaagtattgtgataatatacttaaaagatttagcccttctgtatgtgcatatattggtaatacttaaaggacctcatcttttttttggatgtgtaacatatcttacatgtacgtacanagagtaatatgacag

SEQ ID NO: 175440 - DNA, 1267 bp, Zea mays
  unsure (1)..(1267): unsure at all n locations
  Clone ID: MRT4577_9158C.1
cggtcgcgtgggcggacgcgtgggcggacgcgtgggctttggtacatgtttcacttagatcaagcgatgttgatgtgcttagattggctttcgatttacttttgctggtatttggtacatatgctccgtgctatagggttgaaatttatttgacgggagggccgcgaggctctctagcttttgctggagcagaagtcgatagtgtctgcatattccaaagcaaacgtcatagattaagccttctgatgttgaggatttccattgaaagtttgctctttcgtggatattatccattagagggcagcctcatattccatcgccttgtgtagcagcgtcgccgccatgaaaatttgggactggccatgaggctcatattttatggacgacttcgttgtccaccactcattctcgccgttccccccaagaaccaatcaacagctgcactatacagccgcgaacgctgccaccgaccacgctatggagaacgcagtagtcgggctgatcgtcgtcgccgggacttcagtcgccgtggcagcactctgcctcctcctcgccttcctctgccgacgccacagcagcaagagtcggctcaagccgtgcagccgccagcgctgctgctccgcggcggcggggtcaacgctcccggtctccgtttccgacgggatgacgccggactacctgtcctggtcgttttacagcacgaccgctgaggcctcgctccagaagctctcgctcgccgacctcgccgccgctacggggggtttctccccagacaacatcatcggcgacggcagcttcgggtttgtgtaccgcgccgtgctccccgatggtgccgcggtcgctgtgaaacgcctatcgggagacggtgacgcgggggccggcaaccgcgagttccgcgcggagctggaggtgctcggcagcctcagccactcgaacttggcgcgcttgcttggctactgcgccgacggccgcgaccgcatcctcgtgtacgagctcctggagcgcggcagcctcgacgcctggctccatggtggcgacgccgacgacagtggcggcacgggtacgcttcgctggcccgctcgactgcgcgtcgcgcgcggngccgccgccgcgctcgagtttctgcaccacggccgccgcccaccggtgctgcaccggcgacgttaagtccagcaacgtcttgctcagcgaaggcttcgaggccaagctcgctgactttggcctcgncaggatcatcagagggagcccctgccaatcgcacgtcagc

SEQ ID NO: 175441 - DNA, 455 bp, Zea mays
  unsure (1)..(455): unsure at all n locations
  Clone ID: MRT4577_91590C.1
gttcggaaaaacaaaatgcaacagacaggaaccaataagtgccacccatcccagctgggaattgggccagtctcctgatgtacaacacgcaagttgccgtganttttgcggggacaataactccacctttgggtacaaaaacatattttacaggataggacacttggtttactaggggggcgcgtccgccgggcccggattgtggaccaaggcgacacgaaggttcccaaccagtctgaccggggaaacttgcgcgcgaaccgtggtggtggcagctccggcgacgcttcccgtccgctcgggtgagctcctccatcttgggagcccgggtctcgtttgaccctggacttctgctcctgacgctgctgttgtttccgccaccgtgcacgttagttgagcctgcccctgggccacgactgccgctcttagctcgctgacgaagccgtttcccttgc

SEQ ID NO: 175442 - DNA, 105 bp, Zea mays
  Clone ID: MRT4577_91591C.1
cagacgcgtggggcgaccaggatgtcgccctcgcaggagtgcagcgcgacgccagcctggtggcggcccacgacctgtttgtgtgcgtgggagaggacgggctcg

SEQ ID NO: 175443 - DNA, 415 bp, Zea mays
  unsure (1)..(415): unsure at all n locations
  Clone ID: MRT4577_91592C.1
ctagggatgggaatacttgcctgtttcttttttcctggctgtttctaaaaaatctacgcgcccccaacaccacgccggactcgatccaggctgccttaggccgcatgtgtacaggacgccgccctttctgtccgacggcgggtgattccttctgtccttcctgaggatactggcctgatcacaaagcaggcggctacggttcggacggaactcctgatggcagagcccgggacggagcgaggccagggacccctgatccagtgcccgggctgtgactcggaggcgaggcacaagctagcgcanatcctgctaccggggctcgccgtcgtgtgcgtggactgggctacgggggacccgttccagaggccgacggcggtggacgtggacctgcgcatggggagggtaggactacatc

SEQ ID NO: 175444 - DNA, 1051 bp, Zea mays
  Clone ID: MRT4577_91593C.1
gcactgaggagatgaaaggcaggattctctttgtctatcattcaaaagagctgcctcataccctctgtgtataaatagggtctcgatcggcagagacttgaatcatcaggcaaaaaatccgcttctcatattacttctacctcatttcaaacacacaagaacttccagccagagactacaggtcgatatggcttgccaagtccataagcttgccgtccaggcctcagtccagcgaagccgcagtgcagcaggagatgtgtattctagaggcgatcatctcctcaccatcaacatgtatcgtcacgatgtgtgacggtttgaggaggcttggagacatctacagcagtgttgtggagatgactcacttgccgagcaaccaagtttgctcttcccagcaaaggaagatgctggacggagaaactgagtcttctctcgagctgctggatctctgcaacaccatgcaggagatcttcgttgagttgaaggccattatccaagatctgcaagtggctctaagaaaagggatggtgcaaccgtccaagccaagatccagttttatagccgcttggtgaagaaggctaaacaatctttcaagaaggcatgcaagaaggtcactcctgccagcacagattgtgcaattatcaggctactgaccaaggctagggagatcaccatctctctacttgagtcgacactgcagctcttgtcgaagcaaatcgaaacgcctaagcagtcgcttgtctcgaaggcattttccaagagaaaagcagctgtttgcgaggagggccagttacaggtgttagagtccagcattggagatcttgagagcggagcaggacacctgttcaggatattggtccagagcagggtttctctcctaaacatccttagctcatagatactcctttgttgccttttgacatcctgtgattggcatccatgtttttgaggattagctgatcaattttgtaatatgtatatagtacaaatacatgtacaggaaaaaaatcagaaaggaagaaaggcatataagtttgatccatttcatgtt

SEQ ID NO: 175445 - DNA, 180 bp, Zea mays
  Clone ID: MRT4577_91594C.1
cgagcagacaaaccatattcatcagtcaaaaagggctgtgtatacttgcatatcattgtggttggtaattgtgtgcacctagctttataactgcagtaatctgaaataccatgaaatacctaagccttgatgagatcgataatcatctgtgtgtgtgtgtgtgtgtgtgtgtgtgtgtgt

SEQ ID NO: 175446 - DNA, 304 bp, Zea mays
  Clone ID: MRT4577_91595C.1
acaacgcgtacggatacatctgagagaaaatataaacaaaaacaataaaacgaacataggggggctatatgtggctgacctcgactttagtatcgctaaagactgatccgattgctttgttctttctcgtccaaaacataatgtatttgcccattctttacagaaacggaactggaaacacccttgtgttgcctaacataataccctagtaagataattgcgttgctatatgatgcctattgcattattaggacgaaccgattggtctttctaacattttcgcagcctgaatggataaaggaac

SEQ ID NO: 175447 - DNA, 587 bp, Zea mays
  unsure (1)..(587): unsure at all n locations
  Clone ID: MRT4577_91596C.1
tctctgnaatcttgatttgtggcttccgttgggttgcagctctaccctaccctaacttgctcagttgctcaggactataagacttcgttgttgttgttctcttagctgacctgctttttaacaagatccatcaatgaagggcatgcgaacatttttattcgtttctgtagctatttcatgcttcaggagactttggtgctttttggtaccaagttagttcaggttgagtacaaataatatgtcattttagatcgcacccagcagtttctgttatttgttgcttgtatgcactgtgttctattatctggtgatacattttattgtgactctagattttctacatattcgcccttgtttgcagtaagctggcactcttgtcttatttccatttgacctgctttaacatgtttgtaaatgaatgtcaggaaaataatttaattggtttcttttggtaccttagctntctgttacttctagagctctcttgtacgaagtttattcagactgagcataaatactactccctccgtcccaaattaaaatttgttttagatctgggacggaggcagtattccgttatagacagc

SEQ ID NO: 175448 - DNA, 138 bp, Zea mays
  Clone ID: MRT4577_91597C.1
ctcacgcgagggggcggtctgtgcttcacctgaagtcgatgaaagcggctcgaggtaggttcatcctctctgacactcagactaggtgcggctgtctccggaatttgtaataaagacgctctatgatcttacccagga

SEQ ID NO: 175449 - DNA, 458 bp, Zea mays
  Clone ID: MRT4577_91598C.1
ccggccgggaccccgatgcggattcgtgtgtggaggagagttgcagttgcagcgacgactccaactccaacgaggggatccacgcctggactgttctgttccaacgaggggatccaactccaactcagcggcaggcagctagctgtcctgttcgaaattcaaaacccggccagatccgtgcttgcgctgctcgccggggctgctttgtccactcaggccatcgatctccagttccatgcgtgtggtggcgtttgctgggcagatcagttattactcctccactccacaccactgcaccggccggcaccgctggtaacgcacgcaggtaggcggccaaggccatgccaatgtcatgcagcgggattgatccatgcgtcgtccattggcgccctgccctcggctagctgcggctgtgctggaaagagatctggtggccgaggaggaggagaaggcgagga

SEQ ID NO: 175450 - DNA, 520 bp, Zea mays
  Clone ID: MRT4577_91599C.1
cttctctaagtgaccaggtcgttcgccggtacctttgacggatcttcgccgtctatgagcatcggtcgaggaacagaagaagttgaaccatgggaaagagatatctgtgctaagccctcctaaaaggaatggacaagctggacactgtcttttgctgaccattctggaagcacggagagtagccgtctgaggtgcacgaatatgacatggaagaatctgatgtgcagaaggatcttgtataatctgtcaggaaaactgtcgcacaactggttaatgatatagcggaatgtattgacaggtggtgagcgtggcaagactgttgaaggcgacaatgatgagcgagcttggcccatgcgatgaaagtgttacttacgatcgtaatgccatgtgatgtgattctcgagtggcatagcccataggcgcccatggattgtaataacgtattgactgactgatatggcagaatgttccttatgtagtacttgcagaactgaaaaaagtttgtactgatgcgtgtatg

SEQ ID NO: 175451 - DNA, 255 bp, Zea mays
  unsure (1)..(255): unsure at all n locations
  Clone ID: MRT4577_9159C.1
ggacagatgagcgatccatcaactgccnccgagccgtgccaaccaagagccatccagccaccaccaccaccccggccgcttccttgtccctgcccctccgttggtctcctttgcccatctcatcctctctctctctctccctctctctctctctctggcggtcggcgtggctccgggggcgcgaactggggctcggcggggcgactcgccggcggctacctgcaggtttgggtattagaggggtcaccacgcggc

SEQ ID NO: 175452 - DNA, 551 bp, Zea mays
  Clone ID: MRT4577_915C.1
aggaactaaaacttatttttattaaaaagttcgaccacagcccaaaaactggggacaccaccccatttaaaaaacaacctttaaagtttaggagttctttaaaccacaccaaaacaaaccgcccgatgctaaccaatttaatcgacctttttgattttgggaccaacaccgttcccaccaaaaggggcattcttgtccatgccaaccgaattgcccatgcccgcgccagcgccttggtacattttggcaaagatggggttgcaaaagccctcgagctcctttattttgtttttaaactcgcccaccttaattaggtggttggtggccaaccaggtgggggggcttttgacgggggcctcgattttttttttggcatctgccaaaagcttggaggcgaacttgtcatccttgaggggggtcctcatgttataggcataattttcgagcgggtttttaacggccaccttttttttgacctcctcggcctcggccttggacttttaaaccttctgcaccattttctaaatctcctccttggtaaaccggccctt

SEQ ID NO: 175453 - DNA, 345 bp, Zea mays
  Clone ID: MRT4577_91600C.1
tatcgggccgcaaccacaagcggacaggatcaagggtaaaatgaaaaggcagggggggctccaccggcaccccaacactgcgagaacacctatcgtgaatcactatacaacggtaccgctacatactgatcgctgacctgtgatcgtgcagatcctacacctcggctgctacttgcgccatatccctggacctcacccagacagacaatgcgccaacgctgaacaaggcaacctactacctaaaggacttgcaagggcaacgacagatgataagccccatgggaaacatgatcatgcccatagggatctcgaagcataagaggtgactgatagaccatatgggac

SEQ ID NO: 175454 - DNA, 321 bp, Zea mays
  Clone ID: MRT4577_91601C.1
gttctctaattttttatccacactaagggaacaggaaccactatggaaaagaaagagaaggattacatgatacagagacaacgggccaataccccaaaggtgactgggagacgatggcctagacctctcacgaacacatggcatcatgctgcatgcgcgtcatcctgcgacaccatgacattgacctgagaggcggagtgagacattcccgagagacaatcctatactggcatacaactacacagtgaggggcaagacgatgatgcacgcccaataagacttgagatcacgttaaagcttaaggcgtaccaaaacatgatt

SEQ ID NO: 175455 - DNA, 310 bp, Zea mays
  Clone ID: MRT4577_91602C.1
caattaatatacttaaaaaatccaaaccgtctctctcggtaattcctaaaatttcccacccgaacctccaactttaccttctttccctaaaaaaaaacctattccaactttgcgaaaaaattcccccctctgtcccctttaaaaaaattaaaattcttaacaatttcacaaaccttaccaattgaaagcaaaacctgtaaacccttatgggccaaaaaactcacctaacttacattaatttcactttgctcattgtcccctttacaacaagaaaaccaaccctgcccaatatattaaccaaatctcccca

SEQ ID NO: 175456 - DNA, 1407 bp, Zea mays
  Clone ID: MRT4577_91603C.1
ccggccggggtaccgatccgccggccgccgttctccatttcaaattgcaaacccgttctccttttccgtctcctcgacgcaactcgtcgccgtcttctccaactcgcacctcgttcctcgccccaccatttgccgctcccgcctacgatgtcgacgagtgaggtgtggagcttgtccgatttcgaaatcagcaagtacatcggtgagggcaggttcggcaaggtctacctcgcccgcgagaagcagagcgggtacgtggtggcgctcaaggtgatatttaaggcgaaactgcagaagtaccacttccacgcgcacctgcggcgggagatcgagatccagcagagtctcgaccaccctaacgtgctccgcctcttcacctggttccacgacgaagagcgagtcgtcctcgtcctcgagtacgcggcccgtggcgagctctacaaggtccttcgcgctgctggccgcttcaccgagcgcacgtccgccacatatgtagcgagtcttgctggtgcactggcatactgtcacaaaaagcaagtcattcatagggacatcaagcctgagaatttgctaatcgacatcgagggccggcttaaaattgcagattttggatgggcggctcgttcaaatgctaaacgccacacactctgtggcacaatcgattatctggcaccagagatggtagagaaaaaagctcatgaccatgctgtggacaactggacattaggaatcctgtgctatgagttcttatatggttcacctccttttgaagctgatgaacaggatgataccttgagaaggatagttagggtggatttggcattcccttcatctccttgtgtatcttcagaggctaaggatctcatttccaagcttctagttaaggattcaagcaagaggctttgccttgaagacatcatgaagcatccatggataaagaagaatgcagacccttcaggcagttgcattaagcaaaaagatgtcacaagatcaaagcttctgtaatatcagtacaacctgcttgccagtgggcaagaatcttctgatgtggtgccaaactcgtcactactggaggacaaatatgatgacatgttgtagttttaagttccgatagttctggagtggattggtgtgtgtgtccctgcaagctttctcctacaggctggagttctagttctgatgcagcgtttgtgtttcccttttgaactgtgtcgtgaaaaccaatgttcactcgagaggaatgtagttttctactgagttgttgaaccttcgcaaattggagggtcaatggtctgtggagactggagaggaacgtggctttcgctgtggcgatcgtattttgtaattgtcgaatctgcagtattttggcctttagcaatgatatatggagatgcacgtagttttttt

SEQ ID NO: 175457 - DNA, 354 bp, Zea mays
  Clone ID: MRT4577_91604C.1
ggttaccaaaaaaaaaaaaaaaaaaaaaaaaaaaaaaaaaaaaaaaaaaaaaaaaaaaagggggaccggtctaaaaagatccaaatttacaaacccttccatcccaaattaatagctcttctatatatgaaaacctaagggcggttcattgaaaggacctatcacaacttcccgactgtgaaaaccctaacttttcctaatttaaccccttaataaaatatcccgctttcgttttttaagcgtattagcctaagaaaacccttagcgttcccccttttaacctttttaacaaacatccccttttatgggactcgcgttataccgaaaaatcccccccctatccccttttcaaaa

SEQ ID NO: 175458 - DNA, 1830 bp, Zea mays
  Clone ID: MRT4577_91605C.1
gttctccatttcaaattgcaaacccgttctccttttccgcctcctcgacgcaacgcgcgggccgggcttttgaacttcgcgctccccatccaaaccgtactgatccgccggccgccgttctccatttcaaattgcaaacctatactccttttccgcctcctcgacgcaactcgtcgccgtcttctccaactcgcacttcgtccctcgccccacccaggggcggatctccacccggggctgcctgggctgcagcccctgtcggcagtcgcggcccagtccatcatcgcgcgacatgacctagcagtagcagcagacgtcctacgtccagccccagccgccgccgtttggctcctgcgttcgatctcgctgcgtcctggtcctgcgccctgcggtccagcctcctctccaagactccacttctccagcgcgctcgcccgcgccagccgccaggccgccaccggccaccgccattggccccaccatttgccgctcccgcctacgatgccgacgagtgaggtgtggagcttgtccgattttgaaatcagcaagtacatcgctgagggcaggttcggcaaggtctacctcgcccgcgagaagcagagcgggtacgtggtggcgctcaaggtgatatttaaggcgaaactgaagaagcaccgcttccacgcgcacctacggcgggagatcgagatccagcagagtctcgaccaccctaacgtgctccgcctcttcacctggttccacgacgaagagcgagtcgtcctcgtcctcgagtacgcggcccgtggcgagctctacaaggtccttcgcgctgctggccgcttcaccgagcgcacgtccgccacatatgtagcgagtcttgctggtgcactggcatactgtcacaaaaagcaagtcattcatagggacatcaagcctgagaatttgctaatcgacatcgagggccggcttaaaattgcagattttggatgggcggctcgttcaaatgctaaacgccacacactctgtggcacaatcgattatctggcaccagagatggtagagaaaaaagctcatgaccatgctgtggacaactggacattaggaatcctgtgctatgagttcttatatggttcacctccttttgaagctgatgaacaggatgataccttgagaaggatagttagggtggatttggcattcccttcatctccttgtgtatcttcagaggctaaggatctcatttccaagcttctagttaaggattcaagcaagaggctttgccttgaagacatcatgaagcatccatggataaagaagaatgcagacccttcaggcagttgcattaagcaaaaagatgtcacaagatcaaagcttctgtaatatcagtacaacctgcttgccagtgggcaagaatcttctgatgtggtgccaaactcgtcactactggaggacaaatatgatgacatgttgtagttttaagttccgatagttctggagtggattggtgtgtgtgtgtatccctgcaagctttctcctacaggctggagttctagttctgatgcagcgtttgtgtttcccttttgaactgagtggtgaaaccaatgttcactggagaggaatgtagttttcaactgagttgttgaaccttcgcgaattggagggtcaatggtctgtggagattggagaggaacgtggctttcgctgtggcgatcgtattttgtaattgtcgaatctacagtattttggtctttagcaatgaaatatggagatgcccgtagtttttctaaaaaaaaaaaaaaaaaaaaaaaaaaaaaaaaaaaaaactcgagactagttctctctctctcgtgc

SEQ ID NO: 175459 - DNA, 150 bp, Zea mays
  Clone ID: MRT4577_91606C.1
ccaggcgaacaccatcaggccactgcatggtggcagtcgcgctgatgcgatggaactcgccgcggcgaccgccgaaacggagtccgcggactacgagcaacgcccgacagatcgccgcgtgcacaccgccgatccctacggcgagacgcc

SEQ ID NO: 175460 - DNA, 383 bp, Zea mays
  unsure (1)..(383): unsure at all n locations
  Clone ID: MRT4577_91607C.1
acaaaagggggccgacggcancnaaaagcaaaaaggacaccagcgaaaaggagccacacnccacnccngccaagaaaaaccggggacagcgcnccccccaaangangcngggaccgacngcacaacgggggcaagaaaccacgggagggccngaccgncgnnaggcnacaacaaacacaccccgggaacagggggcaaangccacaacacgaggcagcagaggnncaccnccccgancgccgacnacagccanagaanccacagccaggcaacaaggcagganggnnagaaaaancagcacccaaaannagccaacaccancnangngcaccaacacgaacaccgganaacnncgagaagccgcccaagaacagccncacacc

SEQ ID NO: 175461 - DNA, 327 bp, Zea mays
  unsure (1)..(327): unsure at all n locations
  Clone ID: MRT4577_91608C.1
aataaaaggaccacatgatctggggggtcaagtgatcaaacaaaagctggattacctcactatgctgggttccacaacgcgtaagagaatgattttttacgcaatgtgctttccaaaagagttctgcgctaaaaccggaccaggactttctcccaggctggtgcccatcggaataaggctgcttcctgcagccgccatgcccttatacagtgcatttctgtntgtacatatcaggacgcgaatcctttctggcagccccctgcttttcctttcgggaagcgttctgtaaaagttgatgctcgaactcctttctaaaccgctcgtgct

SEQ ID NO: 175462 - DNA, 453 bp, Zea mays
  Clone ID: MRT4577_91609C.1
gcctgcacgcgcccggccgtactggctggacccacccatgcgtttcgttccacggcggcaggggcgggggcggcgccgcgtctgtgcggcaccagacggacaggagctaccggaaggctggagacgaccaatgcagcctaccttcccgccacgtggagggacgactggtgcgcacggaccgcaatgacaacacgcagcactggatcaaggacatgaagtacacaaccagtgtcaaagatgagaaaggctaccctgccatgatcctagacgacaaaaccactggagaggctataaagcattcccttggccagtcgcaccctgttcttctgacccggcataaaacatacaccctggacgagactgtcctgtggacagagagcaaggacgttgctgacgggttcccctgcttgatgatggtcaacaacatctacctgcactttgatgcttgacatg

SEQ ID NO: 175463 - DNA, 424 bp, Zea mays
  unsure (1)..(424): unsure at all n locations
  Clone ID: MRT4577_9160C.1
gcgctnngccggccagnaagggtggnacatcnnncgcgtcgccttcctncnntgctgcncccttncnncgccgcaccccgtcgccgnnaccccnnctccggctcccaaggccgctccggncnnggcgccaccggcccgcgccnngtcgccgcaaccccttannacgccgcgccgnaagggccctctncnncgccagctccgtnagcccccgcggcttgtcgccaccgtccctttgctctcccttggccgcgngccgtgcccctggcatgaatcacttgannncaggatcgtgtagtgggctggccagggggacccggcgcctttgtgaattgttgagagctcgtactgtgntctgtggtgactggtctctgtgngccgtatgaagcatttagccctggaatctgtgtttgttaactttctgtct

SEQ ID NO: 175464 - DNA, 760 bp, Zea mays
  Clone ID: MRT4577_91610C.1
agactcggactctgctcgcggatcctacaactcacatccatgaccgctagcatacgactccgccagcaccagtaagccaccaccaccaagcctggagctaacgccgtcgtccttgcgccgatatcttcatggcggagaagggcccaccagatgctcgccccgtgcgatgcagacccaggagaaccggatggaatacccgctggaagatgcccaaatgaggaggggcatcctctgtagcatccagctagggcgctctgtacaacacagcctcacgataggtacgcgaagtgacatagacgatagcaccctgcaataggcactatatcgttccctcggtgaggatggcgacggacacacagcctctcgagaacctgctccacctccacttgcaagatgaggatgacaacgagtcatatgagctgggaccatccaagcaagctcttgaacgggcttgtggtgtgacaaaaccgcatattgcttgctcactgaccagcaatgacggcatccagttgagactacaggtacagtgtctcatggactccattgctaatgttctcatctgatatgtcgaagagatgtagatgatatgcggctcaccgacacttttatcagatgcttgcactggggatgctgacctgctcacgatgcgctttgcaaactatattatgacaccgataacgccatgatactagaacagaactggatcatatgagtgtgaatgacatgcaagctgaagatgcctctgtattgtggtggcttc

SEQ ID NO: 175465 - DNA, 440 bp, Zea mays
  Clone ID: MRT4577_91611C.1
tcgtcatctgccataacaaaacgggtcgctccaaacgatttaatttttggtgatcacccatgctagaacacaccccttgaagcgcggcacgccaacggatagcggcttaagacgttcgacgccaagctggctatcttaacaaggcgtgctcgccagcgtaaggctggctactctacgctgggagcgttaacgactactacacactatatagggtgacaacatgcacatttactcacagtcagacgcgctgtttagacgtatggtaacgcgccagatgacatgacatgcttttgcggtctatgaacaagcttcaccttgagcggccgaacatgaagcacagtgttcgtccgccagaacaagggcgcttacgcggtctaggactacaagaagtggagcgcgttcacttgctagccagaaacgttctgctcagtcatagctag

SEQ ID NO: 175466 - DNA, 738 bp, Zea mays
  Clone ID: MRT4577_91612C.1
gtaattgctacttgtaatagagctctacacgccaatcttgttacacttttttacctcatagtgatctttgtgtattgcgcacaacattatgtaccttactacgttttctcagtaattgctacttgtaatagagctctacacgccaatcttgttacacttttttacctcatagtgatctttgtgcattgcccacaacatcatgtaccttactacgttttcctgcttattgaaatcctgtgagccctactcagtttttacctatcttttgattttacccatggagaaatattggctgggtgactgccatgaaggcatgaaccttaaaaaaagtttgttttttcaattctaaatatcttgtgacttatttatattgagcatgtgtttacaaataatgttctcatcagctcatgtggtattttaagctcgcctctacatggacgccggcctcgcttccgcagtcaccatgctccggacctgcaccgatgtcgtgcacctcgcgcacgttctcgagcagtttcgccttgcctggtgcggcaagctcgttcgggacacccgcgccgtcgctccgtcaagggcctctgcttcgacctcttcatcattaggggtggaaacagagctttcaatgtatgctggaggtgagcgatgtgatcgatattatccatgcttgataaattatgacaatggtgatggccatgatatatggtcaatattgtattaatcttttttcgagttttaggc

SEQ ID NO: 175467 - DNA, 384 bp, Zea mays
  unsure (1)..(384): unsure at all n locations
  Clone ID: MRT4577_91613C.1
ccgggcctgccccccgcacgccnccgcagccgacgttgacaccgacgcggacgccgacgncgacgacnaccaccacnccgacgganncggtgngacccacgaccggcgggagggccgggaggccggcaacaaggcacgggaagcgcgcaacgcgcgcancgagaagcacgcggacaaaaagcccaccgagaacgccaccaggggccnccncnaccccgccgacagcaaaaagncccgcgccgacancgacagcaacagccgccccaccggggacaagcacancgaccggcagaacaccgccaagaagcgggcgcagaggacgcacgacggcgacggggaccgccggggccccaagacgcagccccagcccaacaccancaagca

SEQ ID NO: 175468 - DNA, 405 bp, Zea mays
  unsure (1)..(405): unsure at all n locations
  Clone ID: MRT4577_91614C.1
ggcaaaagggacatcnacccctgcaccctgaccggcaccgggatcccccccatgcgaggcattggcaactaccgcggcatcatggggtgggacccctttaacgacgtgcagaacaactacancanccattttaagggcaggggcgttgtggcataccaancttcaanctacaacacctanccatccatatatatataggggctattcgtcaagttatccgactanatatacaaattaatataataagagccgatcatcgggagacgggcgcatntcanctattggctctttttctaancaaccanccgnagctgcgtnccctnggtanatttaattgcctanatttaatatggatattgcccataccgtatgtaattaaatcaaataaatgttaagttcatatcg

SEQ ID NO: 175469 - DNA, 1021 bp, Zea mays
  Clone ID: MRT4577_91615C.1
agcctcccgacaaaycgccccggcatgatgcgacgtgagacttstctttscrcccattgccagggcgctggccaggttttcaaggagaaggaccgatgcaagaagtgcaagggcaagcgaacaagccaagaaaagaaggtccttcgagatttacatcccccgaggttctatgcagggcgagcgcatcgttcttgaaggcgaggccgatcagcacccggaccagacgcctggtgatatcgtcttcactctggttgaagagcctcatgatgtcttcactcgcatcggccacgatttgtctgccgagctgactgtgacacttggcgaggctctatcaggtttctcccgtactgtcttcaagcacctcgatggacgaggtatccatatcgaacgcccccgaggcaagattctgcgaccaggtgactgcctcaagatccctggtgagggtatgcccatgaagcgtggcgaggccaagggtgatctgtaccttattgtcaaggttgagttccctgaggacggatggctgaaggaggactccgagcacgatgctctgcagaagatgctgcccactgctcccgccaacgttgagggctgaggaggttgatgaggtcgagtacgaggatgatgccgacattgagaagatgggcgaaaactcaggcgacggccgattcggcggtgactgggaagacgatgacgacgacatgggtgatggtcaagctcagtgccagacacagtaatcgagtacacactgcgatcagtaccaacgatagagtaggcctagaagtgcaaggtttccgccctgggttaacgaagcgacgactatttcaggatcaggggccgattgggcactgccatggctatggcgggctctcgatggaaatttatcaaaaaggaagaagactgaatatcatgttcggtttgggcatctcagggccagagatgacatgataccataccatacaaaccatgcttgggattcaggaggatagatcttgctctaggaaggcgagtcccatttcgtcat

SEQ ID NO: 175470 - DNA, 1946 bp, Zea mays
  Clone ID: MRT4577_91616C.1
ccgggttctcgaggtcaaactaacttcagagaccggctgctggttctccaccaaaccaaccaaccatgcgtccgtcgtcgcgttacccgccgcaacccgcgctactcgctctcgctctcgccctcgccctcgcggcggcggccccggagctgagacccctcgccgccgccgtcgccgtcaccgtcacgccgccgtcggagcggacggacgaggaggtgcggcggctgtacgaggagtggagatcggagaacgacgcggggccgaggcgtggcgccaccggcggcagcctcggcctgggcgacgccgacgccggcgaggacgacgacgcgcggcggctggaggtgttccgcgacaacctccgctacatcgacgcgcacaacgcggagggcggacgcggggctccacggcttccgcctcggcctcacccgcttcgccgacctcacgctggaggagtaccgcgcccgcctcctccttggctcccgcggccgcaacggcaccgcggtgggcgtcgtcgggagccgccgctacctgcccctagccggggagcagctccccgacgccgtggactggcgcgagcgcggcgccgtcgccgaggtcaaggaccagggccaatgcggtgggtgctgggcgttctcggcggtggcacgcggtggaagggatcaacaagatcgtgacaggcagcctcatatcgctgtcggagcaggagcttatcgactgctataagttccagcaccaatgctgcgatggcggcttaatggacaatgcttccgtgttcatgatcaagaacggcgggatcgacaccgaggccgactacccgttcactggccacgacgggacgtgcgatctcaaactgaaaaatacaagggttgtatccatagattcgttcgagcgtgtgcccatcaactacgagagagcgctgcagaaggccgtggcgcaccagcctgttagtgccagcattgaagcatctcggcgcgcgttccagctctacagttctggcatcttcgacgggagatgcgggacgtacctggaccacggtgtgacggtggtggggtacggcagcgagggcggcaaggactactggatcgtgaagaactcgtggggcacccagtggggcgaggccgggtacgtccggatggcgcgcaacgtcagggtgagggccggcaagtgcgggcatcgccatggagccgctgtacccggtgaaggagggcccgaacccgccgccgggcccgacgccgccgtcgcccgtgaagccgcccaacgtgtgcaacgcggagtactcgtgcccggaggccaccacctgctgctgcgtctccgagtaccgcggcaaatgcctcgcctacggctgctgcgagctggagaacgccacctgctgcgaggaccactcgtcctgctgcccgcacgactaccccgtctgcagcgtccgggacgggacctgccgtaagagcgccaacagcccgatgatggtgaaggctctgcagcgcaagccggcgatgtatactggcggcggcggcggcggcgagcaaagcgggaggagcagctggtgaggagattgagactgtggtggtgcgtggcgtgtactgttcatcgttcagacagatgacttgctggccatgctgtgggctcaggaactgcttcttcacagtggcgatgttctgatctgtaatgcacgaagcacgatactatttgttgtatatgtatgtatgtgtaactacagataagattaggaacggtgtgaaagaataaagaaaccgatggaataagtgatttgggaacaatctcagaatcaatttatgcagccctttaggataacttcgggaacagtcttgcacaaacaacaaggtaataatgcattcactcgtcgtgttatgtaaaacatgttctccagaacaaagctcagatttgcagtgaatatattcctgaattcaagttcgaaactaaaaaaaaat

SEQ ID NO: 175471 - DNA, 245 bp, Zea mays
  Clone ID: MRT4577_91617C.1
cgcctgcgtgtaccgggctcctattacacggtcgaccttgtctttcttttttctaactatcagcatccatatgtagtactgcactagcgctaacttaaccccaatggaggcacacacatatggccgtcctttccctccttgctgtttgattaagcgttgctagccgctactattggttccacattgctgacaacgatacctagctaccttgacagccccatactatgggatacaccgactatcac

SEQ ID NO: 175472 - DNA, 115 bp, Zea mays
  unsure (1)..(115): unsure at all n locations
  Clone ID: MRT4577_91618C.1
ctccgnaatacctcatgttaccagctgttgcctgtgctgctgggnatacgtgcggtcagcggctggnaaaagtcattggtactgnancacacanacatcattcgcgnttccgttc

SEQ ID NO: 175473 - DNA, 694 bp, Zea mays
  Clone ID: MRT4577_91619C.1
gggtacctcgaggccggccggggcgcatcatgatcgtctccccatattgtcgctgcaacagactgccgacccccgtcttgagatcctgcttccacctcaaccaccctggtcttctagctcagacttcaccgttgggttataaatcgcaagcgctgcagcctcctcgtcctcccaaccctagagctctagacgtcgagctcacccaggacctgactcgtggaaaagcagagaggagcattgccacctggttactcgcccatgctgtcgttctgagcgcatggtcgagtcaaggtgcatcgcgggtggttggtgaagtcgttcatgggctcgacggcaaggattgaccattggggcggtggagattgctcaccggaaccactgcgccgtcgtggagctgcgttccatcatgggcgattgtctctacgcccgaatccgcgatgagcaagtgatcgaggacctcggtaccctgtgggtggaaaatactgagcaggaactcgttgaaggcaagttgtgcccttgatcactcttcgttacctaataatgttcgatgttaatcactgtgacttgctcatgttaatttgatgggatctaatagctttccctagcattgtttatcccccaccttgcaaacagatgaattattggatagatttgctattgctctacctgatttttggaaataatgttttattag

SEQ ID NO: 175474 - DNA, 316 bp, Zea mays
  Clone ID: MRT4577_9161C.1
gacatgcacggctcggataggttggctcctatagagcggacggcccgccctttttttttttttttgttcatgtttccatacgaaaggtaaattaacttaccaaaattagaggttccggcacgctgtttttcacatatagggctgcctgaacatcttccggtttacaccggcttgacccaaagcgaggccgatgtgtgataggagaacagacttatcaattatatatcttcatataaaaatttatttaaaccaaccgggggggcagaaattaatttaaaaataagcacttctctaaaagatcggggctgttatccct

SEQ ID NO: 175475 - DNA, 185 bp, Zea mays
  Clone ID: MRT4577_91620C.1
gacagagccacgcccggacccttgaccgatccgttttgcagactagaacacaaccctggtgggcgcatgatgttccacactttgcagaggcatgattaaatttcctatgctagacctcaataactacgaacgcctctgcatgctcaagacgatcgtgtctaatctgatgtacctcgatcgcatcc

SEQ ID NO: 175476 - DNA, 245 bp, Zea mays
  Clone ID: MRT4577_91621C.1
actaaaccatctagcactgctctgctagagaggaggatatttcaccgtccttgcggagcaaaggctcaaaagtatcgtgtggagaacttgttcaagggaccccctgatgatgcgcattccaatgctctcagaaactgcgatccagagggtcctcttatgctgcatgtttcaaagacgaaacctgcatcttacaagggcaggttctttgccttctgtcgtggcttcttagggaaggttgctactgg

SEQ ID NO: 175477 - DNA, 492 bp, Zea mays
  Clone ID: MRT4577_91622C.1
ttttttttttttttttttttttttttttttttttttttttttttttttttttttccccccgcaaaaaaaagggcgaaattttttgggcccccttgcttttaaaagaaaaatttccttgcaatcccttttacaataaggcccggctgggcctatgggattttttttgtagcctaaaaccacccaaagggggaccttggaaattttttgatttaaagggggcttttttttttttgtgtaaaaaaatcccacccttggcaccgggtttgaaaaccccctttccccataattgtttttgggaccaaagaattcccccaaatggttttggatttctgcccctccaccatgggcagtgtttaaaaaaaaattggtaagggggggggcttttacaatgggcccccggaacaggatacattttgaagggggtttttctacaaaatcttttattttagggtgggggccttgcaaaaaaaatttgccaacctttttttttgg

SEQ ID NO: 175478 - DNA, 250 bp, Zea mays
  unsure (1)..(250): unsure at all n locations
  Clone ID: MRT4577_91623C.1
ggganttaaacactgtttgttatttttattgaaactgtaaatacaaacaacacatttcatttcttttaaccccattcacgcacttgggatgtaaaaaggggaatttgatttctttggagcccggacccacccccaaccggggggggtaagcagaaaaaaacacgcgtttccgcccgaaaaggacactcttcttttccaggaaaattttaaaaacaggcacaggggtgcaaaatttccccgccccccgaaa

SEQ ID NO: 175479 - DNA, 158 bp, Zea mays
  Clone ID: MRT4577_91624C.1
gaagcattcattttctctttttcagtatcatttaatgctgtcttgttacgttttttgtttttagcaattttggcctcctatttattgcattttactgttgccccgtagagaaaagacaatggccttactttcctaattccccaggcccccattttaaa

SEQ ID NO: 175480 - DNA, 302 bp, Zea mays
  Clone ID: MRT4577_91625C.1
tgacgcctgggaccgtcagggctatgcaggtggatgtttatccatttggaactctatgccctagcccccgggtccatatcttggacggactctacactatcctgctgaaggtggcgctacaagtgtcacgagggagacagctcttgagctacgattagtacagtgacgcgggggctctgccgatgttgacgcaggacgggccagtccagtcgacataccttgccggagggcgctctgggactcggtgggggtcattgtgaatgactgcaccgccgagtatgtgatgcagctgggcaggaact

SEQ ID NO: 175481 - DNA, 877 bp, Zea mays
  unsure (1)..(877): unsure at all n locations
  Clone ID: MRT4577_91626C.1
aagttcccgtcgtcctcgtcctcgccttccccatcaagctaaaacctccctcttttcgtcgaatccagccaccatgaaaccctaagaccaccgtcctcccgaatcctccattgccctccccgatgcaggcgttcgcgcgcctctcctcccccgccgcctccagaaaggtggtatcgggcgtctctggcgcggtcacaaggccgtgctaccggacatggcggtggaaggcgcatgcggcgccgctgtcggctccgggcccacccaagggcaagaagagggaatacatatccaagaatgaaaggaaggctaggatgaaggagtttattgagggttatcaggcatcaaatgacggtagatttccgactatgcaaatgattcgtcaaagtgttggagggggtcactacacaattagggatgtactctcggaagtgaagtataaccagataaagtttccgtttgataagtctaaggcagcccagcttcaggagacagctgaaggtgctgagcagtcaaggccagaggaggacagtgggaacagttcattcaactctcagagctttaacggaaatcaggatgaagatgacacactccaatcccagaaagattctcctgctggcactacaatcatggaaaacactgaagctttgatgtctttggacgcaaaggaggcgaagttaccgctatataactccgaggcagcccagcttcatgagacaggtgaatgtgctgagaaatcaaggctcgaggagagtgngagcagtacattgagcccagatgacacactcctctcccagaaagattctgctatgggcgctacnatcatagaaaaacatcaaccatttgggatctctagagtcagaagactcctctcattaca

SEQ ID NO: 175482 - DNA, 391 bp, Zea mays
  unsure (1)..(391): unsure at all n locations
  Clone ID: MRT4577_91627C.1
ggaggggaaaaaacagtaaataatcgggggcaaacactgggtagtctacatggggatgaagctgagctgaaagagagggacccggggagaccccaaaccctaccatcagcctcacaccgtcacatgtgatggaaaaagctgtctgaaaaccccgggactttgactgaggccgcctgagggaaacctcattattgaggctgtcttttctgggggggggggggggngggggggccccccaccccaccccacctaaaagctaagcttagggggcggggccccaaaactgggcgggggggttagtccggaacttccgggcgagggccttaatcctttccatggcctcgccgggaatgtaaaaacccaaaacctcaaagttttcctggagcctttc

SEQ ID NO: 175483 - DNA, 334 bp, Zea mays
  Clone ID: MRT4577_91628C.1
tcccacgcgtctctcaaaaaaaaaatttttctttttaaaaaaaaaaaaaaaaaaaaaaaaaaaggaccaagagttaataatacaaggttaaacacacctacacacacactacataactcttctataatgtcacctaaatctaaattaatgtgcctttgctttacaaacacaacgactaaaaaaaaccctaacgttacccccctctatcttaattttactacattcccctttccctttctggcgtaatagtaatatagatccaggcccatctccctttccaacactaacaccattctaaatatgaaatgtgacacaccctgtacctgtacattaa

SEQ ID NO: 175484 - DNA, 473 bp, Zea mays
  Clone ID: MRT4577_91629C.1
gggaataccacggcccagttcgattaaaaccaaacctttttcccacccccggggaaaggaaccccacaaagcttacattggggtttcacaacacaacacaacacaaccccccgttgtttttgtcaaatatcaacagcccaaaatgctgagtcgcatctgaaaaacccacaggaggggtcgagctcaaaataacaaggctcccgacccccccctaggggcactaaacgcggggtagccccacattaacattcacaaaaaacgggtttgcccctaccttggctggaggggggcacaaaaaggatgggtttgggccaaaagtccaaatgaaggcaggccggtttgggtaccgcccataaaataactcatgggccgattcccaccccaaaaatgcactgggcgaaatgagtcaccaacgggtccgcttgggaactgttactcagggtaggagcaaaactttgcaggtctgaattgaa

SEQ ID NO: 175485 - DNA, 104 bp, Zea mays
  Clone ID: MRT4577_9162C.1
gttggggcggtaacaagaaggaaggacggggcatgttcgattgatggccaagctggttggacacgcatacatgtgtttcatttcatatattgtttagaatttat

SEQ ID NO: 175486 - DNA, 395 bp, Zea mays
  Clone ID: MRT4577_91630C.1
gggagctatgcattagtaataatcaattttcagaaaataaagagtattttccctatttttataaaaaaaaaaaaaaaaaaaaaaaaaaaaaaaaaaaaaaaaaaaaaaaaaaaaaaaaaaaaaaaaaaaaaaaaaaaaaaaaaaaaaaaaaaaaaaaaaataaaacataaaagataaaaaaaaggggggggggtttaggaggtttaaaatattattaacgtgtaaattagaggggggggcttctttaatagggtcccgaaatttaacaccgtgggccgggttttaaaacgggggtataggggaaaaagtggggttcaccaaaataatttttttaaaaaaaatgccatttgaaacaagcggggtctataaaaaaaaagccagaattttgagccttt

SEQ ID NO: 175487 - DNA, 434 bp, Zea mays
  Clone ID: MRT4577_91631C.1
catcagaacgcccggtttcagatctcttgaaagatgcaggtgaacgaacagatttgactccaggacggtgcttcctatatttacaggttttgtccaagcatagcatgcggcccagaataaaattctggaatttcaatgccgatctggttcgttcgggcatcagaagcccgggctgaggatgttgagcaatgacactctggtgtcgaccagtgctcggaacaccttctcgccgctaccgtcgacgttggcgatgcagcgctccaggttctcgtggcgctcgaacgccgccttccgcgccctctcctcgggcttcacgcgtgcctcgggccggaactgcgcgggggaagactcctcgtcctcgtcgacgcctttctgcttctcggcggagcgccgcttggcgcgcgacatccagcgcaccagcctcgtgccgaatt

SEQ ID NO: 175488 - DNA, 320 bp, Zea mays
  Clone ID: MRT4577_91632C.1
agaagtgatgatctctcatcaagcctgtgtggtgttaccatcgaaaacgggaccgctgaactttttcctcactattgggcgcgttgaagggactttttgtggagcctggcacccaggaatgggggaactgagtcgaactacggtgccccaaattggtcactgggaccttttgcgtactctttggcttgcttttgaggctagaaactggcttggccaccggggcggacgaaacgcgcagccacaacggcggggcctgcgcgcagtgaccgttgccgcatagcgcggggctgcgatgcgggggcttacccacacctgattac

SEQ ID NO: 175489 - DNA, 287 bp, Zea mays
  Clone ID: MRT4577_91633C.1
cttaacgtgtacaatctatcgaacagcatacatgtgttgccaggaaggctctggcgattacaaactgttcataggacaaatcaacaaatagccggtgagatacattcagccacatgctaggcagcaaacctattaagaggggaatctcctgtttatatacaatttttgacccaaaaagccatggacaatctgcgcaaattgatctgtgagggtggagagcaccactttccactcctgctatcacaggtgcggtatgaaatgtgcacgctcatatatagtagccaagc

SEQ ID NO: 175490 - DNA, 312 bp, Zea mays
  Clone ID: MRT4577_91634C.1
cccattaaaaaaactccaaaataatcgggtttcaaattttgctccaaggttcccgcccatttgtaagaacaaagggtttgccaatttaccgcaacccaaagtgggggaagttgagagatggtttaaatcaaggggggggctacaattccttttatatacacacgaacggcctgaaatcacctggttcctttccattttacacggaaaaccaataaaggtgggcattagccaacggggtttttttggctttgaacccaacgggaccgttttggcaaagggggcatcggttatttttccccgccttaggcgggg

SEQ ID NO: 175491 - DNA, 1992 bp, Zea mays
  unsure (1)..(1992): unsure at all n locations
  Clone ID: MRT4577_91635C.1
tccgcccggaaaaaaaaaaaaaaaaaaaaaaaaaaaacccgtcccggccggccgccggccgggagcgctggactcccccctgctctctcccagtcccaggacagtcccgtcagcagccacttccccggcccctcccgctcctgctcgccggaggccgggccggcggcgatggggcacggcgctagctgcggccgaccaagcgaggaggtagacttcttcggcgcggcgcagtccggggacatggcccgcctcgccgccgctcttcgctcccgccccaccttgctcagccgcaccacgctcttcgaccgcctctccgcgctccacatcgccgccgcacacggccacctccaggtggtctccctggcattggatctttgcgtgcaccccgacgtcgttaaccgccacaagcagacggcgttgatgctctcggcgatgcacgggaagaccgactgcgtccgccggctgctcgacgccggcgccaatatcgtgatgttcgattcctcgcacgggcggacgtgcctgcactacgcggcgtactacgggcacgcggactgcctccggaccatcctctcggcggcggccaagtccgcgccggtctcggaatcctgggggttcgcgcgcttcgtgaacgtgcgggacgacaccggagcgacgccgctgcacctcgcggcgaggcagggctggcggcgctgcgtccacgtcctactcgagaacggcgccatcgtgtctgcttccagtggcgccttcggattcccgggcagcacgccgctgcatttggccgcgcgcggcggcaacctggactgcgtccggcaactgctgtcctggggcgccgaccgcctccagcgagactccgtcgggagaattccgtatgaggtcgccgcgaagcgagggcacgtcgcgtgcgcggcgctgctgaacccgtcatccgcggagccccttgtctggccgtccgctctcaagttcatcagcgagctggaacccgatgccaaatctttgctcgaagcagccctgatggaggccaacagagagagggagaggaggatcctgaaaggcgccaagaatgcattgccctcgccatcgcaccccgatgacggcgctcatgacaccgccatagctgaggctagcgacgcggaggtgtgcagcatctgcttcgagcaggcgtgcagcatcgaggtccgggagtgcgggcaccagatgtgctcggcgtgcacgctggcgctgtgctgccacgccaagcccaacccggcgacgcagtcccagccgctgccgacctgcccgttctgccgcggcggcatcgcccggctggtggtggccacgcggacgagggccggcgacgacgaggagcggtgcaagctggagtctcccaggcactgccggtcccgccggtccatgaacctcagcggcgacgcgggcagcaccagcaccctcatgggcagcatcgcctcctccatcggcaagatgggccgccggcgaacagagagcagcgagcaggtcgacgacaagccgtagcaaaatcattgtttcctttcatgcatccatccatgcgtaatccacatgaaatcggtgcgtatgataatcctgcaatgtcggcgtcgaacaaggcagcttttgtagattattttttggcaagtgagctattcacctgtgtaggttcattcaagagagagtctgtgcgctgacgtgctgtctaggctagatccgatcagcgatgatccgaataagcagctcgtccttgcctgtcagcccccatgcggccatgctccccgtggtccgtggatggagttcttgaaaggttgctgagaaaacatgcctgattcgcagaggcctggcccggcatggcaatgagaaacggtacaaatccatgaggctgattcatatatgatttgcccgaataggggcagcgccgctcaggttttggccagttgccgctctcagaatttagtcccaatcacatcttgattctggttctgaattnnnnaaaanaaaaanaaa

SEQ ID NO: 175492 - DNA, 107 bp, Zea mays
  Clone ID: MRT4577_91636C.1
ctggaatctctccccgggcgggctcatcaatagaggataaaacctgaaccctgggccctttaaaagcccaaccggccatattcaaaaacccttatcgaaagcatgaa

SEQ ID NO: 175493 - DNA, 244 bp, Zea mays
  Clone ID: MRT4577_91637C.1
cgcggccagcggcagcctgccgctgatgcagtagcttcacgccgtgctggtggaccacgctctcagcagcggtctacgcggatcgggagccctccgggttctccaagatcaccaggttcgaggaggagctccgcgcggtgctgccccaggaggtggaggccgcccgcgtggcggtcgccgatggctactccccgtggcgatccggatcgcggacagccggtctttcccgctgtaccgcttcgtg

SEQ ID NO: 175494 - DNA, 197 bp, Zea mays
  Clone ID: MRT4577_91638C.1
aacacacaatgcgaatctcacttattcatcattccttcatctttggctaccaagaaatcacccccacttgctcgttttgtcctaggaaacaccgcccgtatgcgggcaccattgcagagtgcttactatctgttatttaaaagatggcacctccaactgatgggttgtattaaggcggggttcatacataaaaactg

SEQ ID NO: 175495 - DNA, 273 bp, Zea mays
  Clone ID: MRT4577_91639C.1
atgtctgccagaggaacacataaggttccatgtgtgcagtttgctttttctgatgacactgtactatctgtgtctgctgagcaaacgacagatatgcggctttacccaaacagaaccagatgcaccatcttgggtaaaacacacagaaggaggtttatcaacaagtggtcgcggaggctctcagtttcgctgcggcaccataagtccttaaccatgacaccatcaccgaactggcaccaacacagaatcccgcatggtaaatctagattgtga

SEQ ID NO: 175496 - DNA, 2367 bp, Zea mays
  Clone ID: MRT4577_9163C.1
tccgggacgacccagcgtgcgcgacccctttagtcttcgcctcatggaggccgcgcggggccgacatctccctcggcgtcaagctcggagccagtacagccttgggggagccggtctaaatcaggaaccaaaaagcacagagaaagtactctgatggaatgacaatttggattatccaggctgttttgcaatgacagaactacatcatggatcgaatgtccaagccctacagactaccgttaggtatagacgaaagcccgtacggccgagggcctggactagcctacgggggcggcggatcctgaacagccaaaaatgtacgaaaccactgctgagttcccaaagggcggcctgtcccgggcccgccgcgcaccgtctgctaccgccagctgcgcgcgctcgtgcgcgaggccggggtgcgcccgctcacgctcatggccaccgaccccgccgagtacttcgccgtcatggaggccgccggcggggccgacatctccctcggcgtcaagctcggcgtccagtacagcctctggggtggttctgtcataaatctaggaaccaaaaagcacagagataagtactttgatggaattgacaatttggattatccaggctgtttcgcaatgacagaactacatcatggatcgaatgtccaagccctacagactaccgctacatttgatcctgtcactgatgagttcattattaacactccaaatgatggagctattaagtggtggatcggcaatgctgcgcttcatggaaaatttgctactgtctttgcaaggttaattttaccccttcaaggaaaaggaggggaggctgctgatatgggcatccacgcgtttatcgtccccatacgggaccttgaaactcacgctgttcttcctggaatcgagatcaatgactgtgggcacaagatcggcctaaatggtgtagacaatggtgcgctgaggttccgctcagttaggatacccagagacaatcttcttaatcggttcggtgatgtgtcacgggatgggaaatacacgagcagtctgcccacaattaacaaaagatttgcagcaacccttggggagcttgtcggtggacgagttggcattgcttactgttctgtgggtgttctcaaagtcgcagtaacgatcgctgtgaggtatgctctgctgcgccaccaattcggtccacctaagcagcccgagatcagtgtgttggattatcagtctcaccagcacaaactgatgcccatgttagcgtcgtcgtatgcgtttcacttcgccacggtgcagttagtggataagtactcggaaatgaagaaaaccaacgatgaggaccttattgctgacgtgcatgttctttcgtctgggttgaaagcctacataacttcatatacagccaagtctataagcgtatgtagagaagcctgtggtggccatggctatgctgctgtaaatcgttttggagctctgcgcaatgaccatgatatattccaaacgtttgagggggacaatactgttcttctgcagcaggtcgctggagatctcctgaagcagtaccaggagaagtttaagggagggacactttcagtcacctggaattacttaagggactccatgggtacctacctgtcccagcctaatcctgtcactgcccgatgggagggcgaagatcatcttcgggatcctaatttccagctggatgcattcagataccgaacgtctcggttgctacacagtgtcgctgctcggctacagaaacacagcaagacgcttggaggtttcggtgcgtggaatagatgtctgaaccatctgcttacgcttgcggaatcacacatcgagtccgtcatccttgcaaagttcattgaatcggtgaaaagctgccctgacgaaaaatcacgggaagtattgaagctggtatgcgacctttatgcgctcgacaggatttggcaagatatcggaacgtatcggaatgtagactacgttgccccaaacaaagctaaggctattcataagctgacagactacctcagttaccaagtgaggcttgtggcgcgagaactcgtcgacgcatttgaccttccagatcttatcatccgtgccccaattggcatgcaatcggaggcctatgcacagtacacccagtatgttggcttctagtagagtatatacatataataagtccgagaaatatattacgaagttgcaatatagagatagatcataggtgagcaaataagtttcagtagtacatgtaaactgtaaatgtaaagcagtggatccgtaaagcactggctccgtgtgaataaattgtcagattatttttttgtctgaattgttttcaattaagatttttatcagtaagctaaccaca

SEQ ID NO: 175497 - DNA, 1615 bp, Zea mays
  unsure (1)..(1615): unsure at all n locations
  Clone ID: MRT4577_91640C.1
ggtttcttcctctgttgccacttgtcaatcttaattggatgaactgggactgctacattcggtcggtcaataatatcctttacggcaatttctatctcaccaaaagcgttaattaattccttccttgttgctgtagactgcttcgcctcagagctggacatgcatggacctgtacgtgttcgcaacgccctacagggtagcctgggactactacatgaggtcgaacgagaaccacaccttcgagatcaaagcgtgggaggacgcggcagagatggaatacgtaaagcagcacgggatcgccgtcttcctgatgccatctgggatgcttgggacgctgctgtccttggccgacgtggcgcctttgttctccaacaccggctggggccaggacgccaacttggcgttccttgggaagcacatgggggcgtcgttcgagaggcgtcgttccgcgaacacaattataaggagggaggacgtgcggtcgggcgacttcttggcgctctccaagatccggggccggtggggcgggttccagacgctggagaagtgggtcaccggcgccttcgccggccacaccgcggttgtcctcaaagatggtgacgccaacctctgggtcgcagaatcaggctacgaaaataacaagggtgacgagatcattagcatgactccgtgggacgagggggggggatggcgctcaaggacgagtccaaccctcagatagcgcttctgccgctgcaccccgatgtacgggcaaggttcgacgaaagcgccgcgtgggaattcgcccggagcatgtgcgggaaaccctacggctaccacaacatgatatttagctggatcgatacggcgtcagacaattacccgcctcctcttgacgccaacctggtaatggccattatgtccatgtggaccagactgcagccgcgctatgcttccaacatgtggaacgaagcacttaacaagcgacttgggactgagaaactggacctccatgggatcattagggagaccgagagacggggcctgtccttcaaccagctgctcaccgtgcctgagcgagacgactgggagtacagcgacggcaagtccacgacgtgcgtcgccttcatcctgtccatgtacaaggcggctggagtcttcgctccctacacggagtccatccaggtcaccgagttcaccatccgggacgcgtacatgctcaagatcttcgaggacaaccagacgcggctgcccagctggtgcaacgcggcggcggacggcctccccttctgccagatcctcggggagtacaagatgggcctgccggagtacaacaccatcgagccctacgccaacatgaacgagaactgcccctcggcgccgcccacctacagccgcccgtcgcgctgctagctcatcgatcggcgttgcctggggtgtgtgtaaactgtaaactaagctagctaagggcctgtttggggctgcttattgaccggcttcttattaactttaagcggtgcagcagccaaacggtccgttccttgtaccgcggtttaaaccagcgctcaacgaaacgttcgtaaaatcagtggaaatcagacgcggnngagcagggcgcttctcaccgcttatataa

SEQ ID NO: 175498 - DNA, 742 bp, Zea mays
  unsure (1)..(742): unsure at all n locations
  Clone ID: MRT4577_91641C.1
acgccctgcggtttcggtccggaattcccgggtcgacccacgcgtccgcctctatgggcgagggacgagggcaggaagagttgtggccgctgatatgtgggcttgagctttgaggagggacttgccttctgccatgtcgtctgaagaagggaaactcttcgtaggagggctcaacttcaacaccgatgaacaggcacttgaagaccacttcagcagctttgggcctatctctgaggtggttgttgtcaaggaccgggagactcaaagatcccggggttttggcttcatcaccttcacaaacccagagcatgcctcagatgcgatgagagctatgaatggagagtccctggatgggcgccaaatccgagttgatcatgcaggaaagtctgccaggggatccagagggggtgcctttggtgggcgtggtcgcagttactctagaggtggtggagaccagggatatggaagtggaagatatgacagtcgtcctggaggatatggatatgggtatgggcggtctagagactacagtggcagaagccagggtggctatgaccgctactcaggaggaaattacagagacaattatgancactgagatggggcatgcacacaaaatatacacaaggaataacacttctgatccaggatcgtccttgcanattgctgtatttataaagatttttggagctgcgctgaaacgtctgttttagtacatcaagttctatttttgaattgagct

SEQ ID NO: 175499 - DNA, 244 bp, Zea mays
  Clone ID: MRT4577_91642C.1
ctgacgcgtgtgctgactcgtgggtcgattgaatatcatcggcttatggatatggagtggacaggttaattgtacaaggttgtctggcctgaagtacccaacagtcaataccaagatgtacttacagtataacaagatggatagacttgaaccttacgactccttttctgatacctttgtttataagctgatcatgttactgtgtttgatacacccatgatgggtacattgagaccatttatgt

SEQ ID NO: 175500 - DNA, 216 bp, Zea mays
  Clone ID: MRT4577_91643C.1
accggcctgaccctgagtgctcgaccggtggagggccatccttactttcagttggaatcggaggacattgtggccccaattttgaggttaataacctacaaccccaaggtgaacggaaaacggttggggcgtttcaagtcaacccttttcggcaggtcttggaggtggtgccccaactggttttggtccgcaaccttcatcacctgttctataaat

SEQ ID NO: 175501 - DNA, 2304 bp, Zea mays
  Clone ID: MRT4577_91644C.1
tctgtatgagcgccgagaatcgagtttgcgctctcctttccggctttccgcccaaacagccgtcgggcgtcccacggccgccgcccctgccggagatacgcgtagccgggagttaagggatgagtcctcaaatgctgttattggaaacatcttaagttagagtaagttgctgaaactatggaagaggttcaaaactgtgtgatgaagctgcggagcaatccaaggcggcacagggataaagtgtatgttggctgtggggctggatttggtggagacaggctaatggctgcttataagttgctgcagagagtcaaggagcttaattacctagttctcgagtgtttggcagagcgaactctggcggatcgataccgaattatggtgtcaggaggcaaaggctacgatcctcgggtcaaagagtggatgtctttgcttctacccttggcttttgaacggaaagtttgcatcataactaacatgggggcaatggatcctcttggagcacagaaagaagtactgaacctggcatctgtcttgggactggagataacagttgccgtagcttatgaatcatcctttgaaactcaaggaagccctgtattgtccgatgaatcaacaggagggagagggggatgtagcacatatcttggggcagcttcaattgtacattgcttggaaaactataaaccacatgttgtcattacttcacgggttgctgatgcttcactcttcttagcacctatgatctatgaattaggttggaattggaatgacacacagttggcacaaggaacattagcaagccatcttctagagtgtggctgccaactcactggaggatatttcatgcaccctggagatgcatacagggattttccttttgaacaacttctggatttgtctctcccatttgccgaagttagttgcagaggagaagtcattgtcagtaaggtagatggcagtggaggccttttgagcccccatacatgtgctgaacagcttctttatgaagttggagatcctgcaaactacataactcctgatatggttgtagatttctgtaatgtacagttccatcaaatatcaaaagacaaggtcagctgtgatggagcaaaaccttctaatgcttgttgccctgagaaactcctgcaattatctcctactgaaagtggatggaaaggctggggagagatctcatatggggggcatcaatgtttaaagcgtgcccaggcagcagaataccttgtaaggtcgtggataggtgaaaggtacccaggcattaatgaaaaaattgtctcatatgtcatgggctatgatagtttgaaagctattggaggtgatgaggatagttacttggccaagcaagtattggatgtaaggcttcggatggatggtctcttcgagcttgaagagcatgctgttcagtttgtcgaagaatttattgctctatatacaaatggtccagctggtggcggtggaatcagcactggacacaggaaggaaattattctgcaaaagatgctggttgatcgggaaaacatcttttggcgatcgcatgcaaagaaggcgagcattccctgcctgcataatcaagctacatattctgaaacaggtcaggcacgtatttcacaagcgcaacgaaacccaacatgtcgtacaatggccattcaacactttgaagcaagcacggagaccccagcatcccctgctccagctttacctgggaaaagggtcgctctctaccatgtggctcacagcagggccggtgacaaggggaatgatatgaacttctctgtcattcctcactcccctgctgacatcggccggctcaggtccgtaataactccggattgggtgaagaacgctgtgtcacctctgcttggttcgtcttcgtttcctgacgagcgagatgttcagcatcgaaacaagctgcttgagcttgtcaccgtggaaatttactacgtcccgggcataagctccctgaatgttgtggtgaggaatatcctggatggtggcgtcaactgctcgaggaggatagatcggcatggaaagaccttgtcagatgtcatattgtgccaacaagttatcctaccgccatgattgtcaatattcttatccgtattcgaattaaaatatggtaaatagtatctgtattcgaaccaaaatatggtaaatagtgacatccgaatttgtatccgtgcgtatttgatccgaatacatctctattaattgactacagtacccactataaacttatgtgtattaatattattaaggtttgttttttaaaaaaaaaaaaaaaaa

SEQ ID NO: 175502 - DNA, 271 bp, Zea mays
  Clone ID: MRT4577_91645C.1
cccacgcgtccggtcagtgcccctgccgccggtgaccctacctaccattgcgatcggtggcggaagcccgagcccgacaaaaaaggacccccgaaggcgggcccaacggcttcggcttccccgacgcccacacccaagcccaagccggccttggaccagtgccccatcgacgcgcttaagcttggcgcctgcgtggaccttctcgggaaccaagtgcacctcggggaccccaacgtccaatgctggccgctcgtgaaaggcatcgccgggc

SEQ ID NO: 175503 - DNA, 181 bp, Zea mays
  Clone ID: MRT4577_91646C.1
ttgaaatctgcactgcgcgctattaggtttgggtacaagctcttaagctcacgggcccgggacatttaccattcgatatgctaaaaatctacataaaatattgcaccacagagctccgccactactgctgcatccaaccaatgctgctctgactatagtacatcatatcgccgatgtactt

SEQ ID NO: 175504 - DNA, 1519 bp, Zea mays
  Clone ID: MRT4577_91647C.1
ctcgaggccggccgggacggcatacgaatccgttcctgtctgcacctcctcattttcacctccacccacccgactcggcggcctgcgctcgtccgcccgttcctcgccggcgccgtctcttccgcagaccggtccgtgggtcgagggagccgcttcttcctccagcttatggcagacagaagtgatggaccgattgggaggctcccagaacatcttattatagaaatactcattcgtttaccggtctatgagtgggtgcaattagcatgtgtcaacaagcattgggcaagcatatttcaaggagaatgcgtgtggcaaactgctattgcaaggaactggccatctgctggtctccggaaacgctggcctgggccaattcctagaggttctgctaggaggtgagttcggtaacataatattgttgtgtcctcttctaaattttggtgttgaaaacagtcaaactactgccaaatgctgctctctagtttccatgagttcctgaattaatgatccttgttttattagattacatgtcctttgaatttactttaggaaatttcaatttgaagtggagtaatcacaataaactgacatattctcctgttcagaaaaaagtgaaagaaaacaaagaagtggcttgtgcaatacatgctcactagatcagaattcagaactgtaggccgttctcttaagatattatctagctctagtgtcttggacatctcatgaaagttgtttcttgggttcttttaggagatttcaagcactgtatgtcagtgagaacttagtaccatctggtggggagattgatgagcttgttggtcacacttatctctacttaaaagaacagcttgagcgtcctgtcatgcctccttccagcatacttcatggcaccatcattgaccaattcattgcttgcggcaatacaggagaaaaggcccatgatcttgcttcaaaaatatggcttgcagtcattgacagcttggaagaaaaccagcaaactttcttactgttaaaacgcgtggcacaagaaggagaatttttccttccgtttccatactccagatcatatagggtactatggagggtgtttgacaagctgttcaccgacttccgcgactgtttcagtggggctgaataccatgatgctctatcaactgctaagtctaggtttcagccggtgccttttacatggcttggccattaatgcactgttgttgctcctgttgtgcactttacaagtatcagatattcagataaagtagtgatactttccacaagggcaaggcctgatgcaaaagagtggcacttccagtggacgattcttgtacatttagcatattgacagcttcaagagcattaaactgttgtttgagtgggaatactcatgttcttgtaagtccttgaagctcctttgatacaactcgccatctgtacagttagttcagtgtatactgcactttcagcaatacctggtttctatattttgagattccaatagtactgctgatttgttttc

SEQ ID NO: 175505 - DNA, 534 bp, Zea mays
  Clone ID: MRT4577_91648C.1
cctcgattctcggccggggcacgaggaggctgaattgggggcggcgacattcaaattgttggcggcagcgtctgaatcgtcgcctgcggcggcgaatctgagacggcatcgtctcaatcgagggcggcagcagctggatggcgggcgagagaggcagcctagggctgccagaggaagaactatatgggctggctggtgggctgggcctcctaccccttccttcttctttttttcttcctcctccatggggctgctttgctgattctcaggctgataaggcgtcgccttgctcgccctaggcgtcgcctaggcgtctaggcggtggtccattgccttatctcgccttgccgccttacgaaccatggttggatctaaaatgcatgaccatgattcaatacctgtaccatgcgcacaccaatggtcatgtgcatcaaacgttcatgtgtgcctgatatgttctcataacagaactacagaaggcaaaataaaagatgatcaagcctaatattccctctacgtgtgaccggattgaac

SEQ ID NO: 175506 - DNA, 578 bp, Zea mays
  Clone ID: MRT4577_91649C.1
aaaaaatgtacttggatctttctgggaagccattatcatcaaacaaaaaactttattggtgaactattactcctacgaaatgtcaaacagggcaccaccaccgacggggtggtggtagaatgctgatggggttgtcaaagcaagatgcttgaatggcaacaactgctgcatgttgtaagagggagccagcgttaggcgcagcctgctgctggaacgggaacagctgtggctgtgtcaagaacgtaacagggctcacaccagctagctggctgaatggtaatagcagttgctgctgctaataaacatgagagttcaatgctgtcaggtgcttgaatggaagaaattgctgggggtaggcatcagataactggctgaatggcaggcgatgttgttgcaaatgataatcacaattcactgcaggtagtaggttgaacggaagaaactggtgcagctaatagtaggcatcaaagttagctaacacaagttgctgaacttctggaactctgacaggttgcgccaattaatgcaccaacggaaaccgctgggatagggccgatgattgctggaagaacaagggt

SEQ ID NO: 175507 - DNA, 297 bp, Zea mays
  Clone ID: MRT4577_9164C.1
ggcagccaacattctgaaaatcgggggcaccaccggataccaccggaaccgaaatcgcctagcaggaaaacctttagtatcacgttcccgggtaggactttatcccagcggccaaccatacaaatcaaacaagggctcaagcggaaaacaagagggttcagtctagtcatctgacaaggggaccgggtcaaaaatgaaaaaattaccacttgaccatgaacccccttgaacggggacccaaaaacccagggattaaacatgtccacgtcacactaaaagcgacaatgcacaatgcac

SEQ ID NO: 175508 - DNA, 499 bp, Zea mays
  Clone ID: MRT4577_91650C.1
cgagaacgcgtagggcggaacgcgtggagcggactgcgtgggaaaaaaaaaaaaaaaaaagaaaagcaaataaaaaggaaaaaaaaaaaaaaaaagaaaaaaaaaaaaaaaaaaaaaaaaaaagtttggggccccattaagtacataggccttgcgtgcgcgtgatataaacattataatggtttaaaataaatgaaatttaagtgcgttgtcgttgttggagaatatgcaccgtcaggccggggaaaacctcagctttacgccctttgtggacattgtaacaaacccctgttcggccagtttggcaaatgggaagcgggccctccctggccattattcccaacagttgtgggggatataggccccgtggcttttgcttttttaaggcccttaacccccggtggtttcgttttttaccctcagtttattggcaggggtctcgggtccccttccttaggtttatttcgatggcttccttaccggtttcgaccggttcccc

SEQ ID NO: 175509 - DNA, 838 bp, Zea mays
  unsure (1)..(838): unsure at all n locations
  Clone ID: MRT4577_91651C.1
gtttgtattcgttgtgcgccgcgaataaactgcgatccatttctgagcttcgatgaatcgacggtcaagcttgggcgaccaaatgacccagttcttcgagttctacaaaattgaagaccctgagcatctgtttggtgaaggtcacatggcaaccatacaacgcacctgagttggatgggatgatctttagctcagtatgaaacatcgacgaggaaatcaataggatgcaatgtcctatgatatgtttctagtgtgttgagtggcacctaccgcacagggttgagaagcagtttggtaggaaccagatatggctagtcgaagatagattctgtaatataaaggtcttccaggtcttctaggggcaaaggtgtgggaaatgagcgacgaaaggatggagggaagttacctcccatctgtttcgatggccctcttggtccagattattttgaggaggcggttttccactttccagttcaaagtaaaagagatttcaacaaagaggttagacttaggtcttacgataacaagagagaagattggccaaagtgcatgcatggtgaggattgcttggtgcagatgttcgtcgagggggggattgatggaggccggcgtttcttcagatgtccttatgcatatgtcaagaacaggtaccgcaggatgaggcgcatggaggatgttgcgatgtgttcgtgagaggtctaggccgtcgtctcccagtcaactttgggttgctggaccgttgtctccttataatgtaattatttattttgtatagaactcctgttatatataaagatgtgacattcgatccaaaaaaaaaaaaaaaaaaggggcggnc

SEQ ID NO: 175510 - DNA, 230 bp, Zea mays
  Clone ID: MRT4577_91652C.1
cccaattcttaccccaggcacagatgtcatcgagtccaacaagccaaagggtggcgggcgacagcgccgacagctgtcgcaccttaccctcccgctccaccacttttaactgcgcttgacgacaaagacttaacccaacgccgagccgtacaacttcacattctgacgcccaactttcggactacgaaaggatctccgttctcggccacagtaacagcgggaccgactac

SEQ ID NO: 175511 - DNA, 900 bp, Zea mays
  unsure (1)..(900): unsure at all n locations
  Clone ID: MRT4577_91653C.1
atcatcttgttagtatggagttcacaattgaaacctttcttgctagagtttatcttgaacaagagatgaaaaatgtcatccattcaggaaaagggaaaacaagcatgcgcaccaatggaaacacaaagataactctttcttagtaatgtgccaatgctttcagtttactctgtcgcttactctgatcggatctactcggggtcggctgggccgggacggctcctttcgagccccgccggcccagcgaacaccagtcggctgagcggatctccggtgaggttgagggatggcgaatggcggcggctacgtgtgggcccttgcggcgggtttcaacgccgcactcgccgccatctccgccaagttcttctccactctgctgctcaaatatggcacggtgatacttttcaacgtgacaatgtgggggtgctatgtcaacagcctcaaagctttgtcgtccctccaggcaacagtgacaaacttcgccgccaacttcatctcatctgggcttgcggggtgtttcctgtttgatgagcccttgccttctaaggtaatacgggaattctcggtttttatatggtgcatcctgaggatcagcacagagaagtgaacgaaattgggctttatttgtaccgcataagatctctctagctttctaattcccgcttcgattgaaatcctggagtgatttaccatggcatagagttggtgcaacctatggatgaggtaaatacagggatttacagagtgctccctccctcacncagggggtgtagaatttaatcagatcccatcaagtgcagtattttcaacttgtttgggtagtttctggcgtgtgtttaaataaattgatcctcaagtcttttcttcggaaaaaaaaaaaaaaaaaaggcccctagggcc

SEQ ID NO: 175512 - DNA, 599 bp, Zea mays
  Clone ID: MRT4577_91654C.1
ccggccgggacatctttcacttctcctctggatcattcatcaacattcatcagacaacatgtttaacaacgccgtcatctccttcctccagctctggcttgcgacgctcgcctttgctgctcccatcgctgatgacatcagcgcgacctctgctaagccctggcactacggtaccggcggtggaatcatcggattcattgttttggtgcttgacatcctcgtctggatcgaggtcctccagtccaaccgtcccgtttcccacaagatcctctggtgtctcgtcgtcttcctcttccccattgtcggcatgctcgtttactacctgttctccaaccgccaggctcacatgaggagcggaggctacgaacccgtcccttagacggcggccgattgacgcgaccgacaagaatagcatgggtgggcttggataggaatgtggcagagcagaagggctggcatgcgcaagatgagaaatggatggcaggagacacgattatgggccagcgattatccttttatttatgaattaatggagtaacaattggagatcaaataaccatctacccacttgtcaaaaaaaaaaaaaaaaacccgcggcc

SEQ ID NO: 175513 - DNA, 307 bp, Zea mays
  Clone ID: MRT4577_91655C.1
gtacaaatgttttgttctgggaataatacagttgtataaagggcattgtacattatctaaatttgaaagaaagagatcgctttatgtaaacctgttattttaaagccttcccttacattaaatggtgggccagctcgaaagcaaaggtggatcttttaactctgccttatgtatttaccacgttatatgagacaattttaccttaaaacatttttctatacacgaaggactggtctataatggattgggtgaaaacgcgtgatcccacggtttggaggcacatgttggagaatgactttcattagag

SEQ ID NO: 175514 - DNA, 641 bp, Zea mays
  Clone ID: MRT4577_91656C.1
gcagtacctttgacgattgtttatacaaatgctttatggtttttaaccacacaagtagaacaagcgaattgagaattgaaccgacgaatacatattttcttggctatgccgcagttccatggattgtcaaagcctaaccagcaagaacctgatgctgtgcaaggcagcaacctttgaacaaaagtccacaaactacaaaaaacaacaatgctttgccattagtgtaagatcacaaactgaaaaacagaacacaactaaggttcaccaacacataattcttttctcatgaacacaaacatactaacaaccacagttattgcactgcattcatcagtaacgagactatattttgcataaatgttttggagataaatatttgtcagcctggagaatgcaagggatccttgcagttcacatgctgtcaactggcatcacaatctttaaaagatatttgagatcctctacttctcacggatgcaacttactgggttgctcctcattcaatgcaaattggatcacctttcttttctcctcctgccagtaaacatacacattttatcatcactgacgaatgcaggatctgtgtgaataaaatcctactccagtcatgaccctaactaaggggtgtctgatatggctct

SEQ ID NO: 175515 - DNA, 490 bp, Zea mays
  unsure (1)..(490): unsure at all n locations
  Clone ID: MRT4577_91657C.1
tggcttggaacctttgggctgatttatgtgcttgagaatgttatttctgcgcttcttgctactattggttctgctaatgctcctcttattcctgctgtgactgttattgttgataagactggatgttgtgtgtctccttcgtagggtggtatgtagacgactactctttagacttccgcggggatgcctactgggtcgtagcctggtacgagtgggatgggtgatactctggagtagcatgttacgcgtactgcgtcgcctgcgcgtgcgcatgcggttggtcctgtgcggctgcgggggtttacggggcggtcggcttttagtgagactcatttgtcggttgcgtggctggtggtgacgagtgctatggcggttgctaatacgcctcctatggttcctactgggtagactccttctatgtcgtctcgttattcntgtcctggttctcctcatcctcctggtgttcgggcgtcgtctacgatatctccta

SEQ ID NO: 175516 - DNA, 550 bp, Zea mays
  Clone ID: MRT4577_91658C.1
gatccatgtttccacacgagactacagtgcacgtcacgcacctcgatcgtgactctctgagaccccccgtgcatatccacctggtgctccggtgcgaccgaggctactttctctacgccccaatcatgtgagctctgtgcgccctcgtcgaggtgagaactgctattcgatcgctgcatctaccgatacccccattcccgtatacatcgcataccagtgcttccaactcacataaatttccagtacgcacggaatgatgagcggggacttggactagagctctgccctggtttcatcagaaactccactggacacgaaggctacgaaggaaggagtggcactctagctggttatacgcgcccccccgggtagcatactagtgtgcatgttctggacgggttgtggctctctgtgactaacgcttttacctggatgtgcacggagtaaaagaacatcgtccatctgacgtcccccgacgagctcaagggcacctacaagtgcaccttcggcaacttcgggggggggcaaaacgggggcatgctgcaaggat

SEQ ID NO: 175517 - DNA, 277 bp, Zea mays
  Clone ID: MRT4577_91659C.1
ggccgggttgttctttttttttcttttttttggaaacgagaaaccaagcgctttttggcccccccttgcaatgtcccaaaagatccaggacactttttaactacccacccaggtcgactgggctagccacccttttactttaagggggggatcacgttaaaacacacaccctcgcccgggggggatggttccggtaccattttaacaccagggggtccccccgcccgcggggagccctttttgggggaacgtaacgcacaaaaatggggcgccgttt

SEQ ID NO: 175518 - DNA, 984 bp, Zea mays
  Clone ID: MRT4577_9165C.1
acctcgaggccggccgggatcagaggtaagtgggaccagtttctaaaaatgctatgaagtcacttcctccttaaataacgtgcatcttttcatgctcttgtaggtcgctggagatctcctgaagcagtaccaggagaagtttaagggagggacactttcagtcacctggaattacttaagggactccatgggtacctaccagtcccagcctaatcctgtcactgcccgatgggagggtgaagatcatctgcgggatcctaatttccagctggatgcattcagagtgagtcgtttattcctagttactgagagttagttagttctcccatgcccccactttcatgtgctgatcgggtaacctttcctctcagtaccgaacatctcggttgctacatagtgttgctgctcggcttcagaaacacagcaagacgcttggaggttttggtgcgtggaatagatgtttgaatcatcttcttacgcttgcagaatcacacattgagtctgtcatccttgcaaagttcattgaatcagtgaaaagctgccctgacgaaaaatcgcgggaagtattgaagctggtatgcgacctttatgcgctcgacaggatctggcaagatatcggaacgtatcggaatgtagactacgttgccccaaacaaagctaaggctattcataagctgacagattacctcagttaccaagtgaggcttgtggcgcgagaactcgtcgacgcatttgaccttccagatcttatcatccgtgccccaattggcatgcaatcggaggcctatgcacagtacacccagtatgttggcttctagtagagtatatacatataataagtccgagaaatatattacgaagttgcaatatagagatagatcataggtgagcaaataagtttcagtagtacatgtaaactgtaaatgtaaagcagtggatccgtaaagcactggctccgtgtgaataaattgtcagatttttttt

SEQ ID NO: 175519 - DNA, 402 bp, Zea mays
  Clone ID: MRT4577_91660C.1
aacagcacccctccaaaaaacccaggctaaccggctaaatcggcccagtttaaggggggggtaacaaggtccttggttcacccaatcaacgacaaggccaaaaaagccctccctaggcggcctaaggggccccatggggggggggggacccggaccgatctttatgccttttgccagggggggaaccgcccccccggccccttgggggggagcccccccttttgggggcccttgagggggagcgccccccccggggggcccttgagcaaaacccctccctgggggcccttaaaaaaaaccccccccttcgggggtcccttgagggaaacccctccctttgatcccttgagggaaaccggcccctttgatcccttaaacgcaaacccccccttttgggttccc

SEQ ID NO: 175520 - DNA, 148 bp, Zea mays
  Clone ID: MRT4577_91661C.1
tttttaatctctttagacaaagatcaaatgggggctcccttgatttgaacatatccatgcgagaacaaattgtacatttgcaacttaatacacattagactgcttgaaaaaaaattatgaggtgaatattagttgcgtttgacagaaa

SEQ ID NO: 175521 - DNA, 290 bp, Zea mays
  Clone ID: MRT4577_91662C.1
aaaccgaaagactcttacacagaacactttacattccacaactgatacatgacaggggagaatgagaggacgcattacaaagttccgatcacctaaacgagcgtaattaacacacagaaccggagagtcgactccctagcctctgatgtctgcacaaacaatgatgcgcaacgcgaacatacatgcacaacataacgaaaaatccaaagccatgctgcattatccgctcactgctgattaatgattcaagtctagtataacaccgatgggccatgtggcaacatgcactg

SEQ ID NO: 175522 - DNA, 482 bp, Zea mays
  Clone ID: MRT4577_91663C.1
cttgtggtctactaatctttgttcctttgggatttgattctctcgatttctttcacttagacagctgctctgcaaaggaagggacgggccaacgggggttgtactgagactgcactaaaaagctgttttggaaagaccaacgggaagtcacaccatacaaaggagggccggcactgtacttccctggggggcaccgtgctttgtgggccactgtactgaaagcggtttaaaataatccggggtgcacccgtgccattgagagcgctgaagcccaaggctttgttttctttcaatgggggaggcacctttactagggttggggggcgtttaaaaaaaccaaaaggggggccgccctttttttttttttttggggaccccttgccaaaaagggcccattccccaaaggaaaaggacacttttaagcggaagcgggggatagccctgtcgcctgaacgccctctaactttggggggggagaaaaa

SEQ ID NO: 175523 - DNA, 367 bp, Zea mays
  Clone ID: MRT4577_91664C.1
gcggtggcgcccgcgtccttgatccactcttccaggctgaagtacgtggcgaccgacgtagaggggcgcatcataaggtccagtatcggcgatgtgtctcacgaggtcagggcccccgcgccagttacgatgaggcgtggacgccggagagagcttgtaaacagtactgccttacttgtcagtctcagtctcactttggcctgaggtggccaacatgctaggagacggtaagcacgctcatgagccgtcagagatactggagcttagacaggtcgacgccggtctcagtgatgatgtcgaattggaacattaacatgttcagtgtgagattgatgattccgtgagcgtgatatatactatatatact

SEQ ID NO: 175524 - DNA, 176 bp, Zea mays
  Clone ID: MRT4577_91665C.1
attgtttagtacagtatctaactcggtccggcattgttgtctcgatcgagtaataaacaaaaatacaattcttattgttattgttgtaagatattcttgaaagaaaattgtacattgtataaattagatatatatatcgtcgcattggaaataatctaataaaaagctgatagaat

SEQ ID NO: 175525 - DNA, 362 bp, Zea mays
  Clone ID: MRT4577_91666C.1
atgtggcttccaaacagcgtcgatctacttccacgtatggcctgcgactcgccagctccggtctccccactcctcacgacgacctcgctctatgtcctgcctccgtctcgcttccacacactgcgcggacatctcccgtggaaacttcgcggccagacaacgaccctggacgccgctcccttctcgtattgcaccactgctcctccaagggttagctcctgatgcccgattctcctggacgggttacgaattctcgatagtgaaggtcgttcccatggcggcccgggtcggacctcccttgatgaagctacctattggcatcctgctctgccctgaaacatttggaagcaaactgaacccag

SEQ ID NO: 175526 - DNA, 388 bp, Zea mays
  Clone ID: MRT4577_91667C.1
acaaccctctaaactgagtcgtattatggggaggtgatgatgctttcagcaccttcttcagtgagagttgagctgggaagcacgtctcccgtgctgttattgttgacctgtgatccctgtgtcagcgatgacgtgaggactggcacctagcgccagcgcttccatcctgaacaactcatcagtagcaaggttgatgcagcctacaacttcgctcgtggtcaccacatgattggcaaggagattgttgagctgtgcattgactgcatcaggacacttgcatataactgcactcgtctccaaggcatcctcgtcatcatcgctagttctggaagagttggctcttggcttggatctctccacctgtattgcttgtcagtggactatggca

SEQ ID NO: 175527 - DNA, 283 bp, Zea mays
  Clone ID: MRT4577_91668C.1
gttattgtgccgcccgagagacggaaagctgggggggtttatatgagtatcggggccttcaaccaaccgctgcaggcggtaatacaattccggacgtggcagctcagcagcaaccatcagctatctcctctgaagaatggaagagacgccacgcgggactagtatccatagcctagattgcagacggctctgctaacatgatgattaataatatggtgcacgttgatgtgatggtgctaaatactttccaggaccctaacccaccggtggaagtggccagcaa

SEQ ID NO: 175528 - DNA, 200 bp, Zea mays
  Clone ID: MRT4577_91669C.1
ggccgcttttttttttctttttctctggggagaatggatctaatacatagtaatgctcgggaacacaatgcagaacgggggcacccttatagcaaacctcataaattgaatccaaaaaaacacaccttcaatcttggcatggtggccacgacaagtcactaatcataaaagaggactggtcagcatgggacgaattggta

SEQ ID NO: 175529 - DNA, 277 bp, Zea mays
  Clone ID: MRT4577_9166C.1
cggccgcccttttttttttttttttttttttttttttttttttttgtttttttttttttttggaaaacaacccttattcatcgaatgctttcacagaaaatttatccatacatgtttgctcattggggtagacccagctgaccacctaaagctagctgtttacagattgactcaccatgtggcaacgtaggaacccatgttttttagacgactttcttcgtactaatagcctggcttggctggttaccaaacgacaaccacgagatcgcacggtttt

SEQ ID NO: 175530 - DNA, 419 bp, Zea mays
  Clone ID: MRT4577_91670C.1
cggttgctgttgtaaactgacattcctcgattactgcttggctttaaacaaagaaaacacccaacccaggattgtagctgatacttacgtctgaagaaaactgcaccagtgagatcagacgttacagacataggttaatcttacgagcatcatccataacacatacaaacgtaattggaatgcaagccaaaacggggttaacagatggaacttaagctggtgcaaggctggcaatggccaaaaagctaaacgaccctctagatcttgttgtaagccccaatggtttaactctggacgctcttgttcttggggattattttattggggtcctctttctaattgttcttggacacaagatcctcctcaattgagaacacaatattgaagttcttagtgcccgatgccacagggccaaggtt

SEQ ID NO: 175531 - DNA, 136 bp, Zea mays
  Clone ID: MRT4577_91671C.1
aggaaggaaacaccgccgccgccgcgccttccattccagtactcgcggaggaaaggaacaccagccagggccatggtcacgtcgacgaccggtcatcttcttctgtcctcgtcgatcgatgctgctcttatttttg

SEQ ID NO: 175532 - DNA, 364 bp, Zea mays
  Clone ID: MRT4577_91672C.1
ttggtgaattccaattccacattttcaagaacttacgaggcaaaactgtgggtatattaattggaatcatatgtactcttattaggcctatcctctagccaactgaaatgagatcggaattcctacgcgaattcctactccacattctctagacataaggccgcaaccatgatcatatatgaattcgaattatttcgcctcttactaagtctatactgaatccaaaggagatgacatcggtaacctcttgtgaattccatttccacatctttaagacatatggatgtcactaggttcatatgtgaattagagatatcagattatcttaatatgcctatcctgaagccataggaaatgatatcgg

SEQ ID NO: 175533 - DNA, 215 bp, Zea mays
  Clone ID: MRT4577_91673C.1
catatattcagacatttcatatcggttgcaaacttccattcttagaatctgtcagacgaaaacttctggcaattgagggcgtgccatattgtctacataaagatatgcagcttatcaaggcctttaatcatattaaatctacaaattgccagtctcatatatcaaaacgtattgacatggttgtatatgcttactgaatggccttttggtgccta

SEQ ID NO: 175534 - DNA, 292 bp, Zea mays
  Clone ID: MRT4577_91674C.1
attcggctcgagctataactgttttttatctcggcggagcgggtagcgctcgacggtgatgtgtgaatattttctccagctcaactaggcctgctcgttgcgggtaccaaggttattgaacgatcaactcgcatccgaggtgttatgctgccatatgcgttgaccccaaattgctgctgcatggacgagactggaacatcctggttgtttggagactgaactgtaaccatcagcctccacatatatcttaactggcggaaaccatataccgctacttaaagaagagcatctg

SEQ ID NO: 175535 - DNA, 104 bp, Zea mays
  Clone ID: MRT4577_91675C.1
tctcccgctgcgccacgcccgcgagcgccattctaccgcccagaacaaggacggatacatattcaaccgaaccgacaactacaagtattctgtcacggggaacc

SEQ ID NO: 175536 - DNA, 367 bp, Zea mays
  Clone ID: MRT4577_91676C.1
attaaaaaccccaagagagggaacggggccccgggggaacaaaagcaaaggttaaaggggattggtttttaaaaaaaaaacaaaaaacaggttaaacaggtttaagggaaaaagagggcaacaaatttttttttgtttttggcaaaaaaattggggccctgggggactgttttttccaccaaacacactggaaggtttaaaaagccattacctaaaaggggggggggggccattaaaaaaatttctgggcacaacccggggccctccggtgttaccgttttccttggagggaaggggattgccccccgcggaaggggccaaaaccaaatcccgaaaacccaggccaaaatccttttttttaatttgg

SEQ ID NO: 175537 - DNA, 357 bp, Zea mays
  Clone ID: MRT4577_91677C.1
cccccacagcgggggtttttaccacggccccaatttatttataccgcacccccccacagggagaggaagcccgggatatttacaacggttctttacaaccaaaggggccggggaaaaccctccccccgtgggcacggacgtattaacccgttgccatgaggccccctgacccgaaccgacccgaaaaaaaatatggaccaacccctcttttttgaaaaaaaatgaaaaagggggcctgttttaaccaggccccatttgctcaaagatacaggtcgttggggaagccccgggggtcgtatcactccgcccccaccctgaaaaggggggggagggccaccccccggagcttaaccattt

SEQ ID NO: 175538 - DNA, 557 bp, Zea mays
  Clone ID: MRT4577_91678C.1
cattggtacctcgagccggccgggaactgaacaacgcagacacagagtatcttcctactcgtctatctatcctacccacagggttaccccttctcccattcttctctcttatctcaccagcgccgcgactattcccttttcacaacagcatgaggaaaagactctctatccatatgcggtcattgcgacttgccaactctgaaaagcctactaccacttgtactgtcaccaacatggtattcaggatgatggacagatgccctgagacaataccattggaggacgcgatgatgctttcaacaccttcttcagagagactggcgctggaaaacacctcccccgagctggatatagtgatcctgatcccactggcttcgaggaagtgagagactgccacctatcaccggctcgtccatgctgaccatgtcatccgtgactacgatgatgcatatcaacactatcactcgcgaacactactgcattgtacatatcattgactccacgactcttgaccgcatcaggaagcatcgccgataattgcaccgaccctccaagga

SEQ ID NO: 175539 - DNA, 255 bp, Zea mays
  Clone ID: MRT4577_91679C.1
ttatttttttttaggccaaattatttttttggggggtcttttgcattaaactcgtggcgaaaaaaaggcggggaaagtgtaatctgggaatagtatatatcacaagacctccggggaccaatagacaacaaaacacgggagactagacctataatttttggcgcgagcacataggggagccaaatcacgtgttaaacgatatagcgctaacatagcacttttcataagggtccaacccattattcgttaacggaa

SEQ ID NO: 175540 - DNA, 359 bp, Zea mays
  Clone ID: MRT4577_9167C.1
gagcttactagtcggcggccgccctttgtttatttgtgtgagcttgtaacgcagaggcaaaccctcataggaccgttaaaccagccgaatgcaagctgctaagcagattcatgcatggctaagccttgcggtgacactacttaatgctcttgaggcacataattctgagggttgaaaccgtcttagcaaagcgcacacattgagtcgacctacttaacacatctgcgcacactatggctgaaactgcgcgccctgcaacagggcataaaatgctgagctggatcattaggaatgaggacctgcacctgggttcatccatttgcggatatacgggacttgaggctgaactggttactcat

SEQ ID NO: 175541 - DNA, 746 bp, Zea mays
  Clone ID: MRT4577_91681C.1
ttaattcggcacgaggcaggccaggcgagggcgaaggcgtatctaccactctggtctcatcttcctcggtcagtctagagtagagttcgtcagttccaccggcagcaggcacgcaggcagcagcggcagccgtcgtcggcgtcgccaagacaagcaatggagtcaccagcgccagcaagaagcgcgagggctccagccactccaacatgcaccgttccggggctcctagtgggcctcaccaagctgttgagcctcaccaaggcctgcgcggccccaacgccggcggctgacgatggcggcggcgaggcagcggcggcggcggccacgaagcccggacacgaccccggccccgacccgaggctcgtcctcatgaggctgttcgacgcggtgtcggcgctcaagtcggggtacgtgaagctgcagcgggcgcacttcccgtacgaccccgacagggtggcctcggccgacgaggccgtggcgtcggagctcgactcggtggccgcgctgcattgcctgtgcagctcccgccgcgggatcgggccgctggtagacgaccggtggtccctggtgcagcgcctggaggccgaggccaggggggaggacgccgacatcgccgcgctcgggagggagctccggaggctgcagcacgacaacgccaggctgagcaggcggggtcgtcaagagcaggaacgacgacgagcgtcgcagggcgcttctgctgttctccgtgcccaaagagctggcga

SEQ ID NO: 175542 - DNA, 398 bp, Zea mays
  Clone ID: MRT4577_91682C.1
tttttatctcccgtctccgtcgactcgtagggggggcttatctaaacagtcttgggcaagaacaagagcggaatcaacggtttctgaaggatcggcaggctcgtggtcagggtcgccctgcagagcgaggatgtcgagctcgccgccatgaacgaccccttcatcaccgcggattacatgacctacatgttcaagtgccacaccgtgcacggccaatggacgcacagtgacatcgacctaagggactgcaagacgcttcttttacgcgagaagccagtcaccggctttggaatcaggaaccccgcggagatcccgtggggcgaggctggtgctgagtatgctctggagtccaccgctgtctacactgaccaggacaaggctgctgtacatctgaaggg

SEQ ID NO: 175543 - DNA, 886 bp, Zea mays
  Clone ID: MRT4577_91683C.1
cattgggtacctcgaggccggccgggaaagttcgtgaatccccccaatccacgacatttcgacaaccttgaaatcgaccaaaatggccaggtcctctcctattgctcctaacgtcggacgtctgtctcgttcgcaggtcgctgccaagaggggtctctacaagggcaagaagaccggtaccgctcccgccaaggaggagaagcccaccaccgtcgagaagtcgatcggaggtgccaagaacggcgagaagaggaccatctcgaccgacaaggcccagaagtactaccccgccgaggatgtccgaaagcccaaggcttcccgaaagacccctggcaccacccagctccgatcttccatcacccccggaaccgtcttgatcttgttggctggacgattcaggggcaagagggtcgttttcttgaagcaattggacagcggtctgttgctcgttagcggacctttcaggctcaacggagttcccctccgacgagtcggccaggcctacgtcattgccacctcgaccaaggtcgacctcgctggcgtctccgtcccggagaccgtcaacgacgcctacttcaccaagtcgaaggccggaaaggagggcaaggaggaccagttcttcggagacaacaaggagaagaagctcttgtcggacgacaggaagagcgagcagaagaccgtcgatgccgctctccttgccaacatcaagaaggtcgacaacctttccaagtacttgaagtctaccttcagcctctccaggggtgacaaggttcacgagctcaagttctaagcgacgaaagaggacgggcaagtgttaatagtcgagggatgaagacgccttttagagatgggaagatctcgtcatcgaggatcaggatgatccgag

SEQ ID NO: 175544 - DNA, 270 bp, Zea mays
  Clone ID: MRT4577_91684C.1
ccgtaaaaaaaaaaaaaaaaaaaaaaaaaaaaaaaaaaaaaaaaaaaaaaaaaaaaaaaaaaaaaagaaaaagaagaaaaaaaaaaaaaaggatagagacgttaagaagatggatgtcttacgttcgtaggttcttaggaacatagaaaactgtattgtggggtaaatttagaagggggtgttgcgtgtctccggggattcgggggggggggggccgtgtttaccctccttttcgttccttttttttggggggccttgtgataaatttcc

SEQ ID NO: 175545 - DNA, 444 bp, Zea mays
  Clone ID: MRT4577_91685C.1
attcggctcgaggaaaattagaagagtttgctaattgtgaaaaatagggaaatgcaggcagcaaagaagggcatagagacctttaaggaaaccgcagccaacattggcgcctctgccaagtctggcttggagaaaaccaaggccactatccaagataagaatgagaagatgaatgcagaagatcaaactcaaatggatatggctaccaagaggaaagaagagacgatcaaccaggctgatatggagaagcagcaggcccgtaagtactacgccgctgcaaaacactacgccatggctgagcacatggcaaagggcaaccacgacaccgtcgggcctagaatcgagactgccacacacatcaccagtggacccgagactgacaatgctatgtactctaacactgggcctggaactgagactgccacagtcaccactagagggctt
